United States Patent Application Publication US 2026/0055430 A1 - sequence listing, part 5

SEQ ID NO: 11410 - protein, 450 aa, Unknown
  Description of Unknown: Integrase C153 sequence
  Coil,PS51736,IPR006119,PTHR30461,PS51737, G3DSA:1.10.10.2600,PTHR30461:SF3,IPR011109,PF07508,PF13408, SSF53041,PF00239,SM00857,G3DSA:3.40.50.1390,cd00338, IPR038109,IPR036162,IPR025827
MKRVALYMRVSTEQQAKHGDSLREQKETLYEYIEQHKDLKVVNEYVDGGISGQKINRDEFQKLLQDVKENKIDLILFTKLDRWFRNLRHYLNTQEILEKHNVSWNAVSQQYYDTTTAYGRTFIAQVMSFAELEAQIDSERIKAVMANKIAQGEVVSGKTPLGYSIENKKLVINDDAPIVIDIFNYFLSSGSLRKTVYYLGSQYGIVRDYQSVKNMLTNKKYIGELRNNKNYCPPIIDKKLFYAVQKALPKNLKTNAKRDYIFKGLLKCSDCQGSVAGQTIKARYKKKDGTESIYERTCYRCVKRRNNKLRCTNKRAFYEKNLERYIFEATKQKFEQIQINYSKKQPKIIKKKNSKKNIENKLDRLKKAYLNEVIDLEEYKKDREALMKELNEIEVEPAKIDIKNVEFILSKEFDEIYKESSEEEKNALWRSIIDNIIVFPDGNITVNFLI

SEQ ID NO: 11411 - protein, 447 aa, Unknown
  Description of Unknown: Integrase C154 sequence
  PF07508,SSF53041,IPR036162,PTHR30461:SF3,SM00857, PF00239,PS51736,IPR011109,PS51737,cd03768, G3DSA:3.40.50.1390,IPR038109,IPR006119,PTHR30461,G3DSA:1.10.10 .2600
MNATDKVLCAIYTRKSTEEGLEQNFNSLDAQRDACENYVASQKSEGWLMLRERYDDGGFSGGTLERPAIKRLLEDVRQGLVNTIVVYKIDRLSRSLADFAKLVELFDEYKVTFVSVTQSFNTTTSMGRLTLNILLSFAQFERELAGERVRDKIAASRQRGIWMGGMPALGYDVVERKLIPNKAEALIVKELFNRFATTPSMATLVNDLRSRGVTSKCWTTTKGVVRQGKLIDKGLIYKMFHNPVYLGLAAYKGQTFPGEHEPLISQELWDKVQGHLKSGAPLSKARSAGRGSAQSLLRGLIFSDQGRAFTPGWTRKRNKTYRYYVNTDSIKLGKEGCEIQRIPAGEIETLVIEKMRDVLRSPEILARTVREVRIARPGTEEAQAIEALQSIEQVWDQLFPAEQSQIARTLIERITVAPNGISIKWRGEGLNKLLRDTLESNALREAA

SEQ ID NO: 11412 - protein, 433 aa, Unknown
  Description of Unknown: Integrase C155 sequence
  Coil,IPR006119,PTHR30461,PS51737,G3DSA:1.10.10.2600,IPR011109, PF07508,PF13408,SSF53041,PF00239,SM00857,G3DSA:3.40.50.1390, cd00338,IPR038109,IPR036162,IPR025827
MKCSLYIRVSSQQYQEEKKEAIETLSAYIQENGWSVAEVYTDEIKGRNIVRKEAETMIEDGDYGRYDAIVTYDLPQLARNGHISEEIERLITERGIHVLTVDGSYNTLENDPAHFALYRNLYEKEAKKRSEFIKSQIRKRTESGKFKGSIPPYGYQLKDGKLVPRKDETPGVVRRIYKEYLDGAGMDGIRARLNEEGVRSPSSIVGKKNATKEWKKTSLRKILSNPHYVGDLVQGRERTLEPYERKREKVPEDQQVLIPNTHEAIISRKDFEAVRAIRKDHQETHFLKTQQKRLFRGIMHCNECGSSMWYRENRKGYICGRHARYGNDYCTSHVVKEDYVKGQLTHELIQFQNILREPETTGGLAEELWEMGVAEPERVVSDMKERVEQWSLSGYAIGDETLRAFVKEIIVTEDGEPHVTYKSPLHEMEERLE

SEQ ID NO: 11413 - protein, 430 aa, Unknown
  Description of Unknown: Integrase C156 sequence
  PF07508,SSF53041,IPR036162,PTHR30461:SF3,SM00857, PF00239,IPR025827,PS51736,IPR011109,G3DSA:3.40.50.1390, PS51737,IPR038109,IPR006119,PTHR30461,cd00338, G3DSA:1.10.10.2600,PF13408
MSTDQDEQLSSYENQVNYYRDYISKHEDYELVDIYADEGISATNTKKRDAFNRLIQDCRAGKVDRILVKSISRFARNTLDCIKYVRELKELGVGVTFEKENIDSLDSKGEVLLTILSSLAQDESRSISENATWGIRKKFERGEVRVNTTKFMGYDKDDNGRLIINPQQAETVKFIYEKFLEGYSPESIAKYLNDNEIPGWTGKANWYPSAIQKMLQNEKYKGDALLQKTFTVDFLTKKRVQNDGQVNQYYVENSHEAIIDKDTWELVQLELERRKAYREEHQLKSYIMQNDDNPFTTKVFCAECGSAFGRKNWTTSRGKRKVWQCNNRYRVKGQIGCQNNHIDEETLEKAVVMAVERLSENVDLLHGKWNKILEENCPLEKHYSTKLAEMINKPSWEFDSYEMCQVLDSITISEDGQITVRFHEGTEVDL

SEQ ID NO: 11414 - protein, 430 aa, Unknown
  Description of Unknown: Integrase C157 sequence
  PF07508,SSF53041,IPR036162,IPR025827,SM00857, PTHR30461:SF3,PF00239,PS51736,G3DSA:3.40.50.1390,IPR011109, PS51737,IPR038109,IPR006119,PTHR30461,cd00338, G3DSA:1.10.10.2600,PF13408
MSTDQDEQLSSYENQVNYYRDYISKHEDYELVDIYADEGISATNTKKRDAFNRLIQDCRAGKVDRILVKSISRFARNTLDCIKYVRELKELGVGVSFEKENIDSLDSKGEVLLTILSSLAQDESRSISENATWGIRKKFERGEVRVNTTKFMGYDKDENGRLIINPQQAETVKFIYEKYLEGYSPESIAKYLNDNEIPGWTGKANWYPSAIQKMLQNEKYKGDALLQKTFTVDFLTKKRVQNDGQVNQYYVENSHEAIIDKDTWELVQLELTRRRDFRGEHQLKAYIMQNDDNPFTTKVFCAECGSAFGRKNWTTSRGKRKVWQCNNRYRVKGQIGCQNNHIDEETLEKAVVMAVELLSENEDLLHGKWNKILEENRPLEKHYSTKLAEVINKPSWEFDSYEMCQVLDSITISEDGQISVKFLEGTEVDL

SEQ ID NO: 11415 - protein, 430 aa, Unknown
  Description of Unknown: Integrase C158 sequence
  PF07508,SSF53041,IPR036162,PTHR30461:SF3,SM00857, PF00239,IPR025827,PS51736,IPR011109,PS51737, G3DSA:3.40.50.1390,IPR038109,IPR006119,PTHR30461,cd00338, G3DSA:1.10.10.2600,PF13408
MSTDQEEQLSSYENQVNYYREYISKHEDYELVDIYADEGISATNTKKRDAFNRLIQDCRAGKVDRILVKSISRFARNTLDCIKYVRELKELGVGVTFEKENIDSLDSKGEVLLTILSSLAQDESRSISENAMWGIRKKFERGEVRVNTTKFMGYDKDDNGRLIINPQQAETVKFIYEKFLDGYSPESIAKYLNDNEIPGWTGKANWYPSAIQKMLQNEKYKGDALLQKTFTVDFLTKKRVQNDGQVNQYYVENSHEAIIDEETWETVQLEMARRKTYRDEHQLKSYIMQSEDNPFTTKVFCGACGSAFGRKNWATSRGKRKVWQCNNRYRVKGQIGCQNNHIDEETLEKAVVMAVELLSENVDLLHGKWNKILEENRPLEKHYSTKLAEVINKPSWEFDSYEMCQVLDSITISEDGQISVKFLEGTEVDL

SEQ ID NO: 11416 - protein, 430 aa, Unknown
  Description of Unknown: Integrase C159 sequence
  PF07508,SSF53041,PTHR30461:SF3,IPR025827,IPR036162, PF00239,SM00857,PS51736,IPR011109,G3DSA:3.40.50.1390, PS51737,IPR038109,IPR006119,PTHR30461,cd00338, G3DSA:1.10.10.2600,PF13408
MSTDQEEQLSSYENQVNYYREYISKHEDYELVDIYADEGISATNTKKRDAFNRLIQDCRAGKVDRILVKSISRFARNTLDCIKYVRELKELGVGVTFEKENIDSLDSKGEVLLTILSSLAQDESRSISENATWGIRKKFEHGEVRVNTTKFMGYDKDENGRLIINPQQAETVKFIYEKFLDGYSPESIAKYLNDNEISGWTGKANWYPSAIQKMLQNEKYKGDALLQKTFTVDFLTKKRVQNDGQVDQYYVENSHEAIIDKDIWELVQLELARRKAYREEHQLKSYIMQNDDNPFTTKVFCKECGSAFGRKNWTTSRGKRKVWQCNNRYRVKGQIGCQNNHIDEETLEKAVVMAVELLSENVDLLHGKWNKIIEENRPLEKHYSTKLADIINKPSWEFDSYEMCQALDSITIVEDGQITVRFLEGTEVDL

SEQ ID NO: 11417 - protein, 430 aa, Unknown
  Description of Unknown: Integrase C160 sequence
  PF07508,SSF53041,IPR036162,PTHR30461:SF3,SM00857, PF00239,IPR025827,PS51736,IPR011109,G3DSA:3.40.50.1390, PS51737,IPR038109,IPR006119,PTHR30461,cd00338, G3DSA:1.10.10.2600,PF13408
MSTDQDEQLSSYENQVNYYRDYISKHEDYELVDIYADEGISATNTKKRDAFNRLIQDCRAGKVDRILVKSISRFARNTLDCIKYVRELKELGVGVTFEKENIDSLDSKGEVLLTILSSLAQDESRSISENATWGIRKKFERGEVRVNTTKFMGYDKDENGRLIINPQQAETVKFIYEKFLEGYSPESIAKYLNDNEIPGWTGKANWYPSAIQKMLQNEKYKGDALLQKTFTVDFLTKKRVQNDGQVNQYYVENSHEAIIDEETWETVQLEMARRKTYRDEHQLKSYIMQSEDNPFTTKVFCGACGSAFGRKNWATSRGKRKVWQCNNRYRIKGVEGCYSSHLDEATLEQIFLKALELLSENIDLLDGKWEKILAENRLLDKHYSMALSDLLRQEQIDFNPSDMCRVLDHIRIGLDGEITVCLLEGTEVDL

SEQ ID NO: 11418 - protein, 430 aa, Unknown
  Description of Unknown: Integrase C161 sequence
  PF07508,SSF53041,PTHR30461:SF3,IPR036162,SM00857, PF00239,IPR025827,PS51736,IPR011109,G3DSA:3.40.50.1390, PS51737,IPR038109,IPR006119,PTHR30461,cd00338, G3DSA:1.10.10.2600,PF13408
MSTDQDEQLSSYENQVNYYRDYISKHEDYELVDIYADEGISATNTKKRDAFNRLIQDCRAGKVDRILVKSISRFARNTLDCIKYVRELKELGVGVTFEKENIDSLDSKGEVLLTILSSLAQDESRSISENATWGIRKKFERGEVRVNTTKFMGYDKDENGRLIINPQQAETVKFIYEKFLEGYSPESIAKYLNDNEIPGWTGKANWYPSAIQKMLQNEKYKGDALLQKTFTVDFLTKKRVQNDGQVNQYYVENSHEAIIDEETWETVQLEMARRKTYRDEHQLKSYIMQSEANPFTTKVFCGACGSAFGRKNWATSRGKRKVWQCNNRYRIKGVEGCYSSHLDEATLEQIFLKALELLSENIDLLDGKWEKILAENRLLDKHYSMALSDLLRQEQIDFNPSDMCRVLDHIRIGLDGEITVCLLEGTEVDL

SEQ ID NO: 11419 - protein, 430 aa, Unknown
  Description of Unknown: Integrase C162 sequence
  PF07508,SSF53041,IPR036162,PTHR30461:SF3,IPR025827, SM00857,PF00239,PS51736,IPR011109,PS51737, G3DSA:3.40.50.1390,IPR038109,IPR006119,PTHR30461,cd00338, G3DSA:1.10.10.2600,PF13408
MSTDQEEQLSSYENQVNYYREFISKHEDYELVDIYADEGISATNTKKRDAFNRLIQDCRVGKVDRILVKSISRFARNTLDCIKYVRELKELGVGVTFEKENIDSLDSKGEVLLTILSSLAQDESRSISENATWGIRKKFERGEVRVNTTKFMGYDKDESGRLIINPQQAETVKFIYEKFLEGYSPESIAKYLNDNEIPGWTGKANWYPSAIQKMLQNEKYKGDALLQKTFTVDFLTKKRVQNDGQVNQYYVENSHEAIIDKDTWELVQLELARRKVYREEHQLKSYIMQNDDNPFTTKVFCAECGSAFGRKNWTTSRGKRKVWQCNNRYWVKGQIGCQNNHIDEETLEKAVVMAVELLSENVDLLHGKWNKILEENRPLEKHYCTKLAEMINKPLWEFDSYEMCQVLDSITISEDGQISAKFLEGTEVEL

SEQ ID NO: 11420 - protein, 430 aa, Unknown
  Description of Unknown: Integrase C163 sequence
  PF07508,SSF53041,IPR036162,IPR025827,SM00857, PF00239,PTHR30461:SF3,PS51736,G3DSA:3.40.50.1390,PS51737, IPR011109,IPR038109,IPR006119,PTHR30461,cd00338, G3DSA:1.10.10.2600,PF13408
MSTDQEEQLSSYENQVNYYREFISKHEDYELVDIYADEGISATNTKKRDAFNRLIQDCRAGKVDRILVKSISRFARNTLDCIKYVRELKELGVGVIFEKENIDSLDSKGEVLLTILSSLAQDESRSISENATWGIRKKFERGEVRVNTTKFMGYDKDENGKLIVNPQQAEIVKLIYGKYLEGYSPESIAKYLNDNEIPGWTGKANWYPSAIQKMLQNEKYKGDALLQKTFTVDFLTKKRVQNDGQVNQYYVEGSHEGIIDEETWETVQLEIARRKTYREEHQLKSYIMQSQDNPFTTKVFCGACGSAFGRKNWATSRGKRKVWQCNNRYRIKGVEGCYSSHLDEATLEQIFLKALELLSENIDLLDGKWEKILAENLLLDKHYSMALSDLLKQKQMDFNPSDICRVLDHIRIGLDGEITVRFLEGTEVGL

SEQ ID NO: 11421 - protein, 413 aa, Unknown
  Description of Unknown: Integrase C164 sequence
  PF07508,SSF53041,IPR036162,IPR025827,SM00857, mobidb-lite,PF00239,PS51736,IPR011109,G3DSA:3.40.50.1390, PS51737,IPR038109,IPR006119,PTHR30461,cd00338, G3DSA:1.10.10.2600,PF13408
MSVKKIRVNKQKHKQRICAYIRVSTTNGSQLESLENQKQYFENLYSNRDDIDFVGVYHDRGISGSKNNRPNFQAMIENCRKGMIDIIHTKSIARFARNTVTVLEISRELKAIGVDIFFEEQNIHTLSSEGEVMLSVLASIAEDELRSMSGNQRWAFQKKFQRGELVINTKRFLGYDIDENGELIINPEEALIVRQIFALYLEGYGTHRIAKLLNEKGVATVTGAKWHDTTIRQMLSNEKYNGSVLLQKYFHDGVNGPKKLNQGELEQYFIEDNHEAIISMDDWQAVQDKLISKRLQQGRNKTYKFTGLLKCQHCGSSLKRQVSYKKKIVWCCSKYIKEGKAACQGMRVPEVDISNWVITSPVTVIERDGNGEKYYSYSGQESADQRSSSGQEENQGSRILPSVHRPRRTAIKL

SEQ ID NO: 11422 - protein, 413 aa, Unknown
  Description of Unknown: Integrase C165 sequence
  PF07508,SSF53041,IPR036162,IPR025827,SM00857, mobidb-lite,PF00239,PS51736,G3DSA:3.40.50.1390,IPR011109, PS51737,IPR038109,IPR006119,PTHR30461,cd00338, G3DSA:1.10.10.2600,PF13408
MSVKKIRVNRQKHRKRVCAYIRVSTTNGSQLDSLENQKQYFENLYSNRDDIDFIGVYHDRGISGSKDNRPNFQAMIEDCRRGKIDVIHTKSIARFARNTVTVLEISRELKAIGVDIFFEEQNIHTLSSEGEVMLSVLASIAEDELRSMSGNQRWAFQKKFQRGELVINTKRFLGYDVDENGELIINPEEALIVREIFALYLAGNGTHRIAKQLNEKGVATVTGAKWHDTTIRQMLSNEKYKGSVLLQKYFHDGVNGPKKLNQGELEQYLIEDNHEAIISKEDWQAVQDKLNSRRWQQGRNKTYKFTGLLKCQHCGSTLKRQVSYKKKIVWCCSKYIKEGKVACRGMRVPEVDISNWEITSPITVLERDRSGEKYYSYSGQESADQRTSSGQEENQSSRILSSVHRPRRTAIKL

SEQ ID NO: 11423 - protein, 413 aa, Unknown
  Description of Unknown: Integrase C166 sequence
  PF07508,SSF53041,IPR036162,IPR025827,mobidb-lite, SM00857,PF00239,PS51736,PS51737,IPR011109, G3DSA:3.40.50.1390,IPR038109,IPR006119,PTHR30461,cd00338, G3DSA:1.10.10.2600,PF13408
MSVKKIRVNRQKHRKRVCAYIRVSTTNGSQLDSLENQKQYFEKLYSNRDDIDFIGVYHDRGISGSKDNRPNFQAMIEDCRRGKIDVIHTKSIARFARNTVTVLEISRELKAIGVDIFFEEQNIHTLSSEGEVMLSVLASIAEDELRSMSGNQRWAFQKKFQRGELVINTKRFLGYDVDENGELIINPEEALIVREIFSLYLAGNGTHRIAKHLNEKGVATVTGAKWHDTTIRQMLSNEKYKGSVLLQKYFHDGVNGPKKLNQGELEQYLIEDNHEAIISKEDWQAVQDKLNSRRWQQGRNKTYKFTGLLKCQHCGSTLKRQVSYKKKIVWCCSKYIKEGKVACRGMRVPEVDISNWEITSPITVLERDRDGEKYYSYSGQESAEQRSTSGQKENQCGRILPSVHRSRRTAIKL

SEQ ID NO: 11424 - protein, 413 aa, Unknown
  Description of Unknown: Integrase C167 sequence
  PF07508,SSF53041,IPR036162,IPR025827,mobidb-lite, PF00239,SM00857,PS51736,IPR011109,PS51737, G3DSA:3.40.50.1390,IPR038109,IPR006119,PTHR30461,cd00338, G3DSA:1.10.10.2600,PF13408
MSVKKIRVNNQKHKQRICAYIRVSTTNGSQLESLENQKQYFENLYSNRDDIDFVGVYHDKGISGSKDNRPNFQAMIENCRKGMIDVIHTKSIARFARNTVTVLEITRELKAIGVDIFFEEQNIHTLSSEGEVMLSVLASIAEDELRSMSGNQRWAFQKKFQRGELVINTKRFLGYDLDENGELIINPEEALIVRQIFALYLEGYGTHRIAKLLNEKGVATVTGAKWHDTTIRQMLSNEKYNGSVLLQKYFHDGVNGPKKLNQGELEQYFIEDNHEAIISMEDWQAVQGKLNSRRWQQGRNKTYKFTGLLKCQHCGSTLKRQVSYKKKIVWCCSKYIKEGKAACKGMRVPEVDISNWTVTSPVTVIERDRDGEKYYSNTGQESADQRSSSGQEENQSSRILSSVHRPRRTAIKL

SEQ ID NO: 11425 - protein, 413 aa, Unknown
  Description of Unknown: Integrase C168 sequence
  PF07508,SSF53041,IPR036162,IPR025827,SM00857, PF00239,mobidb-lite,PS51736,G3DSA:3.40.50.1390,IPR011109, PS51737,IPR038109,IPR006119,PTHR30461,cd00338, G3DSA:1.10.10.2600,PF13408
MSVKKIRVNRQKHRKRVCAYIRVSTTNGSQLDSLENQKQYFENLYSNRDDIDFMGVYHDRGISGSKDNRPNFQAMIEDCRRGKIDVIHTKSIARFARNTVIVLEISRELKAIGVDIFFEEQNIHTLSSEGEVMLSVLASIAEDELRSMSGNQRWAFQKKFQRGELVINTKRFLGYDVDENGELIINPEEALIVREIFALYLAENGTHRIAKQLNEKGVATVTGAKWHDTTIRQMLSNEKYKGSVLLQKYFHDGVNGPKKLNQGELEQYLIEDNHEAIISKEDWQAVQDKLNSRGWQQGRNQTYKFTGLLKCQYCGSTLKRQVSYKKKIVWCCSKYIKEGKVACQGMRVPEVDISNWVITSPITVIERDRNGEKYYSYSGQESADQRSASGQEENQGSRILSSVHRPRRTAIKL

SEQ ID NO: 11426 - protein, 413 aa, Unknown
  Description of Unknown: Integrase C169 sequence
  PF07508,SSF53041,IPR036162,IPR025827,SM00857, PF00239,mobidb-lite,PS51736,G3DSA:3.40.50.1390,IPR011109, PS51737,IPR038109,IPR006119,PTHR30461,cd00338, G3DSA:1.10.10.2600,PF13408
MSVKKIRVNRQKHRKRVCVYIRVSTTNGSQLESLENQKQYFENLYSNRDDIDFVGVYHDRGISGSKDNRPNFQAMIENCRKGMIDVIHTKSIARFARNTVTVLETSRELKSIGVDIFFEEQNIHTLSSEGEVMLSVLASIAEDELRSMSGNQRWAFQKKFQRGELVINTKRFLGYDIDEKGELIINPEEALIVRQIFALYLEGYGTHRIAKLLNEKGVATVTGAKWHDTTIRQMLSNEKYNGSVLLQKYFHDGVNGPKKLNQGELEQYFIEDNHEAIISMKEWQAVQDKLNSRRWQQGRNKTYKFTGLLKCQHCGSTLKRQVSYKKKIVWCCSKYIKEGKATCQGMRVPEVDISNWEITSTVTVIERDRNGEKYYSYSGQESADQCSTSGQEENQSSRILSSVHRPRRTAIKL

SEQ ID NO: 11427 - protein, 413 aa, Unknown
  Description of Unknown: Integrase C170 sequence
  PF07508,SSF53041,IPR036162,IPR025827,SM00857, mobidb-lite,PF00239,PS51736,G3DSA:3.40.50.1390,IPR011109, PS51737,IPR038109,IPR006119,PTHR30461,cd00338, G3DSA:1.10.10.2600,PF13408
MSVKKIRVNKQKHRKKVCVYIRVSTTNGSQLDSLENQKQYFENLYTNRNDIDFVGVYHDRGISGSKDKRPDFQAMIEECRKGQIDVIHTKSIARFARNTVTVLEISRELKAIGVDIFFEEQNIHTLSSEGEVMLSVLASIAEDELRSMSGNQRWAFQKKFQRGELVINTKRFLGYDVDENGELIINPEEALIVREIFALYLAGNGTHRIAKQLNEKGVATVTGAKWHDTTIRQMLSNEKYKGSVLLQKYFHDGVNGPKKLNQGELEQYLIEDNHEAIISKEDWQSVQDKLTSRRWQQGRNKTYKFTGLLKCQHCSSTLKRQVSYKKKIVWCCSKYIKEGKVACQGMRVPEVDISNWVITSPVTVIERDRNGEKYYSYSGQESADQGSSSGQEENQGSRILSSVHRPRRTAIKL

SEQ ID NO: 11428 - protein, 413 aa, Unknown
  Description of Unknown: Integrase C171 sequence
  PF07508,SSF53041,IPR036162,IPR025827,mobidb-lite, SM00857,PF00239,PS51736,IPR011109,PS51737, G3DSA:3.40.50.1390,IPR038109,IPR006119,PTHR30461,cd00338, G3DSA:1.10.10.2600,PF13408
MSVKKIRVNRQKHKKRVCAYIRVSTTNGSQLDSLENQKQYFENLYSNRDDIDFVGVYHDRGISGSKDNRPNFQAMIENCRKGMVDIIHTKSIARFARNTVTVLEISRELKAIGVDIFFEEQNIHTLSSEGEVMLSVLSSIAEDELRSMSSNQRWAFQKKFQRGELVINTKRFLGYDVDENGELIINPEEALIVRQIFALYLEGYGTHRIAKLLNEKGVATVTGAKWHDTTIRQMLSNEKYNGSVLLQKYFHDGVNGPKKLNQGELEQYFIEDNHEAIISMKEWQAVQDKLNSRRWQQGRNKTYKFTGLLKCQHCGSTLKRQVSYKKKIVWCCSKYIKEGKAACKGMRVPEADISNWAITSPVTVIERHKNGEKYYSYSSQESADQRSSSGQEENQSSRILSSVHRPRRTAIKL

SEQ ID NO: 11429 - protein, 412 aa, Unknown
  Description of Unknown: Integrase C172 sequence
  PF07508,SSF53041,PTHR30461:SF3,IPR036162,SM00857, IPR025827,PF00239,PS51736,PS51737,IPR011109, G3DSA:3.40.50.1390,IPR038109,IPR006119,PTHR30461,cd00338, G3DSA:1.10.10.2600,PF13408
MRTVRRIQPMMTPQKPKLRVAAYARVSDSRLHHSLSTQVSYYSRLIQSHPDWELVGVYYDEGISGKEQSNRQGLQDLLKACDDGKIDRILTKSIARFGRNTVDLLSTVRVLRQKNIGITFEKEGIDSLSSEGELMLTLLASVAQEESHNISENLRWQIKKKFEQGQPHTPQDIYGYRWNGENYVIEPDEAKVVRQVFQWFLDGDNAPMITKKLNEQGVLTRLGNPFTVSSVREFFKQEAYFGRLVLQKTYREPFSRNPKRNNGQKNKYIVEDAHEAIVSKSYFDVVLQEKERRYKVMYQESHMHKGTFRELIECSHCGKIMITRVDSKKVHRTIRYCCRTRDRFGTSSCPSKTLSEKRILATFEDKIGFKPDKNWVTENIKKVIYDSSVGLITVFPIKGRKYELKVRKEHFL

SEQ ID NO: 11430 - protein, 411 aa, Unknown
  Description of Unknown: Integrase C173 sequence
  PF07508,SSF53041,PTHR30461:SF3,IPR025827,SM00857, PF00239,IPR036162,PS51736,PS51737,IPR011109, G3DSA:3.40.50.1390,IPR038109,IPR006119,PTHR30461,cd00338, G3DSA:1.10.10.2600,PF13408
MRTVRRIQPIKSPCRPKLKVAAYARVSDSRLHHSLSTQISYYNRLIQAHPDWELVGIYYDEGISGKEQSNRQGFQNLIKDCDNGKIDRIITKSIARFGRNTVELLTTVRQLRLKNIGVTFEKENVDSLSSEGELMLTLLASVAQEESQNMSENIRWRVQKKFEKGIPHTPQDMYGYRWDGEQYQIEPNEAKVIRKVFKWYLNGDSVKQIVDKLNQEHVLTRLGNPFTVASIREFFKQEAYFGRLVLQKTYREAFSRNPKRNKGQRNKYIIENAHEPIVTKEYFELVLHEKERRYQLMHQESHLNKGIFRDKIFCSDCGCLMIVKVDSKHVKKTVRYYCRTRNRFGASSCPCRTLGEKRLLASFKSKLGIVPYKEWVENNIKHIEYDFGHRIIRVTPVKGRKYTIEIREGRY

SEQ ID NO: 11431 - protein, 411 aa, Unknown
  Description of Unknown: Integrase C174 sequence
  PF07508,SSF53041,PTHR30461:SF3,IPR025827,IPR036162, PF00239,SM00857,PS51736,IPR011109,G3DSA:3.40.50.1390, PS51737,IPR038109,IPR006119,PTHR30461,cd00338, G3DSA:1.10.10.2600,PF13408
MRTVRRIQPIKSPCKPKLKVAAYARVSDSRLHHSLSTQISYYNRLIQAHPDWELVGIYYDEGISGKEQSNRQGFQNLLKDCDDGKIDRIITKSIARFGRNTVELLTTVRQLRLKNIGVTFEKENIDSLSSEGELMLTLLASVAQEESQNMSENIRWRVQKKFEKGIPHTPQDMYGYRWDGEQYQIEPNEAKVIRKVFKWYLDGDSVQQIVDKLNQEQVLTRLGNPFTVASIREFFKQEAYFGRLVLQKTYREAFSRNPKRNKGQLNKYIIENAHEPIVTKEYFELVLHEKERRYQLMHQESHLNKGIFRDKIFCSDCGCLMIVKVDSKHVKKTVRYYCRTRNRFGASSCPCRTLGEKRLLASFKSKLCIVPDKEWVENNIKHIEYDFGQRIIWVIPVKGRKYPIEIREGRY

SEQ ID NO: 11432 - protein, 410 aa, Unknown
  Description of Unknown: Integrase C175 sequence
  PTHR30461:SF3,PF00239,PS51736,G3DSA:3.40.50.1390,IPR038109, IPR006119,G3DSA:1.10.10.2600,PF13408,PF07508,SSF53041, PS51737,cd00338,IPR036162,IPR006118,SM00857, IPR011109,PS00397,IPR025827,Coil,PTHR30461
MTTVALYARVSSKKQAQNNTIESQIAELKCRIAADKHELLDEYEFKDNGISGWILGREGLEALRDKVAEGEIDKIYIHSPDRLSRKSAHQVVLLEEFEKAGVEVIFSNHKIENNPESKLLLGMQGLLSEYECTKTMERSRRGKRHRARKGCISVIGIAPFGYKRMKHVDREKTSFEINEEEAKIVRQIFMWIGQERISIREAIRRLKDMSVRTRTEKKVWRPIIIWKMLRNPAYKGQAAFGKLKRVERISRKKSKQKVKNVYVYRTDEESWIYIPVPKIVDEGLFNKVQKQLDENRKRARMQRREEINLLQGLTICQNCKSTYSGVHHRDGEKTYSYYRCSSIVRITDDEEKCNNKLVRADMLEIAVWEKVKDVLKNPEMIKKEHWNFCFSISHASEQIQILQLKALDRW

SEQ ID NO: 11433 - protein, 713 aa, Unknown
  Description of Unknown: Integrase A1 sequence
  G3DSA:1.10.10.60,SSF46689
MSREPAQLWWTAAEIAAAGLPDLPASRQGVEALARRANWRADPKHSRQRQGRGGGWQYHWSLFPLPAQTRLLQASAGAAPAAKPVLGRAEAWAWFETVPEAVKAEARRRLAVLDEVDTLTGLGTAKTLAVEEIARGHDMGARTIWDWFGMIDGVAPSDRLPYLAPRHRAAARKDTKVALDPEWFERLKGLYLRLGGPSFSQSWRDAERLAKANGWACLPERTARRRFDQEVPRVVQIHAREGVEGLERCYPPMIRSKALLHAMEAVNADCHRFDVFVLWPGSDRPERPQIVAYQDLYSGKILSWRIDHTPNEVAVMAAFGEMVETYGIPKHCTFDNGREFAAKWLSGGAKTRYRGKIRDDDPMGVLPLLNIKIHWAKPAHGQAKPIERAFRDFASDISKDIRFQGAYTGNRPDAKPEDYATRAIPLDDFVRVVGERIAEHNARVGRQSETAAGRSFDETFAESYAASTVVRATEEQRRLWLMGQKPVTLNRHHGRVRLFRNYYWSDWMVEYAGQKIVARFDVEDLHAGIHVYDLAGAYLGFAPCQQAEGFYNLTAAKDEARRRQAWKRVQKQALAAARRMTPAEIGRELDASAPAPAAPVEAKVVAMTPKGPRPAAAQVTRPAYRDPTTPEQQAEIVAFQEHHYADQARKAEAAEVETALDRFRWALEIERKAAAGEPVGEAEARRFERYRQTAEWRGMRRMHEHSGNAMFLS

SEQ ID NO: 11434 - protein, 704 aa, Unknown
  Description of Unknown: Integrase A2 sequence
  G3DSA:1.10.10.60,SSF46689
MTLTPTKEWWTAAEIAAQALPDLANSRQGVEAQAKRDDWRAHPEHARKRAGRGGGWEYHWRLFPSRAQRELIGRATAPTSEGGSTGREDVWAWFDGLPEKTKDKARCNLRIVQEVETSCRAMTKNLAVGMVASQHGCSERTIWNLYRRIEGVDPADWLAYLAPKHRASSKKGVTARASAEFFDLLKGDYLRLGPHSFTSSYERAVKICKAKGLAYLTPRTARRWFDQNVPRVTQVFAREGEAGLAKCFPPQIRDRSTLTALEGVNADCHKIDVFVQWPGIEKPVRPQIVGFQDLYSNKILSWRVDLDPNKVAVMSAFGELVETWGIPHHCLFDNGREFANKWLTGGVPTRFRFKIRDDDALGVLPQMGIQIHWAQPAHGQAKPIERGFRDFADRIALDPRFAGAYVGKRPDAKPEDYGSRAIPLEDFLRVLDEGIRDHNARQGRLTDTAKGRSFDDTFAESYASAPIRKATPEQHRLWLMGQEVRKLHRTHGELTLHRNKYWADWMNEHAGEKVVARFDPENLHAGVYIYSLAGAFMGMSECSQKVGFFDLVGAKLHAKVKRQRRKAEKALLDAMRPVSVQDIAAELDRLPQPETPLVEAKVVEMAPARHRKPLVQRSLPVPDTAADERLKVFTAEFGKPKPAPEAKTETAEDRFRRALDIERRSEAGEPISEEDAEFLSRMQKLPKYRAQRLSYDSWGDQAIN

SEQ ID NO: 11435 - protein, 701 aa, Unknown
  Description of Unknown: Integrase A3 sequence
  G3DSA:1.10.10.60,SSF46689
MAETPRQEWWSAAEIAAAGLPDVPGSKRKVNDMAAREGWKAQPGKSRRRNRTGGGWEYHWSLLPVRARLALSEPVEDEPAPKIGRDEAWAQFEAATGAAQKKARDRLAVLNQVEEIEVAGMTRSLAVTTVSERSGASAKSIWNWLDRVEGIAHADRLAYLVDRRGTRKKAAPAAPSADFCTLVKSDFLRQSQPSFTSCYDRAARIAKKEGLAVPPIHQVRRWYKASVSEPTEIYWRKGVEALRRFYPHQTRDKSAMVPLECVQGDYHKFDVFVRWPGEKDPVRVQAVVFSDVYSGKILAWRLDTTANSHTVQLAIGDLIERYGVPQQALLDNGREFAAKAITGGTPTRFRFKIDDEDIPGLLPLLGINVIWATPYSGQSKPIERAFRDLCDRVAKHPAFEGAYTGNRPDAKPENYGSRAIPLEEFRAVVAEEIEAHNARPARRSEVAFGRSFNDVFNEGYQRAAISRATDEQRRLWLLRVEGLRGDSKNGELKLHGSRYWAEWMYRIAGKKIAARFDQDDLHAGLHVYDLSGSYLGHAPCMEAAPFLSVEDARTHARKRNQFIRATKDLAKAERELDHHQIAARLRAAGKEVEDELPEAEVVRLVPAHPKAPKPARRGRQSTDQIENAARLDAQITRISERRAAPVEDDPRGRFDRAMTLEAMQAEGQPMTVEQATWLAEYQQSAEYRGFARMRRAFGEDE

SEQ ID NO: 11436 - protein, 695 aa, Unknown
  Description of Unknown: Integrase A4 sequence
  PF07508,G3DSA:1.10.10.2600, SSF53041,PF13408,PS51737,cd00338,PTHR30461:SF3, PF00239,PS51736,SM00857,G3DSA:3.40.50.1390,PS00397, PTHR30461
MFSNSLEDFFGPEVDIYARVSSEDQQERETIENQIEYATKYCELNKLTIREWYLDDGITGTIPLRDRPAGAKLIKDAQEGKSKKILIFNMKRLGRVARVTLDAVYELEKHGAKIKSMTEPFDTSTPAGRFILTVLAGQAELDRDTMLETMWHGANRAARKGKWLGGIVPYGYKKNHDGFLEINCDPLPGKEDMSEASVIELLYHLCVNGKMSTIQIADYLNALGIPPSYVKDNRSIKRGRRKEKTAGVWRPARVGNMIKNSTYRGIHVYGKRSNKDRELIERKVPAIISEEMWHQAQIILKANQIEAVKNTKRQYLLRGLIKCGCCGLNYHGTAYRSSPFYVCNGKTAYAGPLMGKCKSRNIPAPWVENLVWEQCVNFINNPGDTVKELVNVDEKVLDHTAAYIDEKELVQKSLLNKDDERQSILELYRKKMISSNDVEIQLTEITNEKKELEDRLRELNILIEGNARKEKRTDDVFQILDGLREVIKEELPFETKRAIVKALVKKIIVHTHFEDGVKRFHNASVHAEFSFDGIKVINGTPVRENNNLDTIIEREFSFEGNYNRYLLLDKTTGQRLRRCRHLKKMTIEELSNSIGISSTTILMLEKHNNKASLRTLKLLSSVLEVPISYLGMFEKMPDSTFGDKVRKARYYHGLTKEELAAQIKVDKKTIQNWESNKCVPRDMKKLNQIIKILHM

SEQ ID NO: 11437 - protein, 675 aa, Unknown
  Description of Unknown: Integrase A5 sequence
  PF07508,G3DSA:1.10.10.2600,SSF53041,PF13408,PS51737, cd00338,PF00239,PS51736,SM00857,G3DSA:3.40.50.1390, PS00397,PTHR30461
MSDKKQDIYAIYIRVSTERQVEHGDSIEMQEALGMQIIKENNGIHYRTYIEPAVSASKTNLKNREVLMECLNDAKNGLFNKLIVYKRDRLARKLEDAMAIWDILKKANCELIFSATDEMQAMMNDPYGKMLEAIKASIAEIESATISVRVSDTLKNKAKKGEFTGGNLPYGYILKDKKIVLIPEEVKIIKEIEDLYLAGYGLYSIAKWLNGEKVSNLGYRPEGRAYRRKQHKNSSEYWTRDVIHTILFNPFYTGIIEYSTSGDKRSVNDDSLIIRAKGSHEPCRTLERHEQILREKKRRESEISEPRRYTTSFLLTGLLYCSECGNKFYGRNSTQNKKKYSYYVCGGKSTIKHIGKEPCPSKQFKKEVLEEFILQKIIEYISSVNLDSEIKKIQESLNESDLKLKTALEEINKKIERLNKDYTAIRRLLLDLDENDENYELLKESYQNDQAEILKKLNEAKKAKQELENQLNIQSDQENIIQSIIEEIRDFSKNIHYVPYHMKKVMIDKIIEKIEINKDGDVKLYFSIPLSPKEEQENKDIERKISFISFGGVGDTTTTKTIKIGIHLDHHKYNFFEWIQTISNKIKSSFINWIKLHVDIKSARQMHRDTGIAETTCREIINKERIPMPKTIKRIVEAYHLNLKSFIDFMGISISEESLFHVIETTISGRRVKAS

SEQ ID NO: 11438 - protein, 673 aa, Unknown
  Description of Unknown: Integrase A6 sequence
  SSF53041,PF13408,PS51737,cd00338,PTHR30461:SF3,PF00239,PS51736 ,SM00857,G3DSA:3.40.50.1390,PTHR30461
MSNTLLPGQRLRRRIRVAIYRRVSTNKQVDGFGLDAQDELCRRWLDLMIGVGNYIVVDVYTDGGVSGKLAEREDLDRMNADIAAGRIDLVIFGKLDRIGRTMKNIHRWVYDTQDIEVEKGRKVRIVTADNRIDSEGEMFEVTLALLAYMAQMEHSLILERTMSGRIQKVMAGGWPHGGIPYGYMIDPETGDVVVNPLEAVVIEKAIEFLVDSPEYLTRGEVAKRLNALGYRTRKGYLWDGANLAQRLKKALCGFSEFTFAAGTDEEQVHVLTLPEIVPGERALAATVALERSAKTKSPSVDYPLSKRLISLCGAGMVGGIDKRSGTRKYRCQKTREGAEYEHECQSLYADDVEAAVMAEVTGLVVDRDRLHELIKEALGTTPQRLESYRRRLTEIDETLAKKRKTRKKAIARLVAAVEVDDDEDDDFADEMREEIEELKARYKEEEADLLQERERVESWIADIEGEEERALQVLAAADKLRTKVGKLSKREQADLIEMLDIQVQIEGVAKVHRRGNVDPLSKWHWETGAEVPAELTDEMWAKVSSIISNTQKWKDIRGAFDVTLEKIRTGRVWTDFLKDERLGGRGYATLMRRVRHWDETGEYQQALKVLEGYRKVPAAPQFSLPPMRVTGAVARAPKGITAGQTGDVANGELGDVDGRGSRMQIACVASLTV

SEQ ID NO: 11439 - protein, 670 aa, Unknown
  Description of Unknown: Integrase A7 sequence
  SSF53041,cd00338,PTHR30461:SF3,PF00239,PS51736, SM00857,G3DSA:3.40.50.1390,PS00397,PTHR30461
MVKRTLPRQRMKQATVRVAIYLRVSTAQQLEGYGLKVQEDQCRAWIAYALRGVNYTIVEVYVDGGVSGKLASREELDRMTADAMAERLDLIVFGKLDRIGRTMKNIHRWVYDVTDKGVRVATADGRIDSEDEMFGIQLSLLAYMAEVEHALILERTMGGRMQKVAVGGWPLGEPPFGFMLDSNGNPALNAPEIKQIEEFADFMIDSPDPVTREDAARHLNALGYRTRRGKEWDGGNLVGRVMAALKGYVEFAFAGENEDGEEITTSFRIDLPKALPDDRAEALKAALARGSRVKGRHSKYLLSNRLISVCGAHRTGATTPEHGRFYRCMAGRQGNPINERHEDCWEIPVEEVDAAVWDEVKDLLSDKDKLRKLVEESLGSVPDRAESYRRRLTELDAQIEKKRSGRKRKVALLLASIDDDSENGEEDAKLVEELKAELKGQEADLVEERERVAEWLYEIEGQEGRAKDMLAMIDKVETRLDDFTFDQKLDLLDLLDVRVQITGKGVPRHKGLVDPIGEWHRETGLTIPIEITDEQWVKVQPILSGNRQWRDVRGGFEVMLDKLRTGRAWNEYSGCEAIGGRSYGALYRRVTHWFGSGEYERALEELTPYVGVPVPPLYVLPPMEVTGSADPKYTVERAAQECPDPNCNDAKTGTSSSRILFAQMDFNPTR

SEQ ID NO: 11440 - protein, 670 aa, Unknown
  Description of Unknown: Integrase A8 sequence
  SSF53041,cd00338,PTHR30461:SF3,PF00239,PS51736,SM00857, G3DSA:3.40.50.1390,PS00397,PTHR30461
MVKRTLPRQRMKQATVRVAIYLRVSTAQQLEGYGLKVQEDQCRAWIAYALRGVNYTIVEVYVDGGVSGKLASREELDRMTADAMAERLDLIVFGKLDRIGRTMKNIHRWVYDVTDKGVRVATADGRIDSEDEMFGIQLSLLAYMAEVEHALILERTMGGRMQKVAVGGWPLGEPPFGFMLDSNGNPALNAPEIKQIEEFADFMIDSPDPVTREDAARHLNALGYRTRRGKEWDGGNLVGRVMAALKGYVEFAFAGENEDGEEITTSFRIDLPKALPDDRAEALKAALARGSRVKGRHSKYLLSNRLISVCGAHRTGATTPEHGRFYRCMAGRQGNPINERHEDCWEIPVEEVDAAVWDEVKDLLSDKDKLRKLVEESLGSVPDRADSYRRRLAELDAQIAKKRSGRKRKVALLLASIDDDSENGEEDAKLVEELKAELKGQEADLVEERERVAEWLYEIEGQEGRAKDMLAMIDKVETRLDDFTFDQKLDLLDLLDVRVQITGKGVPRHKGLVDPIGEWHRETGLTIPIEITDEQWVKVQPILSGNRQWRDVRGGFEVMLDKLRTGRAWNEYSGCEAIGGRSYGALYRRVTHWFGSGEYERALEELTPYVGVPVPPLYVLPPMEVTGSADPKYTVERAAQECPDPNCNDAKTGTSSSRILFAQMDFNPTR

SEQ ID NO: 11441 - protein, 669 aa, Unknown
  Description of Unknown: Integrase A9 sequence
  SSF53041,PF13408,PS51737,cd00338,PTHR30461:SF3, PF00239,PS51736,SM00857,G3DSA:3.40.50.1390,PS00397, PTHR30461
MRTTTLPRKRKMLRVAIYLRVSTSKQLDGWGLDVQDERCRAWVDYQLKGTPHAIVDVYCDGGVSGKLAHRDDLDRLTSDIEAGLIDVVVFAKLDRIGRTMKNIHRWVYDVTDFGVRVATADGRIDSDDQMFGIQLSLLAYMAEVEHALILERTMGGRVKKISGGGWASGTPPYGYMLDEDGEPVVNPAELEQIMKFAELAVDQGASRGEAAKGLNEAGYRTRTGKLWEGNNLILRMRLAIRGYVDFTFSGVNEDGEEITTSYRLELPPLFEDESRRKALETVLLEDMKGEARVSYGEHMLTGHLVSQCGHPRYGAARREYDDVVYRCKNQATIAEGHTCKQIPGEETEKVVWDEVAKKLADPESIKGLVDDWLGTIPERAESYRSRMQEIDDKLNKLRNTRRKKIAMLVASLDEDDEEDQKLIAELKEEIASKEKDLRQEQERIAEWLEEAEHKEERAESMRTLIDRIGTNVHNISQVDKKRLLELLRVRVQIVGESVSGQKGGTKDPMLEWHREKKIKIPLSISDEQWAQVEGILAGGRKPKPEDRPCFEMLLEKLREIKGWHDYDHDERMGGKGWGFFYRLARRWFVEGMYAKALEVLTPYEGVDAPDGYTLPPMKIYGVIDDSAEDVVVTSESAVKAEVGGRTPSTKGIRGNASGFEFEIGSTKAS

SEQ ID NO: 11442 - protein, 669 aa, Unknown
  Description of Unknown: Integrase A10 sequence
  SSF53041,cd00338,PTHR30461:SF3,PF00239,PS51736, SM00857,G3DSA:3.40.50.1390,PS00397,PTHR30461
MKRTLPRQRMKQATVRVAIYLRVSTAQQLEGYGLKVQEDQCRAWIAYALRGVNYTIVEVYVDGGVSGKLASREELDRMTADAMAERLDLIVFGKLDRIGRTMKNIHRWVYDVTDKGVRVATADGRIDSEDEMFGIQLSLLAYMAEVEHALILERTMGGRMQKVAVGGWPLGEPPFGFMLDSNGNPALNAPEIKQIEEFADFMIDSPDPVTREDAARHLNALGYRTRRGKEWDGGNLVGRVMAALKGYVEFAFAGENEDGEEITTSFRIDLPKALPDDRAEALKAALARGSRVKGRHSKYLLSNRLISVCGAHRTGATTPEHGRFYRCMAGRQGNPINERHEGCWEIPVEEVDAAVWDEVKDLLSDKDKLRKLVEESLGSVPDRADSYRRRLAELDAQIAKKRSGRKRKVALLLASIDDDSENGEEDAKLVEELKAELKGQEADLVEERERVAEWLYEIEGQEGRAKDMLAMIDKVETRLDDFTFDQKLDLLDLLDVRVQITGKGVPRHKGLVDPIGEWHRESGLTIPIEITDEQWVKVQPILSGNRQWRDVRGGFEVMLDKLRTGRAWNEYSGCEAIGGRSYGALYRRVTHWFGSGEYERALEELTPYVGVPVPPLYVLPPMEVTGSADPKYTVERAAQECPDPNCNDAKTGTSSSRILFAQMDFNPTR

SEQ ID NO: 11443 - protein, 668 aa, Unknown
  Description of Unknown: Integrase A11 sequence
  SSF53041,PS51737,cd00338,PTHR30461:SF3,PF00239, PS51736,SM00857,G3DSA:3.40.50.1390,PS00397,PTHR30461
MRTKTLPRKTKTLRVAIYLRVSTSKQLDGYGLDVQDERCRAWVDYQLKGTPHTIVDVYCDGGVSGKLAHREDLDRLTADIEAGLIDVVVFAKLDRIGRTMRNIHRWVYDVTDHGVRIATADGRIDSDDQMFGIQLSLLAYMAEVEHALILERTMGGRIQKIAGGGWASGTPPYGYMLDEEGEPVINPAELEVILKAAEFLVDQRMSRGQAAAELNELQYRTRTGKLWEGNNLVLRLRLAVRGYVDFSFSGMNEDGEEITTSYRVELPPLFEDESRRKALEEALEDMKGNPRTSYSNHLLSGHLYSLCGSSRYGVSRADQGDFIYRCSNHATAAEGHTCKQIDGKETETVVWDEVEKLLTDPEAIKGVIDDWLGTIPDRADSYRARLKEIDDKLHRLRNTRRKKIAMLVASLDEDDEEDQKLIAELKEEIAGKEKELREEQERITEWLEEAEHKEERADNLRSIIDRVGVNMQGLTKADKKGVLELLRIRVDIVGDSVSGQKGGTKDPMLEWHREHGISIPLAVSDEQWARIESILAGGRKPKLEDRPCFEMLLEKLREKKGWHDYDHDERMGGKGWGFLYRLGRRWFTEGMYAAALEAMGPYEGVPAPDGYTLPPMKIYGVIDDSTEDVVHTSGDAVKAEAGGRTPSTKGIRATTSGFEFEIASTKAS

SEQ ID NO: 11444 - protein, 663 aa, Unknown
  Description of Unknown: Integrase A12 sequence
  G3DSA:1.10.10.60,SSF46689
MELWVSPKECANLPGLPKTSAGVIYVAKKQGWQNRTRAGVKGGKAIEYNANSLPVEAKAALLLRQGEIETSLGYFEIARPTLEAHDYDREALWSKWDNASDSQRRLAEKWLPAVQAADEMLNQGISTKTAFATVAGHYQVSASTLRDKYYQVQKFAKPDWAAALVDGRGASRRNVHKSEFDEDAWQFLIADYLRPEKPAFRKCYERLELAAREHGWSIPSRATAFRRIQQLDEAMVVACREGEHALMHLIPAQQRTVEHLDAMQWINGDGYLHNVFVRWFNGDVIRPKTWFWQDVKTRKILGWRCDVSENIDSIRLSFMDVVTRYGIPEDFHITIDNTRGAANKWLTGGAPNRYRFKVKEDDPKGLFLLMGAKMHWTSVVAGKGWGQAKPVERAFGVGGLEEYVDKHPALAGAYTGPNPQAKPDNYGDRAVDAELFLKTLAEGVAMFNARTGRETEMCGGKLSFDDVFEREYARTIVRKPTEEQKRMLLLPAEAVNVSRKGEFTLKVGGSLKGAKNVYYNMALMNAGVKKVVVRFDPQQLHSTVYCYTLDGRFICEAECLAPVAFNDAAAGREYRRRQKQLKSATKAAIKAQKQMDALEVAELLPQIAEPAAPESRIVGIFRPSGNTERVKNQERDDEYETERDEYLNHSLDILEQNRRKKAI

SEQ ID NO: 11445 - protein, 663 aa, Unknown
  Description of Unknown: Integrase A13 sequence
  G3DSA:1.10.10.60,SSF46689
MTNWFTTKELVGLPGLPEHSQNISRMAKKNGWEFRQKEGVKGVAYEFSMNSLPIQTQTALMKKQGKVQVGDQVLELPKKKSEQSYCREALWARWSKNNNAAKEKAQQALRTVQAVFALKNNGIKLMDAYQSVSEEYGVALSTLRRSCAKVKGIDECDWAPALLPKNFESSQTQKPNQFAYVTPEAWEFFKADYLSLEQPAMSVCYERLIDTAPSKGWKVPSLKSLGRRLEHEVPVQQRIMLREGEHALHQMFPPQERTVEGLHALEWINGDGYQHNVFVKWFNGEILRPKTWFWQDIYSRKIIGWRCDISENTDSIRLSLMDVCEKFGVPKELTLDNTRAAANKWMTGGVPNRYRFKVKADDPLGIIPMMNIKLHWSSVILGKGHGQAKPIERAFGVGGLEEYIDKHPLCRGAYTGPNPMAKPDNYGSKAIDAEDFLQAIAKGVEMYNAKENRHTEVCKGFMSFNQAFNASYETAAIRKATTDQLQMMMLQAEAVRVSKHGTISLDAGGSLKGRKNRYYSELMMNYVGQKLVARFDPLKLHESIEVYTLNGVRICTAECLDKTGFGDTQAAREHKRKRTQFTKANKIAAQAQTDIDALEVAAMMKPLEEEVLPETKVVEPFRPVSIGNTAAKAIALEDEEEDYEQNFSQSVSNLFEQKFKNKL

SEQ ID NO: 11446 - protein, 662 aa, Unknown
  Description of Unknown: Integrase A14 sequence
  G3DSA:1.10.10.60,SSF46689
MKEWYTAKELLGLAGLPKQATNITRKAQREGWEFRQVAGTKGVSFEFNIKSFPVALRAEILLQQGRIETSQGYFEIARPTLEAHDYDREALWSKWDNASDSQRRLAEKWLPAVQAADEMLNQGISTKTAFATVAGHYQVSASTLRDKYYQVQKFAKPDWAAALVDGRGASRRNVHKSEFDEDAWQFLIADYLRPEKPAFRKCYERLELAAREHGWSIPSRATAFRRIQQLDEAMVVACREGEHALMHLIPAQQRTVEHLDAMQWINGDGYLHNVFVRWFNGDVIRPKTWFWQDVKTRKILGWRCDVSENIDSIRLSFMDVVTRYGIPEDFHITIDNTRGAANKWLTGGAPNRYRFKVKEDDPKGLFLLMGAKMHWTSVVAGKGWGQAKPVERAFGVGGLEEYVDKHPALAGAYTGPNPQAKPDNYGDRAVDAELFLKTLAEGVAMFNARTGRETEMCGGKLSFDDVFEREYARTIVRKPTEEQKRMLLLPAEAVNVSRKGEFALKVGGSLKGAKNVYYNMALMNAGVKKVVVRFDPQQLHSTVYCYTLDGRFICEAECLAPVAFNDAAAGREYRRRQKQLKSATKAAIKAQKQMDALEVAELLPQIAEPEAPESRIVGIFRPSGNTERVKNQERDDEYETERDEYLNHSLDILEQNRRKKAI

SEQ ID NO: 11447 - protein, 662 aa, Unknown
  Description of Unknown: Integrase A15 sequence
  G3DSA:1.10.10.60,SSF46689
MKEWYTAKELLGFAGLPKQATNITRKAQREGWVFRQVTGTKGVSFEFNIKSFPVALRAEILLQQGGIETSQGRFEIARPTLEAYDYDREALWSKWDNASDSQRRLAEKWLPAVQAADEMLNQGISTKTAFATVAGHYQVSASTLRDKYYQVQKFAKPDWAAALVDGRGASRRNVHKSEFDEDAWQFLIADYLRPEKPAFRKCYERLELAAREHGWSIPSRATAFRRIQQLDEAMVVACREGEHALMHLIPAQQRTVEHLDAMQWINGDGYLHNVFVRWFNGDVIRPKTWFWQDVKTRKILGWRCDVSENIDSIRLSFMDVVTRYGIPEDFHITIDNTRGAANKWLTGGAPNRYRFKVKEDDPKGLFLLMGAKMHWTSVVAGKGWGQAKPVERAFGVGGLEEYVDKHPALAGAYTGPNPQAKPDNYGDRAVDAELFLKTLAEGVAMFNARTGRETEMCGGKLSFDDVFEREYARTIVRKPTEEQKRMLLLPAEAVNVSRKGEFTLKVGGSLKGAKNVYYNMALMNAGVKKVVVRFDPQQLHSTVYCYTLDGRFICEAECLAPVAFNDAAAGREYRRRQKQLKSATKAAIKAQKQMDALEVAELLPQIAESEAPESRIVGIFRPSGNTERVKNQERDDEYETERDEYLNHSLDILEQNRRKKVI

SEQ ID NO: 11448 - protein, 662 aa, Unknown
  Description of Unknown: Integrase A16 sequence
  G3DSA:1.10.10.60,SSF46689
MSNLKIKTHYSAMEIASFKLNSAPHAHKNVQEKAKRECWTARKREGRGGGLEYAFESLPQEIQAEILLKHTESKSFTEPTRGVAHKNYLPEVIWAPFDKASEKQRAEAQQKLVLLHKIDDLTRNNIKLMDALEMVATEFNVAKGSLKRWYYKVRTFERSDWLPLLLDKHGTNRKSAEAEFTPEAWESFKADYFRNERPQFGSCYERLKRAAREQGWVIPSASSVKRKIEREIPKVQQVFLRNGEHALSQYYPTMQRSVADLEVLEWINGDGYQHNVFVQWHNGDIVRPKTWIWQDIRTRKILAYRVDLSENSDTIRLSLMDLIWKYGIPKKCTIDNTRAAANKWMTGGVKNRYRFKVKEDDVKGIIPLLGIELFWTSIQFGKGHGQAKPVERAFSHGGLGELIDKHPKLAGFYAGENVYNKPDNYNGGKEGASYEDFILALEDGIRTFNEREQRETEICQGVYSFNQVFERDYAKARVRKASQEQMRILMLMSEATTLKKDGTFELDVGGKVHNRRNRYLCTDLIGSHHKKVIVKFDPQDLHSKVWVYSTEMIYLGEAECTERVAFGDKAAGREHDKARKQWVKAQKQAAKAQQTMNAQEVARFLPEPTFEEEIQQPQIIELFHTQGNAVKKTEVVLDDEENTFEQGWRKGLEMIKQEKGIK

SEQ ID NO: 11449 - protein, 658 aa, Unknown
  Description of Unknown: Integrase A17 sequence
  SSF53041,PS51737,cd00338,PTHR30461:SF3, PF00239,PS51736,SM00857,G3DSA:3.40.50.1390, PS00397,PTHR30461
MGAKTLARKRKTLRVAIYLRVSTSKQLDGWGLDVQDERCRDWINYQLKGTPHTIVDVYCDGGVSGKLAHRDDLDRLTADIEAGLIDVVVFAKLDRIGRTMKNIHRWVYDVTDFGVRVATADGRIDSDDQMFGIQLSLLAYMAEVEHALILERTMGGRVKKVSGGGWASGTPPYGYMLDDEGEPIINPDELEVILKAAELLIDQKMSRGQAAEALNELKYRTRTGKLWEGNNLVLRLRLAVRGYVDFSFSGTNEDGEEITTSYRLELPELLPEDRRKALEAALEDMKGTPRTSYSNHLLSGHLISVCGHSRYGSARHEYGDVVYRCSNSATAAEGHTCKQIAGPETEKVVWDEVAKLLADPDAIKGLIDEWLGSIPERAESYRARTQEIDAKLGKLRTTRRKKIAMLVASLDEDDESDMNLISELKEEIAAKEKELREEQERIAEWLEEAEHKEGKASDMHALIDRIGTNATDLDRPAKKSILELLQVRVEIVGEGKSGRAGGSKDPILEWHRENGITIPLTVSDEQWSRVERILAGGRKPKPDDRPCFEMLLEKLRHDKGWHDYDRDERMGGKGWGFFYRLGRRWFAEGMYAKALEELAPYDGVEAPSGYTLPPMKIYGAIDDSTEDVVKTEAGGRTASTKGIRGNASAFEFEIGSTR

SEQ ID NO: 11450 - protein, 656 aa, Unknown
  Description of Unknown: Integrase A18 sequence
  G3DSA:1.10.10.60,SSF46689
MSQDWFTAKELAGLSGMPGTHSAVVRRAKRDGWKSRQRRAQGGGREYAFSSLPLETQAAVLKKFGSSAKAVTKIKPEKATKTTGREELWDLYEAAPNTMKEAAQHRLVVIESIERLQDNGASKTQAIHQAMITYRESRATIYRWLQIANSVEPEDRLAALAPSYKPGRPRAACDERAWDHFKALYLTPEQRTVAHCYELTEQAAKAEGWDWPPLRTINRRVKDIPRHIRVLEREGENALLRLYPSMKRTVRDIHALFWINGDGYQHNVFVRMPNGEIGRPKTWFWQDIYSRQIVGFRTDQSENTDMIRLALGDVIEQYGIPEHVTIDNTRAAANKWLTGGVSNRYRFKVKETDPLGLLPQLGIKVHWTSVVAGKGWGQAKPVERAFGVGGLGDYVDKHPKFEGAYTGPNVTAKPDNYGEKAVDWDVFVKTLRQAIAQWNEKEKRRTEICAGVHSFKQAFDDSYQRNAEHIRRATAAQRRLWLMQAESVLVQRDASVSLTIGNGPNGKNRYGADFLVDYAGERVVVRFDPDNLHNAVHLYRNDGRYLGEAECLHAAGFGDTSAGREWNRENKRRSKASKQAAKAEKRMSVLEATEYLPEPEDSVPEDESNVRRGDFGRVQKAVAGSDIADQPYQSPADKYGFNDAMERHLKKFKGEA

SEQ ID NO: 11451 - protein, 655 aa, Unknown
  Description of Unknown: Integrase A19 sequence
  PF07508,SSF53041,PF13408,PS51737, cd03768,PTHR30461:SF3,PF00239,PS51736,SM00857, G3DSA:3.40.50.1390,PTHR30461
MKTVAIYSRKSRFTGKGDSIENQIEMCKEHIKKFVSPNVEFLIYEDEGFSGGNTNRPAFQRLINDIKYGNINLLICYRLDRISRNVADFSSVLDVLQEYKVDFISIKEQFDTSSPMGRAMIYIASVFAQLERETIAERIKDNMLEMAKKGKWTGGKLPLGFTSKKIAYIDEEGKKRFKVTLEHDSKDLEFVKFLYEKYLELGSLHKLETYTHENNIRSASGKIFEKSTLKIILQNPIYVKADENVFNYFENKGWSVYGEPDGLHSLLSYNKTETAKKDGKLTKRNKDESESLVAVSDVKGFIDSSLWLKVQYQFKKNKNTFPRLGKTHNALLVGKLFCGNCGTRMIIQHGRTSTKTGIKTFYYVCSLKKTSKKKLCSAHNVKTDFLENLVLDSLEKLYYKKDFINDSLKINLKENKDNIKEINTTKKLIELNKNKINSLIEKLSLDFDNILSDILIPQIKKIKIENDVLESKLEELKLKKQESEMNRIEIDLITSLLNKCKNIKELTRTEQKQIIDCLVDSIYYYSNDNGNDKIKIKFINDIDSINTLLSDEEKRQFEKLSFYSHSMSSMNKKTTLNNILSKKEMYLLDMLPNKTIGDKIKKLRISTGLNYNDFARKVKVGTMTIYRWETGDRTPNKIYLKQLIENFNLDKDYFK

SEQ ID NO: 11452 - protein, 655 aa, Unknown
  Description of Unknown: Integrase A20 sequence
  G3DSA:1.10.10.60,SSF46689
MGFSGLPTTERGIRKLVENLAITSGVERRKRQGTKAFEYPISILSSAHQVLLLKKQGKVQVGDQVLELPKKKSEQSYCREALWARWSKNNNAAKEKAQQALRTVQAVFALKNNGIKLMDAYQSVSEEYGVALSTLRRSCAKVKGIDECDWAPALLPKNFESSQTQKPNQFAYITPEAWEFFKADYLSLEQPAMSVCYERLIDTAPSKGWKVPSLKSLGRRLEHEVPVQQRIMLREGEHALHQMFPPQERTVEGLHALEWINGDGYQHNVFVKWFNGEILRPKTWFWQDIYSRKIVGWRCDISENTDSIRLSLMDVCEKFGVPKELTLDNTRAAANKWMTGGVPNRYRFKVKADDPLGIIPMMNIKLHWSSVILGKGHGQAKPIERAFGVGGLEEYIDKHPLCRGAYTGPNPMAKPDNYGSKAIDAEDFLQAIAKGVEMYNAKENRNTEVCKGFMSFNQAFNASYETAAIRKATTDQLQMMMLQAEAVRVSKHGTISLDAGGSLKGRKNRYYSESMMNHVGQKLVARFDPLKLHESIEVYTLNGVRICTAECLDKTGFGDTQAAREHKRKRTQFTKANKIAAQAQTEMDALEVAAMMKPLEEEVLPESKVVEPFRPVSIGNTAAKAIALEDEDEDYEQNFSQSVSNLFEQKFKNKL

SEQ ID NO: 11453 - protein, 655 aa, Unknown
  Description of Unknown: Integrase A21 sequence
  G3DSA:1.10.10.60,SSF46689
MGFSGLPTTERGIRKLVENLAITSGVERRKRQGTKAFEYPISILSSAHQVLLLKKQGKVQVGDQVLELPKKKSEQSYCREALWARWSKNNNAAKEKAQQALRTVQAVFALKNNGIKLMDAYQSVSEEYGVALSTLRRSCAKVKGIDECDWAPALLPKNFESSQTQKPNQFAYITPEAWEFFKADYLSLEQPAMSVCYERLIDTAPSKGWKVPSLKSLGRRLEHEVPVQQRIMLREGEHALHQMFPPQERTVEGLHALEWINGDGYQHNVFVKWFNGEILRPKTWFWQDIYSRKIVGWRCDISENTDSIRLSLMDVCEKFGVPKELTLDNTRAAANKWMTGGVPNRYRFKVKADDPLGIIPMMNIKLHWSSVILGKGHGQAKPIERAFGVGGLEEYIDKHPLCRGAYTGPNPMAKPDNYGSKAIDAEDFLQAIAKGVEMYNAKENRNTEVCKGFMSFNQAFNASYETAAIRKATTDQLQMMMLQAEAVRVSKHGTISLDAGGSLKGRKNRYYSESMMNHVGQKLVARFDPLKLHESIEVYTLNGVRICTAECLDQTGFGDTQAAREHKRKRTQFTKANKIAAQAQTEMDALEVAAMMKPLEEEVLPESKVVEPFRPVSIGNTAAKAIALEDEDEDYEQNFSQSVSNLFEQKFKNKL

SEQ ID NO: 11454 - protein, 637 aa, Unknown
  Description of Unknown: Integrase A22 sequence
  PF07508,G3DSA:1.10.10.2600,SSF53041,PF13408,PS51737,cd00338, PTHR30461:SF3,PF00239,PS51736,SM00857,G3DSA:3.40.50.1390, PTHR30461
MDKDWNGLADLIANLITKYAGVLDLDNLPDPMPVDNNIENKNIFDIAKTQIDKNKSDIIYLIYKSKLFWKYKDIEKYIEVNAMSKEKIKVYLYTRVSTSIQIDGYSLEAQKTRMKAFALYNDYEIVGEYEDAGKSGKSIEGRVQFTRMMEDIKSGKDGVSFVLVFKLSRFARNAADVLSTLQTMQDFGVNLICVEDGIDSSKDAGKLMISVLSAVAEIERENIRVQTMEGRIQKAREGKWNGGFAPYGYQLVDGKLFINEEEAVAIRTIFEQYVNTTIGANGLSKYLENHGIRKIPRQNGKNPLFDAGLIRKILKNPVYKGKIAFGRRTLEKVHGTRNEYKQVEQDEYLIAEGIHEAIISDELWQAAQVKLKSQAKKYEHVNKGKDVRTHLLSGIVKCPICGVGMFGNKCIKKKKDGTKYKDFYYYGCKHRQMIRGHKCTFSKQIREELLDDAVAELIIKIVSNPKFASIMQEKINMKVDTSEIEKEIDNYQKELRKSHSIKFKLIEEIDNLNVDDKHYKRRKQDLDDRLYRMYDKIEELESLLIDAKAKKQTIEAEKLTGDNIYKVLIYFDKLYNVMNDVERRQLITALISEIQIYEEKQPNGQWLKSITFKLPVIDEDLNISLDNDKQVECVVLM

SEQ ID NO: 11455 - protein, 626 aa, Unknown
  Description of Unknown: Integrase A23 sequence
  G3DSA:1.10.10.2600,SSF53041,PS51737,cd00338,PF00239, SM00857,G3DSA:3.40.50.1390,PTHR30461
MSVKVEGMVILAGGYDRQSAERENSSTASPATQRAANRGKAEALAKEYARDGVEVKWLGHFSEAPGTSAFTGVDRPEFNRILDMCRNREMNMIIVHYISRLSREEPLDIIPVVTELLRLGVTIVSVNEGTFRPGEMMDLIHLIMRLQASHDESKNKSVAVSNAKELAKRLGGHTGSTPYGFDTVEEMVPNPEDGGKLVAIRRLVPSAHTWEGAHGSEGAVIRWAWQEIKTHRDTPFKGGGAGSFHPGSLNGLCERLYRDKVPTRGTLVGKKRAGSDWDPGVLKRVLSDPRIAGYQADIAYKVRADGSRGGFSHYKIRRDPVTMEPLTLPGFEPYIPPAEWWELQEWLQGRGRGKGQYRGQSLLSAMDVLYCYGSGQLDPETGYSNGSTMAGNVREGDQAHKSSYACKCPRRVHDGSSCSITMHNLDPYIVGAIFARITAFDPADPDDLEGDTAALMYEAARRWGATHERPELKGQRSELMAQRADAVKALEELYEDKRNGGYRSAMGRRAFLEEEAALTLRMEGAEERLRQLDAADSPVLPIGEWLGDRGSDPTGPGSWWALAPLEDRRAFVRLFVDRIEVIKLPKGVQRPGRVPPIADRVRIHWAKPKVEEETEPETLNGFTAAA

SEQ ID NO: 11456 - protein, 612 aa, Unknown
  Description of Unknown: Integrase A24 sequence
  G3DSA:1.10.10.2600,SSF53041,PS51737, cd00338,PF00239,SM00857,G3DSA:3.40.50.1390,PTHR30461
MTIHAAGYDRQSAERDSGSAASPATQRAANYGKAESLAREVARDGVEFKWLGHYSEAPGTSAFSGVDRPEWNRLVADCRAGKVNMIIVHYISRLTRRDPLEAIPVLTELLHLGVVIVSVNEGQFRAGNLMDLIHLIMRLDASHQESKNKSIAVKDAKELARALGGHVGFIPYGFDTEARMVPNPNDNGKPVQIQVLKHGAQKWDDAPHGSEPEVIRWLWREIKAHRDTPFKGGGAGSFHPGSLNGLVTRLWQNGVPTRGKTTGKKRADSDWDPSVLKRILRDPRIAGFQAEIVYRLKPDGTRGGFSHYRIKRDPVTMRPLELECGPIIPPAEWWELQAWLDGRGRGKGQYRGQSLLSAMDLLYCHGSGATDPETGYGDGSTMSGNLREGEAAKRATYSCKCPRRIHNGSSCSITMHNLDPYIAGRIMARIATVDPGDPDDADTVALLHEATRRWGMLNERPEKAGQRAELLAERADAVRALEELYEDRRAGGYKGAMGRKAFLQEEAAHTLRMEGAEERLRELDAAANPTLPVHEWLGEPGTDPLGPDSWWAKSELADKRAFIKLFIDRIEVIKTPKGAQRPGRVPDIASRVIIHWAKPSEDAQEEPETLAA

SEQ ID NO: 11457 - protein, 605 aa, Unknown
  Description of Unknown: Integrase A25 sequence
  G3DSA:1.10.10.2600,SSF53041,PS51737,cd00338,PF00239,SM00857 ,G3DSA:3.40.50.1390,PTHR30461
MDTYAGAYDRQSRERENSSAASPATQRSANEDKAADLQREVERDGGRFRFVGHFSEAPGTSAFGTAERPEFERILNECRAGRLNMIIVYDVSRFSRLKVMDAIPIVSELLALGVTIVSTQEGVFRQGNVMDLIHLIMRLDASHKESSLKSAKILDTKNLQRELGGYVGGKAPYGFELVSETKEITRNGRMVNVVINKLAHSTTPLTGPFEFEPDVIRWWWREIKTHKHLPFKPGSQAAIHPGSITGLCKRMDADAVPTRGETIGKKTASSAWDPATVMRILRDPRIAGFAAEVIYKKKPDGTPTTKIEGYRIQRDPITLRPVELDCGPIIEPAEWYELQAWLDGRGRGKGLSRGQAILSAMDKLYCECGAVMTSKRGEESIKDSYRCRRRKVVDPSAPGQHEGTCNVSMAALDKFVAERIFNKIRHAEGDEETLALLWEAARRFGKLTEAPEKSGERANLVAERADALNALEELYEDRAAGAYDGPVGRKHFRKQQAALTLRQQGAEERLAELEAAEAPKLPLDQWFPEDADADPTGPKSWWGRASVDDKRVFVGLFVDKIVVTKSTTGRGQGTPIEKRASITWAKPPTDDDEDDAQDGTEDVAA

SEQ ID NO: 11458 - protein, 603 aa, Unknown
  Description of Unknown: Integrase A26 sequence
  PF07508,G3DSA:1.10.10.2600,SSF53041,PF13408,PS51737, cd00338,PTHR30461:SF3,PF00239,PS51736,SM00857, G3DSA:3.40.50.1390,PTHR30461
MARKKNIAAGQNAVIYARYSSHNQREVSIEQQVRECMKHAAELGLHVVGTYEDRAISGKTDKRPNFQRMMRDAEKGKFQAVVAWKSNRIGRNMLQAMVNEAKLEDCGVKVFYAEEDFDDTAAGRFALRNMMNVNQFYSENMAEDITRGLYDNASKCMANGRQPLGYKRGEDGRVVLDDANAAVVREIFTRVAAGDLFVDIARDLNAQGIKTSKGANWNKGSFQSICQNERYRGIYIYGDVRVVDGIPRIVSDDLWYRVQEAMRMKKNPVGTRHRVGAEDYLLTGKLRCGHCGSYMTGVSGTSRNGELHYYYTCQKRRTEHACDKKNIRRDVIEPAVAQAIKMYCLTDDVIEWMADRTVEYWEKHDNDLQIEALEQQLEENKKATSNMLKAIEMGIITEATRTRMVELETEQSRLSVQLNTAKEDVVKIDREQIISYLELLQQGDIHDRDFQMELFKNFLVAVYVYDDNRMKLVFSCMGDQNSVEISLETGEDPPDGGLSPDAKMFVLTPDSSTKKALYFVESMVLFFFSAAKNGGCTALSASFSDVLQAIQCSPRVIGASAGQKVPVQLTISSICPNTSSIWRTSVNWVRARSRLWSGRAVWK

SEQ ID NO: 11459 - protein, 594 aa, Unknown
  Description of Unknown: Integrase A27 sequence
  PF07508,G3DSA:1.10.10.2600,SSF53041,cd00338, PF00239,PS51736,SM00857,G3DSA:3.40.50.1390,PTHR30461
MSPFIAPDVPEHLLDTVRVFLYARQSKGRSDGSDVSTEAQLAAGRALVASRNAQGGARWVVAGEFVDVGRSGWDPNVTRADFERMMGEVRAGEGDVVVVNELSRLTRKGAHDALEIDNELKKHGVRFMSVLEPFLDTSTPIGVAIFALIAALAKQDSDLKAERLKGAKDEIAALGGVHSSSAPFGMRAVRKKVDNLVISVLEPDEDNPDHVELVERMAKMSFEGVSDNAIATTFEKEKIPSPGMAERRATEKRLASVKARRLNGAEKPIMWRAQTVRWILNHPAIGGFAFERVKHGKAHINVIRRDPGGKPLTPHTGILSGSKWLELQEKRSGKNLSDRKPGAEVEPTLLSGWRFLGCRICGGSMGQSQGGRKRNGDLAEGNYMCANPKGHGGLSVKRSELDEFVASKVWARLRTADMEDEHDQAWIAAAAERFALQHDLAGVADERREQQAHLDNVRRSIKDLQADRKPGLYVGREELETWRSTVLQYRSYEAECTTRLAELDEKMNGSTRVPSEWFSGEDPTAEGGIWASWDVYERREFLSFFLDSVMVDRGRHPETKKYIPLKDRVTLKWAELLKEEDEASEATERELAAL

SEQ ID NO: 11460 - protein, 591 aa, Unknown
  Description of Unknown: Integrase A28 sequence
  PF07508,G3DSA:1.10.10.2600,SSF53041,PS51737,cd00338, PF00239,PS51736,SM00857,G3DSA:3.40.50.1390,PTHR30461
MDSDPRVARVGAAVRCYGYAFHSPSCSFQDRVRSRLVVASPVRDRHTHSGVSSYQHATILLHRHTRDGTISDVKNTDLIEDQRTRVALYVRVSLDRREKASVEEQLADLRLTVDRLGWDIVAELADNDVPASRYSKADRPNWMRLLQIIRRGEVDAVGFWELSRSTRRRTEWAEFAELAIDCRLRILVGSSVYRAENPHEMHILDMMATQGVLEVDQLSERIHRSQRANAERGRPAGVPGYGYRRRYDPATGRLIGQEPDPDEAKVIRMIARWLRAGRSLSWIAEELNRRRIPTDKGRVAGEKYVDSRGRERVSLGWVPANLRRVMSRPELKGIRTYKGKEVAQGQWEPILSVEEWAEVQAALNRTKQRSAATGQRYVRDAAARWLLSGIAICDVCGGDIRAVPRSRRGRPAGDDPSRWRYRCNGVYKGAPMGHVTRRADWLDEAVEALLIRELSRPDVVEAFAVQEDPGVIERARAEILKIEEELRQLEEDVAVGLVTPRIASARERALQRRLEQLRKEATPRLVDPLVGQLVGASDVWAWWQEWELDQRRAALRAVTREIRVLPARVPGRNTRPPVEEMVRIVFGPVGG

SEQ ID NO: 11461 - protein, 589 aa, Unknown
  Description of Unknown: Integrase A29 sequence
  PF07508,G3DSA:1.10.10.2600,SSF53041,PS51737,cd00338, PTHR30461:SF3,PF00239,PS51736,SM00857,G3DSA:3.40.50.1390 ,PTHR30461
MRTDTLATATEIAAGRTPMRRAVIYARQSEAREDKSQGSTITQVRETTDLINRTEDLKLTEVYEDIDFSAFNGEERPAFERMLKDARSGLVDVIVVNYLSRLSREEPKDALPVILELQRLGVQFISVYEGVVTDDLIGLVTLLMRLNSSWEESRNKSLAVSGTKRTLKAAGGFVGGVPPFGFRTEVKQLEKLTIRVLVPEPDEVKVIQDVVNRILEHKDVPYVPGKPHPGSITGVCAWLNETGVPTRGIESHAKRGIAAPSWKVTTLRRVLTDPRLMGHQTEPIYETVPKKNGKGTWKKRVGYRSVRDEHGRPVISHKVIVDPIQYHELQKCLEVAKETSAPKGTSLTRGDSLLSALGVLTCDDGHSMCKQAGKTPRETTYICQRKKGVTSTHEGRVGVLRDRLDKYVAERILKRLKALDYHDPDDIALLVEATERFTAKHAAPDVAADKQAVTIERADYKAALAELWDDFDAGVYKGNMGRDRFIKKRDDLEAAIQRCDERLTELEGKVPTLVSPKVWTETKEPGGDMTGEGSWWHSASMTDRRDFVKLFVDKIKVSKAPNYGTEYEPVPIEERVTIEWAKPAEGSAA

SEQ ID NO: 11462 - protein, 589 aa, Unknown
  Description of Unknown: Integrase A30 sequence
  PF07508,G3DSA:1.10.10.2600,SSF53041,PS51737,cd00338, PTHR30461:SF3,PF00239,PS51736,SM00857,G3DSA:3.40.50.1390, PTHR30461
MRTDTLTTATEVAAGRKPMRRAVIYARQSEAREDKSQGSTITQVRETTDLINKTEDLKLTEVYEDIDFSAFNGEERPAFERMLKDARSGLVDVIVVNYLSRLSREEPKDALPVILELQRLGVQFISVYEGVVTDDLIGLVTLLMRLNSSWEESRNKSLAVSGTKRTLKAAGGFVGGVPPFGFRTEVKQLEKLTIRVLVPEPDEVKVIQDVVARILKHKDQPYVPGKPHPGSITGVCAWLNETGVPTRGIESHAKRGIAAPSWKVTTLRRVLTDPRLMGHQTEPIYETVPKKNGKGTWKKRVGYRSVRDEHGRPVISHKPIVDPIQYHELQKCLAVAKEKSAPKGTSLTRGDSLLSALGVLYCEGAHTMCKQAGNTPRETTYMCQRKKGVTSTHEGRVGVLRDRLDKYVAERILKRLKALDYEDPDDIALLVEATERFTAKHAAPDVAADKQAVTVERADYKAALAELWDDFDAGVYKGTMGRDRFIKKRDDLEAAIQRCDERLTELEGKVPTLVSPKVWTETKEPNGDMTGEGSWWHSATMADRRDFVKLFVDKIVVSKAPNHGTQYEPVPIEDRVKIEWAKPAEGSAA

SEQ ID NO: 11463 - protein, 588 aa, Unknown
  Description of Unknown: Integrase A31 sequence
  PF07508,SSF53041,PS51737,cd00338,PTHR30461:SF3, PF00239,SM00857,G3DSA:3.40.50.1390,PTHR30461
MSTLYLPPQYQGPPDAGDLWLGYIRVSTWKEEKISPELQETAIRQWAARTGRRLLEPMIVDLDESGRHFKRRIMGAIERVERREARGIAVWRFSRFGRNRTGNAAALARLEAVGGELESATEPVDARTAVGELQREMIFAFGNFESNRAGEQWRETHEHRIKNQLPATGRRRFGYVWHPRRVPDLDASGGFRLQDERYTLHPDFASIVEEMYERKLDKPVGQGLNTIAHWLNEELQVPTLRGGLWHTSTIARYMDSGFAAGWLRIHDRECRCGYGKDQKISKCQNDRMIYVPGAQPKIIEPEMWEEYQAHRKLTKPIAPRARKATYTLSGMLSHGRCRHHMSHASDSRKTGQVSGYWLVCSRNKNVSKIACPKGINVKREQVEDEVFDWLGREKIADDVDALAPVVENTAPKEDPKQAAQRKRAHLTRELRTVDAAIDRLVEENAMNPQKYPGESFERVKAKFLDRKGKLVKELNDLGEVETMPVREDFKELIVGLLDEWETFQPIERNAMLLQIVRRVACYDIRDDEGKLLSVRTEVHPLWEPDPWAPKKVCRGPFGTRPGWTPADLWNGPDAIEAAIEAALAEADA

SEQ ID NO: 11464 - protein, 588 aa, Unknown
  Description of Unknown: Integrase A32 sequence
  PF07508,G3DSA:1.10.10.2600,SSF53041,PS51737,cd00338, PTHR30461:SF3,PF00239,PS51736,SM00857,G3DSA:3.40.50.1390, PTHR30461
MRTDTLATATEVAAGRTPMRRAVIYARQSEARKDKSEGSTVTQINDGTAFIEKAEDLKLTKVYEDIDFSAFTGDERPDFENMLRDARAGLIDVIVVLYIARLSRQEPKDALPVILELQRLGIQIISVYEGAVTDDLIGLVTLLMRLNAAYEESANKSKAVSGTKRTLKAAGGFVGGVPPFGFRTEPKREGKLTIRVLVPEPDEVKVIQVVVARILKYKDHPYVPGKPHPGSITGVCAWLNETGVPTRGVESHAKREIAAPSWKVTTLRRVLTDPRLMGHQTEPMYETVPKKDGSGTWKKRIGYRSVRDESGRPRIVHDEIIDPVRFYELQKCLSIAKETSAPKGTSLTRGDSVLSALGVLFCEGGHTMCKQAGNSPRDTTYMCQRKKGVTSSHEGRVGVLRDRLDKYVAERILKRLKALDYHDPDDIALLVEATQRYTAKHTSPDVAADKSAVTVERADYKAALAELWDDFDAGVYKGTMGRDRFIKKRDDLETAIARCDERLNELEAKVPTLVSPKVWTETKEPGGDMTGEGSWWHSASMTDRRDFVKLFVDKIVVSKAPNYGTQYEPVPIEERVKIEWAKPAESAA

SEQ ID NO: 11465 - protein, 587 aa, Unknown
  Description of Unknown: Integrase A33 sequence
  PF07508,G3DSA:1.10.10.2600,SSF53041,PF13408,PS51737,cd03768, PTHR30461:SF3,PF00239,PS51736,SM00857,G3DSA:3.40.50.1390, PS00397,PTHR30461
MEGLFLFDGGIMKKNFKMPGSSSETPIRVAIYVRVSTVYQIDKDSLPMMKQDLTSYCKYILNTDDFVIFEDAGYSGKNTDRPAYQKMMSQIRQGLFTHLLVWKIDRISRNLLDFANMYAELKDLGVTFVSKNEQFDTSTAIGEAMLKIILVFAELERNMTSERVTATMINRASNGVWNGGRIPFGYSYDKPTQVFSIDPEENKVYNFLVETYEDTQSIVHTSRRLNEAGYRSRNGNMWSPVAVWTILRNPWYKGVYRYNYYKIPGRKAIKDESEWVIVENHHPASIDPDRFDRIQATLDKNARYRNTPGRKTAQKNVHVFSGLVWCAECGSAFTASPGKLHVSGYRPSKYGCPNVRKTKTCHAKYTSDVVLGEFLLNYILNILNAQKQFAYIHSTDDLQKRLLHGSTFSNVDHVDPDGLASLLNMLEKCSGSDPVLLKRPRSKPKMDPELKRMMADQKKQQRALDRLNDLYLYSDDSISEREYLVRKQQITDRLQEINEAIGMMSQEPWMRTMNDEEFIRQASSFILTQKLADKQYIYYENLAESLDPEILKNFFVSILDSIILRDGRPETVVFRNGLSHTFTYKDS

SEQ ID NO: 11466 - protein, 582 aa, Unknown
  Description of Unknown: Integrase A34 sequence
  PF07508,G3DSA:1.10.10.2600,SSF53041,PF13408,PS51737, cd00338,PTHR30461:SF3,PF00239,PS51736,SM00857, G3DSA:3.40.50.1390,PTHR30461
MAKVEIIKANKELSNRNKKGPIEILRVGAYCRVSTDSEDQISSYKSQVAYYDDLIDNNPNWIKVDIYADEAITGTQVTKRTDFQRLINDCMNHEIDMVITKSISRFARNTLDTLKYVRMLKENNVAVYFEDEKINTLTMDGELLLVVLSSVAQQEVENISANVKKGLKMRMSRGELIGFNGCLGYDYHAEDKSLSVNEEEAETVRYIFNRYIEGAGCFVIARELENLGYKTAGGKTKWFDSSVRGIIKNEKYVGDIRAGKTFTVDPISKRRLKNLGEEDQFYIRDHHEPIISREVFDKAHEILNIRAESYKRYERGKSSRNKFTRQYAFSCIMECGYCGARLTRRHWMGKNGYSKIIWQCVTYARKGHKNCPYCKGVAESLIEEAFVKSYQYLFETNRYLIDDFMLKLEQNLSRKNYEKERDELSRKLSDLSKKRNALIDMKLDSVIDDQAYESKYYDLTDKINLATTKLESIEKSIVDDLDEKERLQEIRKVLSNNQTIETFDRKVFESIVSKVIVGGFDAEGNACPYNVTFILKSGLSDYPYTIGMKPETSEVIPSNNHSPHKETPTCGGYCVAHQIVAK

SEQ ID NO: 11467 - protein, 579 aa, Unknown
  Description of Unknown: Integrase A35 sequence
  PF07508,G3DSA:1.10.10.2600,SSF53041,PF13408,PS51737,cd00338, PTHR30461:SF3,PF00239,PS51736,SM00857,G3DSA:3.40.50.1390, PS00397,PTHR30461
MITVALYARVSSKSQAQNNTIESQIAELKHRIAADKHELLNEYEFKDDGLSGWSLEREGLDALRDKVGEDQIDKIYIHSPDRLSRKSAHQMILLDEFEKAGVEVIFLNHKTENNPESKLLLGMQGLVAEYECTKIMERSRRGKLHRAKKGCVSVIGIAPFGYNRIKHVDREKTKFEINEEEAKIVKQMFMWVGQERISIREVVRRLRDKSIRTRTGKKVWCPIIIWKLLRNPAYKGQAAFGKLKRVERRERNKQKVSICRTDEDSWIYIPVPKIVDEGLFNKVQKQLDENRKRARIQREGGKKKYLLQGLVVCQNCGYAYSGAQCGVEGKKFSYYRCSSTIRITDGREKCTNKLVRTDMLETAIWEKVKNLLKNPEIIKNEYHRRIAENKNDESSDKKFARRENQIKQGIEKLMEDYYSQENVGDKGYISKEEFKQTMKRMRERLRGIEEEKKKVADQKAIEKGMNLIINSIKSLYSSVKSNLEQLDWQTKRGIIKALVERIQIGYDQVEVAFRIEEPAQGGEIFNLQHCTGRHDVYNNVTKNNIIEFSRIIPRVFLCSKRGNLNNKINTLLIYTEGIL

SEQ ID NO: 11468 - protein, 578 aa, Unknown
  Description of Unknown: Integrase A36 sequence
  PF07508,SSF53041,cd00338,PF00239,SM00857, G3DSA:3.40.50.1390,PTHR30461
MTSLYVPPASAALRGELPWVPYIRVSTWKEEKISPELQLTAIQQWAHRTGRTLLDPPIVDLDATGRNFKRKIEQALEHVEDRRAQGIAVWKFSRFGRTRTGNALALARLERVGGELESATEPLDAKTAIGELQREMIFAFGNFESNRAGEQWKETHEHRRKLKLPASGGQRFGYIWHPRRVPDATVPGGVRLQEERYDYHPEYASVLEELYEKKTSGQGFHLLAHWLNEELAVPTMRGARLWQNATVQRILDSGFGAGLLRSHDPECPCGYGIQHRDNCKEGRMLFLPGGQPPVIDLQKWEEYQAHRADIKGRAPRLRKATYPLSGLTAHMLCRGKCQAKSGTNRTHAAYGTPKPGYAIACSKRNDQGRAGCPTGVHVLRTEVEAEVLRWLADNVAEDVDAAPSEHRAEGGNGDAEARANLARARLTAELTKLEKAIDRLVTNHALNPDMYPNDSFGRVRNELVEQRQKVAEQIKKLTTETARMPTKEEIRPLMVGLMEEWETFDNEELNAMLRQVIRRVACEVHGVYRKEKQTIEYEVHPVWEPDPWACEKCGTVMTGLAPRVCRNKECAAFGSDVI

SEQ ID NO: 11469 - protein, 578 aa, Unknown
  Description of Unknown: Integrase A37 sequence
  PF07508,SSF53041,cd00338,PF00239,SM00857,G3DSA:3.40.50.1390, PTHR30461
MTSLYVPPASAALRGELPWVPYIRVSTWKEEKISPELQITAIQQWAHRTGRTLLDPPIVDLDATGRNFKRKIEQALEHVEDRRAQGIAVWKFSRFGRTRTGNALALARLERVGGELESATEPLDAKTAIGELQREMIFAFGNFESNRAGEQWKETHEHRRKLKLPASGGQRFGYIWHPRRVPDATVPGGVRLQEERYDYHPEYASVLEELYEKKTSGQGFHLLAHWLNEELAVPTMRGARLWQNATVQRILDSGFGAGLLRSHDPECPCGYGIQHRDNCKEGRMLFLPGGQPPVIDLQKWEEYQAHRADIKGRAPRLRKATYPLSGLTAHMLCRGKCQAKSGTNRTHAAYGTPKPGYAIACSKRNDQGRAGCPTGVHVLRTEVEAEVLRWLADNVAEDVDAAPSEHRAEGGNGDAEARANLARARLTAELTKLEKAIDRLVTNHALNPDMYPNDSFGRVRNELVEQRQKVAEQIKKLTTETARMPTKEEIRPLMVGLMEEWETFDNEELNAMLRQVIRRVACEVHGVYRKEKQTIEYEVHPVWEPDPWACEKCGTVMTGLAPRVCRNKECAAFGSDVI

SEQ ID NO: 11470 - protein, 578 aa, Unknown
  Description of Unknown: Integrase A38 sequence
  PF07508,G3DSA:1.10.10.2600,SSF53041,PF13408,PS51737,cd00338, PTHR30461:SF3,PF00239,PS51736,SM00857,G3DSA:3.40.50.1390, PS00397,PTHR30461
MGYVTKKAAQRFEEKKAAIYVRVSTQYQVDRASLPVQREELINYAKYALGISDYVIFEDAGYSAKNTDRPDYQQMMARMRTGEFSHLLVWKIDRISRNLLDFSVMYAELKELGVVFVSKNEQFDTSSAMGEAMLKIILIFAELERKTTSERVSAVFVSRANDGIWNGGKVPYGYSYDKESKTFSIAEDEAKIVRLIYSLYESEKSIVRVARIMNERGLKSRAGSDWSPTTVHTILSSPFYSGTYRYNYRDESNAKRFREKGKDEWVLVENHHPAIVSPERQAAVGVILESKRYNKNATYQRKNVHVFAGLLTCGCCGSTMAATTDKVRADGWRPSMYICSRRRKSEDCTNKYVSDVTLGPFVLNFFANLIKASNSFGRTTSIETLEKKLLRGEALSHVDHIERPGLEELYNHLRSGFDEKCFESPTIAATESSADLSERDLLLSEKRRLERALNRLKTIYLYGDDEMASKDFNIERERITKALSEVDSRINELDIANAFDLSLSDEAFMQKASQFILTQQLLDKRYVNYERFIRKIDPKIVKDFLNETVSNFCIKDGLTTSILLKNGIELRFSYKTAE

SEQ ID NO: 11471 - protein, 577 aa, Unknown
  Description of Unknown: Integrase A39 sequence
  PF07508,SSF53041,cd00338,PTHR30461:SF3,PF00239, SM00857,G3DSA:3.40.50.1390,PTHR30461
MTSLYVPPSFTGGPPPDDLPWLGYIRVSTWKEEKISPELQESAIRQWAARTGRRLLDEMIVDLDATGRNFNRKIQQAIEAVENRKARGIAVWRFSRFGRNRTGNAVALARLERAGGDLESATEPLDAKTAVGELQREMIFAFGNFESNRAGEQWRETHEHRRNLKLPATGGHRFGYIWHPRRVPDATAPGGWRLQEEFYEVHPEYASIAEEMYDRKLNLGGFSGIAHWLNDELGVPNLRGNRWKTRGVRRYLDSGFAAGLLRTHDPKCGCGYGTTHFEQCKEGRVLYLPGAQPALITPQEWEAYLDHREDIKSRPPRTRKAVYTLSGISGHGHCRGTAVFRNDRVRSGENKGAPIRGHHLVCSANKNQGKSACEPGLYVLRTEAEEAVLQWLADKVAEDVDALVPEPRKERVPEVDPRARAIHERARIEAEVAKLDAAIGRLVVDNAKDPDKFPEGAFEAARNQLVKEKGEALDDLKKIAAVEAMPTQEKFRPLMVGLIEEWETFSAEERNAMLRQVIWRAVMTTTPAPEKIGRKSLVATFEVHPKWEPDPWKCKRCGKHIPGPGPLVCPDGKCQRA

SEQ ID NO: 11472 - protein, 576 aa, Unknown
  Description of Unknown: Integrase A40 sequence
  G3DSA:1.10.10.60,SSF46689
MIQDTFVRQRAKQLYWQGYPPAEIARLMGINQNTIYAWKKRDEWYETPPVQRVSQSMDARLIQLTDKKDKTGGDFKEIDLLTRQLKKLSAGQPAGAGAGKKPRKRKLKNHFTEEQIVALREKILDSLSWHQRGWYEQRHHRNRMILKSRQIGATWYFAREALLDALRDDVKYPYQRNQIFLSASRRQAHQFRGFIQKMAEEVDVELKGGDKIVLSNGAELHFLGTSAATAQSYTGNLKFDEFFWVSNFTNLRKVAGAMATLKGLTRTYFSTPSGETHEAYPFWTGDRWNEKRPKAQRKAFDVGWKTLNSGLLCPDKTWRQIVTLKDVIDHGWEYTDLEEIQDENSEDEFRNLYMCEFVRDGESAFNLNALIGCGVDGYDEWPDWKPFASRPMGNRPVWIGYDANGSSGNGDSGAICVVVPPLVPGGKFRTVETEQVRGLEFEEQAKVIENFTFKYNVQHVGIDVTGGNGEAVYQIVKKFFPMAMPYTMSMTSKRALVLKMLQLIRAGRWEYDRSERALINAFNSVRKVKTPGGFITYDTDRSRGVSHGDLAWANMLAIINEPLGQESGSGGFAMEF

SEQ ID NO: 11473 - protein, 573 aa, Unknown
  Description of Unknown: Integrase A41 sequence
  PF07508,SSF53041,cd00338,PTHR30461:SF3,PF00239,SM00857 ,G3DSA:3.40.50.1390,PTHR30461
MKLDIPSTFHGSRTFGEPWLGYIRVSTWREEKISPELQQSAIESWAARTGRRIVDWIVDLDATGRNFKRKIMGGIQRVEGREAVGIAVWKFSRFGRNDLGIAINLARLEQAGGDLASATEEVDARTAVGRFNRAILFDLAVFESDRAGEQWKETHAHRRALKLPATGRQRFGYVWYPRRVPDLTAPGGFRLQEERYERHPEFAPVAAELYERKLAGQGFSQLAYWLNDELLIPTTRGNRWGTNTVQRYLDSGFAAGLLRVHDPECRCKLGQDHFSACKENRWLWLPGAQPALIVPEQWKEYGAHREQTRRTPPRARRASYPTSGIMRHGHCRGTAVARSGRDGKGGFVPGHVFVCFNRRNKGKSACEPGLYVRRDEVEAEVLKWLADTVADDIDNAPSLPAQHTAPSTAPNPRARLVEERTRTEAELAKIEGALDRLVTDYAMDPDKYPADTFGRVRDQLLNKKGDIVKHLKSLSEVEVEPTREEFRPLIVGLLQEWDILHTTEKNAMLRRLLRRLVINSRMTVDLKDATTAGGSTRTAPVPSRYRGRFAFGGRAAPAGVGCGAAVRGRPTRS

SEQ ID NO: 11474 - protein, 571 aa, Unknown
  Description of Unknown: Integrase A42 sequence
  PF07508,G3DSA:1.10.10.2600,SSF53041,PS51737,cd00338, PF00239,PS51736,SM00857,G3DSA:3.40.50.1390,PTHR30461
MDTHAGVYARQSKRRANKSEISTADQLKEGVARARSMGATQIATYEDLGISAYSGDERPDFERLVADCRAGRINVLIVYYISRLSRREVADVLPLLQELLTRGVTLVSITEGVFKRDNIMDLIHLIFRLDAAHQESKNKSLAVKNAKDRARALGGHVGSAPFGFETYEVIVQTKGEDGRSRPVAIRRLRPNKEDCKIAVEHIFTPVLKYMDLPFDPTRSEFHPGSVSGVTTAMNQKAIPTRGKKLGKARATAQWERKTIRRILMDPRFIGYEADTIYNSAGTRKISSYRIRRDENGNPVRTSWEPIVDPADWWRIQEWLAGRQAAKGNNRGGSLLSGDGLAWCPCGSTFGQHSFPPVKERNRDRTRVYRCTKGQRQSDVHTGAVMVSMANLDNYVVNRIFSLIGAAEGDEDTLLILLEAQRRYGRLRENPETAGERDRILTERAEVRQGLEDLYDERDAGGFRTDIGRRRFLKSEAALGERLEGLDRRLAELEEAHAPKLPLAMWEAEGRDPMREGGWWSTRSLEDQREFVRLFVKRVTVRPLKRRGVAEPMHERVKIEWHRPTEEVDLVA

SEQ ID NO: 11475 - protein, 571 aa, Unknown
  Description of Unknown: Integrase A43 sequence
  PF07508,SSF53041,PS51737,cd00338,PTHR30461:SF3,PF00239, SM00857,G3DSA:3.40.50.1390,PTHR30461
MTGRRADYQTLVSLGLSEDDMRAMGLWDPAEGDPETLMDLYLRRSTKREDVATLRGHLRDAVRYASQTDRTIRHVWFEQLSASKTYVRRREFEKATQAVLDGMSKTLGVWKTDRFDRRGMGAVGRLLDEFDTRRAGLVSITEGLDSRQRGARMLFALLSERAREEAKDIALRVKAGHDAHKEENRRGTGKPPFGTLSPRTADGKPSGKVEPNPDEFETARRLLDLLLGTAEGLPDEWADKEGQPLTTKDVAHILNVEKRTTRGGHTWSPTAVSKLAQSPLFYGMVPVRERKTDEHGNPLGEWKGYGEPATDEKGNVRMCGTGVGKPAEFWRVRELIRSRTNEDFGKGQPGAKYLGTGVYRCGRLRDKGKGKEEHCLASMSHRGGRYRCQDRQTRGAVVCEGCTTLCERIDAAVGNAWLAHVAALEPGDPVLLEIGRRWLAFSNPEDQAARENTLKSLDSAKARLKKLEDDYYVFGRVSDERYEELSEKLSTTIQNMTQQLEELDHGQDYSVFSDGETLRETWMETDVPTRRMLLRCALGKKGVIVLPAKRQGDPTPIEDRLIFDWLSGVPA

SEQ ID NO: 11476 - protein, 570 aa, Unknown
  Description of Unknown: Integrase A44 sequence
  PF07508,SSF53041,PS51737,cd00338,PTHR30461:SF3, PF00239,SM00857,G3DSA:3.40.50.1390,PTHR30461
MTLPDIPPTFHGSAHAGEPWIGYIRVSTWKEEKISPELQRTAIEQWAARTGRRIVDWIVDLDESGRHFKRKIMGGIERIERREVRGIAVWRYSRFGRNRTGNAANLARVEAAGGLLESATEPVDASTAIGRFARGMYMEFAAFESDRAGEQWKETHEHRLAAKLPATGRGRFGYIWHRRAVPDATAPNGIRLQQERYTLHPDYASVVEELYERKTEEYEGFNALAHWLNEELVIPTLRGKAWGVSSVSRYLDSGFAAGLLRTHDKTCPCGYSSGKRSGCPDNRFIYLPGAQPRIITPDQWEAYKEHRKTTKATPPRARKATYPLTGLLRHGYCRHHMSAASYTYKGEQMRGRNLVCSRNKHTSKVECPKGINTRRDYVEREVKKWLEREAAPGIDASPRLPVQRTEPTEDPRARAQRERARLQVDLTKVEKALDRLVMDNALNPEKYPADSFARVRDQLAGQRGSIMNAMNELGEVEATPTREEFVPLIANLIEAWDLMEPIEKNALLRQIVRRIVCHDIRTEGSRWIEVRVEVHPVYEPDPWAPIAGEVVARKDEPAEVDDRADGETLF

SEQ ID NO: 11477 - protein, 570 aa, Unknown
  Description of Unknown: Integrase A45 sequence
  PF07508,SSF53041,PS51737,cd00338,PTHR30461:SF3,PF00239,SM00857, G3DSA:3.40.50.1390,PTHR30461
MTLPDIPATFHGSPLAGEPWIGYIRVSTWKEEKISPELQRTAIEQWAERTGRRIVDWIIDLDESGRHFKRKIMGGIERIERREVRGIAVWRYSRFGRNRTGNAANLARVEAVGGLLESATEPIDASTAIGRLARGMYMEFAAFESDRAGEQWKETHEHRLAAKLPATGRPRFGYIWHRRRIPDPTAPDGIRLQQERYALHHDHASVVEELYERKIEEHDGFNSLVHWLNEELVIPTMRGKAWGVSSLSRYLDSGFAAGLLRTHDKTCPCGYSSGTKSRCPDNRFIYLPGAQPRIITPDQWEAYKEHRKLTKATPPRARKATYPLTGLVRHGYCRFHVSAASYTSHGEQLRGHLLVCSRHKSANRLDCPKGLSVKREYVEGEVLTWLKREAAPGIDATPSVPAQRAELVEDPRARAQRERARLQVELSKVEGALDRLVMDNAMNPEKYPADSFARVRDQFAGQRGTIIKAMAELGEAEATPTREEFVPLMLGLVAAWEHMQPIEKNALLRQLVRRVVCHDIRREGSRWIETRVEVHPVFEPDPWAPIMGEVVARRDEPAEVDDRADGETLF

SEQ ID NO: 11478 - protein, 563 aa, Unknown
  Description of Unknown: Integrase A46 sequence
  PF07508,G3DSA:1.10.10.2600,SSF53041,PF13408,PS51737, cd03768,PTHR30461:SF3,PF00239,PS51736,SM00857, G3DSA:3.40.50.1390,PS00397,PTHR30461
MKKSAIYIRVSTHHQIDKDSLPLQKNDLINYSKFILSINDYEIFEDAGYSGKNTDRPAFQEMMNRIRNGEFTHLLVWKIDRISRNLLDFCDMYEEIKKNNCIFVSKNEQFDTSSAMGEAMLKIILVFAELERKLTGERVTSVMLDRATKGLWNGAPVPLGYKWCEETKFPIIDENERLTVEFIYNKYLETESTSAVRNALNAESIKTKRGGAWTTKTISDIIRNPFYKGTYRYNYRESARGKKKNEKEWIIVDDNHSSIINKELWSKCNTIMDENAERNSARFRSNSKTHVFARLLECGECNRNLYAKQDKPSLDGFIPSLYICSGRYNGLGCSQKTISDKIIGTFILNYVSNIIRLHKTLKLSQLKVDELEKLLLKGKPFENVVGIKNKSLNELYFALTQYTKGDKRIFMPKENKILEIEDDSSVEKLLRERNKFERALSRLEDLFLFDENEMSEKDYILKKNKIKEKLNEINKKMNELNSIKNIGSVYELDFLISSSKNAILFEELTQSKSIDYNNLIKETDRKVIKSFINAIITKIVVKDKNILSVKFKNGLVTEFIYNN

SEQ ID NO: 11479 - protein, 560 aa, Unknown
  Description of Unknown: Integrase A47 sequence
  PF07508,G3DSA:1.10.10.2600,SSF53041,PS51737,cd00338,PF00239 ,SM00857,G3DSA:3.40.50.1390,PTHR30461
MAKKPKAKVYSYLRFSDPKQAAGSSADRQMEYAARWATEHDMQLDATLTLRDEGLSAFHQRHIKQGALGVFLRAIEDGRIQPGSVLIVEGLDRLSRAEPIQAQAQLAQIINAGITVVTASDGREYNRERLKAQPMDLVYSLLVMIRAHEESDTKSKRVKAAIRRQCEGWVAGTWRGIIRNGKDPHWVRLGEHGKFEHVPERVLAVRTMIDLFLEGHGAIEITRRLTEQNLYVSNAGNYSVHMYRIVRNQALIGEKRISVDGEEFRLDGYYPPILTREEFAELQQTMSERGRRKGKGEIPNIITGLSITVCGYCGRAMTTQNSKARAPKGKSVVRRLSCPMNSFNEGCPIGGSCESEIVERALMRYCSDQFNLSRLLEGDDGTARRTAQLAVARQRASDIEAQIQRVTDALLSDDGKAPAAFTRRARELETQLEEQRREIEALEHQIAASSAHGIPAAAEAWAQLVDGVLALDYDARMKARQLVADTFRKIVVYQRGFAPIDDAAADRWKRSGTIGLMLVTKRGGMRLLNVDRRTGCWQAEDDLDPSLIPSDGLPMLPLDA

SEQ ID NO: 11480 - protein, 551 aa, Unknown
  Description of Unknown: Integrase A48 sequence
  PF07508,SSF53041,PF13408,PS51737,cd00338, PTHR30461:SF3,PF00239,PS51736,SM00857,G3DSA:3.40.50.1390, PTHR30461
MYHMPSKRALLVIRLSRVTDATTSPERQLADCQALCAQRGYEVAGVAEDLDVSGSIDPFDRKKRPNLAHWLHDRHNEFDVVVAYRVDRLTRSVRYLQKLVNWAEDHDKLVVSATEPHFDTTSPFAAVLIALLGTVAQMELEAIAERNRSAARHNIRAGKYRGSKPPWGYMPQRDDEGVWRLVQDPDQVKIIHEVVQRVLEGEPTQRIANDLTLRGIPTPKDAFAISQGRKPEGLAWNMTTLKRSLKSEAMLGRVTNAAGKSIRKEDGAPVIRSTPILTREVFDRVQVELETRARSGGPTTRSTALLLRVIYCAICGMPAYQYSGGTSGKASRYRCSSSPRSNTDPNIKKCGNRTFAVAEADAVVVKTLLGLLGDSERKEKIWESGCDHSAELADLDATLADLTDQLGTGVFARGTPQRARLDARIAELAARQAALSAEAVRPAGWTWHGTGERFSDWWERQDVTAKNVWLRSMNIQLTFDRERFYLDLGDIVQLTEQFDPQGPVAQWQGLLAAMQAEGIAGVEIRGGEAQATPRDDDMRGALGMTGAPLAD

SEQ ID NO: 11481 - protein, 551 aa, Unknown
  Description of Unknown: Integrase A49 sequence
  PF07508,G3DSA:1.10.10.2600,SSF53041,PF13408,PS51737,cd03768, PTHR30461:SF3,PF00239,PS51736,SM00857,G3DSA:3.40.50.1390, PS00397,PTHR30461
MKKMKIKIAIYVRVSTHHQVDKDSLPLQRSDLINYCKFIIGSNDYEIFEDAGYSGKNTSRPKYQEMMNRIKEGEFSHLLVWKIDRISRNLLDFCDMYENLKKYNCTFISKNEQFDTSSAMGEAMLKIILVFAELERKLTAERVKAIMLDRASKGMWNGAPIPLGYSWDETIKFPVPDPNESKTVDFIFNQYKKVKSTSIVRNILNSNGIKTKKGGTWTTKTITDIIRNPFYIGTYRYNFREPARGKKKDESEWIVLENNHEGIISKELWQECNDIMDRNASRSNAQFRDNTKTHIFSRLLECGECHGSLTAKQDKPHLDGYIPSIYCCSSRYNNLGCNQKTVSEKIIGNFTFNLISEIIKSSKNESISNEYELEKALLKNESLKNVIAIDGTYELYNNIFNDNDNFKIKKEEESISFEVEGLKKEKEKYKRALERLENLYLFDDESMSKKDYLIKKNRLKDKLIEIGYKLSSYKINTNDDINFIKLAANAILNDTLAKDENIDIKNFITEVGRDVIKEFTNAIISKITTKDKRVTSIKFKNGINLNFIYNT

SEQ ID NO: 11482 - protein, 551 aa, Unknown
  Description of Unknown: Integrase A50 sequence
  PF07508,SSF53041,PS51737,cd00338,PTHR30461:SF3, PF00239,SM00857,G3DSA:3.40.50.1390,PTHR30461
MSATAQVSATSPTPFMAGMTTPLRGLSVLRLSVLTDETTSPERQRAANHGAGSALGIDFSDREAVDLGVSASKTTPFERPELGAWLRRPDDFDALVFWRFDRAVRSMDDMHELSKWARDHRKMIVIAEGPGGRLVLDFRNPLDPMAQLMVTLFAFAAQFEAQSIRERVLGAQAAMRVMPLRWRGSKPPYGYMPAPLEGGGVTLVQDKKAVAVIERVIKELMKGKTLSAICAELNAAGIPSPRDHWSLIQKRKKGGRVGNSVGEKITKESFKWRHGALKKLLTSESLLGWKMTESGPVRDSEGAPVMATREPILTREEFDAVGALLKDENADGTKWFRSDSVAMLTRVILCDACGGNMSVGRPSANSKGISVVYKCGSWGRGEKCPEPASVKQEWADEYVRDRFLSAVGGMRQTETRHIPGYDPQPEIDATTAEYEAHMAEQGQQKSKAAQEAWKRRATALDARLAELETREARPARVEVIELDKTVADAWRDTDDKGRRDMLRDAGVTIRIKRAKRGRTFKLNEDRVIWHMDNEFFAQGAEELEGIARAEA

SEQ ID NO: 11483 - protein, 550 aa, Unknown
  Description of Unknown: Integrase A51 sequence
  PF07508,G3DSA:1.10.10.2600,SSF53041,PF13408,PS51737,cd00338, PTHR30461:SF3,PF00239,PS51736,SM00857,G3DSA:3.40.50.1390,PS00397 ,PTHR30461
MITVALYARVSSKSQAQNNTIESQIAELKHRIAADKHELLNEYEFKDDGLSGWSLEREGLDALRDKVGEDQIDKIYIHSPDRLSRKSAHQMILLDEFEKAGVEVIFLNHKTENNPESKLLLGMQGLVAEYECTKIMERSRRGKLHRAKKGCVSVIGIAPFGYNRIKHVDREKTKFEINEEEAKIVKQMFMWVGQERISIREVVRRLRDKSIRTRTGKKVWCPIIIWKLLRNPAYKGQAAFGKLKRVERRERNKQKVSICRTDEDSWIYIPVPKIVDEGLFNKVQKQLDENRKRARIQREGGKKKYLLQGLVVCQNCGYAYSGAQCGVEGKKFSYYRCSSTIRITDGREKCTNKLVRTDMLETAIWEKVKNLLKNPEIIKNEYHRRIAENKNDESSDKKFARRENQIKQGIEKLMEDYYSQENVGDKGYISKEEFKQTMKRMRERLRGIEEEKKKVADQKAIEKGMNLIINSIKSLYSSVKSNLEQLDWQTKRGIIKALVERIQIGYDQVEVAFRIEEPAQGGEIFNLQHCTGRHNSEAIVFAFANLQIKR

SEQ ID NO: 11484 - protein, 548 aa, Unknown
  Description of Unknown: Integrase A52 sequence
  PF07508,SSF53041,PF13408,PS51737,cd00338, PF00239,SM00857,G3DSA:3.40.50.1390,PTHR30461
MQEKPKVYSYLRFSDPKQATGSSADRQLEYAHRWGAEHGMQLDASLTLRDEGLSAYHQRHVTRGALGTFLRAVEDGRVPTGSVLIVEGLDRLSRAEPIQAQAQLSQIVGAGITVVTASDGREYNREKLRAQPMDLVYSLLVMIRAHEESDTKSKRVKAAIRRQCQGWIAGTHRKPIRVGRDPQWVREVDGRFELIPERAEAMRLAVSMYLDGHGAHSIVRHLASRGLVISDKSKTNSSHLYKILVNRCLVGEKTVEIDGEEFRLEGYYPAVLKGPEFDKMRAIGDLRMRQKGKGEIPGIITGIGICVCGYCGKPMTAQNLNKHSKITGRRLNGFRRIMCNSFRSTEADCPMPGSVSARPIERAITHYCADQMNLTSLIEGDSGATAISAKLVRARQRANEVEAQVERLTDMLIDDKDAAPAAVLKRIRDLEAQGERYRNDIEALERELATAARTPPGAAQAWADLVKGIEELDYDTRMKGRRLVSETFSRIVVYTRGFTPRDDDRSIGLLLVAKRGTTRMLNVHRKTGEWQAAEELASHDIPLPQAAE

SEQ ID NO: 11485 - protein, 548 aa, Unknown
  Description of Unknown: Integrase A53 sequence
  PF07508,SSF53041,PF13408,PS51737,cd00338,PTHR30461:SF3,PF00239, PS51736,SM00857,G3DSA:3.40.50.1390,PTHR30461
MPSKRALLVIRLSRVTDATTSPERQLADCQALCAQRGYEVAGVAEDLDVSGSIDPFDRKKRPNLAHWLHDRHNEFDVVVAYRVDRLTRSVRYLQKLVNWAEDHDKLVVSATEPHFDTTSPFAAVLIALLGTVAQMELEAIAERNRSAARHNIRAGKYRGSKPPWGYMPQRDDEGVWRLVQDPDQVKIIHEVVQRVLEGEPTQRIANDLTLRGIPTPKDAFAISQGRKPEGLAWNMTTLKRSLKSEAMLGRVTNAAGKSIRKEDGAPVIRSTPILTREVFDRVQVELETRARSGGPTTRSTALLLRVIYCAICGMPAYQYSGGTSGKASRYRCSSSPRSNTDPNIKKCGNRTFAVAEADAVVVKTLLGLLGDSERKEKIWESGCDHSAELADLDATLADLTDQLGTGVFARGTPQRARLDARIAELAARQAALSAEAVRPAGWTWHGTGERFSDWWERQDVTAKNVWLRSMNIQLTFDRERFYLDLGDIVQLTEQFDPQGPVAQWQGLLAAMQAEGIAGVEIRGGEAQATPRDDDMRGALGMTGAPLVD

SEQ ID NO: 11486 - protein, 547 aa, Unknown
  Description of Unknown: Integrase A54 sequence
  G3DSA:1.10.10.2600,SSF53041,PF13408,PS51737,cd00338, PTHR30461:SF3,PF00239,SM00857,G3DSA:3.40.50.1390,PTHR30461
MWACSHLRADGTTPTSSSTLLTMSARDYDIEAEWTPADLALLKELEEAEALLPADAPRALLSVRLSVFTDDTTSPVRQELDLRQLAREKGHRVVGLASDLNVSATKVPPWKRKSLGDWLNNRAPEFDALLFWKIDRFIRNLNDLNVMIRWSETYSKNLISKNDPIDLTTTMGKMMVSLLGGVAEIEAANTKTRVESLWDYTKTQGEWHVGKPPFGYKTARDEAGKVVLVEDPLAVETLHTARELVMSGMSTTAAAKVLKERGLISSTTATLTRRLRNPGVLGLRVEEDKDGGIRRSKLILGRDGQPIRIADPIFTEEQFEELQAVLDKRGKRQPHRQPGGATSFLGVLKCAVCETNMINHYTRNRHGDYAYLRCQGCKSGGYGAPNPQEVYDRLVEQVLAVLGDFPVEMREYARGEEKRKELKRLEESIAYYMKELEPGGRFTKTRFTQDQAEGTLDKLIAELEAIDPESAKDRWVYVAGGKTFREHWEEGGIDAMSADLIRAGIMCQVTRTKVPKVRAPQVHLKLMIPKDVRTRLVIRPDDFGQTF

SEQ ID NO: 11487 - protein, 547 aa, Unknown
  Description of Unknown: Integrase A55 sequence
  G3DSA:1.10.10.2600,SSF53041,PF13408,PS51737,cd00338,PTHR30461:SF3 ,PF00239,SM00857,G3DSA:3.40.50.1390,PTHR30461
MWACSHLRADGTTPTSSSTLLTMSARDYDIEAEWTPADLALLKELEEAEALLPADAPRALLSVRLSVFTDDTTSPVRQELDLRQLAREKGHRVVGLASDLNVSATKVPPWKRKSLGDWLNNRAPEFDALLFWKIDRFIRNLNDLNVMIRWSETYSKNLISKNDPIDLTTTMGKMMVSLLGGVAEIEAANTKTRVESLWDYTKTQGEWHVGKPPFGYKTARDEAGKVVLIEDPLAVETLHTARELVMSGMSTTAAAKVLKERGLISSTTATLTRRLRNPGVLGLRVEEDKDGGIRRSKLILGRDGQPIRIADPIFTEEQFEELQAVLDKRGKRQPHRQPGGATSFLGVLKCAECGTNMINHFTRNRHGDYAYLRCQGCKSGGYGAPNPQEVYDRLVEQVLTVLGDFPVEMREYARGEEKRKELKRLEESIAYYMKELEPGGRFTKTRFTQDQAEGTLDKLIAELEAIDPESAKDRWVYVAGGKTFREHWEEGGIDAMSADLIRAGIMCQVTRTKVPKVRAPQVHLKLMIPKDVRTRLVIRPDDFGQTF

SEQ ID NO: 11488 - protein, 547 aa, Unknown
  Description of Unknown: Integrase A56 sequence
  PF07508,SSF53041,cd00338,PTHR30461:SF3,PF00239, SM00857,G3DSA:3.40.50.1390,PTHR30461
MKRDLPSTFRGSRTPGEPWLGYIRVSTWREEKISPELQQSAIESWAARTGRRIVDWIVDLDATGRNFKRKIMGGIQRVEGREAVGIAVWKFSRFGRNDLGIAINLARLEQAGGDLASATEEVDARTAVGRFNRAILFDLAVFESDRAGEQWKETHAHRRALKLPATGRQRFGYVWHPRRVPDLTAPGGFRLQEERYERHPEFAPVAAELYERKLAGQGFSQLAYWLNDELLIPTTRGNRWGTNTVQRYLDSGFAAGLLRVHDPECRCKLGQDHFSACKENRWLWLPGAQPALIVPEQWKEYGAHREQTRKTPPRARRASYPTSGIMRHGHCRGTAVARSGRDGKGGFVPGHVFVCFNRRNKGKSACEPGLYVRRDEVEAEVLKWLADTVADDIDNAPALPAQRTAPGTAPDPRARLVEERTRTEAELAKIEGALDRLVTDYALDPDKYPADTFGRVRDQLLGKKGDIIKHLKSLSEVEVAPTREEFRPLIVGLLQEWDILHTTEKNAILRRLLRRLVIHNRKSDQGAQWSVVRSFEFHPVWEPDPWS

SEQ ID NO: 11489 - protein, 547 aa, Unknown
  Description of Unknown: Integrase A57 sequence
  PF07508,SSF53041,cd00338,PTHR30461:SF3,PF00239,SM00857, G3DSA:3.40.50.1390,PTHR30461
MKLDIPSTFHGSRTFGEPWLGYIRVSTWREEKISPELQQSAIESWAARTGRRIVDWIVDLDATGRNFKRKIMGGIQRVEGREAVGIAVWKFSRFGRNDLGIAINLARLEQAGGDLASATEEVDARTAVGRFNRAILFDLAVFESDRAGEQWKETHAHRRALKLPATGRQRFGYVWYPRRVPDLTAPGGFRLQEERYERHPEFAPVAAELYERKLAGQGFSQLAYWLNDELLIPTTRGNRWGTNTVQRYLDSGFAAGLLRVHDPECRCKLGQDHFSACKENRWLWLPGAQPALILPEQWKEYGAHREQTRRTPPRARRASYPTSGIMRHGHCRGTAVARSGRDGKGGFVPGHVFVCFNRRNKGKSACEPGLYVRRDEVEAEVLKWLADTVADDIDNAPSLPAQHTAPSTAPNPRARLVEERTRTEAELAKIEGALDRLVTDYAMDPDKYPADTFGRVRDQLLNKKGDIVKHLKSLSEVEVEPTREEFRPLIVGLLQEWDILHTTEKNAMLRRLLRRLVINSRKSDQGAQWSLVRTYEFHPVWEPDPWS

SEQ ID NO: 11490 - protein, 547 aa, Unknown
  Description of Unknown: Integrase A58 sequence
  G3DSA:1.10.10.2600,SSF53041,PF13408,PS51737, cd00338,PTHR30461:SF3,PF00239,SM00857, G3DSA:3.40.50.1390,PTHR30461
MWACSHLRADGTTPTSSSTLLTMSARDYDIEAEWTPADLALLKELEEAEALLPADAPRALLSVRLSVFTDDTTSPVRQELDLRQLAREKGHRVVGLASDLNVSATKVPPWKRKSLGDWLNNRAPEFDALLFWKIDRFIRNLNDLNVMIRWSETYSKNLISKNDPIDLTTTMGKMMVSLLGGVAEIEAANTKTRVESLWDYTKTQGEWHVGKPPFGYKTARDEAGKVVLVEDPLAVETLHTARELVMTGMSTTAAAKVLKERGLISSTTATLTRRLRNPGVLGLRVEEDKDGGIRRSKLILGRDGKPIRIADPIFTEEQFEELQAVLDKRGKRQPHRQPGGATSFLGVLKCAECGTNMINHFTRNRHGDYAYLRCQGCKSGGYGAPNPQEVYDRLVEQVLAVLGDFPVEMREYARGEEKRKELKRLEESIAYYMKELEPGGRFTKTRFTQDQAEGTLDKLIAELEAIDPESAKDRWVYVAGGKTFREHWEEGGIDAMSADLIRAGIMCQVTRTKVPKVRAPQVHLKLMIPKDVRTRLVIRPDDFGQTF

SEQ ID NO: 11491 - protein, 547 aa, Unknown
  Description of Unknown: Integrase A59 sequence
  G3DSA:1.10.10.2600,SSF53041,PF13408,PS51737,cd00338, PTHR30461:SF3,PF00239,SM00857,G3DSA:3.40.50.1390,PTHR30461
MWACSHLGADGTTPTSSSNLLTMSARDYDIEAEWTPADLALLKELEEAEALLPADAPRALLSVRLSVFTDDTTSPVRQELDLRQLAREKGHRVVGLASDLNVSATKVPPWKRKSLGDWLNNRAPEFDALLFWKIDRFIRNLNDLNVMIRWSETYSKNLISKNDPIDLTTTMGKMMVSLLGGVAEIEAANTKTRVESLWDYTKTQGEWHVGKPPFGYKTGRDETGKVVLVEDPLAVETLHTARELVMSGMSTTAAAKELKERGLISSTTATLTRRLRNPGILGLRVEEDKDGGIRRSKLILGRDGQPIRIADPIFTEEQFEELQAVLDKRGKRQPHRQPGGATSFLGVLKCAECGTNMINHYTRNRHGDYAYLRCQGCKSGGYGAPNPQEVYDRLVEQVLAVLGDFPVEMREYARGEEKRKELKRLEESIAYYMKELEPGGRFTKTRFTQDQAEGTLDKLIAELEAIDPESAKDRWVYVAGGKTFREHWEEGGIDAMSADLIRAGIMCQVTRTKVPKVRAPQVHLKLMIPKDVRTRLVIRPDDFGQTF

SEQ ID NO: 11492 - protein, 547 aa, Unknown
  Description of Unknown: Integrase A60 sequence
  G3DSA:1.10.10.2600,SSF53041,PF13408,PS51737,cd00338,PTHR30461:SF3 ,PF00239,SM00857,G3DSA:3.40.50.1390,PTHR30461
MWACSHLGADGTTPTSSSTLLTMSARDYDIEAEWTPADLALLKELEEAEALLPADAPRALLSVRLSVFTDDTTSPVRQELDLRQLAREKGHRVVGLASDLNVSATKVPPWKRKSLGDWLNNRAPEFDALLFWKIDRFIRNLNDLNVMIRWSETYSKNLISKNDPIDLTTTMGKMMVSLLGGVAEIEAANTKTRVESLWDYTKTQGEWHVGKPPFGYKTGRDAAGKVVLVEDPPAVETLHTARELVMSGMSTTAAAKELKERGLISSTTATLTRRLRNPGILGLRVEEDKDGGIRRSKLILGRDGQPIRIADPIFTEEQFEELQAVLDKRGKRQPHRQPGGATSFLGVLKCAECGTNMINHFTRNRHGDYAYLRCQGCKSGGYGAPNPQEVYDRLVEQVLAVLGDFPVEMREYARGEEKRKELKRLEESIAYYMKELEPGGRFTKTRFTQDQAEGTLDKLIAELEAIDPEAAKDRWVYVAGGKTFREHWEEGGIDAMSADLIRAGIQCQVTRTKVPKVRAPQVHLKLMIPKDVRTRLVIRPDDFGQTF

SEQ ID NO: 11493 - protein, 545 aa, Unknown
  Description of Unknown: Integrase A61 sequence
  PF07508,G3DSA:1.10.10.2600,SSF53041,PS51737,cd00338, PTHR30461:SF3,PF00239,PS51736,SM00857,G3DSA:3.40.50.1390, PTHR30461
MELKNIVNSYNITNILGYLRRSRQDMEREKRTGEDTLTEQKELMNKILTAIEIPYELKMEIGSGESIDGRPVFKECLKDLEEGKYQAIAVKEITRLSRGSYSDAGQIVNLLQSKRLIIITPYKVYDPRNPVDMRQIRFELFMAREEFEMTRERMTGAKYTYAAQGKWISGLAPYGYQLNKKTSKLDPVEDEAKVVQLIFNIFLNGLNGKDYSYTAIASHLTNLQIPTPSGKKRWNQYTIKAILQNEVYIGTVKYKVREKTKDGKRTIRPEKEQIVVQDAHAPIIDKEQFQQSQVKIANKVPLLPNKDEFELSELAGVCTCSKCGEPLSKYESKRIRKNKDGTESVYHVKSLTCKKNKCTYVRYNDVENAILDYLSSLNDLNDSTLTKHINSMLSKYEDDNSNMKTKKQMSEHLSQKEKELKNKENFIFDKYESGIYSDELFLKRKAALDEEFKELQNAKNELNGLQDTQSEIDSNTVRNNINKIIDQYHIESSSEKKNELLRMVLKDVIVNMTQKRKGPIPAQFEITPILRFNFIFDLTATNSFH

SEQ ID NO: 11494 - protein, 543 aa, Unknown
  Description of Unknown: Integrase A62 sequence
  PF07508,G3DSA:1.10.10.2600,SSF53041,PF13408,PS51737, cd00338,PTHR30461:SF3,PF00239,PS51736,SM00857,G3DSA:3.40.50.1390 ,PTHR30461
MQNNRAAIYARFSTDLQNERSVDDQIAVCREFANRNGLVVAGEYYDKARSGASIFGRDGLLGLMEDARTGKFKTVIVEALDRLSRDQEDLAGLHKRLAFAGVEILAIHDGKTDAIQVGIRGLVSTLFLADLKNKIRRGMTGVIRDGRHAGGKAYGYQPTPGQPGVMQIFEPEAEIVRRIYRETIEGKMSREIAIGLNQDKITPPRGTQWNASTINGSAQRGYGIIRNPLYAGEIVWNRVHMVRDPETGKRISRPNPESEHKRTPAPHLAIVDRETYDQALSMLEGKSRRGQGGSNTRRPKRLLSGITRCGHCGGGMSIHDHHGKTVRIRCSRSTQSGVCGNNKRYRLDKIEKTVVTGLRDQLNHPEVLVEYVKAYREERRLDADTAVRERASVERRVADLDGQLDRLMKAMTRGILPIEAVEAQYAPLKAEKEELEKKLVDIPAVPVVELHPAAITRYKNSIDALANRLASLDDITDSDVHKAFRDLVDHVTIIDREDGGVEVEIVGQLAALVGKQAEMLGGRVVAGERFEQSPQIILGRFVA

SEQ ID NO: 11495 - protein, 542 aa, Unknown
  Description of Unknown: Integrase A63 sequence
  G3DSA:1.10.10.2600,SSF53041,PF13408,PS51737,cd00338, PTHR30461:SF3,PF00239,SM00857,G3DSA:3.40.50.1390,PTHR30461
MSEEISAPAELPPNTHQARYPGAMTQTQTPDTFRAKRRPRASLYVRLSKQADDSNLSLDGMVEDVRALCEKEGLEEVALHVDDGKSGGFRDRDEFGLWLDDARQGRCEVLVPYHTDRLTREGLNVAAQILDVVEGKDPHTGRQSHKPVRLLDCFGLDSLHGDAFRFRFVIQAEVGRSERERIRERQRARHKRLRRAGRWAGGTPPFGFRVVPNPELGDDGKPKGFVLEVVPEEAKHIKEAAYAILRPVEPDNLTRVVRRWNHQGIKPRRAAAWSRVTLRQVLTGDIIMGLATEKGKPLRDADGELQFIHPEILPPAYVHALRKALAVKKPDARKGGRRPARLLSGLLTCHACGAVLQVARRSPNAKAPKQAEVTYRCPTKANGGICAQPVSVSAVAIEEHLETRYLATVGDMPYYIERTTVTGLDELAVVDSEIKETLSAMATSADADTFARLQRLQARRQELEDAEPEKRTTLVPTGFTMREHWRDALVDDRRDLLAQAFECMVLGPGQRGPRGFNPARLVAPWAEEPDAGEDYGGETAAE

SEQ ID NO: 11496 - protein, 540 aa, Unknown
  Description of Unknown: Integrase A64 sequence
  PF07508,G3DSA:1.10.10.2600,SSF53041,PS51737,cd00338, PTHR30461:SF3,PF00239,SM00857,G3DSA:3.40.50.1390,PTHR30461
MLTMSSRKRQPAAERAAYNIDAEWTEADLALLQELEEAEARLPLDAPRALLSVRLSVFTDDTTSPVRQELDLRQLAREKGLRVIGVASDLNVSATKVPPWKRKSLGDWLSNRAPEFDALLFWKIDRFIRNLNDLNVMVRWSETYSKNLISKNDPIDLTTTMGKMMVQLLGGVAEIEAANTKTRVESLWDYTKTQGEWLVGKPAYGYMTQRDETGKVVLVIDPQASEALHLARELAIGGMAARVVADELKKRELVTGGLTASTLLRRLRNPALLGYRVEENKETTGMRRSKLLYGRDGKPIRVADPIFTQEEFDSLQAVLDARGKNQPPRHVGGATKFLGVLKCVNCETNMIVHHTRNKHGDYAYLRCQGCKSGGYGSPNPTEVYDRLVEQVLAVLGDFPVETREYARGEEMRKELKRLEESIAYYMKELEPGGRYTKTRFTQDQAEGTLDKLIAELEAIDPESAKDRWVYVAGGKTFREHWEQGGMEAMSLDLLRAGIKVQVNRTKVPKVRAPEVHLKLMIPKDVRQRLVIRPDDFGDTF

SEQ ID NO: 11497 - protein, 540 aa, Unknown
  Description of Unknown: Integrase A65 sequence
  PF07508,G3DSA:1.10.10.2600,SSF53041,PS51737,cd00338, PTHR30461:SF3,PF00239,SM00857,G3DSA:3.40.50.1390,PTHR30461
MLTMSSRKRQPAAERAAYNIDAEWTEADLALLQELEEAEARLPLDAPRALLSVRLSVFTDDTTSPVRQELDLRQLAREKGLRVIGVASDLNVSATKVPPWKRKSLGDWLSNRAPEFDALLFWKIDRFIRNLNDLNVMVRWSETYSKNLISKNDPIDLTTTMGKMMVQLLGGVAEIEAANTKTRVESLWDYTKTQGEWLVGKPAYGYMTQRDETGKVVLVIDPEASEALHLARELAIGGMAARVVADELKTRELVTGGLTASTLLRRLRNPALLGYRVEENKETTGMRRSKLLYGRDGKPIRVADPIFTQEEFDSLQAVLDARGKNQPPRHVGGATKFLGVLKCVNCETNMIVHHTRNKHGDYAYLRCQGCKSGGYGSPNPTEVYDRLVEQVLAVLGDFPVETREYARGEEMRKELKRLEESIAYYMKELEPGGRYTKTRFTQDQAEGTLDKLIAELEAIDPESAKDRWVYVAGGKTFREHWEQGGMEAMSLDLLRAGIKVQVTRTKVPKVRAPEVHLKLMIPKDVRQRLVIRPDDFGDTF

SEQ ID NO: 11498 - protein, 540 aa, Unknown
  Description of Unknown: Integrase A66 sequence
  PF07508,G3DSA:1.10.10.2600,SSF53041,PS51737,cd00338,PTHR30461:SF3 ,PF00239,SM00857,G3DSA:3.40.50.1390,PTHR30461
MLTMSSRKRQPAAERAAYNIDAEWTEADLALLQELEEAEARLPLDAPRALLSVRLSVFTDDTTSPVRQELDLRQLAREKGLRVIGVASDLNVSATKVPPWKRKSLGDWLSNRAPEFDALLFWKIDRFIRNLNDLNVMVRWSETYSKNLISKNDPIDLTTTMGKMMVQLLGGVAEIEAANTKTRVESLWDYTKTQGEWLVGKPAYGYMTQRDETGKVVLVIDPQASEALHLARELAIGGMAARVVADELKKRELVTGGLTASTLLRRLRNPALLGYRVEENKETTGMRRSKLLYGRDGKPIRVADPIFTQEEFDSLQAVLDARGKNQPPRHVGGATKFLGVLKCVNCETNMIVHHTRNKHGDYAYLRCQGCKSGGYGSPNPTEVYDRLVEQVLAVLGDFPVETREYARGEEMRKELKRLEESIAYYMKELEPGGRYTKTRFTQDQAEGTLDKLIAELEAIDPESAKDRWVYVAGGKTFREHWEQGGMEAMSLDLLRAGIKVQVTRTKVPKVRAPEVHLKLMIPKDVRQRLVIRPDDFGDTF

SEQ ID NO: 11499 - protein, 538 aa, Unknown
  Description of Unknown: Integrase A67 sequence
  PF07508,SSF53041,PF13408,PS51737,cd00338, PF00239,SM00857,G3DSA:3.40.50.1390,PTHR30461
MREVAEAGTLLSVTTSVLEQLRQQKAGKVELSNAQVEAALPIVGSYGRISDAYEDAETGVTESGVKRQLKVNGLISQARGWQLHDRVYVDNHLSAYKSHVVRDAFEDLLEDLASGVVDGIICYNLDRLARQVKDLERVIAIYDAGRKAGRQMYFATNEGSIDLSSDDGITLARIMVAFANKASRDTARRVALKHQEIRDEGRNVGGGRPFGWDWKFEGNREHVLNPVESAAIREAAEGLIAGTQTFRGVVRDWTERGFTTPRGRHWTPQAVKGVMRSPRLAGWLVHKGQIAVHSRTGGLVRAQAPAILTDEEYEALLVATETTRSRYTAASGRNKYLLSGIVRCAECGARLVGNRRTDKHFYYACRVGGGLNREGGAACGKVTASGFELDLMVEELILPVVIEHTGDAVLNAKKPHQEDLMGLTEERTSWVKRLDEGAAPDVVLPRISKIDQKIEELRHRQAEWLREQRGAAASVGVTEETWPHLSIEEKRNHVSRYIEAIYVSRATRRGNTFDRSRVSSPVWRTTAGRGEPQLSAVQ

SEQ ID NO: 11500 - protein, 537 aa, Unknown
  Description of Unknown: Integrase A68 sequence
  PF07508,G3DSA:1.10.10.2600,SSF53041,PF13408,PS51737,cd00338, PTHR30461:SF3,PF00239,PS51736,SM00857,G3DSA:3.40.50.1390, PTHR30461
MKAAIYSRKSKFTGKGESVENQIELCKSYAKNNGYDEFYIYEDEGFSGGNINRPEFKSMMKDAKYKKFDAIICYRLDRISRNVSDFSSLIDELKALSIDFISIREQFDTSSPMGTAMMFISSVFAQLERETIAERIKDNMYELAKTGRWLGGTPPFGFSSEPTYYLDNNSKQKKMMKLSPIDEEISLVRILFEQYLSLGSLGKLQKYLIQNNIKTKRDSNWDIKALQLLLRNPVYVKSSDLVTSYLSTKGATVFGDPNGNGILSYNKKDSKDKYKDISEWILSVSKHEGVIMDNLWIKVQRQLDKNKDLAPRLVNGSEYGVFNSVLQCAKCGGKMIQKQGHTSKKTGEILRYYICTNKINSTETTCDSKNVRLDILEKHVMKELFKATADKGSLIKAIEEYKKSLESEYIDKDNIKTYEKQISQKELQVKNLIDKLSLNPNIFDLLSSRIEELNKELKELKFKKFELENTNSNLKAAIKEIDASTSMILNFKSMWEKADYSMKKLLINSLVDYISYNSDTMEVVIKPFCTNKKKGAL

SEQ ID NO: 11501 - protein, 537 aa, Unknown
  Description of Unknown: Integrase A69 sequence
  PF07508,G3DSA:1.10.10.2600,SSF53041,PS51737,cd00338, PTHR30461:SF3,PF00239,SM00857,G3DSA:3.40.50.1390,PTHR30461
MSSRKRQPAAERAAYNIDAEWTEADLALLQELEEAEARLPLDAPRALLSVRLSVFTDDTTSPVRQELDLRQLAREKGLRVIGVASDLNVSATKVPPWKRKSLGDWLSNRAPEFDALLFWKIDRFIRNLNDLNVMVRWSETYSKNLISKNDPIDLTTTMGKMMVQLLGGVAEIEAANTKTRVESLWDYTKTQGEWLVGKPAYGYMTQRDETGKVVLVIDPQASEALHLARELAIGGMAARVVADELKKRELVTGGLTASTLLRRLRNPALLGYRVEENKETTGMRRSKLLYGRDGKPIRVADPIFTQEEFDSLQAVLDARGKNQPPRHVGGATKFLGVLKCVNCETNMIVHHTRNKHGDYAYLRCQGCKSGGYGSPNPTEVYDRLVEQVLAVLGDFPVETREYARGEEMRKELKRLEESIAYYMKELEPGGRYTKTRFTQDQAEGTLDKLIAELEAIDPESAKDRWVYVAGGKTFREHWEQGGVEAMSLDLLRAGIKVQVTRTKVPKVRAPEVHLKLMIPKDVRQRLVIRPDDFGDTF

SEQ ID NO: 11502 - protein, 536 aa, Unknown
  Description of Unknown: Integrase A70 sequence
  G3DSA:1.10.10.60,SSF46689
MNAMTAIEHRPAEITPAEARAAVLALHEHGGNVSATARTLGVTRAKLQRRIRKADMWGISAHGEVMASIPRRIEAAPGRVRRYLLTCAQSNTKVHAEFWRNLLALRDHFGAELMVSRVRYNHNDAQVSQEKDGRAADDSLWYAAEVEPYLADERVEICPTLIWAGDMNIIPTATSPLSGLDSFTGAASCVFPHPQIALKSVATAPGTPHKANYTTGAVTLKRYIKRKAGLKAEFHHAFGALLVEVDGAGDWFARQINATDAGVIYDLDLKVDAGAVTPGHPVEVFTPGDIHGTRVDRAVLAAVWGPGGLVDVLKPRHQILHDVLNFGSRSHHNGFFDSLAIHYGHADGVEDEIRETAAILNATLRPWSQSWVVKSNHDEHLEKWIEVSDFKRDPLNAAFYLSAASAKVEAIRRRDRGFDLLAWALDRAGLEGGVNFLARDGKLLIAGVRHDQHGDLGPNGARGSAANIARTGEKANVGHSHAAAISQGCYQSGTFSDLDMGYNRGPSSWSHSAILTYANGKRAIVTLRAGKWRAEP

SEQ ID NO: 11503 - protein, 536 aa, Unknown
  Description of Unknown: Integrase A71 sequence
  G3DSA:1.10.10.60,SSF46689
MNAMTAIEHRPAEITPAEARAAVLALHEHGGNVSATARTLGVTRAKLQRRIRKADMWGISAHGEVMASIPRRIEAAPGRVRRYLLTCAQSNTKVHAEFWRNLLALRDHFGAELMVSRVRYNHNDAQVSQEKDGRAADDSLWYAAEVEPYLADERVEICPTLIWAGDMNIIPTATSPLSGLDSFTGAASCVFPHPQIALKSVATAPGTPHKANYTTGAVTLKRYIKRKAGLKAEFHHAFGALLVEVDGAGDWFARQINATDAGVIYDLDLKVDAGAVTPGHPVEVFTPGDIHGTRVDRAVLAAVWGPGGLVDVLKPRHQILHDVLNFGSRSHHNGFFDSLAIHYGHADGVEDEIRETAAILNTTLRPWSQSWVVKSNHDEHLEKWIEVSDFKRDPLNAAFYLSAASAKVEAIRRRDRGFDLLAWALDRAGLEGGVNFLARDGKLLIAGVRHDQHGDLGPNGARGSAANIARTGEKANVGHSHAAAISQGCYQSGTFSDLDMGYNRGPSSWSHSAILTYANGKRAIVTLRAGKWRAEP

SEQ ID NO: 11504 - protein, 534 aa, Unknown
  Description of Unknown: Integrase A72 sequence
  PF07508,G3DSA:1.10.10.2600,SSF53041,PS51737, cd00338,PF00239,PS51736,SM00857,G3DSA:3.40.50.1390,PTHR30461
MSNEYCMYLRKSRADAEAEARGEEEILSRHERTLLDLSKKLKLHVTKIFREVVSGETISNRPEVQQLLEEVEEGRWAGVLVMEIERLARGDTVDQGIVAQTFKYSSTKIITPTKTYDPDNEFDEEYFEFGLFMSRREYKTINRRQQRGRTASIKEGKYLGSKPPYGYERIKLEGQKGYSLVPNIEQAPIVKFIFELYTKGEPLGNGTYNRLGTSLIARKLNALKVPTAKGGNWVTSTINGILRNPVYMGKIKWGSRPMQKKRKKGELSISRPRVKLEEMTLVDGLHEGLVSEEVWNLAQELLAQNPARPIPTKYKVKNPLMGLVICGECGRKMIRRPYSKKDLPSTLMCQDPQCTNVSSHLHLVEKKIIEGLKTWLINYKAEWKKIKQDDGKSLNTNEIREKAIAKINNQISSLELQMNNLHDLLEQGIYSTEKFIERSKNISERIKKYLVEKEELEKEIKTEEAVQGNNKEIVPVVERVIETYYLTDNPEMRNNLLKSVLVKVIYKKEYGTRWHRDPDDFELTLHPKILQNYY

SEQ ID NO: 11505 - protein, 531 aa, Unknown
  Description of Unknown: Integrase A73 sequence
  PF07508,SSF53041,PS51737,cd00338,PTHR30461:SF3, PF00239,PS51736,SM00857,G3DSA:3.40.50.1390,PTHR30461
MGVAVMTCVFVVCLVNHRGLSGVRYKPMRALVVIRLSRVTDATTSPERQLESCQQLCAQRGWDVVGVAEDLDVSGAVDPFDRKRRPNLARWLAFEEQPFDVIVAYRVDRLTRSIRHLQQLVHWAEDHKKLVVSATEAHFDTTTPFAAVVIALMGTVAQMELEAIKERNRSAAHFNIRAGKYRGSLPPWGYLPTRVDGEWRLVPDPVQRERVLEVYHRVVDNHEPLHLVAHDLNQRGVLSPKDYFAKLQGREPQGREWSATALKRSLISEAMLGYATLNGKTVRDDDGAPLVRSEPILTREQLEALRAELVKTDRTKPAVSTPSLLLRVLFCSVCGEPAYKFTGGGRKNARYRCRSWGWAQRCGNGTVAMAEWDAFCEEQVLDLLGDAERLEKVWVAGSDSAVELAEVNAELVDLTSLIGSPAYRAGSPQREALDARIAALAARQEELEGLEARPSGWEWRETGQRFGDWWREQDTAAKNTWLRSMNVRLTFDVRGGLTRTIDFGDLQEYEQHLRLGAALYLVNAEKPPTGR

SEQ ID NO: 11506 - protein, 530 aa, Unknown
  Description of Unknown: Integrase A74 sequence
  PF07508,SSF53041,PS51737,cd00338,PTHR30461:SF3,PF00239, PS51736,SM00857,G3DSA:3.40.50.1390,PTHR30461
MFSVGMAVMTCVFVVCLVNHRGLSGVRYKPMRALVVIRLSRVTDATTSPERQLESCQQLCAQRGWDVVGVAEDLDVSGAVDPFDRRRRPNLARWLAFEEQPFDVIVAYRVDRLTRSIRHLQQLVHWAEDHKKLVVSATEAHFDTTTPFAAVVIALMGTVAQMELEAIKERNRSAAHFNIRAGKYRGSLPPWGYLPTRVDGEWRLVPDPVQRERILEVYHRVVDNHEPLHLVAHDLNRRGVLSPKDYFAKLQGREPRGREWSATALKRSLISEAMLGYATLNGKTVRDDDGAPLVRAEPILTREQLEALRAELVKTDRAKPSVSTPSMLLRVLFCAVCGEPAYKFTGGGRKNARYRCRSWGWAQRCGNGTVAMAEWDSFCEEQVLDLLGDSERLEKVWVAGSDSAVELAEVNAELVDLTSLIGSPAYRVGSPQREALDARIAALAARQEELEGLEARPSGWEWRETGQRFGDWWREQGTAAKNTWLRSMNVRLTFDVRGGLTRTIDFGDLQEYEQHLRLGSVVERLHAGMS

SEQ ID NO: 11507 - protein, 530 aa, Unknown
  Description of Unknown: Integrase A75 sequence
  PF07508,SSF53041,PS51737,cd00338,PTHR30461:SF3, PF00239,PS51736,SM00857,G3DSA:3.40.50.1390,PTHR30461
MFSVGMAVMTCVFVVCLVNHRGLSGVRYKPMRALVVIRLSRVTDATTSPERQLESCQQLCAQRGWDVVGVAEDLDVSGAVDPFDRRRRPNLARWLAFEEQPFDVIVAYRVDRLTRSIRHLQQLVHWAEDHKKLVVSATEAHFDTTSPFAAVVIALMGTVAQMELEAIKERNRSAAHFNIRAGKYRGSLPPWGYLPTRVDGEWRLVPDPVQRERILEVYHRVVDNHEPLHLVAHDLNRRGVLSPKDYFAKLQGREPQGREWSATALKRSLISEAMLGYATLNGKTVRDDDGAPLVRAEPILTREQLEALRAELVKTDRTKPAVSTPSLLLRVLFCAVCGEPAYKFTGGGRKNARYRCRSWGWAQRCGNGTVAMAEWDAFCEEQVLDLLGDSERLEKVWVVGSDSAVELAEVNAELVDLTSLIGSPAYRVGSPQREALDARIAALAARQEELEGLEARPSGWEWRETGQRFGDWWREQDTSGKNTWLRSMNVRLTFDVRGGLTRTIDFGDLQEYEQHLRLGSVVERLHTGMS

SEQ ID NO: 11508 - protein, 530 aa, Unknown
  Description of Unknown: Integrase A76 sequence
  PF07508,SSF53041,PS51737,cd00338,PTHR30461:SF3,PF00239, PS51736,SM00857,G3DSA:3.40.50.1390,PTHR30461
MFSVGMAVMTCVFVVCLVNHRGLSGVRYKPMRALVVIRLSRVTDATTSPERQLESCQQLCAQRGWDVVGVAEDLDVSGAVDPFDRGRRPNLARWLAFEEQPFDVIVAYRVDRLTRSIRHLQQLVHWAEDHKKLVVSATEAHFDTTTPFAAVVIALMGTVAQMELEAIKERNRSAAHFNIRAGKYRGSLPPWGYLPTRVDGEWRLVPDPVQRERILEVYHRVVDNHEPLHLVAHDLNRRGVLSPKDYFAKLQGREPQGREWSATALKRSLISEAMLGYATLNGKTVRDDDGAPLVRAEPILTREQLEALRAELVKTDRTKPAVSTPSLLLRVLFCAVCGEPAYKFTGGGRKNARYRCRSWGWAQRCGNGTVAMAEWDAFCEEQVLDLLGDSERLEKVWVVGSDSAVELAEVNAELVDLTSLIGSPAYRVGSPQREALDARIAALAARQEELEGLEARPSGWEWRETGQRFGDWWREQDTSGKNTWLRSMNVRLTFDVRGGLTRTIDFGDLQEYEQHLRLGSVVERLHTGMS

SEQ ID NO: 11509 - protein, 530 aa, Unknown
  Description of Unknown: Integrase A77 sequence
  PF07508,SSF53041,PS51737,cd00338,PTHR30461:SF3, PF00239,PS51736,SM00857,G3DSA:3.40.50.1390,PTHR30461
MGMAVMTCAFVVCLVNHRGLSGVRYKPMRALVVIRLSRVTDATTSPERQLESCQQLCAQRGWDVVGVAEDLDVSGAVDPFDRKRRPNLARWLAFEEQPFDVIVAYRVDRLTRSIRHLQQLVHWAEDHKKLVVSATEAHFDTTTPFAAVVIALMGTVAQMELEAIKERNRSAAHFNIRAGKYRGSLPPWGYLPTRVDGEWRLVPDPVQRERILEVYHRVVDNHEPLHLVAHDLNRRGVLSPKDYFAKLQGREPQGREWSATALKRSLISEAMLGYATLNGKTVRDDDGAPLVRAEPILTREQLEALRAELVKTSRAKPAVATPSLLLRVLFCAVCGEPAYKFDAGRKIPRYRCRSFGFAVRCGNGTVPIAEWDAFCEEQVLDLLGDSERLEKVWVAGSDSAVELAEVNAELVDLTSLIGSPAYRAGSPQREALDARIAALAARQEELEGLEARPSGWEWRETGQRFGDWWRDQDTAGKNTWLRSMNVRLTFDVRGGLTRTIDFGDLQEYEQHLRLGSALDLVNAEKPPTGR

SEQ ID NO: 11510 - protein, 530 aa, Unknown
  Description of Unknown: Integrase A78 sequence
  PF07508,SSF53041,PS51737,cd00338,PTHR30461:SF3,PF00239, PS51736,SM00857,G3DSA:3.40.50.1390,PTHR30461
MCFSGYGRDDLCLRGLSGQPPRSQWCTVQTMRALVVIRLSRVTDATTSPERQLESCQQLCAQRGWDVVGVAEDLDVSGAVDPFDRKRRPNLARWLSFEEQPFDVIVAYRVDRLTRSIRHLQQLVHWAEDHKKLIVSATEAHFDTTTPFAAVVIALMGTVAQMELEAIKERNRSAAHFNIRAGKYRGSLPPWGYLPTRVDGEWRLVPDPVQRARILEVYHRVVDNHEPLHLVAHDLNRRGVLSPKDYFAKLQGREPQGREWSATALKRSLISEAMLGYATLNGKTVRDDDGAPLVRAEPILTREQLEALRAELVKTDRTKPAVSTPSLLLRVLFCAVCGEPAYKFAGGGRKHPRYRCRSMGFPKHCGNGTVAMAEWDAFCEEQVLDLLGDSERLEKVWVAGSDSAVELAEVNAELVDLTSLIGSPAYRVGSPQREALDTRIAALAARQEELEGLEARPSGWEWRETGQRFGDWWREQDTAAKNTWLRSMNVRLTFDVRGGLTRTIDFGDLQEYEQHLRLGSVVERLHTGMS

SEQ ID NO: 11511 - protein, 530 aa, Unknown
  Description of Unknown: Integrase A79 sequence
  PF07508,SSF53041,PS51737,cd00338,PTHR30461:SF3, PF00239,PS51736,SM00857,G3DSA:3.40.50.1390,PTHR30461
MGVAVMTCVFVVCLVNHRGLRGVRYKPMRALVVIRLSRVTDATTSPERQLESCRQLCAQRGWEVVGVAEDLDVSGAVDPFDRKRRPNLARWLAFEEQPFDVIVAYRVDRLTRSIRHLQQLVHWAEDHKKLVVSATEAHFDTTTPFAAVVIALMGTVAQMELESIKERNRSAAHFNIRAGKYRGSLPPWGYLPTRVDGEWRLVPDPVQRERILEVYHRVVDNHEPLHLVAHDLNRRGVLSPKDYFAKLQGREPQGRAWSATALKRSLISEAMLGYTTLNGKTVRDDDGAPLVRAEPILTREQLEALRAELVKTDRTKPAVSTPSLLLRVLFCAVCGEPAYKFDAGRKIPRYRCRSFGFAQRCGNGTIPIAEWDAFCEEQVLDLLGDSERLEKVWVAGSDSAVELAEVNAELVDLTSLIGSPAYRVGSPQREALDARIAALAARQEELEGLEARPSGWEWRETGQRFGDWWRDQDTAGKNTWLRSMNVRLTFDVRGGLTRTIDFGDLQEYEQHLRLGSALDLVNAEKPPTGR

SEQ ID NO: 11512 - protein, 529 aa, Unknown
  Description of Unknown: Integrase A80 sequence
  PF07508,G3DSA:1.10.10.2600,SSF53041,PF13408,PS51737,cd00338, PTHR30461:SF3,PF00239,PS51736,SM00857,G3DSA:3.40.50.1390, PTHR30461
MSDRASTYDIEAEWSPADLALLRSLEEAETLLPPDAPRALLSVRLSVFTEDTTSPVRQELDLRQLARDKGMRVVGVASDLNVSATKVPPWKRKELGDWLGNKTPQFDALLFWKIDRFIRNMGDLSRMIEWANRYEKNLISKNDPIDLKTPIGKMMTTLLGGVAEIESANTKARVESLWDYAKTQSDWLVGKPAYGYVTQRDESGKVSLAVDPKAREALHLARELVLGGMAARSVAEELKKREMVTPGLTAATLLRRMRNPALMGYRVEEDKRGGLRRSKLVLGHDGKPIRVADPVFTEEEFETLQAVLDSRGKNQPPRQPSGATKFLGVLKCVDCRSNMIVHFTRNKHGEYAYLRCQKCKSGGLGAPHPQEVYDALVEQVLAVLGDFPVERREYARGEEARAEVKRLEESIAYYMQGLEPGGRYTKTRFTRENAERALDKLIAELEAVDPETTEDRWIYEPIGKTFRQHWEEGGMEAMALDLIRAGITCDVTRTKVPRVRAPQVELDLDIPSDVRERLVMRRDDFAEAF

SEQ ID NO: 11513 - protein, 529 aa, Unknown
  Description of Unknown: Integrase A81 sequence
  PF07508,G3DSA:1.10.10.2600,SSF53041,PF13408,PS51737, cd00338,PTHR30461:SF3,PF00239,PS51736,SM00857, G3DSA:3.40.50.1390,PTHR30461
MSNRLHEYDVEAEWSPADLALLRSLEEAESLLPESAPRALLSVRLSVFTEDTTSPVRQELDLRQLARDKGMRVVGVASDLNVSATKVPPWKRKSLGTWLNDRVPEFDALLFWKVDRFIRNMSDLSRMIDWSNRYEKNLISKNDPIDLSTPLGKMMVTLLGGIAEIEAANTKARVESLWDYNKTQSEWLVGKPPYGYTTARDEQGKNRLVIDPKASEALHLTRLHLLEGGSVRSFVPVLKEKGLVSTGLTPSTLIRRLRNPALLGYRVEEDKKGGLRRSKVVVGHDGQPIVIADPIFTREEWDTLQAAMDARNKNQPPRQPSGATKFRGVLKCVECGTNMIVHHTRNKHGEYAYLRCQGCQSGGLGSPHPQDVYDALVGQVLTVLGDWPVQTREYARGAEARAETKRLEETIAVYMKGLEPGGRYTKTRFTMEQAEATLDKLIAELEAIDPDTTTDRWVYVAGGKTFREHWEEGGMDAMTSDLLRAGITATVTRTKIPKVRAPKVELDLDIPKDVRERLIVREDDFAETF

SEQ ID NO: 11514 - protein, 528 aa, Unknown
  Description of Unknown: Integrase A82 sequence
  PF07508,SSF53041,PF13408,PS51737,cd00338,PF00239,PS51736,SM00857 ,G3DSA:3.40.50.1390,PTHR30461
MTSSVLEQLRQAKSGAPKLSNAQVEAVLPVVGSYARISDAYEDAETGVTEQGTTRQRKVNKLLAEARGWQLHDREYVDNNLSAFKTHVVRDAFEDLLEDLASGVIDGIICYNLDRLARQVKDLERVIEIYDAGRKSGREMFFATNEGSIDLSSDDGITLARVMVAFANKASRDTARRVALKHQEIRDEGRNVGGSRPFGWDWKMEGSREHVLNPVESEAIRAAATGLIDGSMNYRSIVRDWNEQGLRTPRGREWSPQAVKAVMKNPRLAGWLVHKGSIAVHSRTGELVRAQAPAILTDEEYEALLTATEATRSRYTAASGRNRYLLSGIVRCAECGARLVGNRRTDKHFYYACRVGGDRASDGKSNACGKVTASGFELDRMVEELVVPMIIEASASLVQNAEKPHQAELVGLQDERDKLLQMYREGQAPSDAALPRLAELDQKVAELRHKQAEWLRSQKAAERGVEVTEETWPGLSIEEKRGHVAELIEAIYVSRATRRGNTFDRTRVSTPVWRKRGDVAGSTPSAAE

SEQ ID NO: 11515 - protein, 527 aa, Unknown
  Description of Unknown: Integrase A83 sequence
  PF07508,SSF53041,PS51737,cd00338,PTHR30461:SF3, PF00239,PS51736,SM00857,G3DSA:3.40.50.1390,PTHR30461
MGMAVMTCVFVVCLVNHRGLSGVRYKPMRALVVIRLSRVTDATTSPERQLESCQQLCAQRGWDVVGVAEDLDVSGAVDPFDRKRRPNLARWLAFEEQPFDVIVAYRVDRLTRSIRHLQQLVHWAEDHKKLVVSATEAHFDTTTPFAAVVIALMGTVAQMELEAIKERNRSAAHFNIRAGKYRGSLPPWGYLPTRVDGEWRLVPDPVQRERILEVYHRVVDNHEPLHLVAHDLNRRGVLSPKDYFAKLQGREPRGREWSATALKRSLISEAMLGYATLNGKTVRDDDGAPLVRAEPILTREQLEALRAELVKTDRTKPAVSTPSLLLRVLFCAVCGEPAYKFTGGGRKNARYRCRSWGWAQRCGNGTVAMAEWDAFCEEQVLDLLGDAERLEKVWVAGSDSAVELAEVNAELVDLTSLIGSPAYRVGSPQREALDARIAALAARQEELEGLEARPSGWEWRETGQRFGDWWREQDIAAKNTWLRSMNVRLTFDVRGGLTRTIDFGDLQEYEQHLRLGSVVEQLHAGMS

SEQ ID NO: 11516 - protein, 527 aa, Unknown
  Description of Unknown: Integrase A84 sequence
  PF07508,SSF53041,PS51737,cd00338,PTHR30461:SF3,PF00239, PS51736,SM00857,G3DSA:3.40.50.1390,PTHR30461
MGMAVMTCVFVVCLVNHRGLSGVRYKPMRALVVIRLSRVTDATTSPERQLESCQQLCAQRGWDVVGVAEDLDVSGAVDPFDRKRRPNLARWLAFEEQPFDVIVAYRVDRLTRSIRHLQQLVHWAEDHKKLVVSATEAHFDTTTPFAAVVIALMGTVAQMELEAIKERNRSAAHFNIRAGKYRGSLPPWGYLPTRVDGEWRLVPDPVQRERILEVYHRVVDNHEPLHLVAHDLNRRGVLSPKDYFAKLQGREPQGREWSATALKRSLISEAMLGYATLNGKTVRDDDGAPLVRAEPILTREQLEALRAELVKTDRTKPAVSAPSLLLRVLFCAVCGEPAYKFTGGGRKNARYRCRSWGWAQRCGNGTVAMAEWDAFCEEQVLDLLGDAERLEKVWVAGSDSAVELAEVNAELVDLTSLIGSPAYRAGSPQREALDARIAALAARQEELEARELRPSGWEWRETGQRFGDWWREQDTSGKNTWLRSMNVRLTFDVRGGLARTIDFGDLQEYEQHLRLGSVVEQLHTGMS

SEQ ID NO: 11517 - protein, 527 aa, Unknown
  Description of Unknown: Integrase A85 sequence
  PF07508,SSF53041,PS51737,cd00338,PTHR30461:SF3, PF00239,PS51736,SM00857,G3DSA:3.40.50.1390,PTHR30461
MGMAVMTCVFVVCLVNHRGLSGVRYKPMRALVVIRLSRVTDATTSPERQLESCQQLCTQRGWDVVGVAEDLDVSGAVDPFDRKRRPNLARWLAFEEQPFDVIVAYRVDRLTRSIRHLQQLVHWAEDHKKLIVSATEAHFDTTSPFAAVVIALMGTVAQMELEAIKERNRSAAHFNIRAGKYRGSLPPWGYMPARVDGEWRLLVDPVQRERILEVYHRVVDNHEPLHLVAHDLNQRGILSPKDYFAQLQGREPQGRAWSATALKRSLISEAMLGYTTLNGKTVRDDDGAPLVRAEPILTREQLEALRAELVKTDRTKPAVSTPSLLLRVLFCAVCGEPAYKFAGGGRKHPRYRCRSMGFPKHCGNGTVAMAEWDAFCEEQVLDLLGDAERLEKVWVAGSDAAVELAELNAELVDLTSLIGSPAYRAGSPQREALDARIEALAARQEELEARELRPSGWEWRETGQRFADWWAAQDVAGKNAWLRSMNVRLTFDVRGGLTRTIDFGDLQEYEQHLRLGSVVEQLHTGMS

SEQ ID NO: 11518 - protein, 527 aa, Unknown
  Description of Unknown: Integrase A86 sequence
  PF07508,SSF53041,PS51737,cd00338,PTHR30461:SF3,PF00239, PS51736,SM00857,G3DSA:3.40.50.1390,PTHR30461
MGMAVMTCVFVVCLVNHRGLSGVRYKPMRALVVIRLSRVTDATTSPERQLESCQQLCAQRGWDVVGVAEDLDVSGAVDPFDRKRRPNLARWLAFEEQPFDVIVAYRVDRLTRSIRHLQQLVHWAEDHKKLVVSATEAHFDTTTPFAAVVIALMGTVAQMELEAIKERNRSAAHFNIRAGKYRGSLPPWGYLPTRVDGEWRLVPDPVQRERILEVYHRVVDNHEPLHLVAHDLNRRGVLSPKDYFAKLQGREPQGREWSATALKRSLISEAMLGYATLNGKTVRDDDGAPLVRAEPILTREQLEALRAELVKTDRTKPAVSTPSLLLRVLFCAVCGEPAYKFTGGGRKNARYRCRSWGWVQRCGNGTVAMAEWDAFCEEQVLDLLGDSERLEKVWVAGSDSAVELAEVNAELVDLTSLIGSPAYRVGSPQREALDARIAALAARQEELEGLEARPSGWEWRETGQRFADWWREQDTAAKNTWLRSMNVRLTFDVRGGLTRTIDFGDLQEYEQHLRLGSVVERLHTGMS

SEQ ID NO: 11519 - protein, 527 aa, Unknown
  Description of Unknown: Integrase A87 sequence
  PF07508,SSF53041,PS51737,cd00338,PTHR30461:SF3, PF00239,PS51736,SM00857,G3DSA:3.40.50.1390,PTHR30461
MGMAVMTCVFVVCLVNHRGLSGVRYKPMRALVVIRLSRVTDATTSPERQLESCQQLCAQRGWDVVGVAEDLDVSGAVDPFDRKRRPNLARWLAFEEQPFDVIVAYRVDRLTRSIRHLQQLVHWAEDHKKLVVSATEAHFDTTTPFAAVVIALMGTVAQMELEAIKERNRSAAHFNIRAGKYRGSLPPWGYLPTRVDGEWRLVPDPVQRERILEVYHRVVDNHEPLHQIAHDLNQRGILSPKDYFAQLQGREPQGREWSATALKRSLISEAMLGYATLNGKTVRDDDGAPLVRAEPILTREQLESLRAELVKADRAKPAVSTPSLLLRVLFCAVCGEPAYKFTGGGRKNARYRCRSWGWAQRCGNGTVAMAEWDAFCEEQVLDLLGDAERLEKVWVAGSDSAVELAEVNAELVDLTSLIGSPAYRVGSPQREALDARIAALAARQEELEGLEARPSGWEWRETGQRFGDWWREQDIAAKNTWLRSMNVRLTFDVRGGLTRTIDFGDLQEYEQHLRLGSVVERLHAGMS

SEQ ID NO: 11520 - protein, 527 aa, Unknown
  Description of Unknown: Integrase A88 sequence
  PF07508,SSF53041,PS51737,cd00338,PTHR30461:SF3,PF00239, PS51736,SM00857,G3DSA:3.40.50.1390,PTHR30461
MGMAVMTCVFVVCLVNHRGLSGVRYKPMRALVVIRLSRVTDATTSPERQLESCQQLCAQRGWEVVGVAEDLDVSGAVDPFDRKRRPNLARWLASEEQPFDVIVAYRVDRLTRSIRHLQQLVHWAEDHKKLVVSATEAHFDTTTPFAAVVIALMGTVAQMELEAIKERNRSAAHFNIRAGKYRGSLPPWGYLPTRVDGEWRLVPDPVQRERILEVYHRVVDNHEPLHLVAHDLNRRGVLSPKDYFAKLQGREPQGREWSATALKRSLISEAMLGYATLNGKTVRDDDGAPLVRSEPILTREQLEALRAELVKTDRIKPAVSTPSMLLRVLFCAVCGEPAYKFAGGGRKHPRYRCRSMGFPKHCGNGTVAMAEWDAFCEEQVLDLLGDAERLEKVWVAGSDSAVELAEVNAELVDLTSLIGSPAYRAGSPQREALDARIAALAARQEELEGLEARPSGWEWRETGQRFGDWWREQDTAGKNTWLRSMNVRLTFDVRGGLTRTIDFGDLQEYEQHLRLGSVVERLHTGMS

SEQ ID NO: 11521 - protein, 527 aa, Unknown
  Description of Unknown: Integrase A89 sequence
  PF07508,SSF53041,PS51737,cd00338,PTHR30461:SF3, PF00239,PS51736,SM00857,G3DSA:3.40.50.1390,PTHR30461
MGVSVMTCVFVVCLVNHRGLSGVRYKPMRALVVIRLSRVTDATTSPERQLESCQQLCAQRGWEVVGVAEDLDVSGAVDPFDRKRRPNLARWLAFEEQPFDVIVAYRVDRLTRSIRHLQQLVHWAEDHKKLVVSATEAHFDTTTPFAAVVIALMGTVAQMELEAIKERNRSAAHFNIRAGKYRGSLPPWGYLPTRVDGEWRLVPDPVQRERILEVYHRVVDNHEPLHLVAHDLNRRGVLSPKDYFAKLQGREPQGREWSATALKRSLISEAMLGYATLNGKTVRDDDGAPLVRAEPILTREQLEALRAELVKTDRTKPAVSTPSLLLRVLFCAVCGEPAYKFAGGGRKHPRYRCRSMGFPKHCGNGTVAMAEWDAFCEEQVLDLLGDAERLEKVWVAGSDSAVELAEVNAELVDLTSLIGSPAYRVGSPQREALDARIAALAARQEELEGLEARPSGWEWRETGQRFGDWWREQDTAAKNTWLRSMNVRLTFDVRGGLTRTIDFGDLQEYEQHLRLGSVVEQLHAGMS

SEQ ID NO: 11522 - protein, 527 aa, Unknown
  Description of Unknown: Integrase A90 sequence
  PF07508,SSF53041,PS51737,cd00338,PTHR30461:SF3,PF00239, PS51736,SM00857,G3DSA:3.40.50.1390,PTHR30461
MGVAVMTCVFVVCLVNHRGLSGVRYKPMRALVVIRLSRVTDATTSPERQLESCQQLCAQRGWDVVGVAEDLDVSGAVDPFDRKRRPNLARWLAFEEQPFDVIVAYRVDRLTRSIRHLQQLVHWAEDHKKLVVSATEAHFDTTTPFAAVVIALMGTVAQMELEAIKERNRSAAHFNIRAGKYRGSLPPWGYLPTRVDGEWRLVPDPVQRERILEVYHRVVDNHEPLHLVAHDLNRRGVLSPKDYFAKLQGREPQGREWSATALKRSLISEAMLGYATLNGKTVRDDDGAPLVRAEPILTREQLEALRAELVKTDRTKPAVATPSLLLRVLFCAVCGEPAYKFTGGGRKNARYRCRSWGWAQRCGNGTVAMAEWDAFCEEQVLDLLGDAERLEKVWVAGSDSAVELAEVNAELVDLTSLIGSPAYRVGSPQREALDARIAALAARQEELEGLEARPSGWEWRETGQRFGDWWQEQDIAAKNTWLRSMNVRLTFDVRGGLTRTIDFGDLQEYEQHLRLGSVVERLHTGMS

SEQ ID NO: 11523 - protein, 527 aa, Unknown
  Description of Unknown: Integrase A91 sequence
  PF07508,SSF53041,PS51737,cd00338,PTHR30461:SF3, PF00239,PS51736,SM00857,G3DSA:3.40.50.1390,PTHR30461
MGVAVMTCVFVVCLVNHRGLSGVRYKPMRALVVIRLSRVTDATTSPERQLESCRQLCAQRGWGVVGVAEDLDVSGAVDPFDRKRRPNLARWLAFEEQPFDVIVAYRVDRLTRSIRHLQQLVHWAEDHKKLVVSATEAHFDTTTPFAAVVIALMGTVAQMELEAIKERNRSAAHFNIRAGKYRGSLPPWGYLPTRVDGDWRLVPDPVQRERILEVYHRVVDNHEPLHLVAHDLNRRGVLSPKDYFAKLQGREPQGREWSATALKRSLISEAMLGYATLNGKTVRDDDGAPLVRAEPILTREQLEALRAELVKTDRTKPAVATPSLLLRVLFCAVCGEPAYKFTGGGRKNARYRCRSWGWAQRCGNGTVAMAEWDAFCEEQVLDLLGDAERLEKVWVAGSDSAVELAEVNAELVDLTSLIGSPAYRVGSPQREALDARIAALAARQEELEGLEARPSGWEWRETGQRFGDWWREQDTAAKNTWLRSMNVRLTFDVRGGLTRTIDFGDLQEYEQHLRLGSVVERLHAGMS

SEQ ID NO: 11524 - protein, 527 aa, Unknown
  Description of Unknown: Integrase A92 sequence
  PF07508,SSF53041,PS51737,cd00338,PTHR30461:SF3,PF00239, PS51736,SM00857,G3DSA:3.40.50.1390,PTHR30461
MGMAVMTCVFVVCLVNHRGLSGVRYKPMRALVVIRLSRVTDATTSPERQLESCQQLCAQRGWDVVGVAEDLDVSGAVDPFDRKRRPNLARWLAFEEQPFDVIVAYRVDRLTRSIRHLQQLVHWAEDHKKLVVSATEAHFDTTTPFAAVVIALMGTVAQMELEAIKERNRSAAHFNIRAGKYRGSLPPWGYLPTRVDGEWRLVPDPVQRERILEVYHRVVDNHEPLHLVAHDLNRRGVLSPKDYFAKLQGREPRGREWSATALKRSLISEAMLGYATLNGKTVRDDDGAPLVRSEPILTREQLEALRAELVKADRTKPAVSTPSLLLRVLFCAVCGEPAYKFAGGQRKNPRYRCRSMGFPKHCGNGTVAMAEWDAFCEEQVLDLLGDAERLEKVWVAGSDSAVELAEVNAELVDLTSLIGSPAYRVGSPQREALDARIAALAARQEELEGLEARPSGWEWRETGQRFGDWWREQDASGKNTWLRSMNVRLTFDVRGGLTRTIDFGDLQEYEQHLRLGSVVERLHTGMS

SEQ ID NO: 11525 - protein, 527 aa, Unknown
  Description of Unknown: Integrase A93 sequence
  PF07508,SSF53041,PS51737,cd00338,PTHR30461:SF3, PF00239,PS51736,SM00857,G3DSA:3.40.50.1390,PTHR30461
MGMAVMTCVFVVCLVNHRGLSGVRYKPMRALVVIRLSRVTDATTSPERQLESCRQLCAQRGWDVVGVAEDLDVSGAVDPFDRKRRPNLARWLAFEEQPFDVIVAYRVDRLTRSIRHLQQLVHWAEDHKKLVVSATEAHFDTTTPFAAVVIALMGTVAQMELEAIKERNRSAAHFNIRAGKYRGSLPPWGYLPTRVDGEWRLVPDPVQRERILEVYHRVVDNHEPLHLVAHDLNRRGVLSPKDYFAKLQGREPQGREWSATALKRSLISEAMLGYATLNGKTVRDDDGAPLVRAEPILTREQLEALRAELVKTDRTKPAVSTPSLLLRVLFCAVCGEPAYKFAGGGRKHPRYRCRSMGFPKHCGNGTVAMAEWDAFCEEQVLDLLGDSERLEKVWVAGSDSAVELAEVNAELVDLTSLIGSPAYRVGSPQREALDARIAALAARQEELEGLEARPSGWEWRETGQRFGDWWQEQDTAAKNTWLRSMNVRLTFDVRGGLTRTIDFGDLQEYEQHLRLGSVVEQLHTGMS

SEQ ID NO: 11526 - protein, 527 aa, Unknown
  Description of Unknown: Integrase A94 sequence
  PF07508,SSF53041,PS51737,cd00338,PTHR30461:SF3,PF00239, PS51736,SM00857,G3DSA:3.40.50.1390,PTHR30461
MGVAVMTCVFVVCPVNHRGLSGVRYKPMRALVVIRLSRVTDATTSPERQLEACQQLCAQRGWDVVGVAEDLDVSGAVDPFDRKRRPNLARWLAFEEQPFDVIVAYRVDRLTRSIRHLQQLVHWAEDHKKLVVSATEAHFDTTTPFAAVVIALMGTVAQMELEAIKERNRSAAHFNIRAGKYRGSLPPWGYLPTRVDGEWRLVPDPVQRERILEVYHRVVDNHEPLHLVAHDLNRRGVLSPKDYFAKLQGREPQGREWSATALKRSLISEAMLGYATLNGKTVRDDDGAPLVRSEPILTREQLEALRAELVKTDRTKPAVSTPSLLLRVLFCAVCGEPAYKFAGGGRKHPRYRCRSMGFPKHCGNGTVAMAEWDAFCEEQVLDLLGDAERLEKVWVAGSDSAVELAEVNAELVDLTSLIGSPAYRVGSPQREALDARIAALAARQEELEGLEARPSGWEWRETGQRFGDWWREQDAAAKNTWLRSMNVRLTFDVRGGLTRTIDFGDLQEYEQHLRLGSVVERLHAGMS

SEQ ID NO: 11527 - protein, 526 aa, Unknown
  Description of Unknown: Integrase A95 sequence
  PF07508,SSF53041,PF13408,PS51737,cd00338, PTHR30461:SF21,PF00239,PS51736,SM00857,G3DSA:3.40.50.1390, PTHR30461
MTSSVLDQLRQAKTGPAPKENAEAALSLPVVGSYARISDAYEDAETGVTDTGTTRQRKVNKLLAEARGWQLHDREYVDNNLSAYKSHVVRDDFEDLLEDLAAGVVDGIICYNLDRLARQVKDLERVIEIYDAGRKAGRSMYFATNEGSIDLSSDDGITLARVMVAFANKASRDTARRVGLKHQEMRDEGRNVGGGRPFGWDWQFEGSRQHVLNPVESEAIRQAAAGLTDGSKTWSGIQREWNEAGFTTPRGRPWTPQAIKGVLRSPRLAGWLVHKGGIAVHSRTGELIRAQAPAILTDEEYEALLVATEATRSRYTNASGRQRYLLSGIARCAECGGALVGNRRTDKHWYYACRTSNGHTPDGRIPCGGVTCSGYELDRMIEELVLPMIVEGTGGASLNAEKPHQRELAGLRDERKTWVKRLDDGSAPDIVLPRISRIDQRIEELRHKQAEWLREQRVRERHVGVTNETWPHLSTEEKRGHIADLIEAIYVSRATRRGNTFDRSRVSTPVWRATADASASTDAGSR

SEQ ID NO: 11528 - protein, 525 aa, Unknown
  Description of Unknown: Integrase A96 sequence
  G3DSA:1.10.10.2600,SSF53041,PF13408,PS51737,cd00338,PTHR30461:SF3 ,PF00239,SM00857,G3DSA:3.40.50.1390,PTHR30461
MSARDYDIEAEWTPADLALLKELEEAEALLPADAPRALLSVRLSVFTDDTTSPVRQELDLRQLAREKGYRVVGLASDLNVSATKVPPWKRKSLGDWLNNRAPEFDALLFWKIDRFIRNLNDLNVMIRWSETYSKNLISKNDPIDLTTTMGKMMVSLLGGVAEIEAANTKTRVESLWDYTKTQGEWHVGKPPFGYKTGRDAAGKVVLVEDPPAVETLHTARELVMSGMSTTAAAKELKERGLISSTTATLTRRLRNPGILGLRVEEDKDGGIRRSKLILGRDGQPIRIADPIFTEEQFEELQAVLDKRGKRQPHRQPGGATSFLGVLKCAECGTNMINHFTRNRHGDYAYLRCQGCKSGGCGAPNPQEVYDRLVEQVLAVLGDFPVEMREYARGEEKRKELKRLEESIAYYMKELEPGGRFTKTRFTQDQAEGTLDKLIAELEAIDPESAKDRWVYVAGGKTFREHWEEGGIDAMSADLIRAGIRCQVTRTKVPKVRAPQVHLKLMIPKDVRTRLVIRPDDFGQTF

SEQ ID NO: 11529 - protein, 525 aa, Unknown
  Description of Unknown: Integrase A97 sequence
  G3DSA:1.10.10.2600,SSF53041,PF13408,PS51737,cd00338, PTHR30461:SF3,PF00239,SM00857,G3DSA:3.40.50.1390,PTHR30461
MSARDYDIEAEWTPADLALLKELEEAEALLPADAPRALLSVRLSVFTDDTTSPVRQELDLRQLAREKGHRVVGLASDLNVSATKVPPWKRKSLGDWLNNRAPEFDALLFWKIDRFIRNLNDLNVMIRWSETYSKNLISKNDPIDLTTTMGKMMVSLLGGVAEIEAANTKTRVESLWDYTKTQGEWHVGKPPFGYRTGRDDSGKVVLVEDPLAVETLHTARELVMTGMSTTAAAKELKERGLISSTTATLTRRLRNPGILGLRVEEDKDGGIRRSKLILGRDGQPIRIADPIFTEEQFEELQAVLDKRGKRQPHRQPGGATSFLGVLKCAECGTNMINHFTRNRHGDYAYLRCQGCKSGGYGAPNPQEVYDRLVEQVLAVLGDFPVEMREYARGEEKRKELKRLEESIAYYMKELEPGGRFTKTRFTQDQAEGTLDKLIAELEAIDPESAKDRWVYVAGGKTFREHWEEGGIDAMSADLIRAGIRCQVTRTKVPKVRAPQVHLKLMIPKDVRTRLVIRPDDFGQTF

SEQ ID NO: 11530 - protein, 525 aa, Unknown
  Description of Unknown: Integrase A98 sequence
  G3DSA:1.10.10.2600,SSF53041,PF13408,PS51737,cd00338, PTHR30461:SF3,PF00239,SM00857,G3DSA:3.40.50.1390 ,PTHR30461
MSARDYDIEAEWTPADLALLKELEEAEALLPADAPRALLSVRLSVFTDDTTSPVRQELDLRQLAREKGHRVVGLASDLNVSATKVPPWKRKSLGDWLNNRAPEFDALLFWKIDRFIRNLNDLNVMIRWSETYSKNLISKNDPIDLTTTMGKMMVSLLGGVAEIEAANTKTRVESLWDYTKTQGEWHVGKPPFGYKTARDEAGKVVLVEDPLAVETLHTARELVMTGMSTTAVAKVLKERGLISSTTATLTRRLRNPGILGLRVEEDKDGGIRRSKLILGRDGQPIRIADPIFTEEQFEELQAVLDKRGKRQPHRQPGGATSFLGVLKCAVCETNMINHYTRNRHGDYAYLRCQGCKSGGCGAPNPQEVYDRLVEQVLAVLGDFPVEMREYARGEEKRKELKRLEESIAYYMKELEPGGRFTKTRFTQDQAEGTLDKLIAELEAIDPDSAKDRWVYVAGGKTFREHWEEGGIDAMSADLIRAGIQCQVTRTKVPKVRAPQVHLKLMIPKDVRTRLVIRPDDFGQTF

SEQ ID NO: 11531 - protein, 525 aa, Unknown
  Description of Unknown: Integrase A99 sequence
  G3DSA:1.10.10.2600,SSF53041,PF13408,PS51737,cd00338, PTHR30461:SF3,PF00239,SM00857,G3DSA:3.40.50.1390,PTHR30461
MSARDYDIEAEWTPADLALLKELEEAEALLPADAPRALLSVRLSVFTDDTTSPVRQELDLRQLAREKGHRVVGLASDLNVSATKVPPWKRKSLGDWLNNRAPEFDALLFWKIDRFIRNLNDLNVMIRWSETYSKNLISKNDPIDLTTTMGKMMVSLLGGVAEIEAANTKTRVESLWDYTKTQGEWHVGKPPFGYKTGRDDSGKVVLVEDPLAVETLHTARELVMTGMSTTAAAKELKERGLISSTTATLTRRLRNPGILGLRVEEDKDGGIRRSKLILGRDGQPIRIADPIFTEEQFEELQAVLDKRGKRQPHRQPGGATSFLGVLKCAECGTNMINHFTRNRHGDYAYLRCQGCKSGGYGAPNPQEVYDRLVEQVLAVLGDFPVEMREYARGEEKRKELKRLEESIAYYMKELEPGGRFTKTRFTQEQAEGTLDKLIAELEAIDPESAKDRWVYVAGGKTFREHWEEGGIDAMSADLIRAGIRCQVTRTKVPKVRAPQVHLKLMIPKDVRTRLVIRPDDFGQTF

SEQ ID NO: 11532 - protein, 525 aa, Unknown
  Description of Unknown: Integrase A100 sequence
  G3DSA:1.10.10.2600,SSF53041,PF13408,PS51737,cd00338, PTHR30461:SF3,PF00239,SM00857,G3DSA:3.40.50.1390, PTHR30461
MGARDYDIEAEWTPADLALLRELEEAESRLPSDAPRALLSVRLSVFTDDTTSPVRQELDLRQLAREKGLRVVGLASDLNVSATKVPPWKRKSLGDWLNNRAPEFDALLFWKIDRFIRNLNDLNVMIRWSETYSKNLISKNDPIDLTTTMGKMMVSLLGGVAEIEAANTKTRVESLWDYTKTQGEWHVGKPPFGYKTARDEAGKVVLVEDPVAVETLHTARELVMTGMSTTAAAKVLKERGLISSTTATLTRRLRNPGVLGLRVEEDKDGGIRRSKLILGRDGKPIRIADPIFTEEQFDELQAVLDKRGKRQPHRQPGGATSFLGVLKCAECGTNMINHFTRNRHGDYAYLRCQGCKSGGYGAPNPQEVYDRLVEQVLAVLGDFPVEMREYARGEEKRKELKRLEESIAYYMKELEPGGRFDKTRFTRDQAEGTLDKLIAELEAIDPESAKDRWVYVAGGKTFREHWEEGGIDAMSADLNRAGIQCQVTRTKIPKVRAPQVHLKLMIPKDVRTRLVIRPDDFGQTF

SEQ ID NO: 11533 - protein, 525 aa, Unknown
  Description of Unknown: Integrase A101 sequence
  PF07508,SSF53041,PS51737,cd00338,PTHR30461:SF3, PF00239,PS51736,SM00857,G3DSA:3.40.50.1390,PTHR30461
MAVMTCVFVVCLVNHRGLSGVRYKPMRALVVIRLSRVTDATTSPERQLESCQQLCAQRGWDVVGVAEDLDVSGAVDPFDRKRRPNLARWLAFEEQPFDVIVAYRVDRLTRSIRHLQQLVHWAEDHKKLIVSATEAHFDTTTPFAAVVIALMGTVAQMELEAIKERNRSAAHFNIRAGKYRGSLPPWGYMPARVDGEWRLLVDPVQRERILEVYHRVVDNHEPLHLVAHDLNQRGILSPKDYFAKLQGREPKGREWSATALKRSLISEAMLGYTTLNGKTVRDDDGAPLVRAEPILTREQLESLRAELVKTDRTKPAVSTPSLLLRVLFCAVCGEPAYKFTGGGRKNARYRCRSWGWAQRCGNGTVAMAEWDAFCEEQVLDLLGDAERLEKVWVAGSDAAVELTELNAELVDLTSLIGSPAYRAGSPQREALDARIAALAARQEELEGLEARPSGWEWRETGQRFGDWWRDQDTAGKNTWLRSMNVRLTFDVRGGLTRTIDFGDLQEYEQHLRLGSVVEQLHTGMS

SEQ ID NO: 11534 - protein, 524 aa, Unknown
  Description of Unknown: Integrase A102 sequence
  PF07508,G3DSA:1.10.10.2600,SSF53041,PS51737,cd00338, PTHR30461:SF3,PF00239,SM00857,G3DSA:3.40.50.1390, PTHR30461
MIKNLENIHHVAIYLRISQEKKGENVETLENHRQILIEFCEEHGFTYEEFGEVISGGKSEITQRVALKRLLDNIEKYDAIACFELTRISRNGLISQTVKQYCIDYDKPILTPYQSYDLANSETDRLLFDVGSMISSHEHSTIGKRSKANKMQMSKAGLHVSGNVPFGYKRNNETKKLEIDEEAAPTIRYIFQLHSEGYGSFKIRDILNNEGYKSATGKAFNLPSIKRIIRNPAYKGTLIFNNRKKIKRNGKFEYDNVETITVENAHPAIIPPDVWDKANQDRESRALKSISIREKPATKSGVTLLKDLIFCGVCGRKMIIRKDTKSSIGYTLKKCEYLLPNGEKCPNCGKKLDAVIARVLTGLIKYADDLSQMEERLRKNNASDLNEKNQLKLNQIDKAIMEIEQKQKNLIELAMEGLFSHEEIREKKQELVKRMDELKAKREEVVNSINALSVEEEIELIQEKRKLILSLREDMDQEYGNELLKRFIKKIHFTRVIPEDILKRSTRNSERQNYPFNIKFEFFD

SEQ ID NO: 11535 - protein, 523 aa, Unknown
  Description of Unknown: Integrase A103 sequence
  PF07508,G3DSA:1.10.10.2600,SSF53041,PS51737,cd00338, PTHR30461:SF3,PF00239,PS51736,SM00857,G3DSA:3.40.50.1390, PTHR30461
MTRPTNLDVIIHLRKSRKDIEEEKKALETGVPFDTLDKHKRELMELVRREQHNVIRIFEEIVSGEFLSERPEAQEMLRNVEDGECDAVIVMDLDRLGRGDMIDAGTIFRAFKYSETLIITPTEVIDCNAEGAELLFGVKSIIAREELKQINKRLQGGRRRAVKDGRHIAKKPPYGYLRDENLKLYPHPEEAPVVKKIFELLAEGSGRYKVIDYLMRSGYKAPSNKDIWEQSTISYIVKNEVYLGHLVWGKQKHTKRNGKRVRKNLPPELWTRHDNAHEPIVSQELFDRANEAHTGRLRVSRKEGTAITNPLAGIAKCGVCGRTLTQTHSYDRPNPQIRCNNPACKSIQKGSLTYLFEEKLISSLEELVEQRKMTQSELNNSAERKNKNEERILALTNYIQKATTELNEQHSMRETTFEMLERKVYTEELFLQRHKIISDKIKQLESEIEKSQEEIAQLKIRMRMQAQLIPKIHKVIQAYKSLEDAEQKNNLLKSVIEKVMYIRKKEWLKPEQFELEVILRFPT

SEQ ID NO: 11536 - protein, 523 aa, Unknown
  Description of Unknown: Integrase A104 sequence
  PF07508,SSF53041,PS51737,cd00338,PTHR30461:SF3,PF00239,PS51736 ,SM00857,G3DSA:3.40.50.1390,PTHR30461
MMTCVFVVCLVNHRGLSGVRYKPMRALVVIRLSRVTDATTSPERQLESCQQLCAQRGWDVVGVAEDLDVSGAVDPFDRKRRPNLARWLAFEEQPFDVIVAYRVDRLTRSIRHLQQLVHWAEDHKKLVVSATEAHFDTTSPFAAVVIALMGTVAQMELEAIKERNRSAAHFNIRAGKYRGSLPPWGYMPTRVEGEWRLVPDPVQRERILEVYHRVVDNHEPLHLVAHDLNRRGVLSPKDYFAKLQGREPQGREWSATALKRSLISEAMLGYATLNGKTVRDDDGAPLVRSEPILTREQLESLRAELVKADRAKPAVSTPSLLLRVLFCAVCGEPAYKFTGGGRKNARYRCRSWGWAQRCGNGTVAMAEWDAFCEEQVLDLLGDSERLEKVWVAGSDSAVELAEVNAELVDLTSLIGSPAYRVGSPQREALDARIAALAARQEELEGLEARPSGWEWRETGQRFGDWWRDQDTAAKNTWLRSMNVRLTFDVRGGLTRTIDFGDLQEYEQHLRLGSVVERLHAGMS

SEQ ID NO: 11537 - protein, 523 aa, Unknown
  Description of Unknown: Integrase A105 sequence
  PF07508,SSF53041,PS51737,cd00338,PTHR30461:SF3, PF00239,PS51736,SM00857,G3DSA:3.40.50.1390,PTHR30461
MMTCVFVVCLVNHRGLSGVRYKPMRALVVIRLSRVTDATTSPERQLESCQQLCAQRGWDVVGVAEDLDVSGAVDPFDRKRRPNLARWLAFEEQPFDVIVAYRVDRLTRSIRHLQQLVHWAEDHKKLVVSATEAHFDTTTPFAAVVIALMGTVAQMELEAIKERNRSAAHFNIRAGKYRGSLPPWGYLPTRVDGEWRLVPDPVQRERILEVYHRVVDNHEPLHLVAHDLNRRGVLSPKDYFAKLQGREPQGREWSATALKRSLISEAMLGYATLNGKTVRDDDGAPLVRAEPILTREQLEALRAELVKTGRTKPAAATPSLLLRVLFCAVCGEPAYKFAGGQRKNPRYRCRSMGFPKHCGNGTVAMAEWDAFCEEQVLDLLGDAERLEKVWVAGSDSAVELAEVNAELVDLTSLIGSPAYRVGSPQREALDARIAALAARQEELEGLEARPSGWEWRETGQRFGDWWREQDISAKNTWLRSMNVRLTFDVRGGLTRTIDFGDLQEYEQHLRLGSVVEQLHAGMS

SEQ ID NO: 11538 - protein, 523 aa, Unknown
  Description of Unknown: Integrase A106 sequence
  PF07508,G3DSA:1.10.10.2600,SSF53041,PF13408,PS51737,cd00338, PTHR30461:SF3,PF00239,PS51736,SM00857,G3DSA:3.40.50.1390, PTHR30461
MNENVTLIPARIRAGNRITRQENKPKLRVAAYCRVSTDSDEQAGSYDVQVKHYTEYIGRNKEWELAGIYADDGISGTNIKKREGFIEMIDDCMEGKVDMIITKSISRFARNTIDCLKYVRKLKEKNIAIIFEKENINTLEASGELLLTIMASLAQQESASLSQNIKLGLQFRYQEGKVQPNHEHFLGYTKDEDGKLIVDENEAKIVRRIFREYLEGASFRDIANGLEKDKIRTGGKRYKWHLSTIRGILRNEKYMGDALLQKTITTDFIEKIRIKNDGTVPQYYVKDSQEPIIARDIFMLVQEEMIRRANLTSGVDGKKKRVYSSKYALSSICTCTKCGDIYRRIAWNNRGKKSTVWRCCTRVEHGPSACNALTIQESELQDATVKAINKILICSDRMLQILSDNIEMAIADDNSVEMEKLNGILKGKQKELVKLAHAKKDYTALADEIDILRDKKKELQVQRAETEGVKKRIEELTDFLKGENHQLIEYDECMVRKYIEEIKVYEDKFTICFKAKVEIEVVR

SEQ ID NO: 11539 - protein, 523 aa, Unknown
  Description of Unknown: Integrase A107 sequence
  PF07508,G3DSA:1.10.10.2600,SSF53041,PF13408,PS51737, cd00338,PF00239,PS51736,SM00857,G3DSA:3.40.50.1390, PTHR30461
MNLAKNITMIPTRRMVGTQKPAEKTQKLRVAAYARVSTEFEEQESSYDVQVEHYTTYIKSNPEWELVEIYADDGISATSTTKREAFNRMIQDAKDGKIDMILTKSISRFSRNTVDCLKYTRELKALNIAVFFEKENINTLDAKGEVLMTIMAALAQQESESLSANVRLGNQFRNQQGKVQINHNRFLGYTKDEEGNLVIVPEEAKIVRRIYAEYMDGSSFLQIKRSLEKDGILNGAHNKKWHESNIRQILTNEKYIGDALLQKTFTLNTLEKKRVANNGIAPKYYVEGSHEAIIDRDVFLRVQAEISRRANILNGGKKRIYSSKYALSSMVFCGHCGDIFRRIKWNNRGCKSTVWRCVSRVLKKTSRIDCPARTIREEDLQAAVLTAINDTFNKKDEIIPTLMEIIQDVIDENSQESVEQLDIKIKDLQIRLLEVGKEQKMIDEIGEEIIALRKEKHDIMTEAAKNIELQERINDMFSFLQEQTQAITEYSDTLVRRLIEKITIYDNKAVVEFKSGLQSEVEI

SEQ ID NO: 11540 - protein, 522 aa, Unknown
  Description of Unknown: Integrase A108 sequence
  PF07508,SSF53041,PS51737,cd00338,PF00239,SM00857,G3DSA:3.40.50 .1390,PTHR30461
MAQPLRALVGARVSVVQGPQKVSHIAQQETGAKWVAEQGHTVVGSFKDLDVSATVSPFERPDLGPWLSPELEGEWDILVFSKIDRMFRSTRDCVKFAEWAEAHGKILVFAEDSMTLNYRDKDRSGSLESMMSELFIYIGSFFAQLELNRFKSRARDSHRVLRGMDRWASGVPPLGFRIVDHPSGKGKGLDTDPEGKAILEDMAAKLLDGWSFIRIAQDLNQRKVLTNMDKAKIAKGKPPHPNPWTVNTVIESLTSPRTQGIKMTKHGTRGGSKIGTTVLDAEGNPIRLAPPTFDPATWKQIQEAAARRQGNRRSKTYTANPMLGVGYCGACGASLAQQFTHRKLADGTEVTYRTYRCGRTPLNCNGISMRGDEADGLLEQLFLEQYGSQPVTEKVFVPGEDHSEELEQVRATIDRLRRESDAGLIATAEDERIYFERMKSLIDRRTRLEAQPRRASGWVTQETDKTNADEWAKASTPDERRRLLMKQGIRFELVRGKPDPEVRLFTPGEIPEGEPLPEPSPR

SEQ ID NO: 11541 - protein, 522 aa, Unknown
  Description of Unknown: Integrase A109 sequence
  PF07508,SSF53041,PS51737,cd00338,PTHR30461:SF3, PF00239,PS51736,SM00857,G3DSA:3.40.50.1390,PTHR30461
MTCVFVVCLVNHRGLSGVRYKPMRALVVIRLSRVTDATTSPERQLESCQQLCAQRGWDVVGVAEDLDVSGAVDPFDRKRRPNLARWLAFEEQPFDVIVAYRVDRLTRSIRHLQQLVHWAEDHKKLVVSATEAHFDTTTPFAAVVIALMGTVAQMELEAIKERNRSAAHFNIRAGKYRGSLPPWGYLPTRVEGEWRLVPDPVQRERILEVYHRVVDNHEPLHLVAHDLNRRGVLSPKDYFAKLQGREPQGREWSATALKRSLISEAMLGYATLNGKTVRDDDGAPLVRAAPILTREQLEALRAELVKTDRTKPAVSTPSLLLRVLFCAVCGEPAYKFAGGGRKHPRYRCRSMGFPKHCGNGTVAMAEWDAFCEEQVLDLLGDAERLEKVWVAGSDSAVELAEVNAELVDLTSLIGSPAYRVGSPQREALEARIAALATRQEELEGLEARPSGWEWRETGQRFGDWWREQDTAGKNTWLRSMNVRLTFDVRGGLTRTIDFGDLQEYEQHLRLGSVVERLHTGMS

SEQ ID NO: 11542 - protein, 522 aa, Unknown
  Description of Unknown: Integrase A110 sequence
  PF07508,SSF53041,PS51737,cd00338,PF00239,SM00857, G3DSA:3.40.50.1390,PTHR30461
MAQPLRALVGARVSVVQGPQKVSHIAQQETGAKWVAEQGHTVVGSFKDLDVSATVSPFERPDLGPWLSPELEGEWDILVFSKIDRMFRSTRDCVKFAEWAEAHGKILVFAEDNMTLNYRDKDRSGSLESMMSELFIYIGSFFAQLELNRFKSRARDSHRVLRGMDRWASGVPPLGFRIVDHPSGKGKGLDTDPEGKAILEDMAAKLLDGWSFIRIAQDLNQRKVLTNMDKAKIAKGKPPHPNPWTVNTVIESLTSPRTQGIKMTKHGTRGGSKIGTTVLDAEGNPIRLAPPTFDPATWKQIQEAAARRQGNRRSKTYTANPMLGVGYCGACGASLAQQFTHRKLADGTEVTYRTYRCGRTPLNCNGISMRGDEADGLLEQLFLEQYGSQPVTEKVFVPGEDHSEELEQVRATIDRLRRESDAGLIATAEDERIYFERMKSLIDRRTRLEAQPRRASGWVTQETDKTNADEWAKASTPDERRRLLMKQGIRFELVRGKPDPEVRLFTPGEIPEGEPLPEPSPR

SEQ ID NO: 11543 - protein, 522 aa, Unknown
  Description of Unknown: Integrase A111 sequence
  PF07508,SSF53041,PS51737,cd00338,PF00239, SM00857,G3DSA:3.40.50.1390,PTHR30461
MAQPLRALVGARVSVVQGPQKVSHIAQQETGAKWVAEQGHTVVGSFKDLDVSATVSPFERPDLGPWLSPELEGEWDILVFSKIDRMFRSTRDCVKFAEWAEAHGKILVFAEDNMTLNYRDKDRSGSLESMMSELFIYIGSFFAQLELNRFKSRARDSHRVLRGMDRWASGVPPLGFRIVDHPSGKGKGLDTDPEGKAILEDMAAKLLDGWSFIRIAQDLNQRKVLTNMDKAKIAKGKPPHPNPWTVNTVIESLTSPRTQGIKMTKHGTRGGSKIGTTVLDAEGNPIRLAPPTFDPATWKQIQEAAARRQGNRRSKTYTANPMLGVGHCGACGASLAQQFTHRKLADGTEVTYRTYRCGRTPLNCNGISMRGDEADGLLEQLFLEQYGSQPVTEKVFVPGEDHSEELEQVRATIDRLRRESDAGLIATAEDERIYFERMKSLIDRRTRLEAQPRRASGWVTQETDKTNADEWTKASTPDERRRLLMKQGIRFELVRGKPDPEVRLFTPGEIPEGEPLPEPSPR

SEQ ID NO: 11544 - protein, 522 aa, Unknown
  Description of Unknown: Integrase A112 sequence
  PF07508,SSF53041,PS51737,cd00338,PTHR30461:SF3,PF00239,PS51736, SM00857,G3DSA:3.40.50.1390,PTHR30461
MTCVFVVCLVNHRGLSGVRYKPMRALVVIRLSRVTDATTSPERQLESCQQLCAQRGWEVVGVAEDLDVSGAVDPFDRKRRPNLARWLAFEEQPFDVIVAYRVDRLTRSIRHLQQLVHWAEDHKKLVVSATEAHFDTTTPFAAVVIALMGTVAQMELEAIKERNRSAAHFNIRAGKYRGSLPPWGYLPTRVDGEWRLVPDPVQRERILEVYHRVVDNHEPLHLVAHDLNRRGVLSPKDYFAKLQGREPQGREWSATALKRSLISEAMLGYATLNGKTVRDDDGAPLVRAEPILTREQLEALRAELVKTDRTKPAVSTPSLLLRVLFCAVCGEPAYKFAGGGRKHPRYRCRSMGFPKHCGNGTVAMAEWDAFCEEQVLDLLGDSERLEKVWVAGSDSAVELAEVNAELVDLTSLIGSPAYRAGSPQREALDARIAALAARQEELEGLEARPSGWEWRETGQRFGDWWREQDTAAKNTWLRSMNVRLTFDVRGGLTRTIDFGDLQEYEQHLRLGSVVERLHTGMS

SEQ ID NO: 11545 - protein, 522 aa, Unknown
  Description of Unknown: Integrase A113 sequence
  PF07508,SSF53041,PS51737,cd00338,PTHR30461:SF3, PF00239,PS51736,SM00857,G3DSA:3.40.50.1390,PTHR30461
MMTCVFVVCLVNHRGLSGVRYKPMRALVVIRLSRVTDATTSPERQLESCQQLCAQRGWDVVGVAEDLDVSGAVDPFDRKRRPNLARWLSFEDQPFDVIVAYRVDRLTRSIRHLQQLVHWAEDHKKLVVSATEAHFDTTTPFAAVVIALMGTVAQMELEAIKERNRSAAHFNIRAGKYRGSLPPWGYLPTRVDGEWRLVPDPVQRERILEVYHRVVDNHEPLHLVAHDLNRRGVLSPKDYFAQLQGREPQGRAWSATALKRSLISEAMLGYTTLNGKTVRDDDGAPLVRAEPILTREQLEALRAELVKTDRTKPAVSAPSLLLRVLFCAVCGEPAYKFDAGRKIPRYRCRSFGFAQRCGNGTIPIAEWDAFCEEQVLDLLGDSERLEKVWVAGSDSAVELAEVNAELVDLTSLIGSPAYRVGSPQREALDSRIAALAARQEELEGLEARPSGWEWRETGQRFGDWWREQDIAAKNTWLRSMNVRLTFDVRGGLTRTIDFGDLQEYEQHLRLGSVVERLHTGMS

SEQ ID NO: 11546 - protein, 522 aa, Unknown
  Description of Unknown: Integrase A114 sequence
  PF07508,SSF53041,PS51737,cd00338,PTHR30461:SF3,PF00239, PS51736,SM00857,G3DSA:3.40.50.1390,PTHR30461
MTCVFVVCLVNHRGLSGVRYKPMRALVVIRLSRVTDATTSPERQLESCQQLCAQRGWDVVGVAEDLDVSGAVDPFDRKRRPNLARWLAFEEQPFDVIVAYRVDRLTRSIRHLQQLVHWAEDHKKLVVSATEAHFDTTTPFAAVVIALMGTVAQMELEAIKERNRSAAHFNIRAGKYRGSLPPWGYLPTRVDGEWRLVPDPVQRERILEVYHRVVDNHEPLHLVAHDLNQRGLPSPKDYFAKLQGREPKGREWSATALKRSLISEAMLGYATLNGKTVRDDDGAPLVRAEPILTREQLEALRAELVKTDRTKPAVSTPSLLLRVLFCAVCGEPAYKFAGGQRKNPRYRCRSMGFPKHCGNGTVAMAEWDAFCEEQVLDLLGGSERLEKVWVSGSDSAVELAEVNAELVDLTSLIGSPAYRVGSPQREALDARIAALAARQEELEGLEARPSGWEWRETGQRFGDWWREQDIAAKNTWLRSMNVRLTFDVRGGLTRTIDFGDLQEYEQHLRLGSVVERLHTGMS

SEQ ID NO: 11547 - protein, 522 aa, Unknown
  Description of Unknown: Integrase A115 sequence
  PF07508,SSF53041,PS51737,cd00338,PTHR30461:SF3, PF00239,PS51736,SM00857,G3DSA:3.40.50.1390,PTHR30461
MTCVFVVCLVNHRGLSGVRYKPMRALVVIRLSRVTDATTSPERQLESCQQLCAQRGWDVVGVAEDLDVSGAVDPFDRKRRPNLARWLAFEEQPFDVIVAYRVDRLTRSIRHLQQLVHWAEDHKKLVVSATEAHFDTTTPFAAVVIALMGTVAQMELEAIKERSRSAAHFNIRAGKYRGSLPPWGYLPTRVDGEWRLVPDPVQRERILEVYHRVVDNHEPLHLVAHDLNQRGLPSPKDYFAKLQGREPKGREWSATALKRSLISEAMLGYATLNGKTVRDDDGAPLVRAEPILTREQLEALRAELVKTDRTKPAVSTPSLLLRVLFCAVCGEPAYKFAGGQRKNPRYRCRSMGFPKHCGNGTVAMAEWDAFCEEQVLDLLGGSERLEKVWVSGSDSAVELAEVNAELVDLTSLIGSPAYRVGSPQREALDARIAALAARQEELEGLEARPSGWEWRETGQRFGDWWREQDIAAKNTWLRSMNVRLTFDVRGGLTRTIDFGDLQEYEQHLRLGSVVERLHTGMS

SEQ ID NO: 11548 - protein, 522 aa, Unknown
  Description of Unknown: Integrase A116 sequence
  PF07508,SSF53041,PS51737,cd00338,PTHR30461:SF3,PF00239, PS51736,SM00857,G3DSA:3.40.50.1390,PTHR30461
MMTCVFVVCLVNHRGLSGVRYKPMRALVVIRLSRVTDATTSPERQLESCQQLCAQRGWDVVGVAEDLDVSGAVDPFDRKRRPNLARWLAFEEQPFDVIVAYRVDRLTRSIRHLQQLVHWAEDHKKLVVSATEAHFDTTTPFAAVVIALMGTVAQMELEAIKERNRSAAHFNIRAGKYRGSLPPWGYLPTRVDGERRLVPDPVQRERILEVYHRVVDNHEPLHLVAHDLNRRGVLSPKDYFAKLQGREPQGREWSATALKRSLISEAMLGYATLNGKTVRDDDGAPLVRAEPILTREQLEALRAELVKTDRAKPAVSTPSLLLRVLFCAVCGEPAYKFDAGRKIPRYRCRSFGFAQRCGNGTVPIAEWDAFCEEQVLDLLGDSERLEKVWVAGSDSAVELAEVNAELVDLTSLIGSPAYRVGSPQREALDARIAALAARQEELEGLEARPSGWEWRETGQRFGDWWREQDTSAKNTWLRSMNVRLTFDVRGGLTRTIDFGDLQEYEQHLRLGSVVEQLHAGMS

SEQ ID NO: 11549 - protein, 522 aa, Unknown
  Description of Unknown: Integrase A117 sequence
  PF07508,SSF53041,PS51737,cd00338,PTHR30461:SF3, PF00239,PS51736,SM00857,G3DSA:3.40.50.1390,PTHR30461
MMTCVFVVCLVNHRGLSGVRYKPMRALVVIRLSRVTDATTSPERQLESCQQLCAQRGWDVVGVAEDLDVSGAVDPFDRKRRPNLARWLSFEEQPFDVLVAYRVDRLTRSIRHLQQLVHWAEDHKKLIVSATEAHFDTTSPFAAVVIALMGTVAQMELEAIKERNRSAAHFNIRAGKYRGSLPPWGYMPARVDGEWRLLVDPVQRERILEVYHRVVDNHEPLHLVAHDLNQRGILSPKDYFAQLQGREPQGRAWSATALKRSLISEAMLGYTTLNGKTVRDDDGAPLVRAEPILTREQLEALRAELVKTDRTKPAVSAPSLLLRVLFCAVCGEPAYKFDAGRKIPRYRCRSFGFAQRCGNGTIPIAEWDAFCEEQVLDLLGDAERLEKVWVAGSDSAVELAEVNAELVDLTSLIGSPAYRAGSPQREALDARIAALAARQEELEGLEARPSGWEWRETGQRFGDWWREQDTAAKNTWLRSMNVRLTFDVRGGLTRTIDFGDLQEYEQHLRLGSVVEQLHTGMS

SEQ ID NO: 11550 - protein, 521 aa, Unknown
  Description of Unknown: Integrase A118 sequence
  PF07508,G3DSA:1.10.10.2600,SSF53041,PF13408,PS51737,cd00338, PTHR30461:SF3,PF00239,PS51736,SM00857,G3DSA:3.40.50.1390, PTHR30461
MKNVITIEANAPRNSELASISLPKKRRVAGYARVSTDHEDQTTSYESQMRYYAEYISTRSDWEFVKMYSDEGISGTNTKLRVGFKSMIEDALAGKIDLIITKSVSRFARNTVDSLTTVRKLKEVGVEIYFEKENIWTLDSKGELLITIMSSLAQEESRSISENVTWGLRKQFAEGKVHFPYTNVMGFEKGENGEIVVNQEEAKTVRYIFQQALLGKTPYSIAKDLTQQGILSPSGKNHWSSVTIKRMLRNEKYKGDALLQKTYTIDFLSKKKNINKGELPQYYVENNHEAIVDKETFDAVQASLDRKEKGKGSTTLFSSKLVCGDCGHYFGSKVWHSTSKYRRVIYQCNEKYKGEKKCTTPHVTEDEIKDWFVTAINKVISNKDEIIQNLEMLLDVGESSDLERRLVELETEVEVVTQMVSNLVKENAIMPQDQDTYQKKYSNLVERHDALVSEIESIEKQLLEAASHQKDLKEFLKTLNQQSELISEFDELLWETMVDEIKIFCDQTVAIKFKNGIEVVE

SEQ ID NO: 11551 - protein, 521 aa, Unknown
  Description of Unknown: Integrase A119 sequence
  PF07508,SSF53041,PS51737,cd00338,PTHR30461:SF3, PF00239,PS51736,SM00857,G3DSA:3.40.50.1390,PTHR30461
MRVLGRIRLSRATDESTSVERQREIIAQWASLHGHQIVGWAEDQDVSGTVDPFKAPALGPWFKEDKRGEWDILCCWKLDRLTRSAIRLSAVIGWCLDHDKTIVSCGEEYLDISTPVGRLIAGVIGFLAEGEREAISERTLASQKKLRETGRWGGGKIFYGYKAAERQDAAGWELVPDEHASKVLYGIIEKVLAGQSTESVARELNEAGEMAPLDYQRHRAGKPTKGGMWSNAHIRQQLRSKALLGHMTHNGKTVRDEDGLPILKGPPLIDQDKFDQLQGVLENRSFTVSQRSTNASPLLSVAFCGMTVEDGVCGKPLHIRQHRRNGKLYRYYQCTGGADGHVKTHTEANIIKADELEEKFENWFLAVYGDERVKEQVFIPASDQSAEKAELVRAAQDIAPLYAAAASGTMKSLYLSQLESFDRRIAELDKMPTESARYEWREQTKTYGEVWETSTTEERRQLLMKRKVRAEVAVPKGDGRYRSSGQAMIHMFALDIDMEAFEARAAEERRKYGIPDDEVAL

SEQ ID NO: 11552 - protein, 521 aa, Unknown
  Description of Unknown: Integrase A120 sequence
  PF07508,SSF53041,PS51737,cd00338,PTHR30461:SF3,PF00239, PS51736,SM00857,G3DSA:3.40.50.1390,PTHR30461
MTCVFVVCLVNHRGLSGVRYKPMRALVVIRLSRVTDATTSPERQLESCQRLCAQRGWDVVGVAEDLDVSGAVDPFDRKRRPNLARWLAFEEQPFDVIVAYRVDRLTRSIRHLQQLVHWAEDHKKLVVSATEAHFDTTTPFAAVVIALMGTVAQMELEAIKERNRSAAHFNIRAGKYRGSLPPWGYLPTRVDGEWRLVPDPVQRERILEVYHRVVDNHEPLHLVAHDLNRRGVLSPKDYFAKLQGREPQGREWSATALKRSLISEAMLGYATLNGKTVRDDDGAPLVRAEPILTREQLGALRAELVKTDRTKPAVATPSLLLRVLFCAVCGEPAYKFDAGRKIPRYRCRSFGFAARCGNGTVPIAEWDAFCEEQVLDLLGDSERLEKVWIAGSDSAVELAEVNAELVDLTSLIGSPAYRVGSPQREALDARIAALAARQEELEGLEARPSGWEWRETGQRFGDWWREQDTAAKNTWLRSMNVRLTFDVRGGLTRTIDFGDLQEYEQHLRLGSVVERLHTGMS

SEQ ID NO: 11553 - protein, 521 aa, Unknown
  Description of Unknown: Integrase A121 sequence
  PF07508,G3DSA:1.10.10.2600,SSF53041,PF13408,PS51737, cd00338,PTHR30461:SF3,PF00239,PS51736,SM00857, G3DSA:3.40.50.1390,PTHR30461
MARITKIETTKSFVKERKIRVAAFTRVSTKSEEQLLSLEIQKEHYESYINANSSWEYAGLYYDEGISGTKIEKREGLLALLKDCEDGKIDRVITKSISRFSRNTTDCLEMVRKLTSLKVFLFFEKENIDTEHMSSELMLSILSSIAESESKSISQNSKWSIKNHFKAGTFIISYPPYGYENKDGKMNIVPKEADIVKEIFTMTINGMGTHLIARELNNRSIPSKKGDKWHGSTVRGILQNEKYTGDAIFQKTYTDDNYNRHINYGEENMYLYKNHHEPIISHEIFDKVAEVIKQRGREKSIEKGTGKYQSRYVFSGKIYCGECGATFKRRQHYKPSGDYVAWCCNRHITDKNACSMMYIRDEDIKTTFLRMIRKLQTVHDQVLKPFVMSLKGTNNKQRLKQVLALEEQIEKNAEQATVLTNLMSSGYIEPEVFHAENNQLTLEADRLARNKQLIVKSINGDLSHLDEAQKLLRFTSKKEVITEFNDALFLEYVDTIKVNNRNEITFALKCGLNLTERLVKI

SEQ ID NO: 11554 - protein, 521 aa, Unknown
  Description of Unknown: Integrase A122 sequence
  PF07508,G3DSA:1.10.10.2600,SSF53041,PF13408,PS51737,cd00338, PTHR30461:SF3,PF00239,PS51736,SM00857,G3DSA:3.40.50.1390, PTHR30461
MKNVITIGANAPRNSELASISLPKKRRVAGYARVSTDHEDQTTSYESQMKYYTEYISSRSDWEFVKMYSDEGISGTNTKLRVGFKSMIEDALAGKIDLIITKSVSRFARNTVDSLTTVRKLKEVGVEIYFEKENIWTLDSKGELLITIMSSLAQEESRSISENVTWGLRKQFAEGKVHFPYTNVMGFEKGENGEIVVNQEDAKTVRYIFQQALLGKTPYSIAKDLTQQGILSPSGKNHWSSVTIKRMLRNEKYKGDALLQKTYTIDFLSKKKNINKGELPQYYVENNHEAIVDKETFDAVQATLDRKEKGKGSTTLFSSKLVCGDCGHYFGSKVWHSTSKYRRVIYQCNEKYKGEKKCTTPHVTEDEIKDWFVSAINKVISNKDEIISNLETLLEISGTADLEQRMKELETEVEVVSQMISKLVTDNAVMPQNQDVYQEKYRNLVDRYDALIVELESVEKEHLDKAKRNKELQAFLKTLKSQECLVTEFDDLLWETAVERIIIKENRNIEFIFKNGEVTVH

SEQ ID NO: 11555 - protein, 521 aa, Unknown
  Description of Unknown: Integrase A123 sequence
  PF07508,G3DSA:1.10.10.2600,SSF53041,PF13408,PS51737, cd00338,PTHR30461:SF3,PF00239,PS51736,SM00857, G3DSA:3.40.50.1390,PTHR30461
MKKVITIEPARPVHQVEETSVFTRRRVAGYARVSTDHEEQATSYEAQMKYYTDYINSRIDWEFVKMYSDEGITGTNTKSRMGFKEMINDALDGKIDLIITKSVSRFARNTVDSLSTVRKLKEHGVEIYFEKENIWTFDSKGELLITIMSSLAQEESRSISENVKWGKRKQFERGKVSIPFKSTLGFQRGEHGELVVNQEEAKLVRYIFHEFLTGKNCNTIAKSLTEKGILTPMGKTKWTFGTIKRILQNEKYKGDALLQKTFVTDFLTKSTKVNEGELPQYYVENNHEAIIEKEVFELVQVEFVKQKQRKSSKTLFSGKLICESCGAAFGSKVWHSNSKYRRVVYRCNHKYDGDKKCKTPHVIENEVKQWFIEAMNQVIENKAEILANLEALRKVVANTSELDSEISRLETELTDLTSEVEQLISDNTRTIQDQTSYQNTYNQLASQYEEKKAELERLKVEKADKQKRAVKVKDVIDTFTHQQCLLTAFDEKLWNTMVEQVIITKEKSAIFTFKSGQEIII

SEQ ID NO: 11556 - protein, 521 aa, Unknown
  Description of Unknown: Integrase A124 sequence
  PF07508,G3DSA:1.10.10.2600,SSF53041,PF13408,PS51737,cd00338, PTHR30461:SF3,PF00239,PS51736,SM00857,G3DSA:3.40.50.1390, PTHR30461
MKKVITIEPAKQVSHKVDLPSFTKRRVAGYARVSTDHEDQTTSYEAQMKYYTDYINNRSDWEFVKMYSDEGISGTNTKARIGFQRMVEDALDGKIDLILTKSVSRFARNTVDSLSTVRKLKEAGVEIYFEKENIWTFDSKGELLITIMSSLAQEESRSISENVTWGRRRQLAEGQVTFSYSQVLGFKKSDTGGFEIDHEEAKIVRYIFHQVLLGNNPNKIARELTAQGIPTPQGKRQWSYGTVKRMLRNEKYKGDALLQKSFTTDFLTKSTKPNEGELPQYYVENNHEAIIKREVFDLVQVELDKLEKKRQTSNIFTGRLFCGDCGSAFGSKVWHSTSKYKRTIYQCNAKYKGEHKCRTPHVTEEEIKGWFLSAINQLLSNRDEIIANTELLIDMAKDTSPLESRIDDLEHHLETIRQDIEDLVDRNARKAQNQDLYQEQYDTLVTAYQEIQKELQEATLSLEEQKSRSISLDGFIQELKQQDSLITDFNQELWQTSVERLDIKVDKHISLTFKNGVRIDL

SEQ ID NO: 11557 - protein, 521 aa, Unknown
  Description of Unknown: Integrase A125 sequence
  PF07508,G3DSA:1.10.10.2600,SSF53041,PF13408,PS51737, cd00338,PTHR30461:SF3,PF00239,PS51736,SM00857, G3DSA:3.40.50.1390,PTHR30461
MKKVITIEPAKQVTHKVDLPSFTKRRVAGYARVSTDHEDQTTSYEAQMTYYTDYINSRSDWEFVKMYSDEGISGTNTKKRLGFQEMVEDALDGKVDLILTKSVSRFARNTVDSLSTVRKLKEAGVEIYFEKENIWTFDSKGELLITIMSSLAQEESRSISENVTWGRRRQLAEGQVTFSYSQVLGFKKSDTGGFEIDQEEAKIVRYIFHQVLLGNNPNKIARELTAQGIPTPQGKRKWSYGTVKRMLRNEKYKGDALLQKSFTTDFLTKSTKPNEGELPQYYVENNHEAIIKREVFDLVQVELDKLEKKRQTNNIFTGRLFCGDCGSAFGSKVWHSTSKYKRTIYQCNAKYKGEHKCQTPHVTEEEIKGLFLSAMNQLLSNREEIVANTELLIDLAKDTSPLENKIDDLEQQLETIRQDIEDLVDRNARKAQNQDLYQEQYDTLVTAYQERQKELQEATSSLEEQKSKQLSLDGFIQQLKQQEDLITDFNQELWQTSVERLDIKEGKKISLTFKNGVRIDL

SEQ ID NO: 11558 - protein, 521 aa, Unknown
  Description of Unknown: Integrase A126 sequence
  PF07508,G3DSA:1.10.10.2600,SSF53041,PF13408,PS51737,cd00338, PTHR30461:SF3,PF00239,PS51736,SM00857,G3DSA:3.40.50.1390, PTHR30461
MKKVITIEPAKQVTHKVDLPSFTKRRVAGYARVSTDHEDQTTSYEAQMTYYTDYINSRSDWEFVKMYSDEGISGTNTKKRLGFQEMVEDALDGKVDLILTKSVSRFARNTVDSLSTVRKLKEAGVEIYFEKENIWTFDSKGELLITIMSSLAQEESRSISENVTWGRRRQLAEGQVTFSYSQVLGFKKSDTDGFEIDQEEAKIVRYIFHQVLLGNNPNKIARKLTAQGIPTPQGKRKWSYGTVKRMLRNEKYKGDALLQKSFTTDFLTKSKKANEGELPQYYVENNHEAIIKRDVFDLVQVELDKLEKKRQTSNIFTGRLFCGDCGSAFGSKVWHSTSKYKRTIYQCNAKYKDEHKCQTPHVTEEEIKGWFLSAMNQLLSNREEIVANTELLIDLAKDTSPLENKIDDLEQQLETIRQDIEDLVDRNARKAQNQDLYQEQYDTLVTAYQERQKELQEATSSLEEQKSKQLSLDGFIQQLKQQEDLITDFNQELWQTSVERLDIKEGKKISLTFKNGVRIDL

SEQ ID NO: 11559 - protein, 521 aa, Unknown
  Description of Unknown: Integrase A127 sequence
  PF07508,G3DSA:1.10.10.2600,SSF53041,PF13408,PS51737, cd00338,PTHR30461:SF3,PF00239,PS51736,SM00857, G3DSA:3.40.50.1390,PTHR30461
MKKVITIEPAKQVTHKVDLPSFTKRRVAGYARVSTDHEDQTTSYEAQMTYYTDYINSRSDWEFVKMYSDEGISGTNTKKRLGFQEMVEDALDGKVDLILTKSVSRFARNTVDSLSTVRKLKEAGVEIYFEKENIWTFDSKGELLITIMSSLAQEESRSISENVTWGRRRQLAEGQVTFSYSQVLGFKKSDTGGFEIDQEEAKIVRYIFHQVLLGNNPNKIARELTAQGIPTPQGKRKWSYGTVKRMLRNEKYKGDALLQKSFTTDFLTKSTKPNEGELPQYYVENNHEAIIKREVFDLVQVELDKLEKKRQTNNIFTGRLFCGDCGSAFGSKVWHSTSKYKRTIYQCNAKYKGEHKCQTPHVTEEEIKGWFLSAMNQLLSNREEIVANTELLIDLAKDTSPLENKIDDLEQQLETIRQDIEDLVDRNARKAQNQDLYQEQYDTLVTAYQERQKELQEATSSLEEQKSKQLSLDGFIQQLKQQEDLITDFNQELWQTSVERLDIKEGKKISLTFKNGVRIDL

SEQ ID NO: 11560 - protein, 520 aa, Unknown
  Description of Unknown: Integrase A128 sequence
  PF07508,G3DSA:1.10.10.2600,SSF53041,PF13408,PS51737,cd00338, PTHR30461:SF3,PF00239,PS51736,SM00857,G3DSA:3.40.50.1390, PTHR30461
MKNKIAIYVRVSTTKESQKDSPEHQKWACIEHCKQIDLDTSDLIIYEDRDTGTSIVARPQIQEMISDAQKGLFNTILFSSLSRFSRDALDSISLKRIFVNALGIRVISIEDFYDSQVEDNEMLFGIVSVVNQKLSEQISVASKRGIKQSAAKGNFIGNIAPYGYQKVNIEGRKTLIVDIEKAKVVREIFDLYVNKKMGEKEITKHLNENAIPSAKGGTWGITSVQRILQNEIYTGYNVYGKYEIKKVYTNLKNIGDRKRKLVKKDQELWQKSEKRTHQEIISQELYKKAQEIRQIRGGGKRGGRRKYVNVFAKIIYCKHCGSAMVTASCKKPDKYRYLICSKRRRHGASGCPNDKWIPYYDFRDEVISWVVEKLNKMIDSETGSEYSINFVSSINQNIGKEIDKINKLIESNRRLLFELRKSKMLGEIDEKQYGFEKEEYEKEILQLEEKVIKLTENERHDKDFEKIRKEIKQSVDELVTMGNYDDVEKTRIILSRLIQRIVVDSEGQIDVITPLGVVKD

SEQ ID NO: 11561 - protein, 520 aa, Unknown
  Description of Unknown: Integrase A129 sequence
  PF07508,G3DSA:1.10.10.2600,SSF53041,PF13408,PS51737, cd00338,PTHR30461:SF3,PF00239,PS51736,SM00857, G3DSA:3.40.50.1390,PTHR30461
MKNKIAIYVRVSTTKESQKDSPEHQKWACIEHCKQIDLDTADLIIYEDRDTGTSIVARPQIQEMISDAQKGLFNTILFSSLSRFSRDALDSISLKRIFVNALGIRVISIEDFYDSQIEDNEMLFGIVSVVNQKLSEQISVASKRGIKQSAAKGNFIGNIAPYGYQKVNIEGRKTLIVDIEKAKVVREIFDLYVNKKMGEKEITKHLNENAIPSAKGGTWGITSVQRILQNEIYTGYNVYGKYEIKKVYTNLKNIGDRKRKLVKKDQELWQKSEKRTHPEIISQELYKKAQEIRQIRGGGKRGGRRKYVNVFAKIIYCKHCGSAMVTASCKKSDKYRYLICSKRRRHGASGCPNDKWIPYYDFRDEVISWVVEKLKKMINSETGSEYSINFVSSINQNIGKEIDKINKLIESNRRLLFELRKSKMLGEIDEKQYGFEKEEYEKEILQLEEKVIKLTENERHDKDFEKIRKEIKQSVDELVTMGNYDDVEKTRIILSRLIQRIVVDSDGQIDVITPLGVIKD

SEQ ID NO: 11562 - protein, 520 aa, Unknown
  Description of Unknown: Integrase A130 sequence
  PF07508,SSF53041,PS51737,cd00338,PTHR30461:SF3,PF00239,PS51736, SM00857,G3DSA:3.40.50.1390,PTHR30461
MVCLVNHRGLSGVRYKPMRALVVIRLSRVTDATTSPERQLESCQQLCAQRGWDVVGVAEDLDVSGAVDPFDRKRRPNLARWLAFEEQPFDVIVAYRVDRLTRSIRHLQQLVHWAEDHKKLVVSATEAHFDTTTPFAAVVIALMGTVAQMELEAIKERNRSAAHFNIRAGKYRGSLPPWGYLPTRVDGEWRLVPDPVQRERILEVYHRVVDNHEPLHLVAHDLNRRGVLSPKDYFAKLQGREPQGREWSATALKRSLISEAMLGYATLNGKTVRDDDGAPLVRAEPILTREQLEALRAELVKTSRAKPAVATPSLLLRVLFCAVCGEPAYKFDAGRKIPRYRCRSFGFAVRCGNGTVPIAEWDAFCEEQVLDLLGDSERLEKVWVAGSDSAVELAEVNAELVDLTSLIGSPAYRAGSPQREALDARIAALAARQEELEGLEARPSGWEWRETGQRFGDWWRDQDTAGKNTWLRSMNVRLTFDVRGGLTRTIDFGDLQEYEQHLRLGSALDLVNAEKPPTGR

SEQ ID NO: 11563 - protein, 520 aa, Unknown
  Description of Unknown: Integrase A131 sequence
  PF07508,SSF53041,PS51737,cd00338,PTHR30461:SF3, PF00239,PS51736,SM00857,G3DSA:3.40.50.1390,PTHR30461
MKNPENREPEFQHSSLLATVSDMRVLGRLRISRATEESTSIERQREIVEQWASVNDHEIVGWAVDQDVSGSVDPFDAPALGPWLSDHRKHEWDILCAWKLDRLSRRAIPMNKLFGWMIDNDKTLVCVSENLDLGTWVGRMIANVIAGVAEGELEAIRERTTASHKKLRELGRWAGGPTYYGYIPKPRDGAGWELDIDPHAASVLREIIEKTIAGVPSETIVVELNERGELSPSDYHRKRNGKPVKGTAWNTSWLRQQLKSKTLLGHMTHKGETVYDDAGLPVQKGPALIDRDTYKQLQDALESRGINRTRRRTGASPLLGVAVCDVCDGPLYYRQTKNSKGTGMLRQYICKHGRYGNTKANGGEPYNIIQADLLEATVEELFLSKMGDQPRVERVFIPGEGHQHELETAERAVEDLTSLLGTITQEGARKRLLAQLAAAHERLAHLEELPSSEPHWETRETGETYREAWEGATTEERRQILLKAGVTLKVQMKDRVPRVHPGVIVANWIEPHDIEKRLAS

SEQ ID NO: 11564 - protein, 520 aa, Unknown
  Description of Unknown: Integrase A132 sequence
  PF07508,G3DSA:1.10.10.2600,SSF53041,PF13408,PS51737,cd00338, PTHR30461:SF3,PF00239,PS51736,SM00857,G3DSA:3.40.50.1390, PTHR30461
MKKITKIDELPQGQLPNTKLRVAAYARVSTDSDEQLESLKAQREHYERYIKSNPEWEFAGLYYDEGISGTKMEKRTELLRMIRDCKRGRIDFIITKSISRFARNTVDCLELVRKLIDIGVYIYFEKENLNTGDMESELMLSILSGFATEESASISQNSTWSIQKRFQNGSYVGTPPYGYTNIDGEMVIVPEEAEIIKRIFAECLSGKGGGTIARGLNKDKIPASRGNHWSAGTVIDMLRNEKYMGDVLLQKTYTDSNYNRHPNTGEKDQYYYKDNHEPIISREDFAKAQDLIDERAKMKCKGVKKNVYLNRYALSGKIVCGECGRNFRRKTNYSVGRSYIAWSCIGHIEDKESCSMLFLRDGEIKATLTTMMNKLAFSHKLILEPLFKSISQIDKESDRERMDAIDKRLEQLMEERNTLITLMAKGFLEPALFNQERNVLDSEMKNLSTEKTNLVSNSASGILRANEIKDLIDYVSADNFNGDYTEEIFEEFVENIIVNSRDELTFNLKCGLSLKEKVVR

SEQ ID NO: 11565 - protein, 520 aa, Unknown
  Description of Unknown: Integrase A133 sequence
  PF07508,G3DSA:1.10.10.2600,SSF53041,PF13408,PS51737, cd00338,PTHR30461:SF3,PF00239,PS51736,SM00857, G3DSA:3.40.50.1390,PTHR30461
MTEKNIMVIPARKRVGSTAAKEKIKKLRVAAYCRVSTETEEQNSSYEVQVAHYTEFIKKNNEWEFAGIFADDGISGTNTKKRDEFNRMIAECMDGNIDMVITKSISRFARNTLDCLQYIRQLKDKNISVYFEKENINTMDAKGEVLLTIMASLAQQESQSLSQNVKLGLQYRYQQGKVQVNHKRFMGYTKDEDGNLIIVPEEAEVIKRIYREYLEGQSLVGIGRGLEKDGILTAAGKPKWRPESVKKILQNEKYIGDALLQKTVTVDFLTKKRVKNEGHVPQYYVENSHEAIIPKELFLQVQEEIHRRSNIYTGEGKNKRIYSSKYALSAITFCGDCGDIYRRTYWNIHGRKEFVWRCVTRIEQGPEVCKNRTVKEDELYGAVMTAINRLLAGGNNMIKTLEENIHAVIGETTEYQISEINNLLEEKQKEIIKLANMGQGYEHLAEEIDELRDKRQTLLVEDASLSGENERINELIEFIRKNIFRTLEYDDKLVRKIIQSVTVYEDHFVIAFKSGFEMEV

SEQ ID NO: 11566 - protein, 520 aa, Unknown
  Description of Unknown: Integrase A134 sequence
  PF07508,SSF53041,PF13408,PS51737,cd00338,PTHR30461:SF3,PF00239 ,PS51736,SM00857,G3DSA:3.40.50.1390,PTHR30461
MGCRSCRLLRMSTPASPPRAVLYLRLSREDDASTSIVRQRAELEELAEREGWLIERELVDDGLTGRKQRANAVEALRMLRDGEADALVVWKFDRWSRQGLRAVADLVETLDERPDALFVAHRDGLRSSSPAWRIIASVLAEVARMESENTSTRIRSSQRHLREAGRFRGMVVPFGYRATANPDGPGRVLVHDELEAPLIRDIARRVLEDGATLTELTRELRDRGIPTGKSPARKARQAGKPHADLERGLWHLSALRTLLRNETLLGRTTHVVDGRRVAYTDEHGLPVTLWPPILDVATVQALRERLPEHGGKIGARTATRRAARLLSGVAWCECGAKLYVHRSGRAPYYRCSSKSFDIDAPCPAPRILAEPLEAHVADAYLAVAGAWPELEEVRVVSNPETDAELADIETALAEATTALLSDGADDVAILARIGALKARRRELADRPASAHVELRPTGRTMAEAWHAADPETADGLRKRRDLVLAALDHVELRPGAHKTHPGPIEERVRLHWHPPLELAA

SEQ ID NO: 11567 - protein, 520 aa, Unknown
  Description of Unknown: Integrase A135 sequence
  PF07508,G3DSA:1.10.10.2600,SSF53041,PF13408,PS51737, cd00338,PTHR30461:SF3,PF00239,PS51736,SM00857, G3DSA:3.40.50.1390,PTHR30461
MKKVITIQATPSIIRSSSDDFSLKKRRVAGYARVSTDHEDQATSYESQMRYYSEYISGRDDWEFVKMYSDEGISGTNTKLRTGFKAMVEDALNGKIDLIITKSVSRFARNTVDSLTTVRQLKEVGVEIYFEKENIWTLDSKGELLITIMSSLAQEESRSISENVTWGLRKQFAEGKVHFPYTNVLGFKAGEDGAIVVDQDEAKTVRYIFQQALIGKSPYHIAKDLTEQGIPSPSGKSRWNATTIKRMLRNEKYKGDALLQKTYTIDFLTKKKNINRGELPQYYVENNHEAIVDRETFDAVQQVLDAKGKKSSTSIFSSKLVCGDCGHFFGSKVWHSTSKYRRVIYRCNEKYNGENRCATPHVTEKEIKQWFVLAVNQVIENKDEIIDNIKVLCSIGSLEGIDNQIKELETETEILSQMVSRLVMENASTLQDQDEYQSKYRQLSAKYESLVEEIEELEVQKLAKSKRNKDLQDFITGLKQQEGLLTDFDELLWETMIESITITKDSDVEITFKNGAVSTI

SEQ ID NO: 11568 - protein, 520 aa, Unknown
  Description of Unknown: Integrase A136 sequence
  PF07508,G3DSA:1.10.10.2600,SSF53041,PF13408,PS51737,cd00338, PTHR30461:SF3,PF00239,PS51736,SM00857,G3DSA:3.40.50.1390, PTHR30461
MKKVITIQATPSIIRSSSDDFSLKKRRVAGYARVSTDHEDQATSYESQMRYYSEYISGRDDWEFVKMYSDEGISGTNTKLRTGFKAMVEDALNGKIDLIITKSVSRFARNTVDSLTTVRQLKEVGVEIYFEKENIWTLDSKGELLITIMSSLAQEESRSISENVTWGLRKQFAEGKVHFPYTNVLGFKAGEDGAIVVDQDEAKTVRYIFQQALIGKSPYHIAKDLTEQGIPSPSGKSHWNATTIKRMLRNEKYKGDALLQKTYTIDFLTKKKNINRGELPQYYVENNHEAIVDRETFDAVQQVLDAKGKKSSTSIFSSKLVCGDCGHFFGSKVWHSTSKYRRVIYRCNEKYNGENRCATPHVTEKEIKQWFVLAVNQVIENKDEIIDNIKVLCSIGSLEGIDNQIKELETETEILSQMVSRLVMENASTLQDQDEYQSKYRQLSAKYESLVEEIEELEVQKLAKSKRNKDLQDFITGLKQQEGLLTDFDELLWETMIESITITKDSDVEITFKNGAVSTI

SEQ ID NO: 11569 - protein, 520 aa, Unknown
  Description of Unknown: Integrase A137 sequence
  PF07508,G3DSA:1.10.10.2600,SSF53041,PF13408,PS51737, cd00338,PTHR30461:SF3,PF00239,PS51736,SM00857, G3DSA:3.40.50.1390,PTHR30461
MTEKNIMVIPARKRVGSTAAKEKIKKLRVAAYCRVSTETEEQNSSYEVQVAHYTEFIKKNNEWEFAGIFADDGISGTNTKKRDEFNRMIAECMDGNIDMVITKSISRFARNTLDCLQYIRQLKDKNISVYFEKENINTMDAKGEVLLTIMASLAQQESQSLSQNVKLGLQYRYQQGKVQVNHKRFMGYTKDEDGNLIIVPEEAEIIKRIYREYLEGQSLVGIGRGLEKDSIFTAAGKPRWRPETVKKILQNEKYIGDALLQKTVTVDFLTKKRVKNEGHVPQYYVENSHEAIIPKELYLQVQEEIHRRSNIYTGEGKNKRIYSSKYALSAITFCGDCGDIYRRTYWNIHGRKEFVWRCVTRIEQGPEVCKNRTVKEDELYGAVMTAINKLLAGGNNMIKTLEENIHAVIGETTEYQISEINNLLEEKQKELIKLANKGKDYEHLADEIDELRDKRQILLVEDASLSGENERINELIEFIRKNKFRTLEYDDKLVRKIIQNVTVYEDHFVIAFKSGFEMEI

SEQ ID NO: 11570 - protein, 520 aa, Unknown
  Description of Unknown: Integrase A138 sequence
  PF07508,G3DSA:1.10.10.2600,SSF53041,PF13408,PS51737,cd00338, PTHR30461:SF3,PF00239,PS51736,SM00857,G3DSA:3.40.50.1390, PTHR30461
MKKITKIDELPKGQLPNTKLRVAAYARVSTDSDEQLESLKAQREHYERYIKSNPEWEFAGLYYDEGISGTKMEKRTELLRMIRDCKQGRIDFIITKSISRFARNTVDCLELVRKLIDIGVYIYFEKENLNTGDMESELMLSILSGFAAEESASISQNSTWSIQKRFQNGSYVGTPPYGYTNIDSEMVIVPEEAEIIKRIFAECLSGKGGGTIARGLNKDKIPTRRGNHWSAGTVIDMLRNEKYMGDVLLQKTYTDSNYNRHPNTGEKDQYYYKDNHEPIISREDFAKAQDLIDERAKMKCKGVKKNVYLNRYALSGKIVCGECGRNFRRKTNYSAGRSYIAWSCIGHIEDKESCSMLFLRDGEIKATFTTMMNKLAFSNKLILEPLFKSISQIDEESDRERMDAIDKRMEQLMEERNTLITLMAKGFLEPALFNQERNVLDSEMKNLSTEKTNLVSNSASGILRANEIKDLIDYVSADNFNGDYTEELFEEFVENIIVNSRDELTFNLKCGLSLKEKVVR

SEQ ID NO: 11571 - protein, 520 aa, Unknown
  Description of Unknown: Integrase A139 sequence
  PF07508,SSF53041,PS51737,cd00338,PTHR30461:SF3, PF00239,PS51736,SM00857,G3DSA:3.40.50.1390,PTHR30461
MKNPEKREPEFQHSSLLATVSDMRVLGRLRISRATEESTSIERQREIVEQWASVNDHEIVGWAVDQDVSGSVDPFDAPALGPWLSDHRKHEWDILCAWKLDRLSRRAIPMNKLFGWMIDNDKTLVCVSENLDLGTWVGRMIANVIAGVAEGELEAIRERTTASHKKLRELGRWAGGPTYYGYVPKPRDGAGWELDIDPHAAGVLKEIIEKTIAGQATEAIVVELNERGELSPSDYHRKRSGKPIRGTKWNTSWLRTQLKSKTLLGHMTHNGETVYDDAGLPVQKGPALIDRDTYKQLQDALQSRGINRTKRRTGASPLLGVAVCDVCDGPLYYRQTKNQKGTAMLRQYICKHGRYGNTKANGGEPYNIIQADLLEATVEELFLSKMGDLLRVERVFIPGEGHQHELETAERAVEDLTSLLGTITQEGARKRLLAQLSAAHERLAHLEELPSSEPRWETRETGETYREAWESATTEERRQILLKAGVTLKVQMKGRVPRVHPGVIVANWIEPHDIEKRLAS

SEQ ID NO: 11572 - protein, 520 aa, Unknown
  Description of Unknown: Integrase A140 sequence
  PF07508,SSF53041,PS51737,cd00338,PTHR30461:SF3,PF00239, PS51736,SM00857,G3DSA:3.40.50.1390,PTHR30461
MKNPEKREPEFQHSSLLATVSDMRVLGRLRISRATEESTSIERQREIVEQWASVNDHEIVGWAVDQDVSGSVDPFDAPALGPWLSDHRKHEWDILCAWKLDRLSRRAIPMNKLFGWMIDNDKTLVCVSENLDLGTWVGRMIANVIAGVAEGELEAIRERTTASHKKLRELGRWAGGPTYYGYVPKPRDGAGWELDIDPHAAGVLKEIIEKTIAGQATEAIVVELNERGELSPSDYHRKRSGKPIRGTKWNTSWLRTQLKSKTLLGHMTHNGETVYDDAGLPVQKGPALIDRDTYKQLQDALQSRGINRTKRRTGASPLLGVAVCDVCDGPLYYRQTKNQKGTAMLRQYICKHGRYGNTKANGGEPYNIIQADLLEATVEELFLSKMGDLPRVERVFIPGEGHQHELETAERAVEDLTSLLGTITQEGARKRLLAQLSAAHERLAHLEELPSSEPRWETRETGETYREAWESATTEERRQILLKAGVTLKVQMKGRVPRVHPGVIVANWIEPHDIEKRLAS

SEQ ID NO: 11573 - protein, 520 aa, Unknown
  Description of Unknown: Integrase A141 sequence
  PF07508,SSF53041,PS51737,cd00338,PTHR30461:SF3, PF00239,PS51736,SM00857,G3DSA:3.40.50.1390,PTHR30461
MNNPENREPEFYHSSLLATMSDMRVLGRLRISRATEESTSIERQRELVEQWAAANEHEIVGWAVDQDVSGSVDPFDAPALGPWLTDHRKHDWDILVAWKLDRLSRRAIPMNKLFGWMMDNEKTLVCVSENLDLGTWVGRMIANVIAGVAEGELEAIRERTTASHKKLRELGRWAGGPTYYGYVPKPRDGAGWELDLDPHAAGVLREIIDKTIAGKPSEAIAVELNERGELSPSDYLRKRNGKPIRNTAWNTSTIRHQLKSKTLLGHMTHKGETVYDDAGLPVQKGPALIDRDTYKQLQDALESRGINRTRRRTGASPLLGVAVCDVCEGPLYYRSADNKDRGKTYRQYICKHGRYGNTQANGGEPYNIIQADLLEATVEELFLSKMGDLPRVERVFVPGEGHQHELETAERAVEDLTSLLGTVTQEGARKRLLAQLAAAHERLAHLEELPSSEPRWETRETGETYREAWDKAGTEERRQILLKAGVTLKVQMKGRVPRVHPGVIVAHWIEPHDIEKRLAS

SEQ ID NO: 11574 - protein, 519 aa, Unknown
  Description of Unknown: Integrase A142 sequence
  PF07508,SSF53041,PS51737,cd00338,PTHR30461:SF3,PF00239, PS51736,SM00857,G3DSA:3.40.50.1390,PTHR30461
MLTDETTSPERQRGANHDAGAALGIDFSDREAVDLGVSASKTTPFERPELGAWLKRPDEFDALVFWRFDRAVRSMDDMHELSKWARDHRKMIVIAEGPGGRLVLDFRNPLDPMAQLMVTLFAFAAQFEAQSIRERVLGAQAAMRTMPLRWRGSKPPYGYEPAPLESGGMTLVQDADAVAVIETIIKELMGGKTLSAICHELNEAGIPSPRDYWNTKKGRKKGGRVGNSVGEKITKESFKWRHGTLKKLLTSESLLGWKMTETGPVRDDEGAPVMATNEPILSREEFDAVGALIVDANQDGTKWERRDSTALLLRSILCDGCGQHMFVGHPSANSKGISSVYKCGSWGRGEKCPEPASVKLEWAEDYVRERFLRTVGGMRLTETRHIPGYDPQPEIDATTAEYEAHMKEQGQQKSKAAQAAWKRRADALDARLAELETREARPARVEMVQLDTTIADAWRDADDKGRRDMLREAGVTVRIKRAKRGRTFKLNEDRVVWHMGNDFFAQGAEELEAIARAEA

SEQ ID NO: 11575 - protein, 519 aa, Unknown
  Description of Unknown: Integrase A143 sequence
  PF07508,SSF53041,PS51737,cd00338,PTHR30461:SF3, PF00239,PS51736,SM00857,G3DSA:3.40.50.1390,PTHR30461
MLTDETTSPERQRAANHDAGSSLGIDFSGREAVDLGVSASKTTPFERPELGAWLKRPDDFDALVFWRFDRAVRSMDDMHELSKWARDHRKMIVIAEGPGGRLVLDFRNPLDPMAQLMVTLFAFAAQFEAQSIRERVLGAQAAMRTMPLRWRGSKPPYGYLPAPLEGGGYTLVQDKDAVAVIERVIKELKNGKTLSAICHELNEAGIPSPRDHWSLIQKRKKGGRVGNSVGEKITKESFKWRHGALKKLLKSESLLGWKMTEQGPVRDDEGAPVMATREPILTREEFDAVGALITEANEDGTKWERRDSTALLLRVILCDGCGQHMFVGNPSANSKGISAVYKCGSWGRGEKCPEPASVKLEWAEDYVRERFLRSVGGMRLTETRHIPGYDPQPEIDATTAEYEAHMREQGQQKSKAAQEAWKRRATALDARLAELESREARPARVEVVQLDTTIADAWRDADDKERRDMLREAGVTVRIKRAKRGRTFKLNEDRVKWHMSNEFFDQGAEELEAIARTEA

SEQ ID NO: 11576 - protein, 519 aa, Unknown
  Description of Unknown: Integrase A144 sequence
  PF07508,G3DSA:1.10.10.2600,SSF53041,PF13408,PS51737,cd00338, PTHR30461:SF3,PF00239,PS51736,SM00857,G3DSA:3.40.50.1390, PTHR30461
MTKKIITIEPAKILRSSELPSLKKRKVAGYARVSTDRDDQASSYESQMKYYTDYIGSRSDWEFVKMYSDEGISGTNTKKRLGFQEMVEDALNGKIDLILTKSVSRFARNTVDSLTTVRKLKEVGVEIYFEKENIWTLDSKGELLITIMSSLAQEESRSISENIKWSKRKMAAEGAVSFGYAHVLGFKVAENGGFDIDEDEAKIVRYIFGLFLQGENPNSIARILTEKGIPTPAGKKLWSYSTVKSMLQNEKYKGDALLQKSFTVDYLTKQKKKNEGELPQYYVENNHRAIIDKATFDLVQLELQKTHNRNKVSFCGKVICGCCGNPYGRHVWHSNSKHRRHIYRCNKKYKGEQKCDSPSVSEEEIQGWSVEVINQVIGNKNDIINNMKLLIKMLENTDKLTETIKNLEREMADIGEQAEKMVERNAKVIQNQEMYQAEYDRLVTRYEELQSLLLEKQSTLQLKRKQSADVKLFVDLLAKQEHMVTAFDEKLFNTLIEKMVIYKNKKVAVHFKNGQVIEI

SEQ ID NO: 11577 - protein, 518 aa, Unknown
  Description of Unknown: Integrase A145 sequence
  PF07508,SSF53041,PF13408,PS51737,cd00338, PTHR30461:SF3,PF00239,SM00857,G3DSA:3.40.50.1390,PTHR30461
MCWILPAVPVTLETMPQPLRALVGARVSVVQGPQKVSQQAQLETARKWAEAQGHEIVGTFEDLGVSASVRPDERPDLGKWLTDEGASKWDVIVWSKMDRAFRSTKHCVDFAQWAEERQKVVMFAEDNLRLDYRPGAAKGIDAMMAELFVYLGSFFAQLELNRFKSRAQDSHRVLRQTDRWASGLPPLGYKTVPHPSGKGFGLDTDEDTKAVLYDMAGKLLDGWSLIGIAKDLNDRGVLGSRSRARLAKGKPIDQAPWNVSTVKDALTNLKTQGIKMTGKGKHAKPVLDDKGEQIVLAPPTFDWDTWKQIQDAVALREQAPRSRVHTKNPMLGIGICGKCGATLAQQHSRKKSDKSVVYRYYRCSRTPVNCDGVFIVADEADTLLEEAFLYEWADQPVTRRVFVPGEDHTYELEQINETIARLRRESDAGLIVSDEDERIYLERMRSLITRRTKLEAMPRRSAGWVEETTGQTYGEAWETEDHQQLLKDAKVKFILYSNKPRNIEVVVPQDRVAVDLAI

SEQ ID NO: 11578 - protein, 517 aa, Unknown
  Description of Unknown: Integrase A146 sequence
  PF07508,G3DSA:1.10.10.2600,SSF53041,PF13408,PS51737,cd00338, PTHR30461:SF3,PF00239,PS51736,SM00857,G3DSA:3.40.50.1390, PTHR30461
MCAKKKPAMLEPDMQDAVIYTRYSSHNQRDCSIEQQVADCEIFARQNNLRVVKVYADRHLSGTTDNRPQFQQMLKDASHGHWAYVICWKIDRFARNRYDSATYKFRLKKAGVRVLYAKESIPDGPEGILLESVLEGSAEYYSAALAQNIRRGMKFNAEQCKVNSGSIPFGYCKGPDGRFAIHEANAEVVREIFRKAAAGMPFVDIANDLNSRGLKTSRGGRWNKGSFRLLMNEAYIGVYHFSDTRIEGGMPALIDQGTFWAANERLKANSSVRGRHQDGGDYLLTGKLKCAHCGSYMIGFSGTGKSGELHYYYGCQKRRRERACKKANVPREWIERVVVKAALDYVLRPDVMEWIADAVMEYQEREAASAQLAALTAELEENQKATDNVMKAIEAGIITSTTKQRLLDLEAKAQDLKRAIELEKLSHVRLERDQVLFWLDRFRGGSLQSQEFRRKVIDAFVSVVYLSDDHLRIAFNYSGGSNAEADFDLVMDAEAAAGELSKKFAQGHVTSTNIKAT

SEQ ID NO: 11579 - protein, 517 aa, Unknown
  Description of Unknown: Integrase A147 sequence
  PF07508,G3DSA:1.10.10.2600,SSF53041,PF13408,PS51737, cd00338,PF00239,PS51736,SM00857,G3DSA:3.40.50.1390, PTHR30461
MTYPFNMDQDLAKPTRRPRAVLYSRLSRASIVSTSMEGQREDLHGLAAREGWDVVAAFDDEGKSGGRKRANAEEALRMIRDGEADILAAYSVDRFSRQGIGEDAEVIRIIQAREHAARRGDGPPALAYFVREGIRSDSGDDWRLRYALSSEMAWKERELMVQRRQRSIYQLQEQGRFSGRGPAPWGYRSAPHPSGAGRTLVLDETEAHDIREAAARLISGASATSVATDMTARGVPAPRSPYRLALLKGEDPTGLATGFWGIGNLIQALTSPSITGRIVRHSRQTNALGGETRAGTPVLDAEGKPLQAFPPALPLGDWLALQERFQRGQGRGQQRTRKAARLASGLVWCQCGEKCYVIKYGRETRYRCASRSKGMIHCPAPSMSADVVEDIITQHYLATVGKLPAIERIESDDAPELAEALALAADELRRLTADMTKPGADIMTLATEVAKASARRDELLARPSERHVSWRPLGGSWADVWQTSDLETRRRQLTEAYDHWELRTPEHEPRLVPRTAE

SEQ ID NO: 11580 - protein, 515 aa, Unknown
  Description of Unknown: Integrase A148 sequence
  PF07508,G3DSA:1.10.10.2600,SSF53041,PF13408,PS51737,cd00338, PF00239,PS51736,SM00857,G3DSA:3.40.50.1390,PTHR30461
MNSLEVAIYLRKSRADVEEEQKAIAKGEAYDALGKHRRELLSLARKANHRVIDMYEEIVSGESITARPKMKLLLENILAEKYEGVLVVDVDRLGRGNKGDQSVIEDAFKETNTLIITPSAIYDLNQEDGEMSVEMKTFLANMEYRSIKRRLQRGLINTAKQGKDVGGNAPYGYKKDENLRLVIDEDKADVIRLIFRRCIDGVGVRFIRKELHELEIKSPTGNEWWGTTMIKKVISNAKYAGKMTYGIKQHKKLKDGRYTVKTKTDPNKMVIVDDAHEPIVSLEDFEAAQNAMRHRDPRVNAKKRLVYPMAGLVRCAKCGRLMRCQAPSNRKHKYLYCGNELCNQKGIRLDEIEDSVINEISTILARVKIEGDNVSVKSLEDERRQILKRIAKIERERSKNIEKKERVYDSYEDGTYTKEMFQERLTFIQNADRKNEQTIDELNEQLSTLEQRKQTKLDMIPAIENVLDVYNMTDDAEHKNRLLKTVIKQIDYDREVNKNRVYDPNEVVLRVHLVE

SEQ ID NO: 11581 - protein, 515 aa, Unknown
  Description of Unknown: Integrase A149 sequence
  PF07508,SSF53041,PS51737,cd00338,PTHR30461:SF3, PF00239,PS51736,SM00857,G3DSA:3.40.50.1390,PTHR30461
MSGQPLRSQWCTVQTMRALVVIRLSRVTDATTSPERQLESCQQLCAQRGWDVVGVAEDLDVSGAVDPFDRKRRPNLARWLAFEEQPFDVIVAYRVDRLTRSIRHLQQLVHWAEDHKKLVVSATEAHFDTTTPFAAVVIALMGTVAQMELEAIKERNRSAAHFNIRAGKYRGSLPPWGYLPTRVDGEWRLVPDPVQRERILEVYHRVVDNHEPLHLVAHDLNRRGVLSPKDYFAKLQGREPQGREWSATALKRSLISEAMLGYATLNGKTVRDDDGAPLVRAEPILTREQLEALRAELVKTDRTKPAVSTPSLLLRVLFCAVCGEPAYKFAGGGRKHPRYRCRSMGFLKHCGNGTVAMAEWDAFCEEQVLDLLGDSERLEKVWVAGSDSAVELAEVNAELVDLTSLIGSPAYRVGSPQREALDARIAALAARQEELEGLEARPSGWEWRETGQRFGDWWREQDTSGKNTWLRSMNVRLTFDVRGGLTRTIDFGDLQEYEQHLRLGSVVERLHAGMS

SEQ ID NO: 11582 - protein, 515 aa, Unknown
  Description of Unknown: Integrase A150 sequence
  PF07508,SSF53041,PF13408,PS51737,cd00338,PTHR30461:SF3, PF00239,SM00857,G3DSA:3.40.50.1390,PTHR30461
MQVRALVGARVSHVQGEEKTSHLTQRTKGESYAESQGWTVVGGFEDLDVSAIKLSPWDRPDLKQWLDEKADDWDALIFSKTDRVFRSANDCVKLAEWCKDHRKILVLVDDGIKLDYFNPEDSKDAFAGAMSKVFLILASVFAEIEGQRFVQRARDRVAYLRPTDRWGYGNPPYGFVVVDHPTGVGKALGHDEGDQAVLHRIADEVLSGNSLVSICVKLNDEGVLSPSDRTRVRAKKEPEGSKWRPLTMKRLLTSPSTQGIKMAKERPVLDAQGEPVRVGPESFDAETWKQLGIELADRATEPSKRRHSTNPLLGVAKCAICGLNMRQHGKTTKYGSYRYYNCIGHPIACPKVSIVAETAEDAVYSIFLNSHSGRRVKERVWQAGSDHSAELDQTLRTIESLREDRAAGLFNDPEDAKMYQQQMAALLSKRTALSDAPIIKAGWVEMETDRTYGEVWESSTEEEKRKMLVDAGVVLWVTNRNDYYVGDLDKLLGEGDGGEEFLASTVLAKAGIASQ

SEQ ID NO: 11583 - protein, 514 aa, Unknown
  Description of Unknown: Integrase A151 sequence
  PF07508,SSF53041,PS51737,cd00338,PTHR30461:SF3, PF00239,PS51736,SM00857,G3DSA:3.40.50.1390,PTHR30461
MSGQPPRSQWCTVQTMRALVVIRLSRVTDATTSPERQLESCQQLCAQRGWDVVGVAEDLDVSGAVDPFDRKRRPNLARWLAFEEQPFDVIVAYRVDRLTRSIRHLQQLVHWAEDHKKLVVSATEAHFDTTTPFAAVVIALMGTVAQMELEAIKERNRSAAHFNIRAGKYRGSLPPWGYLPTRVDGEWRLVPDPVQRERILEVYHRVVDNHEPLHLVAHDLNRRGVLSPKDYFAKLQGREPQGREWSATALKRSLISEAMLGYATLNGKTVRDDDGAPLVRSEPILTREQLEALRAELVKTDRTKPAVSTPSLLLRVLFCAVCGEPAYKFDAGRKIPRYRCRSFGFAQRCGNGTVPISEWDAFCEEQVLDLLGDAERLEKVWVAGSDSAVELAEVNAELVDLTSLIGSPAYRVGSPQREALDARIAALAARQEELEGLEARPSGWEWRETGQRFADWWREQDTAAKNTWLRSMNVRLTFDVRGGLTRTIDFGDLQEYEQHLRLGNVVERLHTGMS

SEQ ID NO: 11584 - protein, 514 aa, Unknown
  Description of Unknown: Integrase A152 sequence
  PF07508,G3DSA:1.10.10.2600,SSF53041,PF13408,PS51737,cd00338, PTHR30461:SF3,PF00239,PS51736,SM00857,G3DSA:3.40.50.1390, PTHR30461
MAKRKFNKGGEVRLVAYYRYSGGSGQTEQSIEGQRRDCETYARLHNMTIQKEYVDRHISGKTDDRAAFQQMITDSDKGAFDMVICWKTDRFARNRYDSAVYKKRLRDNGVEIVYAAESNIAGAEGIIIEGVMEALAEYYSAELAEKMRRGMRESALKGQAISRCRALGLKTDEHKRFVIDEKTAPTVRFIFEHYAAGESATSIVDKLNAKGLRTSQGNPFNKSSIPRIIQNEAYRGVYVSKSYDVRIEGAIPAIIDDELWERAQTMLKLNRQLKAKNEPKADYILSGKLYCSCGSLMRGMSGHSATGEVYRYYTCPNKNCHLRNIPKDDLEGKVMQSISDHLLQPEAMEALAEAMVEVQKADAEKPNAERVAIEQSLADVRRRSKNILDAIENGTANAQLCARLDDLSEQERTLNFQLSALEKEKPVVFTKEQYLFLLEQFLVEPSERTPEYGRRLVNTFVTSMVVSDRELVINFNVSDETVNKNKKTSQTNLQKESSSGMRLVRVARIELTAS

SEQ ID NO: 11585 - protein, 514 aa, Unknown
  Description of Unknown: Integrase A153 sequence
  PF07508,SSF53041,PS51737,cd00338,PTHR30461:SF3, PF00239,PS51736,SM00857,G3DSA:3.40.50.1390,PTHR30461
MSGQPLRSQWCTVQTMRALVVIRLSRVTDATTSPERQLESCQQLCAQRGWDVVGVAEDLDVSGAVDPFDRKRRPNLARWLSFEEQPFDVIVAYRVDRLTRSIRHLQQLVHWAEDHKKLIVSATEAHFDTTTPFAAVVIALMGTVAQMELEAIKERNRSAAHFNIRAGKYRGSLPPWGYLPTRVDGEWRLVPDPVQRERILEVYHRVVDNHEPLHLVAHDLNQRGILSPKDYFAKLQGREPKGREWSATALKRSLISEAMLGYATLNGKTVRDGDGAPLVRAEPILTREQLEALRAELVKTDRTKPAVSTPSLLLRVLFCAVCGEPAYKFDAGRKIPRYRCRSFGFAVRCGNGTVPIAEWDAFCEEQVLDLLGDAERLEKVWVAGSDSAVELAEVNAELVDLTSLIGSPAYRVGSPQREALDARIAALAARQEELEGLEARPSGWEWRETGQRFGDWWREQDTAGKNTWLRSMNVRLTFDVRGGLTRTIDFGDLQEYEQHLRLGSVVERLHTGMS

SEQ ID NO: 11586 - protein, 513 aa, Unknown
  Description of Unknown: Integrase A154 sequence
  PF07508,G3DSA:1.10.10.2600,SSF53041,PF13408,PS51737,cd00338, PTHR30461:SF3,PF00239,PS51736,SM00857,G3DSA:3.40.50.1390, PTHR30461
MKRITKIEPAKKTSKKKLRVAAYARVSTNRDDQLISLDAQKNHYEKYIKAKPNWEYAGLYFDEGLSGTHMEKRNGLLKLLEDCERGKIDYIIVKSISRFSRNTIDSIETIRSLCEKGIYIFFEKENIDTGKMDSELLLSIFSSLAESESKSISENNKWGIQKKYQNGTFKIGYPPYGYHNIEGQMVIDEKEAEIVRLIFSEVLLGKSPGLIAKELNEKNITSKRGKNWSSSVIHGMIRNEKYTGDVIFQKTFTDENFNRHINYGERNQYYAKDHHAPIISHDTFEKANSIIEKNGKEKGIVKYAGKYKNRYALSGKIICDECGGKLKRVKLSSYFGFACNTHIKNKELCNMKTISEDSVKAAFATMMNKLSSAREVVLLPLERSLKRNSSDMQLSQLEELESLLEKNTERKNQLMNFFTSGLLDPALYSEEIMRLEEEIEVLVNEQELITKNLSGGYERQKALELILSYTAKKNIITEFDDALFLRHVDHIIVYSRTEIGFVMKFGPIFKERI

SEQ ID NO: 11587 - protein, 513 aa, Unknown
  Description of Unknown: Integrase A155 sequence
  PF07508,G3DSA:1.10.10.2600,SSF53041,PF13408,PS51737, cd00338,PTHR30461:SF3,PF00239,PS51736,SM00857, G3DSA:3.40.50.1390,PTHR30461
MAKKIVTIEAVKPVCHQVDFLRKRKVAGYARVSTDHDDQASSYEAQMCYYENYIQSRHDWEFVKMYSDEGISGTNTKKRLGFQEMVADALDGKIDLIITKSISRFARNTVDALTTVRKLKEVGVEIYFEKENIWTLDSKGELLITIMSSLAQEESRSISENITWSKRKMAAEGQVTFNYTHVLGFKESKEGGFEIDEKEAEVVRYIFGLFLQGENPNSIAKILTDKKIATPAGKKVWSYSTIKSILSNEKYKGDALLQKSFTVDFLTKTRKTNQGELPQYYIENNHEAIIDKAIFDMVQVELKHERSRSTLSYFGKVICGCCGGSYGRQTWHSTSKYKRVVYRCNHKYKGEEKCDTPHASREEIEAWISQAISQLITNKDEIIRNLECLISVLAKSGQLEDELKTLESQLFSIQEEVEQLVNGKLTQNLYSQYDALVKNYHTLQKTYRDKQQVLQERKIKLKALNNFIDILRQQDKLVVVYDEKLFNTLVDKVIIYKDKQVEVHFKNEQVISM

SEQ ID NO: 11588 - protein, 512 aa, Unknown
  Description of Unknown: Integrase A156 sequence
  PF07508,G3DSA:1.10.10.2600,SSF53041,PS51737,cd00338,PF00239, PS51736,SM00857,G3DSA:3.40.50.1390,PTHR30461
MRTNEHNFHNIEEEIKHVAVYLRLSRGEDESELDNHKTRLLNRCELNNWSYELYKEIGSGSTIDDRPVMQKLLTDVEKNLYDAVLVVDLDRLSRGNGTDNDRILYSMKVSETLIVVESPYQVLDANNESDEEIILFKGFFARFEFKQINKRMREGKKLAQSRGQWVNSVTPYGYIVNKTTKKLTPSEEEAKVVIMIKDFFFEGKSTSDIAWELNKRKIKPRRATEWRSSSIANILQNEVYVGNIVYNKSVGNKKPSKSKTRVTTPYRRLPEEEWRRVYNAHQPLYSKEEFDRIKQYFECNVKSHKGSEVRTYALTGLCKTPDGKTMRVTQGKKGTDDDLYLFPKKNKHGDSSIYKGISYNVVYETLKEVILQVKDYLDSVLDQNENKDLVEELKEELMKKEDELETIQKAKNRIVQGFLIGLYDEQDSIELKVEKEKEIDEKEKEIEAIKMKIDNAKTVNNSIKKTKIERLLSDVQSAESEKEINRFYKTLIKEIIVDRTDENEAKIKVNFL

SEQ ID NO: 11589 - protein, 510 aa, Unknown
  Description of Unknown: Integrase A157 sequence
  PF07508,G3DSA:1.10.10.2600,SSF53041,PF13408,PS51737, cd03768,PTHR30461:SF3,PF00239,PS51736,SM00857, G3DSA:3.40.50.1390,PTHR30461
MYSKTHKRCDVLLCSILTQNWSKKQMSKKVAIYTRVSTTNQAEEGYSIDEQIDKLKMYCEAMDWKVSEIYTDAGFSGSKLTRPAMEKMITDIGLKKFDTVIVYKLDRLSRSVRDTLYLVKDVFTKNEIDFISLSESIDTSSAMGSLFLTILSAINEFERENIKERMTMGKIGRAKSGKSMMWAKTAFGYSHNQETGILEINPLEASIVEQIFNEYLKGTSITKLRDKLNEDGHIAKELPWSYRTIRQTLDNPVYCGYIKYKNNTFEGLHKPIISHETYLSVQKELEARQQQTYEKNNNPRPFQAKYLLSGIARCGYCGAPLRIVLGHRRKDGSRTMKYQCVNRFPRKTKGVTTYNDNKKCDSGAYDMQWIEDIVLKTLNGFQKSDKKLRKILNIKEESKVDTSGFQKQLKSINNKIQKNSDLYLNDFITMDDLKKRTEMLQGEKKLIQAKINEVDKPSTSEIFDLVKSELGETPISKISYEDKKKIVNNLISKVDVTADNIDIIFKFQLA

SEQ ID NO: 11590 - protein, 510 aa, Unknown
  Description of Unknown: Integrase A158 sequence
  PF07508,G3DSA:1.10.10.2600,SSF53041,PF13408,PS51737,cd03768, PTHR30461:SF3,PF00239,PS51736,SM00857,G3DSA:3.40.50.1390 ,PTHR30461
MYSKTHKRCDVLLCSILTQNWSKKQMSKKVAIYTRVSTTNQAEEGYSIDEQIDKLKMYCEAMDWKVSEIYTDAGFSGSKLTRPAMEKMITDIGLKKFDTVIVYKLDRLSRSVRDTLYLVKDVFTKNEIDFISLSESIDTSSAMGSLFLTILSAINEFERENIKERMTMGKIGRAKSGKSMMWAKTAFGYSHNQETGILEINPLEASIVEQIFNEYLKGTSITKLRDKLNEDGHIAKELPWSYRTIRQTLDNPVYCGYIKYKNNTFEGLHKPIISHETYLKVQKELEVRQQQTYEKNNNPRPFQAKYLLSGIARCGYCGAPLRIVLGHRRKDGSRTMKYQCVNRFPRKTKGVTTYNDNKKCDSGAYDMQWIEDIVLKTLNGFQKSDKKLRKILNIKEETKVDTSGFKKQLKSINNKIQKNSDLYLNDFITMDDLKKRTEMLQGEKKLIQAKINEVDKPSTSEIFDLVKSELGEIPISKISYEDKKKIVNNLISKVDVTADNIDIIFKFQLA

SEQ ID NO: 11591 - protein, 510 aa, Unknown
  Description of Unknown: Integrase A159 sequence
  PF07508,SSF53041,PF13408,PS51737,cd00338, PTHR30461:SF3,PF00239,SM00857,G3DSA:3.40.50.1390,PTHR30461
MPQPLRALVGARVSVVQGPQKVSQQAQLETARKWAEAQGHEIVGTFEDLGVSASVRPDERPDLGKWLTEEGASKWDVIVWSKMDRAFRSTKHCVDFAQWAEERQKVVMFAEDNLRLDYRPGAAKGIDAMMAELFVYLGSFFAQLELNRFKSRAQDSHRILRQTDRWASGLPPLGYKTVPHPSGKGFGLDTDPDGKDLLYQMAGRLLDGGSLIGIAKWLNETGAMSNRARARVAKGKPADQRPWTVGTVKDALTSLKTQGIKMSGKGKNSKPVLDAKGEQIVLAPPTFDWDTWKQIQDAVALREQAPRSRVHTKNPMLGIGICGKCGSTLAQQHSRKRPAKSDVPGQVVTYRYYRCSRTPVNCDGVFIVADEADEILEDAFLHEWADQPVTRRVFVPGEDHTYELEQINETIARLRRESDAGLIVSDEDEQVYLERMKSLITRRTRLEAMPLRSAGWVEETTGQTYGEAWKTEDHQQLLKDAKVKFILYTNKPRNIEVVVPQDRVAVDLAI

SEQ ID NO: 11592 - protein, 510 aa, Unknown
  Description of Unknown: Integrase A160 sequence
  PF07508,G3DSA:1.10.10.2600,SSF53041,PF13408,PS51737,cd00338, PTHR30461:SF3,PF00239,PS51736,SM00857,G3DSA:3.40.50.1390, PTHR30461
MKKVITIEPAKQVTHMVDLPSFTKRRVAGYARVSTDHEDQTTSYEAQMTYYTDYINSRSDWEFVKMYSDEGISGTNTKKRLGFQEMVEDALDGKIDLILTKSVSRFARNTVDSLSTVRKLKEAGVEIYFEKENIWTFDSKGELLITIMSSLAQEESRSISENVTWGRRHQLAEGQVTFSYSQVLGFKKCDTGGFEIDQEEAKIVRYIFHQVLLGNNPNKIARELTAQGIPTPQGKRKWSYGTVKRMLRNEKYKGDALLQKSFTTDFLTKSTKPNEGELPQYYVENNHEAIIKREVFDLVQVELDKLEKKRQTSNIFTGRLFCGDCGSAFGSKVWHSTSKYKRTIYQCNAKYKGEHKCQTPHVTEEEIKGWFLSAMNQLLGNREEIIANTELLIDMAKDTTPLESEIADLERHLETIRQDIEDLVDRNARKAQNQDLYQEQYDTLVTAYQEKQKELQETRSALEEQKSKQLSLDGFIQKFKEQDASSQTSTKNSGRPALSDWISKKIRKSA

SEQ ID NO: 11593 - protein, 509 aa, Unknown
  Description of Unknown: Integrase A161 sequence
  PF07508,G3DSA:1.10.10.2600,SSF53041,PF13408,PS51737, cd00338,PTHR30461:SF3,PF00239,PS51736,SM00857, G3DSA:3.40.50.1390,PTHR30461
MRAVAYARFSSDNQREESIEAQIMDIKKYALKNNITVLREYVDEAISGRTFERKSFKRMIEDAKKNMFDLILVHKVDRFARNRYDAAIYKSILKKHNIKIKYVMQPIDDSPEGNLMEGILESFAEYYSENLANEVMKGLKINAKKAQFNGGYPPLGYDIAEDKTYIINEREARIVREIFDLYLDGIGYKKIADILNNKGYKNKRGKPFVFNSIPTILKNDKYCGIYTYNKTSRKYKNGRRNLKKYNKDEDIIRVEDGIPKIISKEKFNTAQQEIKKRTKSRGKKIAVREYILSGLIKCECERKMSGYAQKRSKESNRYFYYRCTGCNNSIRAEKIETIATNFIKEQVFRDIDNLIIKIHKYIADQEAESPSELKYLKNELSNSNNQINNIVKMISNGVTSMHLAKKLEELETYIDGIQQRIGEINRMSVIPEDEIKNWLLELKNSFDNGKNIKKIISVFIKNIEITKEDINIDFFVKAPYKGANSLSVAPSAPPSAPELFAQKCCLKRI

SEQ ID NO: 11594 - protein, 509 aa, Unknown
  Description of Unknown: Integrase A162 sequence
  PF07508,G3DSA:1.10.10.2600,SSF53041,PF13408,PS51737,cd00338, PF00239,PS51736,SM00857,G3DSA:3.40.50.1390,PTHR30461
MELTPIEFKKDTEKIIPYSEYPYAVYVRISTDKEEQMTSPENQIEICRNWLEKNNYEWNDGSVLYDEQSGTVLIDRAAMQLILEKARRREIKMVVFKSISRLARDLKDALDIKETLISHGVRLVTIEEGYDSLYEGKNDMKFEIFSLFAAQYPKTLSVSISAALAAKVRRGEAIGPAPFGYKIEGENLVINEEEAPTIRQIFKWYVEDGYGFKSITKMLNEEMIKGNVSRPRKKDKWQVTSVQRIIKNPTYAGYFVHGRYTTVKQNGRKKFIENPREKWMVYENHHPAIIPKEMWEAANNKRMKKVKTKVTPWNEFRGIAKCSECGSNMVIIQTGNKKNKGGHWNYIKCSSYRRAGQYGCVNHAPILYEDFRELIIKRLKRKGKNIKLKLESGIVQKRKNEIAALEKEKLSLEQKRKRLIDLYLEDGLISKEEFQEKRKQYEDRIREIEDRIFLLSQEQNTTKEIKTIEDAFQQLENIDQDLYHVFKTLIDQIIVHPDGKIEILYKFKV

SEQ ID NO: 11595 - protein, 508 aa, Unknown
  Description of Unknown: Integrase A163 sequence
  PF07508,G3DSA:1.10.10.2600,SSF53041,PS51737,cd00338, PTHR30461:SF3,PF00239,PS51736,SM00857,G3DSA:3.40.50.1390, PTHR30461
MNRVCIYLRKSRADEEIEKELGQGETLAKHRKALLKFAKEKNLNIVKIREEIVSGESLIHRPEMLELLKEVEQGMYDAVLCMDLQRLGRGNMQEQGLILEAFKKSNTKIITLQKTYDLNNDFDEEYSEFEAFMSRKELKMINRRLQGGRVRSIQEGNYLSPLPPYGYLIHEEKFSRTLVPNPEQADVVKMIFDMYVNKQMGSSAIANELNKMGYKTYTGRNWASSSVINILKNPVYIGKITWKKKDIKKSADPNKSKDTRQRPRSEWIVSDGKHEPIVGKELFAKAQEIIKNKYHIPYQIVNGPRNPLAGLIICKICGSKMVYRPYKDKEAHIICPNKCGNKSSKFIYVEKRLLQALEEWMQGYELDLQIEEDDSSFAEAQEKQKEALERELHELQKQKNNLHDLLERGIYDIDTFVERSTIVAQRIEETQKSIDVLVQKIEEEKNKRDKEKILPEIRHVLDLYWKTDDIAQKNMLLKSVLEKAEYLKEKKQREDNFELWIYPKLPEK

SEQ ID NO: 11596 - protein, 508 aa, Unknown
  Description of Unknown: Integrase A164 sequence
  PF07508,SSF53041,PS51737,cd00338,PTHR30461:SF3,PF00239,PS51736, SM00857,G3DSA:3.40.50.1390,PTHR30461
MRVLGRLRLSRSTEESTSIERQREIVTAWAQSNGHTVVGWAEDVDVSGSVDPFDTPSLGPWLDERRGEWDILCAWKLDRLGRDAIRLNKLFGWCQEHGKTVASCSEGIDLSTPVGRLIANVIAFLAEGEREAIRERVTSSKQKLREIGRWGGGKPPYGYKGIPNPNGQGYVLVVDPVAQPVVRRIVDEILDGKPLTRLCTELSEEGYLTPAEYYATLKAGSPRQRAEAGEVTARWRPTALRNLLRSKALRGYAHHKGQTVRDEKGMPVQLAEPLVSADEWELLQEALDRVQADFSGRRVEGVSPLLGVAVCMKCDRPLHHDRYLVKRPYGDYHYRYYRCRDRHGKNLPAEMVEELTEESFLARVGDFPVRERVWVQGDTNWADLKEAVAAYDELMQAAGRAKSVTAKERLQRQLDALDERIAELESAPTTEAHWEYQPTGGTYRDAWEAADTDGRRELLKRSGITVAVFIDGVEGRRSKYNPGALHFDIRVPEELTRRLGLPDPVPSQ

SEQ ID NO: 11597 - protein, 507 aa, Unknown
  Description of Unknown: Integrase A165 sequence
  PF07508,SSF53041,PF13408,PS51737,cd00338, PTHR30461:SF3,PF00239,SM00857,G3DSA:3.40.50.1390,PTHR30461
METMPQPLRALVGARVSVVQGPQKVSQQAQLETARKWAEAQGHEIVGTFEDLGVSASVRPDERPDLGKWLTDEGASKWDVIVWSKMDRAFRSTKHCVDFAQWAEERQKVVMFAEDNLRLDYRPGAAKGIDAMMAELFVYLGSFFAQLELNRFKSRAQDSHRVLRQTDRWASGLPPLGYKTVPHPSGKGFGLDTDEDTKAVLYDMAGKLLDGWSLIGIAKDLNDRGVLGSRSRARLAKGKPIDQAPWNVSTVKDALTNLKTQGIKMTGKGKHAKPVLDDKGEQIVLAPPTFDWDTWKQIQDAVALREQAPRSRVHTKNPMLGIGICGKCGATLAQQHSRKKSDKSVVYRYYRCSRTPVNCDGVFIVADEADTLLEEAFLYEWADQPVTRRVFVPGEDHTYELEQINETIARLRRESDAGLIVSDEDERIYLERMRSLITRRTKLEAMPRRSAGWVEETTGQTYGEAWETEDHQQLLKDAKVKFILYSNKPRNIEVVVPQDRVAVDLAI

SEQ ID NO: 11598 - protein, 507 aa, Unknown
  Description of Unknown: Integrase A166 sequence
  PF07508,SSF53041,PF13408,PS51737,cd00338,PTHR30461:SF3, PF00239,SM00857,G3DSA:3.40.50.1390,PTHR30461
METMPQPLRALVGARVSVVQGPQKVSQQAQLETARKWAEAQGHEIVGTFEDLGVSASVRPDDRPDLGKWLTDEGASKWDVIVWSKMDRAFRSTKHCVDFAQWAEERQKVVMFAEDNLRLDYRPGAAKGIDAMMAELFVYLGSFFAQLELNRFKSRAQDSHRVLRQTDRWASGLPPLGYKTVPHPSGKGFGLDTDEDTKAVLYDMAGKLLDGWSLIGIAKDLNDRGVLGSRSRARLAKGKPIDQAPWNVSTVKDALTNLKTQGIKMTGKGKHAKPVLDDKGEQIVLAPPTFDWDTWKQIQDAVALREQAPRSRVHTKNPMLGIGICGKCGATLAQQHSRKKSDKSVVYRYYRCSRTPVNCDGVFIVADEADTLLEEAFLYEWADQPVTRRVFVPGEDHTYELEQINETIARLRRESDAGLIVSDEDERIYLERMRSLITRRTKLEAMPRRSAGWVEETTGQTYGEAWETEDHQQLLKDAKVKFILYSNKPRNIEVVVPQDRVAVDLAI

SEQ ID NO: 11599 - protein, 507 aa, Unknown
  Description of Unknown: Integrase A167 sequence
  PF07508,SSF53041,PF13408,PS51737,cd00338, PTHR30461:SF3,PF00239,SM00857,G3DSA:3.40.50.1390,PTHR30461
METMPQPLRALVGARVSVVQGPQKVSQQAQLETARKWAEAQGHEIVGTFEDLGVSASVRPDDRPDLGKWLTDEGASKWDVIVWSKMDRAFRSTKHCVDFAQWAEERQKVVMFAEDNLRLDYRPGAAKGIDAMMAELFVYLGSFFAQLELNRFKSRAQDSHRVLRQTDRWASGLPPLGYKTVPHPSGKGFGLDTDEDTKAVLYDMAGKLLDGWSLIGIAKDLNDRGVLGSRSRARLAKGKPIDQAPWNVSTVKDALTNLKTQGIKMTGKGKHAKPVLDAKGEQIVLAPPTFDWDTWKQIQDAVALREQAPRSRVHTKNPMLGIGICGKCGATLAQQHSRKKSDKSVVYRYYRCSRTPVNCDGVFIVADEADTLLEEAFLYEWADQPVTRRVFVPGEDHTYELEQINETIARLRRESDAGLIVSDEDERIYLERMRSLITRRTKLEAMPRRSAGWVEETTGQTYGEAWETEDHQQLLKDAKVKFILYSNKPRNIEVVVPQDRVAVDLAI

SEQ ID NO: 11600 - protein, 507 aa, Unknown
  Description of Unknown: Integrase A168 sequence
  PF07508,SSF53041,PS51737,cd00338,PTHR30461:SF3,PF00239, PS51736,SM00857,G3DSA:3.40.50.1390,PTHR30461
MYPTFVRVLGRLRLSRSTEESTSIERQREIVTAWADSNGHTVVGWAEDVDVSGAIDPFDTPSLGVWLDERRGEWDILCAWKLDRLGRDAIRLNKLFLWCQEHGKTVTSCSEGIDLGTPVGRLIANVIAFLAEGEREAIRERVASSKQKLREIGRWGGGKPPFGYMGVRNPDGQGHILVVDPVAKPVVRRIVEDILEGKPLTRLCTELTEERYLTPAEYYATLKAGAPRQQAEEGEVTAKWRPTAVRNLLRSKALRGHAHHKGQTVRDDQGRAIQLAEPLVDADEWELLQETLDGIAADFSGRRVEGASPLSGVAVCMTCDKPLHHDRYLVKRPYGDYPYRYYRCRDRHGKNVPAETLEELVEDAFLQRVGDFPVRERVWVQGDTNWADLKEAVAAYDELVQAAGRAKSATARERLQRQLDILDERIAELESAPNTEAHWEYQRTGGTYRDAWENSDADERRELLRRSGIVVAVHIDGVEGRRSKHNPGALHFDIRVPHELTQRLIAP

SEQ ID NO: 11601 - protein, 507 aa, Unknown
  Description of Unknown: Integrase A169 sequence
  PF07508,SSF53041,PF13408,PS51737,cd00338, PTHR30461:SF3,PF00239,SM00857,G3DSA:3.40.50.1390,PTHR30461
METMPEPLRALVGARVSVVQGPQKVSQQAQLETARKWAEAQGHEIVGTFEDLGVSASVRPDDRPDLGKWLTDEGASKWDVIVWSKMDRAFRSTKHCVDFAQWAEERQKVVMFAEDNLRLDYRPGAAKGIDAMMAELFVYLGSFFAQLELNRFKSRAQDSHRVLRQTDRWASGLPPLGYKTVPHPSGKGFGLDTDEDTKAVLYDMAGKLLDGWSLIGIAKDLNDRGVLGSRSRARLAKGKPIDQAPWNVSTVKDALTNLKTQGIKMTGKGKHAKPVLDEKGEQIVLAPPTFDWDTWKQIQDAVALREQAPRSRVHTKNPMLGIGICGKCGATLAQQHSRKKSDKSVVYRYYRCSRTPVNCDGVFIVADEADTLLEEAFLYEWADQPVTRRVFVPGEDHTYELEQINETIARLRRESDAGLIVSDEDERIYLERMRSLITRRTKLEAMPRRSAGWVEETTGQTYGEAWETEDHQQLLKDAKVKFILYSNKPRNIEVVVPQDRVAVDLAI

SEQ ID NO: 11602 - protein, 504 aa, Unknown
  Description of Unknown: Integrase A170 sequence
  PF07508,SSF53041,PS51737,cd00338,PTHR30461:SF3,PF00239, PS51736,SM00857,G3DSA:3.40.50.1390,PTHR30461
MRALVVIRLSRVTDATTSPERQLESCRQLCAQRGWDVVGVAEDLDVSGAVDPFDRKRRPNLARWLAFEEQPFDVIVAYRVDRLTRSIRHLQQLVHWAEDHKKLVVSATEAHFDTTTPFAAVVIALMGTVAQMELEAIKERNRSAAHFNIRAGKYRGSLPPWGYLPTRVDGEWRLVPDPVQRERILEVYHRVVDNHEPLHLVAHDLNRRGVLSPKDYFAKLQGREPQGREWSATALKRSLISEAMLGYATLNGKTVRDDDGAPLVRAAPILTREQLEALRAELVKTDRTKPAVSTPSLLLRVLFCAVCGEPAYKFAGGGRKHPRYRCRSMGFPKHCGNGTVAMAEWDAFCEEQVLDLLGDAERLEKVWVAGSDSAVELAEVNAELVDLTSLIGSPAYRAGSPQREALDARIAALAARQEELEGLEARPSGWEWRETGQRFGDWWRDQDTAGKNTWLRSMNVRLTFDVRGGLTRTIDFGDLQEYEQHLRLGAALDLVNAEKPPTGR

SEQ ID NO: 11603 - protein, 504 aa, Unknown
  Description of Unknown: Integrase A171 sequence
  PF07508,SSF53041,PS51737,cd00338,PTHR30461:SF3, PF00239,PS51736,SM00857,G3DSA:3.40.50.1390,PTHR30461
MRALVVIRLSRVTDATTSPERQLESCQQLCAQRGWDVVGVAEDLDVSGAVDPFDRKRRPNLARWLSFEEQPFDVIVAYRVDRLTRSIRHLQQLVHWAEDHKKLIVSATESHFDTTSPFAAVVIALMGTVAQMELEAIKERNRSAAHFNIRAGKYRGSLPPWGYMPARVDGEWRLLVDPVQRERILEVYHRVVDNHEPLHQIAHDLNQRGILSPKDYFAKLQGREPKGREWSATALKRSLISEAMLGYATLNGKTVRDDDGAPLVRADPILTREQLESLRAELVKADRTKPAVSTPSLLLRVLFCAVCGEPAYKFTGGGRKNARYRCRSWGWAQRCGNGTVAMAEWDAFCEEQVLDLLGDAERLEKVWVAGSDSAVELAEVNAELVDLTSLIGSPAYRVGSPQREALDARIAALAARQEELEGLEARPSGWEWRETGQRFGDWWREQDTPGKNTWLRSMNVRLTFDVRGGLTRTIDFGDLQEYEQHLRLGSALDLVNAEKPPTGR

SEQ ID NO: 11604 - protein, 504 aa, Unknown
  Description of Unknown: Integrase A172 sequence
  PF07508,SSF53041,PS51737,cd00338,PTHR30461:SF3,PF00239, PS51736,SM00857,G3DSA:3.40.50.1390,PTHR30461
MRALVVIRLSRVTDATTSPERQLESCQQLCAQRGWDVVGVAEDLDVSGAVDPFDRKRRPNLARWLAFEEQPFDVIVAYRVDRLTRSIRHLQQLVHWAEDHKKLVVSATEAHFDTTTPFAAVVIALMGTVAQMELEAIKERNRSAAHFNIRAGKYRGSLPPWGYLPTRVDGEWRLVPDPVQRERILEVYHRVVDNHEPLHLVAHDLNRRGVLSPKDYFAKLQGREPQGREWSATALKRSLISEAMLGYATLNGKTVRDDDGAPLVRSEPILTREQLEALRAELVKTDRTKPAVSTPSLLLRVLFCAVCGEPAYKFTGGGRKNARYRCRSWGWAQRCGNGTVAMAEWDAFCEEQVLDLLGDSERLEKVWVAGSDSAVELAEVNAELVDLTSLIGSPAYRVGSPQREALDARIAALAARQEELEGLEARPSGWEWRETGQRFGDWWRDQDTAGKNTWLRSMNVRLTFDVRGGLTRTIDFGDLQEYEQHLRLGSALDLVNAEKPPTGR

SEQ ID NO: 11605 - protein, 504 aa, Unknown
  Description of Unknown: Integrase A173 sequence
  PF07508,SSF53041,PS51737,cd00338,PTHR30461:SF3, PF00239,PS51736,SM00857,G3DSA:3.40.50.1390,PTHR30461
MRVLVVIRLSRVTDATTSPERQLESCRQLCAQRGWDVVGVAEDLDVSGAVDPFDRKRRPNLARWLSFEEQPFDVIVAYRVDRLTRSIRHLQQLVHWAEDHKKLIVSATEAHFDTTSPFAAVVIALMGTVAQMELEAIKERNRSAAHFNIRAGKYRGSLPPWGYMPARVDGEWRLVVDPVQRERILEVYHRVVDNHEPLHLVAHDLNQRGILSPKDYFAQLQGREPKGREWSATALKRSLISEAMLGYTTLNGKTVRDDDGAPLVRAEPILTREQLEALRAELVKTDRTKPAVATPSLLLRVLFCAVCGEPAYKFAGGGRKHPRYRCRSMGFPKHCGNGTVAMAEWDAFCEEQVLDLLGDAERLEKVWVAGSDSAVELAEVNAELVDLTSLIGSPAYRVGSPQREALDARIAALAARQEELEGLEARPSGWEWRETGQRFGDWWREQDIAAKNTWLRSMNVRLTFDVRGGLTRTIDFGDLQEYEQHLRLGTALDLVNAEKPPTGR

SEQ ID NO: 11606 - protein, 504 aa, Unknown
  Description of Unknown: Integrase A174 sequence
  PF07508,SSF53041,PS51737,cd00338,PTHR30461:SF3,PF00239, PS51736,SM00857,G3DSA:3.40.50.1390,PTHR30461
MRALVVIRLSRVTDATTSPERQLESCQQLCAQRGWDVVGVAEDLDVSGAVDPFDRKRRPNLARWLAFEEQPFDVIVAYRVDRLTRSIRHLQQLVHWAEDHKKLVVSATEAHFDTTTPFAAVVIALMGTVAQMELEAIKERNRSAAHFNIRAGKYRGSLPPWGYLPTRVDGEWRLVPDPVQRERILEVYHRVVDNHEPLHLVAHDLNQRGILSPKDYFAKLQGREPQGREWSATALKRSLISEAMLGYATLNGKTVRDDDGAPLVRAEPILTREQLEALRAELVKTSRAKPAVATPSLLLRVLFCAVCGEPAYKFAGGGRKHPRYRCRSMGFPKHCGNGTVAMAEWDAFCEEQVLDLLGDAERLEKVWVAGSDSAVELAEVNAELVDLTSLIGSPAYRVGSPQREALDARIAALAARQEELEGLEARPSGWEWRETGQRFGDWWREQDIAAKNTWLRSMNVRLTFDVRGGLTRTIDFGDLQEYEQHLRLGTALDLVNAEKPPTGR

SEQ ID NO: 11607 - protein, 504 aa, Unknown
  Description of Unknown: Integrase A175 sequence
  PF07508,SSF53041,PS51737,cd00338,PTHR30461:SF3, PF00239,PS51736,SM00857,G3DSA:3.40.50.1390,PTHR30461
MRALVVIRLSRVTDATTSPERQLESCQQLCAQRGWDVVGVAEDLDVSGAVDPFDRKRRPNLARWLAFEEQPFDVIVAYRVDRLTRSIRHLQQLVHWAEDHKKLVVSATEAHFDTTTPFAAVVIALMGTVAQMELEAIKERNRSAAHFNIRAGKYRGSLPPWGYLPTRVDGEWRLVPDPVQRERILEVYHRVVDNHEPLHLVAHDLNQRGVLSPKDYFAKLQGREPQGREWSATALKRSLISEAMLGYATLNGKTVRDDDGAPLVRAEPILTREQLEALRAELVKADRTKPAVSTPSLLLRVLFCAVCGEPAYKFTGGGRKNARYRCRSWGWAQRCGNGTVAMAEWDAFCEEQVLDLLGDSERLEKVWVAGSDSAVELAEVNAELVDLTSLIGSPAYRAGSPQREALDARIAALAARQEELEGLEARPSGWEWRETGQRFGDWWRDQDTAGKNAWLRSMNVRLTFDVRGGLTRTIDFGDLQEYEQHLRLGSALDLVNAEKPPTGR

SEQ ID NO: 11608 - protein, 504 aa, Unknown
  Description of Unknown: Integrase A176 sequence
  PF07508,SSF53041,PF13408,PS51737,cd00338,PTHR30461:SF3, PF00239,SM00857,G3DSA:3.40.50.1390,PTHR30461
MPQPLRALVGARVSVVQGPQKVSQQAQLETARKWAEAQGHEIVGTFEDLGVSASVRPDERPDLGKWLTDEGASKWDVIVWSKMDRAFRSTKHCVDFAQWAEERQKVVMFAEDNLRLDYRPGAAKGIDAMMAELFVYLGSFFAQLELNRFKSRAQDSHRVLRQTDRWASGLPPLGYKTVPHPSGKGFGLDTDEDTKAVLYDMAGKLLDGWSLIGIAKDLNDRGVLGSRSRARLAKGKPIDQAPWNVSTVKDALTNLKTQGIKMTGKGKHAKPVLNDKGEQIVLAPPTFDWDTWKQIQDAVALREQAPRSRVHTKNPMLGIGICGKCGATLAQQHSRKKSDKSVVYRYYRCSRTPVNCDGVFIVADEADTLLEEAFLYEWADQPVTRRVFVPGEDHTYELEQINETIARLRRESDAGLIVSDEDERIYLERMRSLITRRTKLEAMPRRSAGWVEETTGQTYGEAWETEDHQQLLKDAKVKFILYSNKPRNIEVVVPQDRVAVDLAI

SEQ ID NO: 11609 - protein, 504 aa, Unknown
  Description of Unknown: Integrase A177 sequence
  PF07508,SSF53041,PS51737,cd00338,PTHR30461:SF3, PF00239,PS51736,SM00857,G3DSA:3.40.50.1390,PTHR30461
MRALVVIRLSRVTDATTSPERQLESCQQLCAQRGWDVVGVAEDLDVSGAVDPFDRKRRPNLARWLAFEEQPFDVIVAYRVDRLTRSIRHLQQLVHWAEDHKKLVVSATEAHFDTTTPFAAVVIALMGTVAQMELEAIKERNRSAAHFNIRAGKYRGSLPPWGYLPTRVDGEWRLVPDPVQRERILEVYHRVVDNHEPLHLVAHDLNRRGVLSPKDYFAKLQGREPRGREWSATALKRSLISEAMLGCATLNGKTVRDDDGAPLVRAEPILTREQLEALRAELVKTDRTKPAVATPSLLLRVLFCAVCGEPAYKFTGGGRKNARYRCRSMGFPKHCGNGTVAMAEWDAFCEEQVLDLLGDAERLEKVWVAGSDSAVELAEVNAELVDLTSLIGSPAYRAGSPQREALDSRIAALAARQEELEGLEARPSGWEWRETGQRFGDWWRDQDTAGKNTWLRSMNVRLTFDVRGGLTRTIDFGDLQEYEQHLRLGAALYLVNAEKPPTGR

SEQ ID NO: 11610 - protein, 504 aa, Unknown
  Description of Unknown: Integrase A178 sequence
  PF07508,SSF53041,PS51737,cd00338,PTHR30461:SF3,PF00239, PS51736,SM00857,G3DSA:3.40.50.1390,PTHR30461
MRALVVIRLSRVTDTTTSPERQLESCQQLCAQRGWDVVGVAEDLDVSGAVDPFDRKRRPNLARWLSFEEQPFDVIVAYRVDRLTRSIRHLQQLVHWAEDHKKLIVSATEAHFDTTSPFAAVVIALMGTVAQMELEAIKERNRSAAHFNIRAGKYRGSLPPWGYMPARVEGEWRLLVDPVQRERILEVYHRVVDNHEPLHQIAHDLNQRGLPSPKDYFAKLQGREPKGREWSATALKRSLISEAMLGYTTLNGKTVRDDDGAPLVRSEPILTREQLEALRAELVKTDRTKPAVSTPSLLLRVLFCAVCGEPAYKFTGGGRKNARYRCRSWGWAQRCGNGTVAMAEWDAFCEEQVLDLLGDAERLEKVWVAGSDSAVELAEVNAELVDLTSLIGSPAYRAGSPQREALDARIAALAARQEELEGLEARPSGWEWRETGQRFGDWWRDQDTAGKNTWLRSMNVRLTFDVRGGLTRTIDFGDLQEYEQHLRLGTALDLVNAEKPPTGR

SEQ ID NO: 11611 - protein, 504 aa, Unknown
  Description of Unknown: Integrase A179 sequence
  PF07508,SSF53041,PF13408,PS51737,cd00338, PTHR30461:SF3,PF00239,SM00857,G3DSA:3.40.50.1390,PTHR30461
MPQPLRALVGARVSVVQGPQKVSQQAQLETARKWAEAQGHEIVGTFEDLGVSASVRPDERPDLGKWLTDEGASKWDVIVWSKMDRAFRSTKHCVDFAQWAEERQKVVMFAEDNLRLDYRPGAAKGIDAMMAELFVYLGSFFAQLELNRFKSRAQDSHRVLRQTDRWASGLPPLGYKTVPHPSGKGFGLDTDEDTKAVLYDMAGKLLDGWSLIGIAKDLNDRGVLGSRSRARLAKGKPIDQAPWNVSTVKDALTNLKTQGIKMTGKGKHAKPVLDDKGEQIVLAPPTFDWDTWKQIQDAVALREQAPRSRVHTKNPMLGIGICGKCGATLAQQHSRKKSDKSVVYRYYRCSRTPVNCDGVFIVADEADTLLEEAFLYEWADQPVTRRVFVPGEDHTYELEQINETIARLRRESDAGLIVSDEDERIYLERMRSLITRRTKLEAMPRRSAGWVEETTGQTYGEAWEIEDHQQLLKDAKVKFILYSNKPRNIEVVVPQDRVAVDLAI

SEQ ID NO: 11612 - protein, 504 aa, Unknown
  Description of Unknown: Integrase A180 sequence
  PF07508,SSF53041,PS51737,cd00338,PTHR30461:SF3,PF00239, PS51736,SM00857,G3DSA:3.40.50.1390,PTHR30461
MRALVVIRLSRVTDATTSPERQLESCQQLCAQRGWDVIGVAEDLDVSGAVDPFDRKRRPNLARWLAFEEQPFDVIVAYRVDRLTRSIRHLQQLVHWAEDHKKLVVSATEAHFDTTTPFAAVVIALMGTVAQMELEAIKERNRSAAHFNIRAGKYRGSLPPWGYLPTRVDGEWRLVPDPVQRERILEVYHRVVDNHEPLHLVAHDLNRRGVLSPKDYFAKLQGREPQGREWSATALKRSLISEAMLGYATLNGKTVRDDDGAPLVRSEPILTREQLEALRAELVKTDRTKPAVSTPSLLLRVLFCAVCGEPAYKFTGGGRKNARYRCRSWGWAQRCGNGTVAMAEWDAFCEEQVLDLLGDAERLEKVWVAGSDSAVELAEVNAELVDLTSLIGSPAYRAGSPQREALDARIAALAARQEELEGLEARPSGWEWRETGQRFGDWWRDQDTAGKNAWLRSMNVRLTFDVRGGLTRTIDFGDLQEYEQHLRLGSALDLVNAEKPPTGR

SEQ ID NO: 11613 - protein, 504 aa, Unknown
  Description of Unknown: Integrase A181 sequence
  PF07508,SSF53041,PF13408,PS51737,cd00338, PTHR30461:SF3,PF00239,SM00857,G3DSA:3.40.50.1390,PTHR30461
MPQPLRALVGARVSVVQGPQKVSQQAQLETARKWAEAQGHEIVGTFEDLGVSASVRPDERPDLGKWLTDEGASKWDVIVWSKMDRAFRSTKHCVDFAQWAEERQKVVMFAEDNLRLDYRPGAAKGIDAMMAELFVYLGSFFAQLELNRFKSRAQDSHRVLRQTDRWASGLPPLGYKTVPHPSGKGFGLDTDEDTKAVLYDMAGKLLDGWSLIGIAKDLNDRGVLGSRSRARLAKGKPIDQAPWNVSTVKDALTNLKTQGIKMTGKGKHAKPVLDDKGEQIVLAPPTFDWDTWKQIQDAVALREQAPRSRVHTKNPMLGIGICGKCGATLAQQHSRKKSDKSVVYRYYRCSRTPVNCDGVFIVADEADTLLEEAFLYEWADQPVTRRVFVPGEDHTYELEQINETIARLRRESDAGLIVSDEDERIYLERMRSLITRRTKLEAMPRRSAGWVEETTGQTYGEAWETDDHQQLLKDAKVKFILYSNKPRNIEVVVPQDRVAVDLAI

SEQ ID NO: 11614 - protein, 503 aa, Unknown
  Description of Unknown: Integrase A182 sequence
  PF07508,SSF53041,PS51737,cd00338,PTHR30461:SF3,PF00239, PS51736,SM00857,G3DSA:3.40.50.1390,PTHR30461
MRALVVIRLSRVTDATTSPERQLESCQQLCVQRGWEVVGVAEDLDVSGAVDPFDRKRRPNLARWLAFEDEPFDVIVAYRVDRLTRSIRHLQQLVHWAEDHKKLVVSATEPHFDTTSPFAAVVIALMGTVAQMELEAIKERNRSAAHFNIRAGKYRGSLPPWGYMPARVDGEWRLLVDPVQRERILEVYHRVVDNHEPLHLVAHDLNQRGILSPKDYFAKLQGREPQGREWSATALKRSLISEAMLGYATLNGKTVRDDDGAPLVRAEPILTREQLESLRAELVKADRAKPAVSTPSLLLRVLFCAVCGEPAYKFDAGRKIPRYRCRSFGFAQRCGNGTVPIAEWDAFCEEQVLDLLGDAERLEKVWVAGSDSAVELAEVNAELVDLTSLIGSPAYRVGSPQREALDSRIAALAARQEELEGLEARPSGWEWRETGQRFADWWAAQDTAGKNTWLRSMNVRLTFDVRGGLTRTIDFGDLQEYEQHLRLGAALDLVNAEKPPTGR

SEQ ID NO: 11615 - protein, 502 aa, Unknown
  Description of Unknown: Integrase A183 sequence
  PF07508,G3DSA:1.10.10.2600,SSF53041,PS51737,cd00338, PF00239,PS51736,SM00857,G3DSA:3.40.50.1390,PTHR30461
MNKKICIYLRKSRADEELEKTLGEGETLSKHRNALLKFAKENKLNVTDIKEEIVSGDSLFFRPKMLELLKEVENNMYYGVLVMDIDRLGRGGMKDQGIILDAFKESKTKIITPLKTYDLDNEMDEEITEFKTFFSRRELKTINRRMQGGRIRSIEEGNYIATNPPYGYDISFIKKNRTLKINEDEAPAINLIFKLYIEGNGASAIANELNNLRYKTKLGNNFSPSSVLTIIKNPIYIGKIPWKRKDIKKSKTPGKVKDTRTRDKSEWIIADGKHPGIVTNEIWESAQKILKGRYHIPYQLSNAPVNPFAGIISCGICGKKMVMRKARGINRLMCIYKCGNKSTRFDNVESDCLEALKDYLSNYSAEIKNSIKKEDIDMYSIQITNLKKELTTLNNQRLKLFDLLERNLYDEDTFLERSKNINDRIENITHTLKSLEKKVKKNSYTSYEEDIKHFKNVLDAYNLTKDVSKKNNLLKSILYKIEYTKTEKGKDYEIKLFPKLRK

SEQ ID NO: 11616 - protein, 502 aa, Unknown
  Description of Unknown: Integrase A184 sequence
  PF07508,G3DSA:1.10.10.2600,SSF53041,PS51737,cd00338,PF00239, PS51736,SM00857,G3DSA:3.40.50.1390,PTHR30461
MNKICIYLRKSRADEELEKTLGEGETLSKHRKALLKFAKEKKLNIVEIKEEIVSGESLFFRPKMLELLKEVENKQYTGVLVMDMQRLGRGNMQDQGIILETFKKSNTKIITPMKTYDLSDDFDEEYTEFEAFMSRKELKMINRRMQGGRVRSVEDGNYIATNPPLGYDIHWIKKSRTLKINPHECEIIKLIFKLYTEGNGAGSIAEHLNNLGYKTKFNNNFSRSSVLFILKNPIYIGKVTWKKKEIKKSKNPNKVKDTRTRDKSEWIVVDGKHEPMISMKMWNKAQEILNNKYHIPYQLVNGPANPLAGIVICSKCKFKMVMRKLKGVDRLLCRNNKCDNISNRYDSTEKAIIQALERYLKEYRINISNQNKTSDIKPYERQVNILEKELAALNEQKLKLFDFLERGIYDENTFLERSKNIEERITKTSSGIEKINDIINKEKKVVKEEDVIKFQKLLDGYKNTDDIKLKNELMKKLVNKVEYTKNKRGDTFGIDIFPKLKP

SEQ ID NO: 11617 - protein, 502 aa, Unknown
  Description of Unknown: Integrase A185 sequence
  PF07508,G3DSA:1.10.10.2600,SSF53041,PS51737,cd00338, PF00239,PS51736,SM00857,G3DSA:3.40.50.1390,PTHR30461
MNKICIYLRKSRADEELEKTLGEGETLSKHRKALLKFAKEKKLNIVEIKEEIVSGESLFFRPKMLELLKEVENKQYTGVLVMDMQRLGRGNMQDQGIILETFKKSNTKIITPMKTYDLSDDFDEEYTEFEAFMSRKELKMINRRMQGGRVRSVEDGNYIATNPPLGYDIHWIKKSRTLKINTHECEIIKLIFKLYTEGNGAGSIAEHLNNLGYKTKFNNNFSRSSVLFILKNPIYIGKVTWKKKEIKKSKNPNKVKDTRTRDKSEWIVVDGKHEPIISMKIWNKAQEILNNKYHIPYQLVNGPANPLAGIVICSKCKFKMVMRKLKGIDRLLCRNNKCNNISNRYDSTEKAIVQALERYLNEYRINISNKNKTSNIKPYERQINILEKELAALNEQKLKLFDFLERGIYDENTFLERSKNIEKRITKTSSGIEKINDIINKEKKVVKEEDVIKFQKLLDGYKNTDDIKLKNELMKKLVNKVEYTKDKRGETFGIDIFPKLKP

SEQ ID NO: 11618 - protein, 502 aa, Unknown
  Description of Unknown: Integrase A186 sequence
  PF07508,G3DSA:1.10.10.2600,SSF53041,PS51737,cd00338,PF00239, PS51736,SM00857,G3DSA:3.40.50.1390,PTHR30461
MNKICIYLRKSRADEELEKTLGEGETLSKHRKALLKFAKEKKLNIVEIKEEIVSGESLFFRPKMLELLKEVENKQYTGVLVMDMQRLGRGNMQDQGIILETFKKSNTKIITPMKTYDLSDDFDEEYTEFEAFMSRKELKMINRRMQGGRVRSVEDGNYIATNPPLGYDIHWIKKSRTLKINPHECEIIKLIFKLYTEGNGAGSIAEHLNNLGYKTKFNNNFSRSSVLFILKNPIYIGKVTWKKKEIKKSKNPNKVKDTRTRDKSEWIVVDGKHEPMISMKMWNKAQEILNNKYHIPYQLVNGPANPLAGIVICSKCKFKMVMRKLKGVDRLLCRNNKCDNISNRYDSTEKAIVQALERYLKEYRINISNRNKTSDIKPYERQINILEKELAALNEQKLKLFDFLERGIYDENTFLERSKNIEERITKTSLGIEKINDIINKEKKVVKEEDVIKFQKLLDGYKNTDDIKLKNELMKKLVNKVEYTKNKRGETFGIDIFPKLKP

SEQ ID NO: 11619 - protein, 502 aa, Unknown
  Description of Unknown: Integrase A187 sequence
  PF07508,SSF53041,PF13408,PS51737,cd00338, PTHR30461:SF3,PF00239,PS51736,SM00857,G3DSA:3.40.50.1390, PTHR30461
MRVLGRLRLSRSTEESTSIERQREIVTAWADSNGHTVVGWAEDVDVSGAVDPFDTPSLGPWLDERRGEWDILCAWKLDRLGRDAIRLNKLFLWCQENGKTVASTSEGIDLGTPVGRLIANVIAFLAEGEREAIRERVTSSKQKLREVGRWGGGKPPFGYMGIPNPDGQGYILVVDPIAKPVVRRIVDDVVDGKPLTRLCAELTEERYLTPAEYYATLKAGAPRQQADPGEVIAKWRPTAVRNLLRSKALRGHAHHRGQTVRDDQGRPVRLAEPLVDSDEWELLQETLDGIQADFSGRRVEGASPLSGVAVCMTCGRPLHFSRHMVKRPYGDYPYQYYRCQDRHGKNVPADVLDELVEENFLLKVGDYPVRERVWVQGDTNWADMKEAVAAYDELVQAAGRAKSATAKERLQRQLDALDTRIAELESAPATEAHWEYRETGSTYRDAWENSDTDQRRELLKKSGITVAVGIDGVEGRRSKHNPGALRFDIRVPAELTQRLGAS

SEQ ID NO: 11620 - protein, 502 aa, Unknown
  Description of Unknown: Integrase A188 sequence
  PF07508,SSF53041,PS51737,cd00338,PTHR30461:SF3,PF00239,PS51736, SM00857,G3DSA:3.40.50.1390,PTHR30461
MRVLGRLRLSRSTEESTSIERQREIVTAWAESNGHTLVGWAEDVDVSGAIDPFDTPSLGPWLDERRGEWDILCAWKLDRLGRDAIRLNKLFGWCQEHGKTVASCSEGIDLSTPVGRLIANVIAFLAEGEREAIRERVTSSKQKLREVGRWGGGKPPFGYMGIPNPDGQGHILVVDPVAKPVVRRIVDDILDGKPLTRLCTELTEERYLTPAEYYATLKAGAPRQKAEPDETPAKWRPTALRNLLRSKALRGYAHHKGQTVRDLKGQPVRLAEPLVDADEWELLQETLDRVQANWSGRRVEGVSPLSGVVVCITCDRPLHHDRYLVKRPYGDYPYRYYRCRDRHGKNLPAEMVETLMEESFLARVGDYPVRERVWVQGDTNWADLKEAVAAYDELVQAAGRAKSATAKERLQRQLDALDERIAELESAPATEAHWEYRPTGGTYRDAWETADTDERREILRRSGIVLAVGVDGVDGRRSKHNPGALHFDFRVPEELTQRLGVS

SEQ ID NO: 11621 - protein, 502 aa, Unknown
  Description of Unknown: Integrase A189 sequence
  PF07508,SSF53041,PS51737,cd00338,PTHR30461:SF3, PF00239,PS51736,SM00857,G3DSA:3.40.50.1390,PTHR30461
MRVLGRLRLSRSTEESTSIERQREIVTAWADSNGHTVVGWAEDVDVSGAIDPFDTPSLGVWLDERRGEWDILCAWKLDRLGRDAIRLNKLFLWCQEHGKTVTSCSEGIDLGTPVGRLIANVIAFLAEGEREAIRERVASSKQKLREIGRWGGGKPPFGYMGVRNPDGQGHILVVDPVAKPVVRRIVEDILEGKPLTRLCTELTEERYLTPAEYYATLKAGAPRQQAEEGEVTAKWRPTAVRNLLRSKALRGHAHHKGQTVRDDQGRAIQLAEPLVDADEWELLQETLDGIAADFSGRRVEGASPLSGVAVCMTCDKPLHHDRYLVKRPYGDYPYRYYRCRDRHGKNVPAETLEELVEDAFLQRVGDFPVRERVWVQGDTNWADLKEAVAAYDELVQAAGRAKSATARERLQRQLDILDERIAELESAPNTEAHWEYQPTGGTYRDAWENSDADERRELLRRSGIVVAVHIDGVEGRRSKHNPGALHFDIRVPHELTQRLIAP

SEQ ID NO: 11622 - protein, 502 aa, Unknown
  Description of Unknown: Integrase A190 sequence
  PF07508,SSF53041,PS51737,cd00338,PTHR30461:SF3,PF00239, PS51736,SM00857,G3DSA:3.40.50.1390,PTHR30461
MPTYDRSMRVIGRLRISRQSEESTSIDRQRELIQNWADTHDHEIVGWAEDIDVSGSVDPFEAPGLGPWLKRDRLGEWDILVAWKLDRIARRAIAINRVFHLCQEHDKTLVCISDNIDLSTWVGRLIANVIAGVAEGELEAIRERTLASHRKLRDLGRWPGGRPAYGYKAVERTDGPGWKLVHDEYSATIMREIVDRTLQGEAGNAIAQDLQERGVLPPAEYRRQMNGEKLRGGEWMGQVIRKMLKSRTLLGHVTHQQVTVINEKEGTPILKGEPLVSLEEWEELQAMLGGSSRPKNHNRTTAASPMLDVALCAECEKPLHLRTQRTQRKEKLHVHRYYYCPDKHGSAIRGEDVENAVENQFLEDFGDVPAMERVFREGENHEIEIKQAIRSIEALTPLLGTATSGTVLKSLTDQISALSNRVTYLESLPKAESGYILRPTGKTYREEWEERDEQGRRALLRRSGITATFRLTGKGRGGRNPAPGALEFNLRVPEDAHARMAS

SEQ ID NO: 11623 - protein, 502 aa, Unknown
  Description of Unknown: Integrase A191 sequence
  PF07508,SSF53041,PS51737,cd00338,PTHR30461:SF3, PF00239,PS51736,SM00857,G3DSA:3.40.50.1390,PTHR30461
MPTYDRSMRVIGRLRISRQSEESTSIDRQRELIQNWADTHDHEIVGWAEDIDVSGSIDPFEAPGLGPWLKRDRLGEWDILVAWKLDRIARRAIAINRVFHLCQEHDKTLVCISDNIDLSTWVGRLIANVIAGVAEGELEAIRERTLASHRKLRELGRWPGGRPAYGYKAVERTDGPGWKLVHDEYSATIMREIVDRTLQGEAGNAIAQDLQERGVLTPAEYRREMNGEKLRGGEWMGQVIRKMLKSRTLLGHVTHQQVTVINEKEGTPILKGEPLVSLEEWEELQAMLGGSSRPKNHNRTTAASPMLDVALCAECEKPLHLRTQRTQRKEKLHVHRYYYCPDKHGSAIRGEDVENAVENQFLEDFGDLPAMERVFREGENHEIEIKQAIQSIEALTPLLGAATSGTVLKSLTDQISALSNRVTYLESLPKAESGYILRPTGKTYREEWEERDEQGRRALLRRSGITATFMLTGKGRGGRNPAPGALQFNLRVPADAQERLAS

SEQ ID NO: 11624 - protein, 502 aa, Unknown
  Description of Unknown: Integrase A192 sequence
  PF07508,SSF53041,PS51737,cd00338,PTHR30461:SF3,PF00239, PS51736,SM00857,G3DSA:3.40.50.1390,PTHR30461
MPTYDRSMRVIGRLRISRQTEESTSIERQRELIQNWADTHDHEIVGWAEDKDVSGSVDPFDTPGLGPWLKRDRLDDWDILVAWKLDRIARRAIAINRVFHLCQEHDKTLVCISDSIDLSTWVGRLIANVIAGVAEGELEAIRERTLASHRKLRELGRWPGGRPAYGYKAVERTDGPGWKLVHDEYSATIMREIVDRTLQGEAGNAIAQDLQARGVLPPAEYRRQMNGEKLRGGEWMGQVIRKMLKSRTLLGHVTHQQVTVINEKEGTPILKGEPLVSLEEWEELQAMLGGSSRPKNHNRTTAASPMLDVALCAECEKPLHLRTQRTQRKEKLHVHRYYYCPDKHGSAIRGEDVENAVENQFLEDFGDLPAMERVFREGENHEIEIKQAIQSIEALTPLLGAATSGTVLKSLTDQISAISNRVTYLESLPKAESGYILRPTGKTYREEWEERDEQGRRALLRRAGITATFRLTGKGRGGRNPAPGALEFHLRVPEDAHDRMAS

SEQ ID NO: 11625 - protein, 502 aa, Unknown
  Description of Unknown: Integrase A193 sequence
  PF07508,SSF53041,PS51737,cd00338,PTHR30461:SF3, PF00239,PS51736,SM00857,G3DSA:3.40.50.1390,PTHR30461
MPTYDRSMRVIGRLRISRQTEESTSIERQRELIQNWADTHDHEIVGWAEDKDVSGSVDPFDTPGLGPWLKRDRLDDWDILVAWKLDRIARRAIAINRVFHLCQEHDKTLVCISDNIDLSTWVGRLIANVIAGVAEGELEAIRERTLASHRKLRELGRWPGGRPAYGYKAVERTDGPGWKLVHDEYSATIMREIVDRTLQGEAGNAIAQDLQARGVLPPAEYRRQMNGEKLRGGEWMGQVIRKMLKSRTLLGHVTHQQVTVINEKEGTPILKGEPLVSLEEWEELQAMLGGSSRPKNHNRTTAASPMLDVALCAECEKPLHLRTQRTQRKEKLHVHRYYYCPDKHGSAIRGEDVENAVENQFLEDFGDLPAMERVFREGENHEIEIKQAIQSIEALTPLLGAATSGTVLKSLTDQISAISNRVTYLESLPKAESGYILRPTGKTYREEWEERDEQGRRALLRRAGITATFRLTGKGRGGRNPAPGALEFHLRVPEDAHDRMAS

SEQ ID NO: 11626 - protein, 502 aa, Unknown
  Description of Unknown: Integrase A194 sequence
  PF07508,SSF53041,PS51737,cd00338,PTHR30461:SF3,PF00239, PS51736,SM00857,G3DSA:3.40.50.1390,PTHR30461
MRVLGRLRLSRSTEESTSIERQREIVTAWAQSNGHTLVGWAEDVDVSGAIDPFDTPSLGPWLDERRGEWDILCAWKLDRLGRDAIRLNKLFGWCQEHGKTVASCSEGIDLSTPVGRLIANVIAFLAEGEREAIRERVTSSKQKLREVGRWGGGKPPFGYMGVPNPDGQGHILVVDPVAKPVVRRIVDDILDGKPLTRLCTELTEERYLTPAEYYATLKAGAPRQKAEPDETPAKWRPTALRNLLRSKALRGYAHHKGQTVRDLKGQPVRLAEPLVDADEWELLQEILDRVQANWSGRRVEGVSPLSGVAVCITCDRPLHHDRYLVKRPYGDYPYRYYRCRDRHGKNLPAELVETLMEESFLARVGDYPVRERVWVQGDTNWADLKEAVAAYDELVQAAGRAKSATAKERLQRQLDALDERIAELESAPATEAHWEYRPTGGTYRDAWETADTDERREILRRSGIVLAVGVDGVEGRRSKHNPGALHFDFRVPEELTQRLGVA

SEQ ID NO: 11627 - protein, 502 aa, Unknown
  Description of Unknown: Integrase A195 sequence
  PF07508,SSF53041,PS51737,cd00338,PTHR30461:SF3, PF00239,PS51736,SM00857,G3DSA:3.40.50.1390,PTHR30461
MPTYDRSMRVIGRLRISRQTEESTSIERQRELIQNWADTHEHEIVGWAEDKDVSGSVDPFDTPGLGPWLKRDRLDDWDILVAWKLDRIARRAIAINRVFHLCQEHDKTLVCISDNIDLSTWVGRLIANVIAGVAEGELEAIRERTLASHRKLRELGRWPGGRPAYGYKAVERTDGPGWKLVHDEYSATIMREIVDRTLQGEAGNAIAQDLQARGVLPPAEYRRQMNGEKLRGGEWMGQVIRKMLKSRTLLGHVTHQQVTVINEKEGTPILKGEPLVSLEEWEELQAMLGGSSRPKNHNRTTAASPMLDVALCAECEKPLHLRTQRTQRKEKLHVHRYYYCPDKHGSAIRGEDVENAVENQFLEDFGDLPAMERVFREGENHEIEIKQAIQSIEALTPLLGAATSGTVLKSLTDQISAISNRVTYLESLPKAESGYILRPTGKTYREEWEERDEQGRRALLRRAGITATFRLTGKGRGGRNPAPGALEFHLRVPEDAHDRMAS

SEQ ID NO: 11628 - protein, 502 aa, Unknown
  Description of Unknown: Integrase A196 sequence
  PF07508,SSF53041,PS51737,cd00338,PTHR30461:SF3,PF00239, PS51736,SM00857,G3DSA:3.40.50.1390,PTHR30461
MRVLGRLRLSRSTEESTSIERQREIVTAWADSNGHTVVGWAEDVDVSGAIDPFDTPSLGVWLDERRGEWDILCAWKLDRLGRDAIRLNKLFLWCQEHGKTVTSCSEGIDLGTPVGRLIANVIAFLAEGEREAIRERVASSKQKLREIGRWGGGKPPFGYMGVRNPDGQGHILVVDPVAKPVVRRIVEDILEGKPLTRLCTELTEERYLTPAEYYATLKAGAPRQQAEEGEVTAKWRPTAVRNLLRSKALRGHAHHKGQTVRDDQGRAIQLAEPLVDADEWELLQETLDGIAADFSGRRVEGASPLSGVAVCMTCDKPLHHDRYLVKRPYGDYPYRYYRCRDRHGKNVPAETLEELVEDAFLQRVGDFPVRERVWVQGDTNWADLKEAVAAYDELVQAAGRAKSATARERLQRQLDILDERIAELESAPNTEAHWEYQRTGGTYRDAWENSDADERRELLRRSGIVVAVHIDGVEGRRSKHNPGALHFDIRVPHELTQRLIAP

SEQ ID NO: 11629 - protein, 502 aa, Unknown
  Description of Unknown: Integrase A197 sequence
  PF07508,SSF53041,PS51737,cd00338,PTHR30461:SF3, PF00239,PS51736,SM00857,G3DSA:3.40.50.1390,PTHR30461
MRVLGRLRLSRSTEESTSIERQREIVTAWAESNGHTLVGWAEDVDVSGAIDPFDTPSLGPWLDERRGEWDILCAWKLDRLGRDAIRLNKLFGWCQEHGKTVASCSEGIDLSTPVGRLIANVIAFLAEGEREAIRERVTSSKQKLREVGRWGGGKPPFGYMGIPNPDGQGHILVVDPVAKPVVRRIVDDILDGKPLTRLCTELTEERYLTPAEYYATLKAGAPRQKAEPDETPAKWRPTALRNLLRSKALRGYAHHKGQTVRDLKGQPVRLAEPLVDADEWELLQETLDRVQANWSGRRVEGVSPLSGVAVCITCDRPLHHDRYLVKRPYGDYPYRYYRCRDRHGKNLPAELVETLMEESFLARVGDYPVRERVWVQGDTNWADLKEAVAAYDELVQAAGRAKSATAKERLQRQLDALDERIAELESAPTTEAHWEYRPTGGTYRDAWETADTDERREILRRSGIVLAVGVDGVDGRRSKHNPGALHFDFRVPEELTQRLGVS

SEQ ID NO: 11630 - protein, 501 aa, Unknown
  Description of Unknown: Integrase A198 sequence
  PF07508,SSF53041,PS51737,cd00338,PTHR30461:SF3,PF00239, PS51736,SM00857,G3DSA:3.40.50.1390,PTHR30461
MVVIRLSRVTDATTSPERQLESCQQLCAQRGWDVVGVAEDLDVSGAVDPFDRKRRPNLARWLSFEEQPFDVIVAYRVDRLTRSIRHLQQLVHWAEDHKKLIVSATEAHFDTTTPFAAVVIALMGTVAQMELEAIKERNRSAAHFNIRAGKYRGSLPPWGYMPARVDGEWRLLVDPVQRERILEVYHRVVDNHEPLHLVAHDLNQRGILSPKDYFAKLQGREPKGREWSATALKRSLISEAMLGYATLNGKTVRDDDGAPLVRAEPILTREQLEALRAELVKTDRTKPAVSTPSLLLRVLFCAVCGEPAYKFTGGGRKNARYRCRSWGWAQRCGNGTVAMAEWDAFCEEQVLDLLGDAERLEKVWVAGSDSAVELAEVNAELVDLTSLIGSPAYRVGSPQREALDARIAALAARQEELEGLEARPSGWEWRETGQRFGDWWREQDTAAKNTWLRSMNVRLTFDVRGGLTRTIDFGDLQEYEQHLRLGSALDLVNAEKPPTGR

SEQ ID NO: 11631 - protein, 501 aa, Unknown
  Description of Unknown: Integrase A199 sequence
  PF07508,SSF53041,PS51737,cd00338,PTHR30461:SF3, PF00239,PS51736,SM00857,G3DSA:3.40.50.1390,PTHR30461
MSDMRVLGRLRISRATEESTSIERQREIVEQWASVNDHEIVGWAVDQDVSGSVDPFDAPALGPWLSDHRKHEWDILCAWKLDRLSRRAIPMNKLFGWMIDNDKTLVCVSENLDLGTWVGRMIANVIAGVAEGELEAIRERTTASHKKLRELGRWAGGPTYYGYVPKPRDGAGWELDIDPHAAGVLREIIEKTIAGQSTESIVVELNERGELAPSDYHRKRNGKPIRGTKWSTSWLRSQLKSKTLLGHMTHNGETVYDDAGLPVQKGPALVDRDTYKQLQDALESRGINRTRRRTGASPLLGVAVCDVCEGPLYYRQTKNAKGTAMLRQYICKHGRYGNTKANGGEPYNIIQADLLEATVEELFLSKMGDQPRVERVFIPGEGHQHELETAERAVEDLTSLLGTITQEGARKRLLAQLAAAHERLAHLEELPSSEPRWETRETGETYREAWEGATVEERRQILLKAGVTLKVQMKDRVPRVHPGVIVANWIEPHDIEKRLAS

SEQ ID NO: 11632 - protein, 500 aa, Unknown
  Description of Unknown: Integrase A200 sequence
  PF07508,SSF53041,PS51737,cd00338,PTHR30461:SF3,PF00239, SM00857,G3DSA:3.40.50.1390,PTHR30461
MTQTLRALVGARVSVVQGPQKVSHIAQQESGTKWATERGHEIVGTFKDLDVSASVSPFERPDLGPWLSPERQDEWDILVFSKIDRMFRSTRDCVKFAEWAEERKKILVFAEDSMTLNYRDKSDSLEKMMSELFIYIGSFFAQLELNRFRSRAKDSHRVLRGTDRWASGVPPLGFKVIDHPSGKGKGLATDPEGKELLYDMAGKLLEGWSFIRISQYLNEKKIPTQLDKARMAKGKPAYDNPWSVNTVIESLTSLRTQGLKMTRSGKKFVTVLDEAGEPIRMAPPTFDAATWKQIQEAAALRQNNRRSRSYTANPMLGVGFCGQCGASLAQQFSRSKLKDGTVNEHRYYRCGRTPVNCQNVFLRADDGDDLLEQTFLEAYGDEPVTRRVFVPGEDHTEELEQVRATIERLRRESDAGLIVSAEDERIYLERMKSLIDRRTQLEAVPRRAAGWVTEETGQAYREAWETEDHRTLLSEAGIRFELKSSKPMNFALHVPQKEAG

SEQ ID NO: 11633 - protein, 500 aa, Unknown
  Description of Unknown: Integrase A201 sequence
  PF07508,SSF53041,PS51737,cd00338,PTHR30461:SF3, PF00239,PS51736,SM00857,G3DSA:3.40.50.1390,PTHR30461
MRALVVIRLSRVTDATTSPERQLESCQQLCAQRGWDVVGVAEDLDVSGAVDPFDRKRRPNLARWLAFEEQPFDVIVAYRVDRLTRSIRHLQQLVHWAEDHKKLVVSATEAHFDTTTPFAAVVIALMGTVAQMELEAIKERNRSAAHFNIRAGKYRGSLPPWGYLPTRVDGEWRLVPDPVQRERILEVYHRVVDNHEPLHLVAHDLNRRGVLSPKDYFAKLQGREPQGREWSATALKRSLISEAMLGYATLNGKTVRDDDGAPLVRAEPILTREQLEALRAELVKTDRTKPAVSTPSLLLRVLFCAVCGEPAYKFAGGGRKHPRYRCRSMGFPKHCGNGTVAMAEWDAFCEEQVLDLLGDSERLEKVWVAGSDSAVELAEVNAELVDLTSLIGSPAYRAGSPQREALDSRIAALAARQEELEGLEARPSGWEWRETGQRFGDWWREQDTAGKNTWLRAMNVRLTFDVRGGLTRTIDFGDLQEYEQHLRLGSVVERLHAGMS

SEQ ID NO: 11634 - protein, 500 aa, Unknown
  Description of Unknown: Integrase A202 sequence
  PF07508,SSF53041,PS51737,cd00338,PTHR30461:SF3,PF00239, PS51736,SM00857,G3DSA:3.40.50.1390,PTHR30461
MRALVVIRLSRVTDATTSPERQLESCQQLCAQRGWDVVGVAEDLDVSGAVDPFDRKRRPNLARWLAFEEQPFDVIVAYRVDRLTRSIRHLQQLVHWAEDHKKLVVSATEAHFDTTTPFAAVVIALMGTVAQMELEAIKERNRSAAHFNIRAGKYRGSLPPWGYLPTRVDGEWRLVPDPVQRERILEVYHRVVDNHEPLHLVAHDLNRRGVLSPKDYFAKLQGREPQGREWSATALKRSLISEAMLGYATLNGKTVRDDDGAPLVRSEPILTREQLEALRAELVKTDRTKPAVSTPSLLLRVLFCAVCGEPAYKFTGGGRKNARYRCRSWGWAQRCGNGTVAMAEWDAFCEEQVLDLLGDAERLEKVWVAGSDSAVELAEVNAELVDLTSLIGSPAYRAGSPQREALDARIAALAARQEELEGLEARPSGWEWRETGQRFGDWWRDQDTAAKNTWLRSMNVRLTFDVRGGLTRTIDFGDLQEYEQHLRLGSVVERLHTGMS

SEQ ID NO: 11635 - protein, 500 aa, Unknown
  Description of Unknown: Integrase A203 sequence
  PF07508,SSF53041,PS51737,cd00338,PTHR30461:SF3, PF00239,PS51736,SM00857,G3DSA:3.40.50.1390,PTHR30461
MRALVVIRLSRVTDATTSPERQLESCQRLCAQRGWDVVGVAEDLDVSGAVDPFDRKRRPNLARWLAFEEQPFDVIVAYRVDRLTRSIRHLQQLVHWAEDHKKLVVSATEAHFDTTTPFAAVVIALMGTVAQMELEAIKERNRSAAHFNIRAGKYRGSLPPWGYLPTRVDGEWRLVPDPVQRERILEVYHRVVDNHEPLHLVAHDLNRRGVLSPKDYFAKLQGREPQGREWSATALKRSLISEAMLGYATLNGKTVRDDDGAPLVRAEPILTREQLEALRAELVKTDRTKPAVSTPSLLLRVLFCAVCGEPAYKFTGGGRKNARYRCRSWGWAQRCGNGTVAMAEWDAFCEEQVLDLLGDAERLEKVWVAGSDSAVELAEVNAELVDLTSLIGSPAYRVGSPQREALDARIAALAARQEELEGLEARPSGWEWRETGQRFGDWWREQDTSGKNTWLRSMNVRLTFDVRGGLTRTIDFGDLQEYEQHLRLGSVVERLHTGMS

SEQ ID NO: 11636 - protein, 500 aa, Unknown [sequence omitted]

SEQ ID NO: 11637 - protein, 500 aa, Unknown
  Description of Unknown: Integrase A205 sequence
  PF07508,SSF53041,PS51737,cd00338,PTHR30461:SF3, PF00239,PS51736,SM00857,G3DSA:3.40.50.1390,PTHR30461
MRALVVIRLSRVTDATTSPERQLESCQQLCAQRGWDVVGVAEDLDVSGAVDPFDRKRRPNLARWLAFEEQPFDVIVAYRVDRLTRSIRHLQQLVHWAEDHKKLIVSATEAHFDTTSPFAAVVIALMGTVAQMELEAIKERNRSAAHFNIRAGKYRGSLPPWGYMPARVDGEWRLLVDPVQRERILEVYHRVVDNHEPLHLVAHDLNRRGVLSPKDYFAKLQGREPQGREWSATALKRSLISEAMLGYTTLNGKTVRDDDGAPLVRAEPILTREQLEALRAELVKTDRTKPAVSTPSLLLRVLFCAVCGEPAYKFTGGGRKNARYRCRSWGWAQRCGNGTVAMAEWDAFCEEQVLDLLGDAERLEKVWVAGSDSAVELAEVNAELVDLTSLIGSPAYRVGSPQREALDARIAALAARQEELEGLEARPSGWEWRETGQRFGDWWREQDTAAKNTWLRSMNVRLTFDVRGGLTRTIDFGDLQEYEQHLRLGSVVERLHTGMS

SEQ ID NO: 11638 - protein, 500 aa, Unknown
  Description of Unknown: Integrase A206 sequence
  PF07508,SSF53041,PS51737,cd00338,PTHR30461:SF3,PF00239, PS51736,SM00857,G3DSA:3.40.50.1390,PTHR30461
MRALVVIRLSRVTDATTSPERQLESCQQLCAQRGWDVVGVAEDLDVSGAVDPFDRKRRPNLARWLAFEEQPFDVIVAYRVDRLTRSIRHLQQLVHWAEDHKKLIVSATEAHFDTTTPFAAVVIALMGTVAQMELEAIKERNRSAAHFNIRAGKYRGSLPPWGYLPTRVDGEWRLVPDPVQRERILEVYHRVVDNHEPLHLVAHDLNRRGVLSPKDYFAKLQGRDPQGREWSATALKRSLISEAMLGYATLNGKTVRDDDGAPLVRAEPILTREQLEALRAELVKTDRTKPAVSTPSLLLRVLFCAVCGEPAYKFTGGGRRNARYRCRSWGWAQRCGNGTVAMAEWDAFCEEQVLDLLGDAERLEKVWVAGSDSAVELAEVNAELVDLTSLIGSPAYRVGSPQREALDARIAALAARQEELEGLEARPSGWEWRETGQRFGDWWREQDTSGKNTWLRSMNVRLTFDVRGGLTRTIDFGDLQEYEQHLRLGSVVERLHTGMS

SEQ ID NO: 11639 - protein, 500 aa, Unknown
  Description of Unknown: Integrase A207 sequence
  PF07508,SSF53041,PS51737,cd00338,PTHR30461:SF3, PF00239,PS51736,SM00857,G3DSA:3.40.50.1390,PTHR30461
MRALVVIRLSRVTDATTSPERQLESCQQLCAQRGWDVVGVAEDLDVSGAVDPFDRKRRPNLARWLSFEEQPFDVIVAYRVDRLTRSIRHLQQLVHWAEDHKKLIVSATEAHFDTTSPFAAVVIALMGTVAQMELEAIKERNRSAAHFNIRAGKYRGSLPPWGYMPARVDGEWRLVPDPVQRERILEVYHRVVDNHEPLHLVAHDLNRRGVLSPKDYFAKLQGREPQGREWSATALKRSLISEAMLGYATLNGKTVRDDDGAPLVRAEPILTREQLESLRAELVKTDRTKPAVSTPSLLLRVLFCAVCGEPAYKFTGGGRKNARYRCRSWGWAQRCGNGTVAMAEWDAFCEEQVLDLLGDSERLEKVWVAGSDSAVELAELNAELVDLTSLIGSPAYRAGSPQREALDARIAALAARQEELEGLEARPSGWEWRETGQRFGDWWRDQDTAGKNTWLRSMNVRLTFDVRGGLTRTIDFGDLQEYEQHLRLGSVVERLHTGMS

SEQ ID NO: 11640 - protein, 500 aa, Unknown
  Description of Unknown: Integrase A208 sequence
  PF07508,SSF53041,PS51737,cd00338,PTHR30461:SF3,PF00239, PS51736,SM00857,G3DSA:3.40.50.1390,PTHR30461
MRALVVIRLSRVTDATTSPERQLESCQQLCAQRGWDVVGVAEDLDVSGAVDPFDRKRRPNLARWLAFEEQPFDVIVAYRVDRLTRSIRHLQQLVHWAEDHKKLVVSATEAHFDTTTPFAAVVIALMGTVAQMELEAIKERNRSAAHFNIRAGKYRGSLPPWGYLPTRVDGEWRLVPDPVQRERILEVYHRVVDNHEPLHLVAHDLSRRGVLSPKDYFAKLQGREPRGREWSATALKRSLISEAMLGYATLNGKTVRDDDGAPLVRAEPILTREQLEALRAELVKTDRTKPAVATPSLLLRVLFCAVCGEPAYKFTGGGRKNARYRCRSWGWAQRCGNGTVAMAEWDAFCEEQVLDLLGDSERLEKVWVAGSDSAVELAEVNAELVDLTSLIGSPAYRVGSPQREALDARIAALAARQEELEGLEARPSGWEWRETGQRFGDWWREQDIAAKNTWLRSMNVRLTFDVRGGLTRTIDFGDLQEYEQHLRLGSVVERLHAGMS

SEQ ID NO: 11641 - protein, 500 aa, Unknown
  Description of Unknown: Integrase A209 sequence
  PF07508,SSF53041,PS51737,cd00338,PTHR30461:SF3, PF00239,PS51736,SM00857,G3DSA:3.40.50.1390,PTHR30461
MRALVVIRLSRVTDATTSPERQLESCQQLCAQRGWDVVGVAEDLDVSGAVDPFDRRRRPNLARWLAFEEQPFDVIVAYRVDRLTRSIRHLQQLVHWAEDHKKLVVSATEAHFDTTTPFAAVVIALMGTVAQMELEAIKERNRSAAHFNIRAGKYRGSLPPWGYLPTRVDGEWRLVPDPVQRERILEVYHRVVDNHEPLHLVAHDLNQRGVLSPKDYFAKLQGREPRGREWSATALKRSLISEAMLGYATLNGKTVRDDDGAPLVRAEPILTREQLEALRAELVKTDRTKPAVSTQSLLLRVLFCAVCGEPAYKFTGGGRKNARYRCRSWGWAQRCGNGTVAMAEWDAFCEEQVLDLLGGSERLEKVWVAGSDSAVELAEVNAELVDLTSLIGSPAYRVGSPQREALDARIAALAARQEELEGLEARPSGWEWRETGQRFGDWWREQGTAGKNTWLRSMNVRLTFDVRGGLTRTIDFGDLQEYEQHLRLGSVVERLHAGMS

SEQ ID NO: 11642 - protein, 500 aa, Unknown
  Description of Unknown: Integrase A210 sequence
  PF07508,SSF53041,PS51737,cd00338,PTHR30461:SF3,PF00239, PS51736,SM00857,G3DSA:3.40.50.1390,PTHR30461
MRALVVIRLSRVTDATTSPERQLESCQQLCAQRGWDVVGVAEDLDVSGAVDPFDRKRRPNLARWLAFEEQPFDVIVAYRVDRLTRSIRHLQQLVHWAEDHKKLIVSATEAHFDTTSPFAAVVIALMGTVAQMELEAIKERNRSAAHFNIRAGKYRGSLPPWGYMPARVDGEWRLLVDPVQRERILEVYHRVVDNHEPLHQIAHDLNQRGILSPKDYFAKLQGREPKGREWSATALKRSLISEAMLGYTTLNGKTVRDDDGAPLVRAEPILTREQLESLRAELVKTSRAKPAVSTPALLLRVLFCAVCGEPAYKFTGGGRKNARYRCRSWGWAQRCGNGTVAMAEWDAFCEEQVLDLLEDSERLEKVWVAGSDSAVELAEVNAELVDLTSLIGSPAYRVGSPQREALDARIAALAARQEELEGLEARPSGWEWRETGQRFGDWWREQDTAAKNTWLRSMNVRLTFDVRGGLTRTIDFGDLQEYEQHLRLGSVVERLHTGMS

SEQ ID NO: 11643 - protein, 500 aa, Unknown
  Description of Unknown: Integrase A211 sequence
  PF07508,SSF53041,PS51737,cd00338,PTHR30461:SF3, PF00239,PS51736,SM00857,G3DSA:3.40.50.1390,PTHR30461
MRALVVIRLSRVTDATTSPERQLESCQRLCAQRGWDVVGVAEDLDVSGAVDPFDRKRRPNLARWLAFEEQPFDVIVAYRVDRLTRSIRHLQQLVHWAEDHKKLVVSATEAHFDTTTPFAAVVIALMGTVAQMELEAIKERNRSAAHFNIRAGKYRGSLPPWGYLPTRVDGEWRLVPDPVQRERILEVYHRVVDNHEPLHLVAHDLNRRGVLSPKDYFAKLQGREPQGREWSATALKRSLISEAMLGYATLNGKTVRDDDGAPLVRSEPILTREQLEALRAELVKTDRTKPAVSTPSLLLRVLFCAVCGEPAYKFTGGGRKNARYRCRSWGWAQRCGNGTVAMAEWDAFCEEQVLDLLGDSERLEKVWVAGSDSAVELAEVNAELVDLTSLIGSPAYRVGSPQREALDARIAALAARQEELEGLEARPSGWEWRETGQRFGDWWREQDTAAKNTWLRSMNVRLTFDVRGGLTRTIDFGDLQEYEQHLRLGSVVERLHTGMS

SEQ ID NO: 11644 - protein, 500 aa, Unknown
  Description of Unknown: Integrase A212 sequence
  PF07508,SSF53041,PS51737,cd00338,PTHR30461:SF3,PF00239, PS51736,SM00857,G3DSA:3.40.50.1390,PTHR30461
MRALVVIRLSRVTDATTSPERQLESCQQLCAQRGWDVVGVAEDLDVSGAVDPFDRKRRPSLARWLAFEEQPFDVIVAYRVDRLTRSIRHLQQLVHWAEDHKKLVVSATEAHFDTTTPFAAVVIALMGTVAQMELEAIKERNRSAAHFNIRAGKYRGSLPPWGYLPTRVDGEWRLVPDPVQRERILEVYHRVVDNHEPLHLVAHDLNRRGVLSPKDYFAKLQGREPQGREWSATALKRSLISEAMLGYATLNGKTVRDDDGAPLVRAEPILTREQLEALRAELVKTDRAKPAVSTPSLLLRVLFCAVCGEPAYKFTGGGRKNARYRCRSWGWAQRCGNGTVAMAEWDAFCEEQVLDLLGDAERLEKVWVAGSDSAVELAEVNAELVDLTSLIGSPAYRVGSPQREALDARIAALAARQEELEGLEARPSGWEWREAGQRFGDWWREQDTAAKNTWLRSMNVRLTFDVRGGLTRTIDFGDLQEYEQHLRLGSVVEQLHAGMS

SEQ ID NO: 11645 - protein, 500 aa, Unknown
  Description of Unknown: Integrase A213 sequence
  PF07508,SSF53041,PS51737,cd00338,PTHR30461:SF3, PF00239,PS51736,SM00857,G3DSA:3.40.50.1390,PTHR30461
MRALVVIRLSRVTDATTSPERQLESCQQLCAQRGWDVVGVAEDLDVSGAVDPFDRKRRPNLARWLAFEEQPFDVIVAYRVDRLTRSIRHLQQLVHWAEDHKKLVVSATEAHFDTTSPFAAVVIALMGTVAQMELEAIKERNRSAAHFNIRAGKYRGSLPPWGYLPTRVDGEWRLVPDPVQRERILEVYHRVVDNHEPLHLVAHDLNRRGVLSPKDYFAKLQGREPQGREWSATALKRSLISEAMLGYATLNGKTVRDDDGAPLVRAEPILTREQLEALRAELVKTSRAKPAVATPSLLLRVLFCAVCGEPAYKFTGGGRKNARYRCRSWGWAQRCGNGTVAMAEWDAFCEEQVLDLLGGSERLEKVWVAGSDSAVELAEVNAELVDLTSLIGSPAYRVGSPQREALDARIAALAARQEELEGLEARPSGWEWRETGQRFGDWWREQGTAGKNTWLRSMNVRLTFDVRGGLTRTIDFGDLQEYEQHLRLGSVVERLHAGMS

SEQ ID NO: 11646 - protein, 500 aa, Unknown
  Description of Unknown: Integrase A214 sequence
  PF07508,SSF53041,PS51737,cd00338,PTHR30461:SF3,PF00239, PS51736,SM00857,G3DSA:3.40.50.1390,PTHR30461
MRALVVIRLSRVTDATTSPERQLESCQQLCAQRGWDVVGVAEDLDVSGAVDPFDRKRRPNLARWLAFEEQPFDVIVAYRVDRLTRSIRHLQQLVHWAEDHKKLVVSATEAHFDTTTPFAAVVIALMGTVAQMELEAIKERNRSAAHFNIRAGKYRGSLPPWGYLPTRVDGEWRLVPDPVQRERILEVYHRVVDNHEPLHLVAHDLNRRGVLSPKDYFAKLQGREPRGREWSATALKRSLISEAMLGYTTLNGKTVRDDDGAPLVRAEPILTREQLESLRAELVKTDRTKPAVSTPSLLLRVLFCAVCGEPAYKFAGGQRKNPRYRCRSMGFPKHCGNGTVAMAEWDAFCEEQVLDLLGDAERLEKVWVAGSDSAVELAEVNAELVDLTSLIGSPAYRVGSPQREALDARIAALAARQEELEGLEARPSGWEWRETGQRFGDWWREQDASGKNTWLRSMNVRLTFDVRGGLTRTIDFGDLQEYEQHLRLGSVVERLHTGMS

SEQ ID NO: 11647 - protein, 500 aa, Unknown
  Description of Unknown: Integrase A215 sequence
  PF07508,SSF53041,PS51737,cd00338,PTHR30461:SF3, PF00239,PS51736,SM00857,G3DSA:3.40.50.1390,PTHR30461
MRALVVIRLSRVTDATTSPERQLESCRQLCAQRGWDVVGVAEDLDVSGAVDPFDRKRRPNLARWLAFEEQPFDVIVAYRVDRLTRSIRHLQQLVHWAEDHKKLVVSATEAHFDTTTPFAAVVIALMGTVAQMELEAIKERNRSTAHFNIRAGKYRGSLPPWGYLPTRVDGEWRLVSDPVQRERILEVYHRVVDNHEPLHQIAHDLNQRGLPSPKDYFAKLQGREPKGREWSATALKRSLISEAMLGYATLNGKTVRDDDGAPLVRAEPILTREQLEALRAELVKTDRTKPAVATPSLLLRVLFCAVCGEPAYKFTGGGRKNARYRCRSWGWAQRCGNGTVAMAEWDAFCEEQVLDLLGGSERLEKVWVAGSDSAVELAEVNAELVDLTSLIGSPAYRVGSPQREALDARIAALAARQEELEGLEARPSGWEWRETGQRFGDWWREQGTAAKNTWLRSMNVRLTFDVRGGLTRTIDFGDLQEYEQHLRLGSVVERLHAGMS

SEQ ID NO: 11648 - protein, 500 aa, Unknown
  Description of Unknown: Integrase A216 sequence
  PF07508,SSF53041,PS51737,cd00338,PTHR30461:SF3,PF00239, PS51736,SM00857,G3DSA:3.40.50.1390,PTHR30461
MRALVVIRLSRVTDATTSPERQLESCQQLCAQRGWDVVGVAEDLDVSGAVDPFDRKRRPNLARWLAFEEQPFDVIVAYRVDRLTRSIRHLQQLVHWAEDHKKLVVSATEAHFDTTTPFAAVVIALMGTVAQMELEAIKERNRSAAHFNIRAGKYRGSLPPWGYLPTRVDGEWRLVPDPVQRERILEVYHRVVDNHEPLHLVAHDLNRRGVLSPKDYFAKLQGREPQGREWSATALKRSLISEAMLGYATLNGKTVRDDDGAPLVRAEPILTREQLEALRAELVKTDRTKPAVSTPSLLLRVLFCAVCGEPAYKFAGGGRKHPRYRCRSMGFPKHCGNGTVAMAEWDAFCEEQVLDLLGDSERLEKVWVAGSDSAVELAEVNAELVDLTSLIGSPAYRVGSPQREALDARIAALAARQEELEGLEARPSGWEWRETGQRFADWWRDQDTAGKNTWLRSMNVRLTFDVRGGLTRTIDFGDLQEYEQHLRLGSVVEQLHTGMS

SEQ ID NO: 11649 - protein, 500 aa, Unknown
  Description of Unknown: Integrase A217 sequence
  PF07508,SSF53041,PS51737,cd00338,PTHR30461:SF3, PF00239,PS51736,SM00857,G3DSA:3.40.50.1390,PTHR30461
MRALVVIRLSRVTDATTSPERQLESCQQLCAQRGWDVVGVAEDLDVSGAVDPFDRKRRPSLARWLAFEEQPFDVIVAYRVDRLTRSIRHLQQLVHWAEDHKKLIVSATEAHFDTTSPFAAVVIALMGTVAQMELEAIKERNRSAAHFNIRAGKYRGSLPPWGYMPARVDGEWRLLVDPVQRERILEVYHRVVDNHEPLHLVAHDLNQRGILSPKDYFAQLQGREPQGRAWSATALKRSLISEAMLGYTTLNGKTVRDDDGAPLVRAEPILTREQLEALRAELVKTDRTKPAVSTPSLLLRVLFCAVCGEPAYKFAGGGRKHPRYRCRSMGFPKHCGNGTVAMAEWDAFCEEQVLDLLGDAERLEKVWVAGSDAAVELAELNAELVDLTSLIGSPAYRAGSPQREALDARIEALAARQEELEARELRPSGWEWRETGQRFADWWAAQDVAGKNAWLRSMNVRLTFDVRGGLTRTIDFGDLQEYEQHLRLGSVVERLHTGMS

SEQ ID NO: 11650 - protein, 500 aa, Unknown
  Description of Unknown: Integrase A218 sequence
  PF07508,SSF53041,PS51737,cd00338,PTHR30461:SF3,PF00239, PS51736,SM00857,G3DSA:3.40.50.1390,PTHR30461
MRALVVIRLSRVTDATTSPERQLESCQQLCAQRGWDVVGVAEDLDVSGAVDPFDRKRRPNLARWLSFEEQPFDVIVAYRVDRLTRSIRHLQQLVHWAEDHKKLIVSATEAHFDTTTPFAAVVIALMGTVAQMELEAIKERNRSAAHFNIRAGKYRGSLPPWGYMPARVDGEWRLLVDPVQRERILEVYHRVVDNHEPLHLVAHDLNRRGVLSPKDYFAKLQGREPQGREWSATALKRSLISEAMLGYTTLNGKTVRDDDGAPLVRAEPILTREQLESLRAELVKTDRTKPAVSTPSLLLRVLFCAVCGEPAYKFTGGGRKNARYRCRSWGWAQRCGNGTVAMAEWDAFCEEQVLDLLGDAERLEKVWVAGSDAAVELTELNAELVDLTSLIGSPAYRAGSPQREALDARIAALAARQEELEGLEARPSGWEWRETGQRFGDWWRDQDTAGKNTWLRSMNVRLTFDVRGGLTRTIDFGDLQEYEQHLRLGSVVEQLHTGMS

SEQ ID NO: 11651 - protein, 500 aa, Unknown
  Description of Unknown: Integrase A219 sequence
  PF07508,SSF53041,PS51737,cd00338,PTHR30461:SF3, PF00239,PS51736,SM00857,G3DSA:3.40.50.1390,PTHR30461
MRALVVIRLSRVTDATTSPERQLESCQQLCAQRGWDVVGVAEDLDVSGAVDPFDRRRRPNLARWLAFEEQPFDVIVAYRVDRLTRSIRHLQQLVHWAEDHKKLVVSATEAHFDTTTPFAAVVIALMGTVAQMELEAIKERNRSAAHFNIRAGKYRGSLPPWGYLPTRVDGEWRLVPDPVQRERILEVYHRVVDNHEPLHLVAHDLNRRGVLSPKDYFAKLQGREPRGREWSATALKRSLISEAMLGYATLNGKTVRDDDGAPLVRAEPILTREQLEALRAELVKTDRAKPSVSTPSMLLRVLFCAVCGEPAYKFTGGGRKNARYRCRSWGWAQRCGNGTVAMAEWDSFCEEQVLDLLGDSERLEKVWVAGSDSAVELAEVNAELVDLTSLIGSPAYRAGSPQREALDARIAALAARQEELEGLEARPSGWEWRETGQRFGDWWREQDTAGKNTWLRSMNVRLTFDVRGGLTRTIDFGDLQEYEQHLRLGSVVERLHAGMS

SEQ ID NO: 11652 - protein, 500 aa, Unknown
  Description of Unknown: Integrase A220 sequence
  PF07508,SSF53041,PS51737,cd00338,PTHR30461:SF3,PF00239, PS51736,SM00857,G3DSA:3.40.50.1390,PTHR30461
MRALVVIRLSRVTDATTSPERQLESCQQLCAQRGWDVVGVAEDLDVSGAVDPFDRKRRPNLARWLAFEEQPFDVIVAYRVDRLTRSIRHLQQLVHWAEDHKKLVVSATEAHFDTTSPFAAVVIALMGTVAQMELEAIKERNRSAAHFNIRAGKYRGSLPPWGYLPTRVDGEWRLVPDPVQRERILEVYHRVVDNHEPLHLVAYDLNRRGVLSPKDYFAKLQGREPQGREWSATALKRSLISEAMLGYATLNGKTVRDDDGAPLVRAEPILTREQLEALRAELVKTDRTKPAVSTPSLLLRVLFCAVCGEPAYKFAGGGRKHPRYRCRSMGFPKHCGNGTVAMAEWDAFCEEQVLDLLGDSERLEKVWVAGSDSAVELAEVNAELVDLTSLIGSPAYRVGSPQREALDARIAALAARQEELEGLEARPSGWEWRETGQRFGDWWREQDTAAKNTWLRSMNVRLTFDVRGGLTRTIDFGDLQEYEQHLRLGSVVERLHTGMS

SEQ ID NO: 11653 - protein, 500 aa, Unknown
  Description of Unknown: Integrase A221 sequence
  PF07508,SSF53041,PS51737,cd00338,PTHR30461:SF3, PF00239,SM00857,G3DSA:3.40.50.1390,PTHR30461
MTQTLRALVGARVSVVQGPQKVSHIAQQESGTKWATERGHEIVGTFKDLDVSASVSPFERPDLGPWLSPERQDEWDILVFSKIDRMFRSTRDCVKFAEWAEERKKILVFAEDSMTLNYRDKSDSLEKMMSELFIYIGSFFAQLELNRFRSRAKDSHRVLRGTDRWASGVPPLGFKVIDHPSGKGKGLATDPEGKELLYDMAGKLLEGWSFIRISQCLNEKKIPTQLDKARMAKGKPAYENPWSVNTVIESLTSLRTQGLKMTRSGKKFVTVLDEAGEPIRMAPPTFDAATWKQIQEAAALRQNNRRSRSYTANPMLGVGFCGQCGASLAQQFSRSKLKDGTVNEHRYYRCGRTPVNCQNVFLRADDGDELLEQTFLEAYGDEPVTRRVFVPGEDHTEELEQVRATIERLRRESDAGLIVSAEDERIYLERMKSLIDRRTQLEAVPRRAAGWVTEETGQTYREAWETEDHRTLLSEAGIRFELKSSKPMNFALHVPQKEAG

SEQ ID NO: 11654 - protein, 500 aa, Unknown
  Description of Unknown: Integrase A222 sequence
  PF07508,SSF53041,PS51737,cd00338,PTHR30461:SF3,PF00239,PS51736, SM00857,G3DSA:3.40.50.1390,PTHR30461
MRALVVIRLSRVTDATTSPERQLESCQQLCAQRGWDVVGVAEDLDVSGAVDPFDRKRRPNLARWLAFEEQPFDVIVAYRVDRLTRSIRHLQQLVHWAEDHKKLVVSATEAHFDTTTPFAAVVIALMGTVAQMELEAIKERNRSAAHFNIRAGKYRGSLPPWGYLPTRVDGEWRLVPDPVQRERILEVYHRVVDSHEPLHLVAHDLNRRGVLSPKDYFAKLQGREPQGREWSATALKRSLISEAMLGYATLNGKTVRDDDGAPLVRSEPILTREQLEALRAELVKTDRTKPAVSTPSLLLRVLFCAVCGEPAYKFAGGQRKNPRYRCRSMGFPKHCGNGTVAMAEWDAFCEEQVLDLLGDAERLEKVWVAGSDSAVELAEVNAELVDLTSLIGSPAYRAGSPQREALDARIAALAARQEELEGLEARPSGWEWRETGQRFGDWWREQDTSGKNTWLRSMNVRLTFDVRGGLTRTIDFGDLQEYEQHLRLGSVVERLHDGMS

SEQ ID NO: 11655 - protein, 500 aa, Unknown
  Description of Unknown: Integrase A223 sequence
  PF07508,SSF53041,PS51737,cd00338,PTHR30461:SF3, PF00239,PS51736,SM00857,G3DSA:3.40.50.1390,PTHR30461
MRALVVIRLSRVTDATTSPERQLESCQQLCAQRGWDVVGVAEDLDVSGAVDPFDRKRRPNLARWLAFEEQPFDVIVAYRVDRLTRSIRHLQQLVHWAEDHKKLVVSATEAHFDTTTPFAAVVIALMGTVAQMELEAIKERNRSAAHFNIRAGKYRGSLPPWGYLPTRVDGEWRLVPDPVQRERILEVYHRVVDNHEPLHLVAHDLNRRGVLSPKDYFAKLQGREPQGREWSATALKRSLISEAMLGYATLNGKTVRDDDGAPLVRAEPILTREQLEALRAELVKTSRAKPAVSTPSLLLRVLFCAVCGLPAYKFAGGQRKNPRYRCRSMGFPKHCGNGTVAMAEWDAFCEEQVLDLLGDAERLEKVWVAGSDSAVELAEVNAELVDLTSLIGSPAYRVGAPQREALDARIAALAARQEELEGLEARPSGWEWRETGQRFGDWWAQQDTAAKNTWLRAMNVRLTFDVRGGLTRTIDFGDLQEYEQHLRLGSVVEQLHTGMS

SEQ ID NO: 11656 - protein, 500 aa, Unknown
  Description of Unknown: Integrase A224 sequence
  PF07508,SSF53041,PS51737,cd00338,PTHR30461:SF3,PF00239, PS51736,SM00857,G3DSA:3.40.50.1390,PTHR30461
MRALVVIRLSRVTDATTSPERQLESCQQLCAQRGWDVVGVAEDLDVSGAVDPFDRKRRPNLARWLAFEEQPFDVIVAYRVDRLTRSIRHLQQLVHWAEDHKKLVVSATEAHFDTTTPFAAVVIALMGTVAQMELEAIKERNRSAAHFNIRAGKYRGSLPPWGYLPTRVDGEWRLVPDPVQRERILEVYHRVVDNHEPLHLVAHDLNRRGVLSPKDYFAKLQGREPRGREWSATALKRSLISEAMLGCATLNGKTVRDDDGAPLVRAEPILTREQLEALRAELVKADRTKPAVSTPSLLLRVLFCAVCGEPAYKFTGGGRKNARYRCRSWGWAQRCGNGTVAMAEWDAFCEEQVLDLLGDAERLEKVWVAGSDAAVELTELNAELVDLTSLIGSPAYRAGSPQREALDARIAALAARQEELEGLEARPSGWEWRETGQRFGDWWRDQDTAGKNTWLRSMNVRLTFDVRGGLTRTIDFGDLQEYEQHLRLGSVVEQLHTGMS

SEQ ID NO: 11657 - protein, 500 aa, Unknown
  Description of Unknown: Integrase A225 sequence
  PF07508,SSF53041,PS51737,cd00338,PTHR30461:SF3, PF00239,PS51736,SM00857,G3DSA:3.40.50.1390,PTHR30461
MRALVVIRLSRVTDATTSPERQLESCQQLCAQRSWDVVGVAEDLDVSGAVDPFDRKRRPNLARWLAFEEQPFDVIVAYRVDRLTRSIRHLQQLVHWAEDHKKLVVSATEAHFDTTTPFAAVVIALMGTVAQMELEAIKERNRSAAHFNIRAGKYRGSLPPWGYLPTRVDGEWRLVPDPVQRERILEVYHRVVDNHEPLHLVAHDLNRRGVLSPKDYFAKLQGREPRGREWSATALKRSLISEAMLGYATLNGKTVRDDDGAPLVRAEPILTREQLEALRAELVKTDRTKPAVSTPSLLLRVLFCAVCGEPAYKFTGGGRKNARYRCRSWGWAQRCGNGTVAMAEWDAFCEEQVLDLLGDAERLEKVWVAGSDSAVELAEVNAELVDLTSLIGSPAYRAGSPQREALDARIAALAARQEELEGLEARPSGWEWRETGQRFGDWWREQDTTAKNTWLRSMNVRLTFDVRGGLTRTIDFGDLQEYEQHLRLGNVVEQLHAGMS

SEQ ID NO: 11658 - protein, 500 aa, Unknown
  Description of Unknown: Integrase A226 sequence
  PF07508,SSF53041,PS51737,cd00338,PTHR30461:SF3,PF00239, PS51736,SM00857,G3DSA:3.40.50.1390,PTHR30461
MRALVVIRLSRVTDATTSPERQLESCQQLCAQRGWDVVGVAEDLDVSGAVDPFDRKRRPNLARWLAFEEQPFDVIVAYRVDRLTRSIRHLQQLVHWAEDHKKLVVSATEAHFDTTTPFAAVVIALMGTVAQMELEAIKERNRSAAHFNIRAGKYRGSLPPWGYLPTRVDGEWRLVPDPVQRERILEVYHRVVDNHEPLHLVAHDLNRRGVLSPKDYFAKLQGREPQGREWSATALKRSLISEAMLGYATLNGKTVRDDDGAPLVRAEPILTREQLEALRAELVKTDRTKPAVSTPSLLLRVLFCAVCGEPAYKFAGGGRKHPRYRCRSMGFPKHCGNGTVAMAEWDAFCEEQVLDLLGDAERLEKVWVGGSDSAVELAEVNAELVDLTSLIGSPAYRVGSPQREALDARIAALAARQEELEGLEARPSGWEWRETGQRFGDWWREQDIAAKNTWLRSMNVRLTFDVRGGLTRTIDFGDLQEYEQHLRLGSVVERLHAGMS

SEQ ID NO: 11659 - protein, 500 aa, Unknown
  Description of Unknown: Integrase A227 sequence
  PF07508,SSF53041,PS51737,cd00338,PTHR30461:SF3, PF00239,PS51736,SM00857,G3DSA:3.40.50.1390,PTHR30461
MRALVVIRLSRVTDATTSPERQLESCRQLCAQRGWEVVGVAEDLDVSGAVDPFDRKRRPNLARWLAFEEQPFDVIVAYRVDRLTRSIRHLQQLVHWAEDHKKLVVSATEAHFDTTTPFAAVVIALMGTVAQMELEAIKERNRSAAHFNIRAGKYRGSLPPWGYLPTRVDGEWRLVPDPVQRERILEVYHRVVDNHEPLHLVAHDLNRRGVLSPKDYFAKLQGREPRGREWSATALKRSLISEAMLGYATLNGKTVRDDDGAPLVRAEPILTREQLEALRAELVKTDRTKPAVSTPSLLLRVLFCAVCGEPAYKFAGGGRKHPRYRCRSMGFPKHCGNGTVAMAEWDAFCEEQVLDLLGDAERLEKVWVAGSDSAVELAEVNAELVDLTSLIGSPAYRVGSPQREALDARIAALAARQEELEGLEARPSGWEWRETGQRFGDWWREQDIAGKNTWLRSMNVRLTFDVRGGLTRTIDFGDLQEYEQHLRLGSVVERLHTGMS

SEQ ID NO: 11660 - protein, 500 aa, Unknown
  Description of Unknown: Integrase A228 sequence
  PF07508,SSF53041,PS51737,cd00338,PTHR30461:SF3,PF00239, PS51736,SM00857,G3DSA:3.40.50.1390,PTHR30461
MRALVVIRLSRVTDATTSPERQLESCQQLCAQRGWEVVGVAEDLDVSGAVDPFDRKRRPNLARWLAFEEQPFDVIVAYRVDRLTRSIRHLQQLVHWAEDHKKLVVSATEAHFDTTTPFAAVVIALMGTVAQMELEAIKERNRSAAHFNIRAGKYRGSLPPWGYMPTRVDGEWRLVPDPVQRERILEVYHRVVDNHEPLHQIAHDLNQRGLPSPKDYFAKLQGREPQGREWSATALKRSLISEAMLGYATLNGKTVRDDDGAPLVRAEPILTREQLEALRAELVKTDRTKPAVSTPSLLLRVLFCAVCGEPAYKFTGGGRKSARYRCRSWGWAQRCGNGTVAMAEWDAFCEEQVLDLLGDAERLEKVWVAGSDAAVELTELNAELVDLTSLIGSPAYRAGSPQREALDARIAALAARQEELEGLEARPSGWEWRETGQRFGDWWAAQDVAGKNAWLRSMNVRLTFDVRGGLTRTIDFGDLQEYEQHLRLGSVVERLHAGMS

SEQ ID NO: 11661 - protein, 500 aa, Unknown
  Description of Unknown: Integrase A229 sequence
  PF07508,SSF53041,PS51737,cd00338,PTHR30461:SF3, PF00239,PS51736,SM00857,G3DSA:3.40.50.1390,PTHR30461
MRALVVIRLSRVTDATTSPERQLESCQQLCAQRGWDVVGVAEDLDVSGAVDPFDRKRRPNLARWLSFEEQPFDVIVAYRVDRLTRSIRHLQQLVHWAEDHKKLIVSATEAHFDTTSPFAAVVIALMGTVAQMELEAIKERNRSAAHFNIRAGKYRGSLPPWGYLPTRVDGEWRLVPDPVQRERILEVYHRVVDNHEPLHQIAHDLNQRGILSPKDYFAKLQGREPKGREWSATALKRSLISEAMLGYTTLNGKTVRDDDGAPLVRAEPILTREQLEALRAELVKTDRTKPAVSTPSLLLRVLFCAVCGEPAYKFTGGGRKNARYRCRSWGWAQRCGNGTVAMAEWDAFCEEQVLDLLGDSERLEKVWVAGSDSAVELAEVNAELVDLTSLIGSPAYRAGSPQREALDARIAALAARQEELEGLEARPSGWEWRETGQRFGDWWRDQDTAGKNTWLRSMNVRLTFDVRGGLTRTIDFGDLQEYEQHLRLGSVVEQLHTGMS

SEQ ID NO: 11662 - protein, 500 aa, Unknown
  Description of Unknown: Integrase A230 sequence
  PF07508,SSF53041,PS51737,cd00338,PTHR30461:SF3,PF00239, PS51736,SM00857,G3DSA:3.40.50.1390,PTHR30461
MRALVVIRLSRVTDATTSPERQLESCRQLCAQRGWDVVGVAEDLDVSGAVDPFDRKRRPNLARWLAFEEQPFDVIVAYRVDRLTRSIRHLQQLVHWAEDHKKLVVSATEAHFDTTTPFAAVVIALMGTVAQMELEAIKERNRSAAHFNIRAGKYRGSLPPWGYLPTRVDGEWRLVPDPVQRERILEVYHRVVDNHEPLHLVAHDLNRRGVLSPKDYFAKLQGREPQGREWSATALKRSLISEAMLGYATLNGKTVRDDDGAPLVRAEPILTREQLEALRAELVKTDRAKPSVSTPSMLLRVLFCAVCGEPAYKFAGGQRKNPRYRCRSMGFPKHCGNGTVAMAEWDAFCEEQVLDLLGDAERLEKVWVAGSDSAVELAEVNAELVDLTSLIGSPAYRVGSPQREALDARIAALAARQEELEGLEARPSGWEWRETGQRFGDWWREQGTAAKNTWLRSMNVRLTFDVRGGLTRTIDFGDLQEYEQHLRLGSVVEQLHTGMS

SEQ ID NO: 11663 - protein, 500 aa, Unknown
  Description of Unknown: Integrase A231 sequence
  PF07508,SSF53041,PS51737,cd00338,PTHR30461:SF3, PF00239,PS51736,SM00857,G3DSA:3.40.50.1390,PTHR30461
MRALVVIRLSRVTDATTSPERQLESCQQLCAQRGWDVVGVAEDLDVSGAVDPFDRKRRPNLARWLAFEEQPFDVIVAYRVDRLTRSIRHLQQLVHWAEDHKKLVVSATEAHFDTTTPFAAVVIALMGTVAQMELEAIKERNRSAAHFNIRAGKYRGSLPPWGYLPTRVDGEWRLVPDPVQRERILEVYHRVVDNHEPLHLVAHDLNRRGVLSPKDYFAKLQGREPQGREWSATALKRSLISEAMLGYATLNGKTVRDDDGAPLVRAEPILTREQLEALRAELVKTDRTKPAVSTPSLLLRVLFCAVCGEPAYKFAGGGRKHPRYRCRSMGFPKHCGNGTVAMAEWDAFCEEQVLDLLGDSERLEKVWVAGSDSAVELAEVNAELVDLTSLIGSPTYRVGSPQREALDARIAALAARQEELEGLEARPSGWEWRETGQRFGDWWEQQDTAAKNTWLRSMNVRLTFDVRGGLTRTIDFGDLQEYEQHLRLGSVVERLHAGMS

SEQ ID NO: 11664 - protein, 500 aa, Unknown
  Description of Unknown: Integrase A232 sequence
  PF07508,SSF53041,PS51737,cd00338,PTHR30461:SF3,PF00239, PS51736,SM00857,G3DSA:3.40.50.1390,PTHR30461
MRALVVIRLSRVTDATTSPERQLESCQQLCAQRGWDVVGVAEDLDVSGAVDPFDRKRRPNLARWLAFEEQPFDVIVAYRVDRLTRSIRHLQQLVHWAEDHKKLVVSATEAHFDTTTPFAAVVIALMGTVAQMELEAIKERNRSAAHFNIRAGKYRGSLPPWGYLPTRVDGEWRLVPDPVQRERILEVYHRVVDNHEPLHLVAHDLNRRGVLSPKDYFAKLQGREPQGREWSATALKRSLISEAMLGYATLNGKTVRDDDGAPLVRAEPILTREQLEALRAELVKTDRTKPAVSTPSLLLRVLFCAVCGEPAYKFTGGGRKNARYRCRSWGWAQRCGNGTVAMAEWDAFCEEQVLDLLGDAERLEKVWVAGSDSAVELAEVNAELVDLTSLIGSPAYRVGSPQREALDARIAALAARQEELEGLEARPSGWEWRETGQRFGDWWREQDTSGKNTWLRSMNVRLTFDVRGGLTRTIDFGDLQEYEQHLRLGSVVERLHAGMS

SEQ ID NO: 11665 - protein, 500 aa, Unknown
  Description of Unknown: Integrase A233 sequence
  PF07508,SSF53041,PS51737,cd00338,PTHR30461:SF3, PF00239,PS51736,SM00857,G3DSA:3.40.50.1390,PTHR30461
MRALVVIRLSRVTDATTSPERQLESCQQLCAQRGWDVVGVAEDLDVSGAVDPFDRKRRPNLARWLAFEEQPFDVIVAYRVDRLTRSIRHLQQLVHWAEDHKKLVVSATEAHFDTTTPFAAVVIALMGTVAQMELEAIKERNRSAAHFNIRAGKYRGSLPPWGYLPTRVDGEWRLLVDPVQRERILEVYHRVVDNHEPLHLVAHDLNQRGILSPKDYFAQLQGREPQGRAWSATALKRSLISEAMLGYATLNGKTVRDDDGAPLVRAEPILTREQLEALRAELVKTDRTKPAVSTPSLLLRVLFCAVCGEPAYKFAGGGRKHPRYRCRSMGFPKHCGNGTVAMAEWDAFCEEQVLDLLGDAERLEKVWVAGSDAAVELAELNAELVDLTSLIGSPAYRAGSPQREALDARIEALAARQEELEGLEARPSGWEWRETGQRFGDWWREQDTAAKNTWLRSMNVRLTFDVRGGLTRTIDFGDLQEYEQHLRLGSVVERLHTGMS

SEQ ID NO: 11666 - protein, 500 aa, Unknown
  Description of Unknown: Integrase A234 sequence
  PF07508,SSF53041,PS51737,cd00338,PTHR30461:SF3,PF00239, SM00857,G3DSA:3.40.50.1390,PTHR30461
MTQTLRALVGARVSVVQGPQKVSHIAQQESGTRWATERGHEIVGTFKDLDVSASVSPFERPDLGPWLSPERQDEWDILVFSKIDRMFRSTRDCVKFAEWAEERKKILVFAEDSMTLNYRDKSDSLEKMMSELFIYIGSFFAQLELNRFRSRAKDSHRVLRGTDRWASGVPPLGFKVIDHPSGKGKGLATDPEGKELLYDMAGKLLEGWSFIRISQYLNEKKIPTQLDKARMAKGKPAYENPWSVNTVIESLTSLRTQGLKMTRSGKKFVTVLDEAGEPIRMAPPTFDAATWKQIQEAAALRQNNRRSRSYTANPMLGVGFCGQCGASLAQQFSRSKLKDGTVNEHRYYRCGRTPVNCQNVFLRADDGDELLEQTFLEAYGDEPVTRRVFVPGEDHTEELEQVRATIERLRRESDAGLIVSAEDERIYLERMKSLIDRRTQLEAVPRRAAGWVTEETGQTYREAWETEDHRTLLSEAGIRFELKSSKPMNFALHVPQKEAG

SEQ ID NO: 11667 - protein, 500 aa, Unknown
  Description of Unknown: Integrase A235 sequence
  PF07508,SSF53041,PS51737,cd00338,PTHR30461:SF3, PF00239,PS51736,SM00857,G3DSA:3.40.50.1390,PTHR30461
MRALVVIRLSRVTDATTSPERQLESCQQLCAQRGWDVVGVAEDLDVSGAVDPFDRKRRPNLARWLAFEEQPFDVIVAYRVDRLTRSIRHLQQLVHWAEDHKKLVVSATEAHFDTTTPFAAVVIALMGTVAQMELEAIKERNRSAAHFNIRAGKYRGSLPPWGYLPTRVDGEWRLVPDPVQRERILEVYHRVVDNHEPLHLVAHDLNRRGVLSPKDYFAKLQGREPQGREWSATALKRSLISEAMLGYATLNGKTVRDDDGAPLVRAEPILTREQLEALRAELVKTDRTKPAVSTPSLLLRVLFCAVCGEPAYKFAGGGRKHPRYRCRSMGFPKHCGNGTVAMAEWDAFCEEQVLDLLGDSERLEKVWVAGSDSAVELAEVNAELVDLTSLIGSPAYRAGSPQREALDSRIAALAARQEELEGLEARPSGWEWRETGQRFGDWWREQDTAAKNTWLRSMNVRLTFDVRGGLTRTIDFGDLQEYEQHLRLGSVVEQLHAGMS

SEQ ID NO: 11668 - protein, 500 aa, Unknown
  Description of Unknown: Integrase A236 sequence
  PF07508,SSF53041,PS51737,cd00338,PTHR30461:SF3,PF00239, PS51736,SM00857,G3DSA:3.40.50.1390,PTHR30461
MLGRLRLSRSTEESTSIERQREIVTAWADSNGHTVVGWAEDVDVSGAIDPFDTPSLGVWLDERRGEWDILCAWKLDRLGRDAIRLNKLFLWCQEHGKTVTSCSEGIDLGTPVGRLIANVIAFLAEGEREAIRERVASSKQKLREIGRWGGGKPPFGYMGVRNPDGQGHILVVDPVAKPVVRRIVEDILEGKPLTRLCTELTEERYLTPAEYYATLKAGAPRQQAEEGEVTAKWRPTAVRNLLRSKALRGHAHHKGQTVRDDQGRAIQLAEPLVDADEWELLQETLDGIAADFSGRRVEGASPLSGVAVCMTCDKPLHHDRYLVKRPYGDYPYRYYRCRDRHGKNVPAETLEELVEDAFLQRVGDFPVRERVWVQGDTNWADLKEAVAAYDELVQAAGRAKSATARERLQRQLDILDERIAELESAPNTEAHWEYQRTGGTYRDAWENSDADERRELLRRSGIVVAVHIDGVEGRRSKHNPGALHFDIRVPHELTQRLIAP

SEQ ID NO: 11669 - protein, 500 aa, Unknown
  Description of Unknown: Integrase A237 sequence
  PF07508,SSF53041,PS51737,cd00338,PTHR30461:SF3, PF00239,PS51736,SM00857,G3DSA:3.40.50.1390,PTHR30461
MRALVVIRLSRVTDATTSPERQLEACQQLCAQRGWDVVGVAEDLDVSGAVDPFDRKRRPNLARWLAFEEQPFDVIVAYRVDRLTRSIRHLQQLVHWAEDHKKLVVSATEAHFDTTTPFAAVVIALMGTVAQMELEAIKERNRSAAHFNIRAGKYRGSLPPWGYLPTRVDGEWRLVPDPVQRERILEVYHRVVDNHEPLHLVAHDLNRRGVLSPKDYFAKLQGREPQGREWSATALKRSLISEAMLGYATLNGKTVRDDDGAPLVRAEPILTREQLEALRAELVKTDRTKPAVSTPSLLLRVLFCAVCGEPAYKFAGGQRKNPRYRCRSMGFPKHCGNGTVAMAEWDAFCEEQVLDLLGDAERLEKVWVAGSDSAVELAEVNAELVDLTSLIGSPAYRVGSPQREALDARIAALAARQEELEGLEARPSGWEWRETGQRFADWWAQQDTAGKNTWLRAMNVRLTFDVRGGLTRTIDFGDLQEYEQHLRLGSVVERLHTGMS

SEQ ID NO: 11670 - protein, 500 aa, Unknown
  Description of Unknown: Integrase A238 sequence
  PF07508,SSF53041,PS51737,cd00338,PTHR30461:SF3,PF00239, PS51736,SM00857,G3DSA:3.40.50.1390,PTHR30461
MRALVVIRLSRVTDATTSPERQLESCQQLCAQRGWEVVGVAEDLDVSGAVDPFDRKRRPNLARWLAFEEQPFDVIVAYRVDRLTRSIRHLQQLVHWAEDHKKLIVSATEAHFDTTSPFAAVVIALMGTVAQMELEAIKERNRSAAHFNIRAGKYRGSLPPWGYMPARVEGEWRLLVDPVQRERILEVYHRVVDNHEPLHQIAHDLNQRGILSPKDYFAQLQGREPQGREWSATALKRSLISEAMLGYATLNGKTVRDDDGAPLVRSEPILTREQLEALRAELVKTDRTKPAVSTPSLLLRVLFCAVCGEPAYKFTGGGRKNARYRCRSWGWAQRCGNGTVAMAEWDAFCEEQVLDLLGDAERLEKVWVAGSDSAVELAEVNAELVDLTSLIGSPAYRVGSPQREALDARIAALAARQEELEGLEARPSGWEWRETGQRFADWWREQDTAAKNTWLRSMNVRLTFDVRGGLTRTIDFGDLQEYEQHLRLGSVVERLHAGMS

SEQ ID NO: 11671 - protein, 500 aa, Unknown
  Description of Unknown: Integrase A239 sequence
  PF07508,SSF53041,PS51737,cd00338,PTHR30461:SF3, PF00239,PS51736,SM00857,G3DSA:3.40.50.1390,PTHR30461
MLGRLRLSRSTEESTSIERQREIVTAWADSNGHTVVGWAEDVDVSGAIDPFDTPSLGVWLDERRGEWDILCAWKLDRLGRDAIRLNKLFLWCQEHGKTVTSCSEGIDLGTPVGRLIANVIAFLAEGEREAIRERVASSKQKLREIGRWGGGKPPFGYMGVRNPDGQGHILVVDPVAKPVVRRIVEDILEGKPLTRLCTELTEERYLTPAEYYATLKAGAPRQQAEEGEVTAKWRPTAVRNLLRSKALRGHAHHKGQTVRDDQGRAIQLAEPLVDADEWELLQETLDGIAADFSGRRVEGASPLSGVAVCMTCDKPLHHDRYLVKRPYGDYPYRYYRCRDRHGKNVPAETLEELVEDAFLQRVGDFPVRERVWVQGDTNWADLKEAVAAYDELVQAAGRAKSATARERLQRQLDILDERIAELESAPNTEAHWEYQPTGGTYRDAWENSDADERRELLRRSGIVVAVHIDGVEGRRSKHNPGALHFDIRVPHELTQRLIAP

SEQ ID NO: 11672 - protein, 500 aa, Unknown
  Description of Unknown: Integrase A240 sequence
  PF07508,SSF53041,PS51737,cd00338,PTHR30461:SF3,PF00239, PS51736,SM00857,G3DSA:3.40.50.1390,PTHR30461
MRALVVIRLSRVTDATTSPERQLESCQQLCAQRGWDVVGVAEDLDVSGAVDPFDRKRRPNLARWLAFEEQPFDVIVAYRVDRLTRSIRHLQQLVHWAEDHKKLIVSATEAHFDTTSPFAAVVIALMGTVAQMELEAIKERNRSAAHFNIRAGKYRGSLPPWGYMPARVDGEWRLVPDPVQRERILEVYHRVVDNHEPLHLVAHDLNRRGVLSPKDYFAQLQGREPQGRAWSATALKRSLISEAMLGYTTLNGKTVRDDDGAPLVRAEPILTREQLEALRAELVKTDRTKPAVSTPSLLLRVLFCAVCGEPAYKFTGGGRKNARYRCRSWGWAQRCGNGTVAMAEWDAFCEEQVLDLLGDSERLEKVWVAGSDSAVELAEVNAELVDLTSLIGSPAYRVGSPQREALDARIAALAARQEELEGLEARPSGWEWRETGQRFGDWWREQDTSAKNTWLRSMNVRLTFDVRGGLTRTIDFGDLQEYEQHLRLGSVVERLHTGMS

SEQ ID NO: 11673 - protein, 500 aa, Unknown
  Description of Unknown: Integrase A241 sequence
  PF07508,SSF53041,PS51737,cd00338,PTHR30461:SF3, PF00239,PS51736,SM00857,G3DSA:3.40.50.1390,PTHR30461
MRALVVIRLSRVTDATTSPERQLESCQQLCAQRGWEVVGVAEDLDVSGAVDPFDRKRRPNLARWLAFEEQPFDVIVAYRVDRLTRSIRHLQQLVHWAEDHKKLVVSATEAHFDTTTPFAAVVIALMGTVAQMELEAIKERNRSAAHFNIRAGKYRGSLPPWGYLPTRVDGEWRLVPDPVQRERILEVYHRVVDNHEPLHLVAHDLNQRGVLSPKDYFAKLQGREPQGREWSATALKRSLISEAMLGYATLNGKTVRDDDGAPLVRAEPILTREQLEALRAELVKTGRTKPAVSTPSLLLRVLFCAVCGEPAYKFAGGGRKHPRYRCRSMGFPKHCGNGTVAMAEWDAFCEEQVLDLLGDAERLEKVWVAGSDSAVELAELNAELVDLTSLIGSPAYRAGSPQREALDARIEALAARQEELEARELRPSGWEWRETGQRFADWWAAQDVAGKNAWLRSMNVRLTFDVRGGLTRTIDFGDLQEYEQHLRLGSVVEQLHTGMS

SEQ ID NO: 11674 - protein, 500 aa, Unknown
  Description of Unknown: Integrase A242 sequence
  PF07508,SSF53041,PS51737,cd00338,PTHR30461:SF3,PF00239, PS51736,SM00857,G3DSA:3.40.50.1390,PTHR30461
MRALVVIRLSRVTDATTSPERQLESCQQLCAQRGWDVVGVAEDLDVSGAVDPFDRKRRPNLARWLAFEEQPFDVIVAYRVDRLTRSIRHLQQLVHWAEDHKKLVVSATEAHFDTTTPFAAVVIALMGTVAQMELEAIKERNRSAAHFNIRAGKYRGSLPPWGYLPTRVDGEWRLVPDPVQRARILEVYHRVVDNHEPLHLVAHDLNRRGVLSPKDYFAKLQGREPQGREWSATALKRSLISEAMLGYATLNGKTVRDDDGAPLVRAEPILTREQLEALRAELVKTDRTKPAVSTPSLLLRVLFCAVCGEPAYKFAGGGRKHPRYRCRSMGFPKHCGNGTVAMAEWDAFCEEQVLDLLGDAERLEKVWVAGSDSAVELAEVNAELVDLTSLIGSPAYRVGSPQREALDARIAALAARQEELEGLEARPSGWEWRETGQRFGDWWREQDTAAKNTWLRSMNVRLTFDVRGGLTRTIDFGDLQEYEQHLRLGSVVERLHTGMS

SEQ ID NO: 11675 - protein, 500 aa, Unknown
  Description of Unknown: Integrase A243 sequence
  PF07508,SSF53041,PS51737,cd00338,PTHR30461:SF3, PF00239,PS51736,SM00857,G3DSA:3.40.50.1390,PTHR30461
MRALVVIRLSRVTDATTSPERQLESCRQLCAQRGWEVVGVAEDLDVSGAVDPFDRKRRPNLARWLAFEEQPFDVIVAYRVDRLTRSIRHLQQLVHWAEDHKKLVVSATEAHFDTTTPFAAVVIALMGTVAQMELEAIKERNRSAAHFNIRAGKYRGSLPPWGYLPTRVDGEWRLVPDPVQRERILEVYHRVVDNHEPLHLVAHDLNRRGVLSPKDYFAKLQGREPQGREWSATALKRSLISEAMLGYATLNGKTVRDDDGAPLVRSEPILTREQLEALRAELVKTDRTKPAVSTPSLLLRVLFCAVCGEPAYKFAGGGRKHPRYRCRSMGFPKHCGNGTVAMAEWDAFCEEQVLDLLGDSERLEKVWIAGSDSAVELAEVNAELVDLTSLIGSPAYRAGSPQREALDARIAALAARQEELEGLEARPSGWEWRETGQRFGDWWREQDTSGKNTWLRSMNVRLTFDVRGGLTRTIDFGDLQEYEQHLRLGSVVERLHTGMS

SEQ ID NO: 11676 - protein, 500 aa, Unknown
  Description of Unknown: Integrase A244 sequence
  PF07508,SSF53041,PS51737,cd00338,PTHR30461:SF3,PF00239, PS51736,SM00857,G3DSA:3.40.50.1390,PTHR30461
MRALVVIRLSRVTDATTSPERQLESCQQLCAQRGWDVVGVAEDLDVSGAVDPFDRKRRPNLARWLAFEEQPFDVIVAYRVDRLTRSIRHLQQLVHWAEDHKKLVVSATEAHFDTTTPFAAVVIALMGTVAQMELEAIKERNRSAAHFNIRAGKYRGSLPPWGYLPTRVDGEWRLVPDPVQRERILEVYHRVVDNHEPLHLVAHDLNRRGVLSPKDYFAKLQGREPRGREWSATALKRSLISEAMLGYTTLNGKTVRDDDGAPLVRAEPILTREQLESLRAELVKTDRTKPAVSTPSLLLRVLFCAVCGEPAYKFTGGGRKNARYRCRSWGWAQRCGNGTVAMAEWDAFCEEQVLDLLGDAERLEKVWVAGSDAAVELTELNAELVDLTSLIGSPAYRAGSPQREALDARIAALAARQEELEGLEARPSGWEWRETGQRFGDWWRDQDTAGKNTWLRSMNVRLTFDVRGGLTRTIDFGDLQEYEQHLRLGSVVEQLHTGMS

SEQ ID NO: 11677 - protein, 500 aa, Unknown
  Description of Unknown: Integrase A245 sequence
  PF07508,SSF53041,PS51737,cd00338,PTHR30461:SF3, PF00239,PS51736,SM00857,G3DSA:3.40.50.1390,PTHR30461
MRALVVIRLSRVTDATTSPERQLESCQQLCAQRGWDVIGVAEDLDVSGAVDPFDRKRRPNLARWLAFEEQPFDVIVAYRVDRLTRSIRHLQQLVHWAEDHKKLVVSATEAHFDTTTPFAAVVIALMGTVAQMELEAIKERNRSAAHFNIRAGKYRGSLPPWGYLPTRVDGEWRLVPDPVQRERILEVYHRVVDNHEPLHLVAHDLNRRGVLSPKDYFAKLQGREPQGREWSATALKRSLISEAMLGYATLNGKTVRDDDGAPLVRSEPILTREQLEALRAELVKTDRTKPAVSTPSLLLRVLFCAVCGEPAYKFAGGGRKHPRYRCRSMGFPKHCGNGTVAMAEWDAFCEEQVLDLLGDSERLEKVWAAGSDSAVELAEVNAELVDLTSLIGSPAYRVGSPQREALDARIAALAARQEELEGLEARPSGWEWRETGQRFGDWWREQDAAAKNTWLRSMNVRLTFDVRGGLTRTIDFGDLQEYEQHLRLGSVVEQLHAGMS

SEQ ID NO: 11678 - protein, 500 aa, Unknown
  Description of Unknown: Integrase A246 sequence
  PF07508,SSF53041,PS51737,cd00338,PTHR30461:SF3,PF00239, PS51736,SM00857,G3DSA:3.40.50.1390,PTHR30461
MRALVVIRLSRVTDATTSPERQLESCQQLCAQRGWDVVGVAEDLDVSGAVDPFDRKRRPNLARWLAFEEQPFDVIVAYRVDRLTRSIRHLQQLVHWAEDHKKLVVSATEAHFDTTTPFAAVVIALMGTVAQMELEAIKERNRSAAHFNIRAGKYRGSLPPWGYLPTRVDGEWRLVPDPVQRERILEVYHRVVDNHEPLHLVAHDLNRRGVLSPKDYFAKLQGREPRGREWSATALKRSLISEAMLGYATLNGKTVRDDDGAPLVRAEPILTREQLEALRAELVKTDRTKPAVSTPSLLLRVLFCAVCGEPAYKFTGGGRKNARYRCRSWGWAQRCGNGTVAMAEWDAFCEEQVLDLLGDAERLEKVWVAGSDSAVELAEVNAELVDLTSLIGSPAYRVGSPQREALDARIAALAARQEELEGLEARPSGWEWRETGQRFGDWWAQQDTAAKNTWLRSMNVRLTFDVRGGLTRTIDFGDLQEYEQHLRLGSVVERLHTGMS

SEQ ID NO: 11679 - protein, 500 aa, Unknown
  Description of Unknown: Integrase A247 sequence
  PF07508,SSF53041,PS51737,cd00338,PTHR30461:SF3, PF00239,PS51736,SM00857,G3DSA:3.40.50.1390,PTHR30461
MRALVVIRLSRVTDATTSPERQLESCQQLCAQRGWEVVGVAEDLDVSGAVDPFDRKRRPNLARWLAFEEQPFDVIVAYRVDRLTRSIRHLQQLVHWAEDHKKLVVSATEAHFDTTTPFAAVVIALMGTVAQMELEAIKERNRSAAHFNIRAGKYRGSLPPWGYLPTRVDGEWRLVPDPVQRERILEVYHRVVDNHEPLHLVAHDLNRRGVLSPKDYFAKLQGREPQGREWSATALKRSLISEAMLGYATLNGKTVRDDDGAPLVRAEPILTREQLEALRAELVKTDRTKPAVSTPSLLLRVLFCAVCGEPAYKFAGGQRKNPRYRCRSMGFPKHCGNGTVAMAEWDAFCEEQVLDLLGDSERLEKVWVAGSDSAVELAEVNAELVDLTSLIGSPAYRVGSPQREALDARIAALAARQEELEGLEARPSGWEWRETGQRFGDWWREQDTAAKNTWLRSMNVRLTFDVRGGLTRTIDFGDLQEYEQHLRLGSVVERLHAGMS

SEQ ID NO: 11680 - protein, 500 aa, Unknown
  Description of Unknown: Integrase A248 sequence
  PF07508,SSF53041,PS51737,cd00338,PTHR30461:SF3,PF00239, PS51736,SM00857,G3DSA:3.40.50.1390,PTHR30461
MRALVVIRLSRVTDATTSPERQLESCQQLCAQRGWDVVGVAEDLDVSGAVDPFDRKRRPNLARWLAFEEQPFDVIVAYRVDRLTRSIRHLQQLVHWAEDHKKLIVSATEAHFDTTSPFAAVVIALMGTVAQMELEAIKERNRSAAHFNIRAGKYRGSLPPWGYLPMRVDGEWRLVPDPVQRERILEVYHRVVDNHEPLHLVAHDLNRRGVLSPKDYFAKLQGREPQGREWSATALKRSLISEAMLGYTTLNGKTVRDDDGAPLVRAEPILTREQLESLRAELVKTDRTKPAVSTPSLLLRVLFCAVCGEPAYKFTGGGRKNARYRCRSWGWAQRCGNGTVAMAEWDAFCEEQVLDLLGDAERLEKVWVAGSDAAVELTELNAELVDLTSLIGSPAYRAGSPQREALDARIAALAARQEELEGLEARPSGWEWRETGQRFGDWWRDQDTAGKNTWLRSMNVRLTFDVRGGLTRTIDFGDLQEYEQHLRLGSVVEQLHTGMS

SEQ ID NO: 11681 - protein, 500 aa, Unknown
  Description of Unknown: Integrase A249 sequence
  PF07508,SSF53041,PS51737,cd00338,PTHR30461:SF3, PF00239,PS51736,SM00857,G3DSA:3.40.50.1390,PTHR30461
MRALVVIRLSRVTDATTSPERQLESCQQLCAQRGWEVVGVAEDLDVSGAVDPFDRKRRPNLARWLAFEEQPFDVIVAYRVDRLTRSIRHLQQLVHWAEDHKKLVVSATEAHFDTTTPFAAVVIALMGTVAQMELEAIKERNRSAAHFNIRAGKYRGSLPPWGYLPTRVDGEWRLVPDPVQRERILEVYHRVVDNHEPLHLVAHDLNRRGVLSPKDYFAKLQGREPQGREWSATALKRSLISEAMLGYATLNGKTVRDDDGAPLVRAEPILTREQLEALRAELVKTDRTKPAVSTPSLLLRVLFCAVCGEPAYKFAGGQRKNPRYRCRSMGFPKHCGNGTVAMAEWDAFCEEQVLDLLGDSERLEKVWVAGSDSAVELAEVNAELVDLTSLIGSPAYRVGSPQREALDARIAALAARQEELEGLEARPSGWEWRETGQRFGDWWREQDTAAKNTWLRSMNVRLTFDVRGGLTRTIDFGDLQEYEQHLRLGSVVERLHTGMS

SEQ ID NO: 11682 - protein, 500 aa, Unknown
  Description of Unknown: Integrase A250 sequence
  PF07508,SSF53041,PS51737,cd00338,PTHR30461:SF3,PF00239, PS51736,SM00857,G3DSA:3.40.50.1390,PTHR30461
MRALVVIRLSRVTDATTSPERQLESCQQLCAQRGWAVVGVAEDLDVSGAVDPFDRKRRPNLARWLAFEEQPFDVIVAYRVDRLTRSIRHLQQLVHWAEDHKKLVVSATEAHFDTTTPFAAVVIALMGTVAQMELEAIKERNRSAAHFNIRAGKYRGSLPPWGYLPTRIDGEWRLVPDPVQRERILEVYHRVVDNHEPLHLVAHDLNRRGVLSPKDYFAKLQGREPQGREWSATALKRSLISEAMLGYATLNGKTVRDDDGAPLVRSEPILTREQLEALRAELVKTDRTKPAVSTPSLLLRVLFCAVCGEPAYKFTGGGRKNARYRCRSWGWAQRCGNGTVAMAEWDAFCEEQVLDLLGDAERLEKVWVAGSDSAVELAEVNAELVDLTSLIGSPAYRVGSPQREALDARIAALAARQEELEGLEARPSGWEWRETGQRFGDWWRDQDTAGKNTWLRSMNVRLTFDVRGGLTRTIDFGDLQEYEQHLRLGSVVEQLHAGMS

SEQ ID NO: 11683 - protein, 500 aa, Unknown
  Description of Unknown: Integrase A251 sequence
  PF07508,SSF53041,PS51737,cd00338,PTHR30461:SF3, PF00239,SM00857,G3DSA:3.40.50.1390,PTHR30461
MTQTLRALVGARVSVVQGPQKVSHIAQQESGTKWATERGHEIVGTFKDLDVSASVSPFERPDLGPWLSPERQDEWDILVFSKIDRMFRSTRDCVKFAEWAEERKKILVFAEDSMTLNYRDKSDSLEKMMSELFIYIGSFFAQLELNRFRSRAKDSHRVLRGTDRWASGVPPLGFKVIDHPSGKGKGLATDPEGKELLYDMAGKLLEGWSFIRISQYLNEKRIPTQLDKARMAKGKPAYDNPWSVNTVIESLTSLRTQGLKMTRSGKKFVTVLDEAGEPIRMAPPTFDAATWKQIQEAAALRQNNRRSRSYTANPMLGVGFCGQCGASLAQQFSRSKLKDGTVNEHRYYRCGRTPVNCQNVFLRADDGDDLLEQTFLEAYGDEPVTRRVFVPGEDHTEELEQVRATIERLRRESDAGLIVSAEDERIYLERMKSLIDRRTQLEAVPRRAAGWVTEETGQTYREAWETEDHRTLLSEAGIRFELKSSKPMNFALHVPQKEAG

SEQ ID NO: 11684 - protein, 500 aa, Unknown
  Description of Unknown: Integrase A252 sequence
  PF07508,SSF53041,PS51737,cd00338,PTHR30461:SF3,PF00239,PS51736, SM00857,G3DSA:3.40.50.1390,PTHR30461
MRALVVIRLSRVTDATTSPERQLESCQRLCAQRGWDVVGVAEDLDVSGAVDPFDRKRRPNLARWLAFEEQPFDVIVAYRVDRLTRSIRHLQQLVHWAEDHKKLVVSATEAHFDTTTPFAAVVIALMGTVAQMELEAIKERNRSAAHFNIRAGKYRGSLPPWGYLPTRVDGEWRLVPDPVQRERILEVYHRVVDNHEPLHLVAHDLNRRGVLSPKDYFAKLQGREPQGREWSATALKRSLISEAMLGYATLNGKTVRDDDGAPLVRAEPILTREQLEALRAELVKTDRTKPAVSTPSLLLRVLFCAVCGEPAYKFAGGGRKHPRYRCRSMGFPKHCGNGTVAMAEWDAFCEEQVLDLLGDAERLEKVWVAGSDSAVELAEVNAELVDLTSLIGSPAYRVGSPQREALDARIAALAARQEELEGLEARPSGWEWRETGQRFGDWWREQGTAAKNTWLRSMNVRLTFDVRGGLTRTIDFGDLQEYEQHLRLGSVVERLHAGMS

SEQ ID NO: 11685 - protein, 500 aa, Unknown
  Description of Unknown: Integrase A253 sequence
  PF07508,SSF53041,PS51737,cd00338,PTHR30461:SF3, PF00239,SM00857,G3DSA:3.40.50.1390,PTHR30461
MTQTLRALVGARVSVVQGPQKVSHIAQQESGTKWATERGHEIVGTFKDLDVSASVSPFERPDLGPWLSPERQDEWDILVFSKIDRMFRSTRDCVKFAEWAEERKKILVFAEDSMTLNYRDKSDSLEKMMSELFIYIGSFFAQLELNRFRSRAKDSHRVLRGTDRWASGVPPLGFKVIDHPSGKGKGLTTDPEGKELLYDMAGKLLEGWSFIRISQYLNEKKIPTQLDKARMAKGKPAYENPWSVNTVIESLTSLRTQGLKMTRSGKKFVTVLDEAGEPIRMAPPTFDAATWKQIQEAAALRQNNRRSRSYTANPMLGVGFCGQCGASLAQQFSRSKLKDGTVNEHRYYRCGRTPVNCQNVFLRADDGDDLLEQTFLEAYGDEPVTRRVFVPGEDHTEELEQVRATIERLRRESDAGLIVSAEDERIYLERMKSLIDRRTQLEAVPRRAAGWVTEETGQSYREAWETEDHRTLLSEAGIRFELKSSKPMNFALHVPQKEAG

SEQ ID NO: 11686 - protein, 500 aa, Unknown
  Description of Unknown: Integrase A254 sequence
  PF07508,SSF53041,PS51737,cd00338,PTHR30461:SF3,PF00239,PS51736, SM00857,G3DSA:3.40.50.1390,PTHR30461
MRALVVIRLSRVTDATTSPERQLESCRQLCAQRGWDVVGVAEDLDVSGAVDPFDRKRRPNLARWLAFEEQPFDVIVAYRVDRLTRSIRHLQQLVHWAEDHKKLVVSATEAHFDTTTPFAAVVIALMGTVAQMELEAIKERNRSAAHFNIRAGKYRGSLPPWGYLPTRVDGEWRLVPDPVQRERILEVYHRVVDNHEPLHLVAHDLNRRGVLSPKDYFAKLQGREPQGREWSATALKRSLISEAMLGYATLNGKTVRDDDGAPLVRSEPILTREQLEALRAELVKTDRTKPAVATPSLLLRVLFCAVCGEPAYKFAGGGRKHPRYRCRSMGFPKHCGNGTVAMAEWDAFCEEQVLDLLGDAERLEKVWVAGSDSAVELAEVNAELVDLTSLIGSPAYRVGSPQREALDARIAALAARQEELEGLEARPSGWEWRETGQRFGDWWREQDTAAKNTWLRSMNVRLTFDVRGGLTRTIDFGDLQEYEQHLRLGSVVERLHTGMS

SEQ ID NO: 11687 - protein, 500 aa, Unknown
  Description of Unknown: Integrase A255 sequence
  PF07508,SSF53041,PS51737,cd00338,PTHR30461:SF3, PF00239,PS51736,SM00857,G3DSA:3.40.50.1390,PTHR30461
MRALVVIRLSRVTDATTSPERQLESCQQLCAQRGWEVVGVAEDLDVSGAVDPFDRKRRPNLARWLAFEEQPFDVIVAYRVDRLTRSIRHLQQLVHWAEDHKKLVVSATEAHFDTTTPFAAVVIALMGTVAQMELEAIKERNRSAAHFNIRAGKYRGSLPPWGYLPTRVDGEWRLVPDPAQRERILEVYHRVVDNHEPLHLVAHDLNRRGILSPKDYFAKLQGREPQGREWSATALKRSLISEAMLGYATLNGKTVRDDDGAPLVRAEPILTREQLEALRAELVKTDRTKPAVSTPSLLLRVLFCAVCGEPAYKFTGGGRKNARYRCRSWGWAQRCGNGTVAMAEWDAFCEEQVLDLLGGAERLEKVWVAGSDSAVELAEVNAELVDLTSLIGSPAYRVGSPQREALDARIAALAARQEELEGLEARPSGWEWRETGQRFGDWWREQDIAAKNTWLRSMNVRLTFDVRGGLTRTIDFGDLQEYEQHLRLGSVVEQLHTGMS

SEQ ID NO: 11688 - protein, 500 aa, Unknown
  Description of Unknown: Integrase A256 sequence
  PF07508,SSF53041,PS51737,cd00338,PTHR30461:SF3,PF00239, PS51736,SM00857,G3DSA:3.40.50.1390,PTHR30461
MRALVVIRLSRVTDATTSPERQLESCQQLCAQRGWDVVGVAEDLDVSGAVDPFDRKRRPNLARWLAFEEQPFDVIVAYRVDRLTRSIRHLQQLVHWAEDHKKLVVSATEAHFDTTTPFAAVVIALMGTVAQMELEAIKERNRSAAHFNIRAGKYRGSLPPWGYLPTRVDGEWRLVPDPVQRERILEVYHRVVDNHEPLHLVAHDLNRRGVLSPKDYFAKLQGREPQGREWSATALKRSLISEAMLGYATLNGKTVRDDDGAPLVRAEPILTREQLEALRAELVKTDRTKPAVATPSLLLRVLFCAVCGEPAYKFTGGGRKNARYRCRSWGWAQRCGNGTVAMAEWDAFCEEQVLDLLGDAERLEKVWVAGSDSAVELAEVNAELVDLTSLIGSPAYRVGSPQREALDARIAALAARQEELEGLEARPSGWEWRETGQRFGDWWREQDTAAKNTWLRSMNVRLTFDVRGGLTRTIDFGDLQEYEQHLRLGSVVEQLHAGMS

SEQ ID NO: 11689 - protein, 500 aa, Unknown
  Description of Unknown: Integrase A257 sequence
  PF07508,SSF53041,PS51737,cd00338,PTHR30461:SF3, PF00239,PS51736,SM00857,G3DSA:3.40.50.1390,PTHR30461
MRALVVIRLSRVTDATTSPERQLESCQQLCTQRGWDVVGVAEDLDVSGAVDPFDRKRRPNLARWLAFEEQPFDVIVAYRVDRLTRSIRHLQQLVHWAEDHKKLIVSATEAHFDTTSPFAAVVIALMGTVAQMELESIKERNRSAAHFNIRAGKYRGSLPPWGYLPTRVDGEWRLVPDPVQRERILEVYHRVVDNHEPLHLVAHDLNRRGVLSPKDYFAKLQGREPQGREWSATALKRSLISEAMLGYATLNGKTVRDDDGALLVRAEPILTREQLEALRAELVKTDRTKPAVATPSLLLRVLFCAVCGEPAYKFTGGQRKNPRYRCRSMGFPKHCGNGTVAMAEWDAFCEEQVLDLLGDAERLEKVWVAGSDSAVELAEVNAELVDLTSLIGSPAYRVGSPQREALDARIAALAARQEELEGLEARPSGWEWRETGQRFGDWWREQDTAAKNTWLRSMNVRLTFDVRGGLTRTIDFGDLQEYEQHLRLGGVVEQLHTGMS

SEQ ID NO: 11690 - protein, 500 aa, Unknown
  Description of Unknown: Integrase A258 sequence
  PF07508,SSF53041,PS51737,cd00338,PTHR30461:SF3,PF00239, SM00857,G3DSA:3.40.50.1390,PTHR30461
MTQTLRALVGARVSVVQGPQKVSHIAQQESGTKWATERGHEIVGTFKDLDVSASVSPFERPDLGPWLSPERQDEWDILVFSKIDRMFRSTRDCVKFAEWAEERKKILVFAEDSMTLNYRDKSDSLEKMMSELFIYIGSFFAQLELNRFRSRAKDSHRVLRGTDRWASGVPPLGFKVIDHPSGKGKGLATDPEGKELLYDMAGKLLEGWSFIRISQYLNEKKIPTQLDKARMAKGKPAYDNPWSVNTVIESLTSLRTQGLKMTRSGKKFVTVLDEAGEPIRMAPPTFDAATWKQIQEAAALRQNNRRSRSYTANPMLGVGFCGQCGASLAQQFSRSKLKDGTVNEHRYYRCGRTPVNCQNVFLRADDGDDLLEQTFLEAYGDEPVTRRVFVPGEDHTEELEQVRATIERLRRESDAGLIVSAEDERIYLERMKSLIDRRTQLEAVPRRAAGWVTEETGQTYREAWETEDHRTLLSEAGIRFELKSSKPMNFALHVPQKEAG

SEQ ID NO: 11691 - protein, 500 aa, Unknown
  Description of Unknown: Integrase A259 sequence
  PF07508,SSF53041,PS51737,cd00338,PTHR30461:SF3, PF00239,PS51736,SM00857,G3DSA:3.40.50.1390,PTHR30461
MRALVVIRLSRVTDATTSPERQLESCQQLCAQRGWDVVGVAEDLDVSGAVDPFDRKRRPNLARWLAFEEQPFDVIVAYRVDRLTRSIRHLQQLVHWAEDHKKLVVSATEAHFDTTTPFAAVVIALMGTVAQMELEAIKERNRSAAHFNIRAGKYRGSLPPWGYLPTRVDGEWRLVPDPVQRERILEVYHRVVDNHEPLHLVAHDLNQRGILSPKDYFAQLQGREPQGREWSATALKRSLISEAMLGYTTLNGKTVRDDDGAPLVRSEPILTREQLEALRAELVKTDRTKPAVSTPSLLLRVLFCAVCGEPAYKFAGGGRKNARYRCRSWGWAQRCGNGTVAMAEWDAFCEEQVLDLLGDAERLEKVWVAGSDSAVELAEVNAELVDLTSLIGSPAYRAGSPQREALDARIAALAARQEELEGLEARPSGWEWRETGQRFGDWWREQDIAAKNTWLRSMNVRLTFDVRGGLTRTIDFGDLQEYEQHLRLGSVVEQLHAGMS

SEQ ID NO: 11692 - protein, 500 aa, Unknown
  Description of Unknown: Integrase A260 sequence
  PF07508,SSF53041,PS51737,cd00338,PTHR30461:SF3,PF00239, PS51736,SM00857,G3DSA:3.40.50.1390,PTHR30461
MRALVVIRLSRVTDATTSPERQLESCQQLCAQRGWDIVGVAEDLDVSGAVDPFDRKRRPNLARWLAFEEQPFDVIVAYRVDRLTRSIRHLQQLVHWAEDHKKLIVSATEAHFDTTSPFAAVVIALMGTVAQMELEAIKERNRSAAHFNIRAGKYRGSLPPWGYMPARVDGEWRLLVDPVQRERILEVYHRVVDNHEPLHLVAHDLNRRGILSPKDYFAQLQGREPQGRAWSATALKRSLISEAMLGYTTLNGKTVRDDDGAPLVRAEPILTREQLEALRAELVKTDRTKPAVSTPSLLLRVLFCAVCGEPAYKFTGGGRKNARYRCRSWGWAQRCGNGTVAMAEWDAFCEEQVLDLLGDAERLEKVWVAGSDSAVELAEVNAELVDLTSLIGSPAYRVGSPQREALDARIAALAARQEELEGLEARPSGWEWRETGQRFGDWWREQDIAGKNTWLRSMNVRLTFDVRGGLTRTIDFGDLQEYEQHLRLGSVVERLHTGMS

SEQ ID NO: 11693 - protein, 500 aa, Unknown
  Description of Unknown: Integrase A261 sequence
  PF07508,SSF53041,PS51737,cd00338,PTHR30461:SF3, PF00239,PS51736,SM00857,G3DSA:3.40.50.1390,PTHR30461
MRALVVIRLSRVTDATTSPERQLESCHQLCAQRGWDVVGVAEDLDVSGAVDPFDRKRRPNLARWLAFEEQPFDVIVAYRVDRLTRSIRHLQQLVHWAEDHKKLVVSATEAHFDTTTPFAAVVIALMGTVAQMELEAIKERNRSAAHFNIRAGKYRGSLPPWGYLPTRVDGEWRLVPDPVQRERILEVYHRVVDNHEPLHLVAHDLNRRGVLSPKDYFAKLQGREPQGREWSATALKRSLISEAMLGYATLNGKTVRDDDGAPLVRAEPILTREQLEALRAELVKTDRTKPAVSTPSLLLRVLFCAVCGEPAYKFTGGGRKNARYRCRSWGWAQRCGNGTVAMAEWDAFCEEQVLDLLGDAERLEKVWVAGSDSAVELAEVNAELVDLTSLIGSPAYRVGSPQREALDARIAALAARQEELEGLEARPSGWEWRETGQRFGDWWREQDTSGKNTWLRSMNVRLTFDVRGGLTRTIDFGDLQEYEQHLRLGSVVEQLHAGMS

SEQ ID NO: 11694 - protein, 500 aa, Unknown
  Description of Unknown: Integrase A262 sequence
  PF07508,SSF53041,PS51737,cd00338,PTHR30461:SF3,PF00239, PS51736,SM00857,G3DSA:3.40.50.1390,PTHR30461
MRALVVIRLSRVTDATTSPERQLESCQQLCAQRGWDVVGVAEDLDVSGAVDPFDRKRRPNLARWLAFEEQPFDVIVAHRVDRLTRSIRHLQQLVHWAEDHKKLVVSATEAHFDTTTPFAAVVIALMGTVAQMELEAIKERNRSAAHFNIRAGKYRGSLPPWGYLPTRVDGEWRLVPDPVQRERILEVYHRVVDNHEPLHLVAHDLNRRGVLSPKDYFAKLQGREPQGREWSATALKRSLISEAMLGYATLNGKTVRDDDGAPLVRAEPILTREQLEALRAELVNTDRTKPAVSTPSLLLRVLFCAVCGEPAYKFTGGGRKNPRYRCRSWGWAQRCGNGTVAMAEWDAFCEEQVLDLLGDAERLEKVWVAGSDSAVELAEVNAELVDLTSLIGSPAYRVGSPQREALDARIAALAARQEELEGLEARPSGWEWRETGQRFGDWWREQDTSAKNTWLRSMNVRLTFDVRGGLTRTIDFGDLQEYEQHLRLGSVVERLHTGMS

SEQ ID NO: 11695 - protein, 500 aa, Unknown
  Description of Unknown: Integrase A263 sequence
  PF07508,SSF53041,PS51737,cd00338,PTHR30461:SF3, PF00239,SM00857,G3DSA:3.40.50.1390,PTHR30461
MTQTLRALVGARVSVVQGPQKVSHIAQQESGTKWATERGHEIVGTFKDLDVSASVSPFERPDLGPWLSPERQDEWDILVFSKIDRMFRSTRDCVKFAEWAEERKKILVFAEDSMTLNYRDKSDSLEKMMSELFIYIGSFFAQLELNRFRSRAKDSHRVLRGTDRWASGVPPLGFKVIDHPSGKGKGLATDPEGKELLYDMAGKLLEGWSFIRISQYLNEKKIPTQLDKARMAKGKPAYENPWSVNTVIESLTSLRTQGLKMTRSGKKFVTVLDEAGEPIRMAPPTFDAATWKQIQEAAALRQNNRRSRSYTANPMLGVGFCGQCGASLAQQFSRSKLKDGTVNEHRYYRCGRTPVNCQNVFLRADDGDDLLEQTFLEAYGDEPVTRRVFVPGEDHTEELEQVRATIERLRRESDAGLIVSAEDERIYLERMKSLIDRRTQLEAVPRRAAGWVTEETGQTYREAWETEDHRTLLSEAGIRFELKSSKPMNFALHVPQKEAG

SEQ ID NO: 11696 - protein, 500 aa, Unknown
  Description of Unknown: Integrase A264 sequence
  PF07508,SSF53041,PS51737,cd00338,PTHR30461:SF3,PF00239,PS51736, SM00857,G3DSA:3.40.50.1390,PTHR30461
MRALVVIRLSRVTDATTSPERQLESCRQLCAQRGWDVVGVAEDLDVSGAVDPFDRKRRPNLARWLAFEEQPFDVIVAYRVDRLTRSIRHLQQLVHWAEDHKKLVVSATEAHFDTTTPFAAVVIALMGTVAQMELEAIKERNRSAAHFNIRAGKYRGSLPPWGYLPTRVDGEWRLVPDPVQRERILEVYHRVVDNHEPLHLVAHDLNRRGVLSPKDYFAQLQGREPQGRAWSATALKRSLISEAMLGYATLNGKTVRDDDGAPLVRSEPILTREQLESLRAELVKTDRTKPAVSTPSLLLRVLFCAVCGEPAYKFAGGGRKHPRYRCRSMGFPKHCGNGTVAMAEWDAFCEEQVLDLLGDSERLEKVWVAGSDSAVELAEVNAELLDLTSLIGSPAYRAGSPQREALDARIAALAARQEELEGLEARPSGWEWRETGQRFGDWWRDQDTAGKNTWLRSMNVRLTFDVRGGLTRTIDFGDLQEYEQHLRLGSVVERLHTGMS

SEQ ID NO: 11697 - protein, 500 aa, Unknown
  Description of Unknown: Integrase A265 sequence
  PF07508,SSF53041,PS51737,cd00338,PTHR30461:SF3, PF00239,PS51736,SM00857,G3DSA:3.40.50.1390,PTHR30461
MRALVVIRLSRVTDATTSPERQLESCQQLCAQRGWDVVGVAEDLDVSGAVDPFDRKRRPNLARWLAFEEQPFDVIVAYRVDRLTRSIRHLQQLVHWAEDHKKLVVSATESHFDTTSPFAAVVIALMGTVAQMELEAIKERNRSAAHFNIRAGKYRGSLPPWGYMPARVDGEWRLLVDPVQRERILEVYHRVVDNHEPLHQIAHDLNQRGILSPKDYFAKLQGREPKGREWSATALKRSLISEAMLGYATLNGKTVRDDDGAPLVRAEPILTREQLEALRAELVKTARTKPAVSTPSLLLRVLFCAVCGEPAYKFAGGQRKNPRYRCRSMGFPKHCGNGTVAMAEWDAFCEEQVLDLLGDAERLEKVWVAGSDSAVELAEVNAELVDLTSLIGSPAYRVGSPQREALEARIAALAARQEELEGLEARPSGWEWRETGQRFGDWWRDQDTAGKNTWLRSMSVRLTFDVRGGLTRTIDFGDLQEYEQHLRLGSVVEQLHTGMS

SEQ ID NO: 11698 - protein, 499 aa, Unknown
  Description of Unknown: Integrase A266 sequence
  PF07508,SSF53041,PS51737,cd00338,PTHR30461:SF3,PF00239, PS51736,SM00857,G3DSA:3.40.50.1390,PTHR30461
MRALVVIRLSRVTDATTSPERQLESCQQLCAQRGWEVVGVAEDLDVSGAVDPFDRKRRPNLARWLAFEEQPFDVIVAYRVDRLTRSIRHLQQLVHWAEDHKKLVVSATEAHFDTTSPFAAVVIALMGTVAQMELEAIKERNRSAAHFNIRAGKYRGSLPPWGYLPTRVDGEWRLVPDPVQRERILEVYHRVVDNHEPLHLVAHDLNRRGVLSPKDYFAKLQGREPQGREWSATALKRSLISEAMLGYATLNGKTVRDDDGAPLVRAEPILTREQLEALRAELVKTDRAKPAVSTPSLLLRVLFCAVCGEPAYKFDAGRKIPRYRCRSFGFAQRCGNGTVPIAEWDAFCEEQVLDLLGDSERLEKVWVAGSDSAVELAEVNAELVDLTSLIGSPAYRVGSPQREALDARIAALAARQEELEGLEARPSGWEWRETGQRFGDWWREQDTSAKNTWLRSMNVRLTFDVRGGLTRTIDFGDLQEYEQHLRLGSVVEQLHAGMS

SEQ ID NO: 11699 - protein, 499 aa, Unknown
  Description of Unknown: Integrase A267 sequence
  PF07508,SSF53041,PS51737,cd00338,PTHR30461:SF3, PF00239,PS51736,SM00857,G3DSA:3.40.50.1390,PTHR30461
MRALVVIRLSRVTDATTSPERQLESCQQLCAQRGWEVVGVAEDLDVSGAVDPFDRKRRPNLARWLAFEEQPFDVIVAYRVDRLTRSIRHLQQLVHWAEDHKKLVVSATEAHFDTTTPFAAVVIALMGTVAQMELEAIKERNRSAAHFNIRAGKYRGSLPPWGYLPTRVDGEWRLVPDPVQRERILEVYHRVVDNHEPLHLVAHDLNRRGVLSPKDYFAKLQGREPQGREWSATALKRSLISEAMLGYATLNGKTVRDDDGAPLVRAEPILTREQLEALRAELVKTDRAKPAVSTPSLLLRVLFCAVCGEPAYKFDAGRKIPRYRCRSFGFAQRCGNGTVPIAEWDAFCEEQVLDLLGDSERLEKVWVAGSDSAVELAEVNAELVDLTSLIGSPAYRVGSPQREALDARIAALAARQEELEGLEARPSGWEWRETGQRFGDWWREQDTSAKNTWLRSMNVRLTFDVRGGLTRTIDFGDLQEYEQHLRLGSVVEQLHAGMS

SEQ ID NO: 11700 - protein, 499 aa, Unknown
  Description of Unknown: Integrase A268 sequence
  PF07508,SSF53041,PS51737,cd00338,PTHR30461:SF3,PF00239, PS51736,SM00857,G3DSA:3.40.50.1390,PTHR30461
MRALVVIRLSRVTDATTSPERQLESCQQLCAQRGWDVVGVAEDLDVSGAVDPFDRKRRPNLARWLAFEEQPFDVIVAYRVDRLTRSIRHLQQLVHWAEDHKKLVVSATEAHFDTTTPFAAVVIALMGTVAQMELEAIKERNRSAAHFNIRAGKYRGSLPPWGYLPTRVDGEWRLVPDPVQRERILEVYHRVVDNHEPLHLVAHDLNRRGVLSPKDYFAKLQGREPQGREWSATALKRSLISEAMLGYATLNGKTVRDDDGAPLVRSEPILTREQLEALRAELVKTDRTKPAVSTPSLLLRVLFCAVCGEPAYKFDAGRKIPRYRCRSFGFAQRCGNGTVPISEWDAFCEEQVLDLLGDAERLEKVWVAGSDSAVELAEVNAELVDLTSLIGSPAYRVGSPQREALDARIAALAARQEELEGLEARPSGWEWRETGQRFGDWWREQDTAAKNTWLRSMNVRLTFDVRGGLTRTIDFGDLQEYEQHLRLGNVVERLHTGMS

SEQ ID NO: 11701 - protein, 499 aa, Unknown
  Description of Unknown: Integrase A269 sequence
  PF07508,SSF53041,PS51737,cd00338,PTHR30461:SF3, PF00239,PS51736,SM00857,G3DSA:3.40.50.1390,PTHR30461
MRALVVIRLSRVTDATTSPERQLESCQQLCAQRGWDVVGVAEDLDVSGAVDPFDRKRRPNLARWLAFEEQPFDVIVAYRVDRLTRSIRHLQQLVHWAEDHKKLVVSATEAHFDTTTPFAAVVIALMGTVAQMELEAIKERNRSAAHFNIRAGKYRGSLPPWGYLPTRVDGEWRLVPDPVQRERILEVYHRVVDNHEPLHLVAHDLNRRGVLSPKDYFAKLQGREPQGREWSATALKRSLISEAMLGYATLNGKTVRDDDGAPLVRAEPILTREQLEALRAELVKTDRAKPAVSTPSLLLRVLFCAVCGEPAYKFDAGRKIPRYRCRSFGFAQRCGNGTVPIAEWDAFCEEQVLDLLGDSERLEKVWVAGSDSAVELAEVNAELVDLTSLIGSPAYRAGSPQREALDARIAALAARQEELEGLEARPSGWEWRETGQRFGDWWREQDTSAKNTWLRSMNVRLTFDVRGGLTRTIDFGDLQEYEQHLRLGSVVEQLHAGMS

SEQ ID NO: 11702 - protein, 499 aa, Unknown
  Description of Unknown: Integrase A270 sequence
  PF07508,SSF53041,PS51737,cd00338,PTHR30461:SF3,PF00239, SM00857,G3DSA:3.40.50.1390,PTHR30461
MPKYDGRMRVLGRVRLSRFQEESTSVERQREIVENWAKQHDHEIIGWAEDIDVSRSVDPFDTPGLGPWFTDKTKIDQWDIVATWKLDRLATGSIYLNKMMGWCAENEKVIVSVTENFDLSTWVGRMIANVIAGVAEGELEAIKERTQASRKKLVSVGRWTGGRPTYGYRAVEIPSGGWALEPDPESSVTLAWMIDEVLAGTSANAIAKSLNERGVLTPADFVRYRNGKPTKGAKWSVTALLSLLRSRTLLGEIMHNGRTVLGDDGEPVLAGPPLIDVEKFNRVQAVLEARSLKQYMDRVDASPLLGVLVCAGCGDNMYHQRQMDKRRGVMYRYYKCLKRCGQQFHADVAEEMVENQFLNDLGDSEALTRVYIPAENHQIELEEAVRLMDGLTPLLGAVTSDHARKRLTEQISALDSKIARLEMLPESPARTELQPTGLTYRELWESLDTDGRRELMVKAGIRAAVKVEGRTVGGRGGRTTGAITFHFQIPEDLHERLAS

SEQ ID NO: 11703 - protein, 499 aa, Unknown
  Description of Unknown: Integrase A271 sequence
  PF07508,SSF53041,PS51737,cd00338,PTHR30461:SF3, PF00239,PS51736,SM00857,G3DSA:3.40.50.1390,PTHR30461
MRALVVIRLSRVTDATTSPERQLESCQQLCAQRGWDVVGVAEDLDVSGAVDPFDRKRRPNLARWLAFEEQPFDVIVAYRVDRLTRSIRHLQQLVHWAEDHKKLVVSATEAHFDTTTPFAAVVIALMGTVAQMELEAIKERNRSAAHFNIRAGKYRGSLPPWGYLPTRVDGEWRLVPDPVQRERILEVYHRVVDNHEPLHLVAHDLNRRGVLSPKDYFAKLQGREPQGREWSATALKRSLISEAMLGYATLNGKTVRDDDGAPLVRAEPILTREQLEALRAELVKTDRAKPAVSTPSLLLRVLFCAVCGEPAYKFDAGRKIPRYRCRSFGFAQRCGNGTVPIAEWDAFCEEQVLDLLGDSERLEKVWVAGSDSAVELAEVNAELVDLTSLIGSPAYRVGSPQREALDARIAALAARQEELEGLEARPSGWEWRETGQRFGDWWREQDTSAKNTWLRSMNVRLTFDVRGGLTRTIDFGDLQEYEQHLRLGSVVEQLHAGMS

SEQ ID NO: 11704 - protein, 499 aa, Unknown
  Description of Unknown: Integrase A272 sequence
  PF07508,SSF53041,PS51737,cd00338,PTHR30461:SF3,PF00239, PS51736,SM00857,G3DSA:3.40.50.1390,PTHR30461
MRALVVIRLSRVTDATTSPERQLESCQRLCAQRGWDVVGVAEDLDVSGAVDPFDRKRRPNLARWLAFEEQPFDVIVAYRVDRLTRSIRHLQQLVHWAEDHKKLVVSATEAHFDTTTPFAAVVIALMGTVAQMELEAIKERNRSAAHFNIRAGKYRGSLPPWGYLPTRVDGEWRLVPDPVQRERILEVYHRVVDNHEPLHLVAHDLNRRGVLSPKDYFAKLQGREPQGREWSATALKRSLISEAMLGYATLNGKTVRDDDGAPLVRSEPILTREQLEALRAELVKTDRTKPAVSTPSLLLRVLFCAVCGEPAYKFDAGRKIPRYRCRSFGFAQRCGNGTVPISEWDAFCEEQVLDLLGDAERLEKVWVAGSDSAVELAEVNAELVDLTSLIGSPAYRVGSPQREALDARIAALAARQEELEGLEARPSGWEWRETGQRFADWWREQDTAAKNTWLRSMNVRLTFDVRGGLTRTIDFGDLQEYEQHLRLGSVVERLHTGMS

SEQ ID NO: 11705 - protein, 499 aa, Unknown
  Description of Unknown: Integrase A273 sequence
  PF07508,SSF53041,PS51737,cd00338,PTHR30461:SF3, PF00239,PS51736,SM00857,G3DSA:3.40.50.1390,PTHR30461
MRALVVIRLSRVTDATTSPERQLASCQQLCEQRGWEVVGVAEDLDVSGAVDPFDRKRRPNLARWLAFEDQPFDVLVAYRVDRLTRSIRHLQQLVHWAEDHKKLVVSATEPHFDTTTPFAAVVIALMGTVAQMELEAIKERTRSTAHFNIRAGKYRGSLPPWGYMPARVDGEWRLIVDPVQRERILEVYHRVVDNHEPLHLIAHDLNGRGVLSPKDYFATLQGREPKGREWSATALKRSLISDAMLGYATLNGKTVRDDTGAPLVRAEPILTREQLESVRAELVKTDRAKPSVSTPSMLLRVLHCGVCGEPAYKFDAGRKIPRYRCRSFGYAVRCGNGTVPIAEWDAFCEEQVLDLLGDAERLEKVWVAGSDAAVELAEVNAELVDLTSLIGSPAYRAGSPQRTALDARIAALAARQEELEGLEARPSGWEWRETGQRFAEWWAEQDTAAKNTWLRSMNVRLTFDVRGGLTRTIDFGDLQEYEQHLRLGSVVERLHTGMS

SEQ ID NO: 11706 - protein, 499 aa, Unknown
  Description of Unknown: Integrase A274 sequence
  PF07508,SSF53041,PS51737,cd00338,PTHR30461:SF3,PF00239, PS51736,SM00857,G3DSA:3.40.50.1390,PTHR30461
MRALVVIRLSRVTDATTSPERQLESCQQLCAQRGWDVVGVAEDLDVSGAVDPFDRKRRPNLARWLAFEEQPFDVIVAYRVDRLTRSIRHLQQLVHWAEDHKKLVVSATEAHFDTTTPFAAVVIALMGTVAQMELEAIKERNRSAAHFNIRAGKYRGSLPPWGYLPTRVDGEWRLVPDPVQRERILEVYHRVVDNHEPLHLVAHDLNRRGVLSPKDYFAKLQGREPQGREWSATALKRSLISEAMLGYATLNGKTVRDDDGAPLVRSEPILTREQLEALRAELVKTDRTKPAVSTPSLLLRVLFCAVCGEPAYKFDAGRKIPRYRCRSFGFAQRCGNGTVPISEWDAFCEEQVLDLLGDAERLEKVWVAGSDSAVELAEVNAELVDLTSLIGSPAYRVGSPQREALDARIAALAARQEELEGLEARPSGWEWRETGQRFGDWWREQDTAAKNTWLRSMNVRLTFDVRGGLTRTIDFGDLQEYEQNLRLGNVVERLHTGMS

SEQ ID NO: 11707 - protein, 499 aa, Unknown
  Description of Unknown: Integrase A275 sequence
  PF07508,SSF53041,PS51737,cd00338,PTHR30461:SF3, PF00239,PS51736,SM00857,G3DSA:3.40.50.1390,PTHR30461
MRALVVIRLSRVTDATTSPERQLESCQQLCAQRGWDVVGVAEDLDVSGAVDPFDRKRRPNLARWLAFEEQPFDVIVAYRVDRLTRSIRHLQQLVHWAEDHKKLVVSATEAHFDTTTPFAAVVIALMGTVAQMELEAIKERNRSAAHFNIRAGKYRGSLPPWGYLPTRVDGEWRLVPDPVQRERILEVYHRVVDNHEPLHLVAHDLNRRGVLSPKDYFAKLQGREPQGREWSATALKRSLISEAMLGYATLNGKTVRDDDGAPLVRSEPILTREQLEALRAELVKTDRTKPAVSTPSLLLRVLFCAVCGEPAYKFDAGRKIPRYRCRSFGFAQRCGNGTVPISEWDAFCEEQVLDLLGDAERLEKVWVAGSDSAVELAEVNAELVDLTSLIGSPAYRVGSPQREALDARIAALAARQEELEGLEARPSGWEWRETGQRFADWWREQDTAAKNTWLRSMNVRLTFDVRGGLTRTIDFGDLQEYEQHLRLGSVVERLHTGMS

SEQ ID NO: 11708 - protein, 498 aa, Unknown
  Description of Unknown: Integrase A276 sequence
  PF07508,SSF53041,PS51737,cd00338,PTHR30461:SF3,PF00239, PS51736,SM00857,G3DSA:3.40.50.1390,PTHR30461
MPTYDRSMRVIGRLRISRQTEESTSIDRQRELIQNWADTHDHEIVGWAEDKDVSGSVDPFDTPGLGPWLKRDRLDDWDILVAWKLDRIARRAIAINRVFHLCQEHDKTLVCISDNIDLSTWVGRLIANVIAGVAEGELEAIRERTLASHRKLRELGRWPGGRPAYGYKAVENENGPGWKLVHDEYSATIMREIVDRTLQGEAGNAIAQDLQARGVLPPAEYRRQMNGEKLRGGEWMGQVIRRMLKSRTLLGHVTHQKVTVIHETEGTPILKGEPLVTLEEFEELQAILGGSSRPKNHNRSTGASPMLDVALCGECGKPLHLRTQRTERKTKVHVHRYYYCPDKHGQALRAEIVERTVEEQFLDMFGDKPAMERVFREGENHEIEIKQAIQSIEALTPLLGAATSGTVLKSLTDQISAISNRVTYLESLPKAESGYILRATGKTYREEWESRDEQGRRSLLKRSGVTVTFLLQGKTRTTEGALQTEIKFPGDVEERLAS

SEQ ID NO: 11709 - protein, 498 aa, Unknown
  Description of Unknown: Integrase A277 sequence
  PF07508,SSF53041,PF13408,PS51737,cd00338, PTHR30461:SF3,PF00239,SM00857,G3DSA:3.40.50.1390,PTHR30461
MRVLGRLRISRATEESTSIERQREIVEQWAAAHDHEIVGWAEDQDVSGSVDPFDAPALGPWLSEHRKHEWDILCAWKLDRLSRRAIPMNKLFGWMIDNDKTLVCVSENLDLGTWVGRMIANVIAGVAEGELEAIRERTTASHKKLRELGRWAGGPTYYGYVPKPRDSAGWELDIDPHAAGVLKEIIEKTIAGQSTESIVVELNERGELAPSDYLRKRTGKPLRGTKWNTSTIRHQLKSKTLLGHMTHKGQTVYDEAGLPVQKGPALIDRDTFKQLQDALEARGINRTKRVTGASPLLGVAVCDVCGGPMYYRSTSNRNNTGLLRQYICKHGRYGKTQANGGEPYNIIQADLLEAHVEEQFLWRMGDKRRIERVFVPGEGHQDELETAERAVEDLTSLLGTITQASARSRLLAQLAAAHDRLSRLEELPASEPRWEIRETGDTYAEAWQKATTEERRQIMLKAGVQMRVQMKDRVPRVFAGVLHSNWIEPTDIEERLLA

SEQ ID NO: 11710 - protein, 498 aa, Unknown
  Description of Unknown: Integrase A278 sequence
  PF07508,SSF53041,PS51737,cd00338,PTHR30461:SF3,PF00239, PS51736,SM00857,G3DSA:3.40.50.1390,PTHR30461
MRVLGRLRISRATEESTSIERQRELVEQWAAAHEHEIVGWAVDQDVSGSVDPFDAPALGPWLSDHRKHEWDILCAWKLDRLSRRAIPMNKLFGWMIDNDKTLVCVSENLDLGTWVGRMIANVIAGVAEGELEAIRERTTASHKKLRELGRWAGGPTYYGYVPKPRDGAGWELDIDPHAAGVLREIIEKTIAGQSTESIVVELNERGELSPSDYHRKRSGKPIRGTKWNTSWLRTQLKSKTLLGHMTHNGETVYDDAGLPVQKGPALIDRDTYKQLQDALQSRGINRTKRRTGASPLLGVAVCDVCDGPLYYRQTKNQKGTAMLRQYICKHGRYGNTKANGGEPYNIIQADLLEATVEELFLSKMGDLPRVERVFIPGEGHQHELETAERAVEDLTSLLGTITQEGARKRLLAQLSAAHERLAHLEELPSSEPRWETRETGETYREAWESATTEERRQILLKAGVTLKVQMKGRVPRVHPGVIVANWIEPHDIEKRLAS

SEQ ID NO: 11711 - protein, 498 aa, Unknown
  Description of Unknown: Integrase A279 sequence
  PF07508,SSF53041,PS51737,cd00338,PTHR30461:SF3, PF00239,PS51736,SM00857,G3DSA:3.40.50.1390,PTHR30461
MPTYDRSMRVIGRLRISRQTEESTSIERQRELIQNWADTHDHEIVGWAEDKDVSGSVDPFDTPGLGPWLKRDRLDDWDILVAWKLDRIARRAIAINRVFHLCQEHDKTLVCISDNIDLSTWVGRLIANVIAGVAEGELEAIRERTLASHRKLRELGRWPGGRPAYGYKAVENENGPGWKLVHDEYSATIMREIVDRTLQGEAGNAIAQDLQARGVLPPAEYRRQMNGEKLRGGEWMGQVIRKMLKSRTLLGHVTHQQVTVINEKEGTPILKGEPLVSLEEWEELQAMLGGSSRPKNHNRSTGASPMLDVALCGECGKPLHLRTQRTERKTKVHVHRYYYCPDKHGQAIRAEIVERTVEEQFLDMFGDKPAMERVFREGENHEIEIKQAIQSIEALTPLLGAATSGTVLKSLTDQISAISNRVTYLESLPKAESGYILRATGKTYREEWESRDEQGRRSLLKRSGVTVTFLLQGKTRTTEGALQTEIKFPGDVEERLAS

SEQ ID NO: 11712 - protein, 498 aa, Unknown
  Description of Unknown: Integrase A280 sequence
  PF07508,SSF53041,PS51737,cd00338,PTHR30461:SF3,PF00239, PS51736,SM00857,G3DSA:3.40.50.1390,PTHR30461
MRVLGRLRISRATEESTSIERQREIVEQWASVNDHEIVGWAVDQDVSGSVDPFDAPALGPWLSDHRKHEWDILCAWKLDRLSRRAIPMNKLFGWMIDNDKTLVCVSENLDLGTWVGRMIANVIAGVAEGELEAIRERTTASHKKLRELGRWAGGPTYYGYIPKPRDGAGWELDIDPHAASVLREIIEKTIAGVPSETIVVELNERGELSPSDYHRKRNGKPVKGTAWNTSWLRQQLKSKTLLGHMTHKGETVYDDAGLPVQKGPALIDRDTYKQLQDALESRGINRTRRRTGASPLLGVAVCDVCDGPLYYRQTKNSKGTGMLRQYICKHGRYGNTKANGGEPYNIIQADLLEATVEELFLSKMGDQPRVERVFIPGEGHQHELETAERAVEDLTSLLGTVTQEGARKRLLAQLAAAHERLAHLEELPSSEPRWETRETGETYREAWEGATTEERRQILLKAGVTLKVQMKDRVPRVHPGVIVANWIEPHDIEKRLAS

SEQ ID NO: 11713 - protein, 498 aa, Unknown
  Description of Unknown: Integrase A281 sequence
  PF07508,SSF53041,PS51737,cd00338,PTHR30461:SF3, PF00239,PS51736,SM00857,G3DSA:3.40.50.1390,PTHR30461
MPTYDRSMRVIGRLRISRQTEESTSIERQRELIQNWADTHDHEIVGWAEDKDVSGSVDPFDTPGLGPWLKRDRLDDWDILVAWKLDRIARRAIAINRVFHLCQEHDKTLVCISDNIDLSTWVGRLIANVIAGVAEGELEAIRERTLASHRKLRELGRWPGGRPAYGYKAVERTDGPGWKLVHDEYSATIMREIVDRTLQGEAGNAIAQDLQERGVLTPAEYRREMNGEKLRGGEWMGQVIRKMLKSRTLLGHVTHQQVTVINEKEGTPILKGEPLVSLEEWEELQAILGGSSRPKNHNRSTGASPMLDVALCGECGKPLHLRTQRTERKTKVHVHRYYYCPDKHGQALRAEIVERTVEEQFLDMFGDKPAMERVFREGENHEIEIKQAIQSIEALTPLLGAATSGTVLKSLTDQISAISNRVTYLESLPKAESGYILRATGKTYREEWESRDEQGRRSLLKRSGVTVTFLLQGKTRTTEGALQTEIKFPGDVEERLAS

SEQ ID NO: 11714 - protein, 498 aa, Unknown
  Description of Unknown: Integrase A282 sequence
  PF07508,SSF53041,PS51737,cd00338,PTHR30461:SF3,PF00239, PS51736,SM00857,G3DSA:3.40.50.1390,PTHR30461
MRVLGRLRISRATEESTSIERQREIVEQWASVNDHEIVGWAVDQDVSGSVDPFDAPALGPWLSEHRKHEWDILVAWKLDRLSRRAIPMNKLFGWMIDNEKTLVCVSENLDLGTWVGRMIANVIAGVAEGELEAIRERTTASHKKLRELGRWAGGPTYYGYVPKPRDGAGWELDIDPHAAGVLTEIIEKTIAGQSTESIVVELNERGELAPSDYHRKRNGKPIRGTKWSTSWLRSQLKSKTLLGHMTHNGETVYDDAGLPVQKGPALVDRDTYKQLQDALESRGINRTRRRTGASPLLGVAVCDVCEGPLYYRQTKNAKGTAMLRQYICKHGRYGNTQANGGEPYNIIQADLLEATVEELFLSKMGDLPRVERVFIPGEGHQHELETAERAVEDLTSLLGTITQESARKRLLAQLAAAHERLAHLEELPSSEPRWETRETGETYREAWEGATVEERRQILLKAGVTLKVQMKDRVPRVHPGVIVANWIEPHDIEKRLAS

SEQ ID NO: 11715 - protein, 498 aa, Unknown
  Description of Unknown: Integrase A283 sequence
  PF07508,SSF53041,PS51737,cd00338,PTHR30461:SF3, PF00239,PS51736,SM00857,G3DSA:3.40.50.1390,PTHR30461
MPTYDRSMRVIGRLRISRQTEESTSIERQRELIQNWADTHEHEIVGWAEDKDVSGSVDPFDTPGLGPWLKRDRLDDWDILVAWKLDRIARRAIAINRVFHLCQEHDKTLVCISDNIDLSTWVGRLIANVIAGVAEGELEAIRERTLASHRKLRELGRWPGGRPAYGYKAVENENGPGWKLVHDEYSATIMREIVDRTLQGEAGNAIAQDLQARGVLPPAEYRRQMNGEKLRGGEWMGQVIRKMLKSRTLLGHVTHQQVTVINEKEGTPILKGEPLVSLEEWEELQAMLGGSSRPKNHNRSTGASPMLDVALCGECGKPLHLRTQRTERKTKVHVHRYYYCPDKHGQAIRAEIVERTVEEQFLDMFGDKPAMERVFREGENHEIEIKQAIQSIEALTPLLGAATSGTVLKSLTDQISAISNRVTYLESLPKAESGYILRATGKTYREEWESRDEQGRRSLLKRSGVTVTFLLQGKTRTTEGALQTEIKFPGDVEERLAS

SEQ ID NO: 11716 - protein, 498 aa, Unknown
  Description of Unknown: Integrase A284 sequence
  PF07508,SSF53041,PS51737,cd00338,PTHR30461:SF3,PF00239, PS51736,SM00857,G3DSA:3.40.50.1390,PTHR30461
MPTYDRSMRVIGRLRISRQTEESTSIERQRELIQNWADTHDHEIVGWAEDKDVSGSVDPFDTPGLGPWLKRDRLDDWDILVAWKLDRIARRAIAINRVFHLCQEHDKTLVCISDNIDLSTWVGRLIANVIAGVAEGELEAIRERTLASHRKLRELGRWPGGRPAYGYKAVENENGPGWKLVHDEYSATIMREIVDRTLQGEAGNAIAQDLQARGVLPPAEYRRQMNGEKLRGGEWMGQVIRRMLKSRTLLGHVTHQKVTVIHETEGTPILKGEPLVTLEEFEELQAILGGSSRPKNHNRSTGASPMLDVALCGECGKPLHLRTQRTERKTKVHVHRYYYCPDKHGQALRAEIVERTVEDQFLDMFGDKPAMERVFREGENHEIEIKQSIQSIEALTPLLGAATSGTVLKSLTDQISAISNRVTYLESLPKAESGYILRPTGKTYREEWESRDEQGRRSLLKRSGVTVTFLLQGKTRTTEGALQTEIKFPGDVEERLAS

SEQ ID NO: 11717 - protein, 498 aa, Unknown
  Description of Unknown: Integrase A285 sequence
  PF07508,SSF53041,PS51737,cd00338,PTHR30461:SF3, PF00239,PS51736,SM00857,G3DSA:3.40.50.1390,PTHR30461
MPTYDRSMRVIGRLRISRQTEESTSIERQRELIQNWADTHEHEIVGWAEDKDVSGSVDPFDTPGLGPWLKRDRLDDWDILVAWKLDRIARRAIAINRVFHLCQEHDKTLVCISDNIDLSTWVGRLIANVIAGVAEGELEAIRERTLASHRKLRELGRWLGGRPAYGYKAVENENGPGWKLVHDEYSATIMREIVDRTLQGEAGNAIAQDLQARGVLPPAEYRRQMNGEKLRGGEWMGQVIRKMLKSRTLLGHVTHQQVTVINEKEGTPILKGEPLVSLEEWEELQAMLGGSSRPKNHNRSTGASPMLDVALCGECGKPLHLRTQRTERKTKVHVHRYYYCPDKHGQAIRAEIVERTVEEQFLDMFGDKPAMERVFREGENHEIEIKQAIQSIEALTPLLGAATSGTVLKSLTDQISAISNRVTYLESLPKAESGYILRATGKTYREEWESRDEQGRRSLLKRSGVTVTFLLQGKTRTTEGALQTEIKFPGDVEERLAS

SEQ ID NO: 11718 - protein, 498 aa, Unknown
  Description of Unknown: Integrase A286 sequence
  PF07508,SSF53041,PS51737,cd00338,PTHR30461:SF3,PF00239, PS51736,SM00857,G3DSA:3.40.50.1390,PTHR30461
MRVLGRLRISRATEESTSIERQRELVEQWAAAHEHEIVGWAVDQDVSGSVDPFDAPALGPWLSDHRKHEWDILCAWKLDRLSRRAIPMNKLFGWMIDNDKTLVCVSENLDLGTWVGRMIANVIAGVAEGELEAIRERTTASHKKLRELGRWAGGPTYYGYVPKPRDGAGWELDIDLHAAGVLREIIEKTIAGQSTESIVVELNERGELSPSDYHRKRSGKPIRGTKWNTSWLRTQLKSKTLLGHMTHNGETVYDDAGLPVQKGPALIDRDTYKQLQDALQSRGINRTKRRTGASPLLGVAVCDVCDGPLYYRQTKNQKGTAMLRQYICKHGRYGNTKANGGEPYNIIQADLLEATVEELFLSKMGDLPRVERVFIPGEGHQHELETAERAVEDLTSLLGTITQEGARKRLLAQLSAAHERLAHLEELPSSEPRWETRETGETYREAWESATTEERRQILLKAGVTLKVQMKGRVPRVHPGVIVANWIEPHDIEKRLAS

SEQ ID NO: 11719 - protein, 498 aa, Unknown
  Description of Unknown: Integrase A287 sequence
  PF07508,SSF53041,PS51737,cd00338,PTHR30461:SF3, PF00239,PS51736,SM00857,G3DSA:3.40.50.1390,PTHR30461
MPTYDRSMRVIGRLRISRQTEESTSIERQRELIQNWADTHDHEIVGWAEDKDVSGSVDPFDTPGLGPWLKRDRLDDWDILVAWKLDRIARRAIAINRVFHLCQEHDKTLVCISDNIDLSTWVGRLIANVIAGVAEGELEAIRERTLASHRKLRELGRWPGGRPAYGYKAVENENGPGWKLVHDEYSATIMREIVDRTLQGEAGNAIAQDLQARGVLPPAEYRRQMNGEKLRGGEWMGQVIRRMLKSRTLLGHVTHQKVTVIHETEGTPILKGEPLVTLEEFEELQAILGGSSRPKNHNRSTGASPMLDVALCGECGKPLHLRTQRTERKTKVHVHRYYYCPDKHGQALRAEIVERTVEEQFLDMFGDKPAMERVFREGENHEIEIKQAIQSIEALTPLLGAATSGTVLKSLTDQISAISNRVTYLESLPKAESGYILRATGKTYREEWESRDEQGRRSLLKRSGVTVTFLLQGKTRTTEGALQTEIKFPGDVEERLAS

SEQ ID NO: 11720 - protein, 498 aa, Unknown
  Description of Unknown: Integrase A288 sequence
  PF07508,SSF53041,PS51737,cd00338,PTHR30461:SF3,PF00239, PS51736,SM00857,G3DSA:3.40.50.1390,PTHR30461
MPTYDRSMRVIGRLRISRQTEESTSIERQRELIQNWADTHDHEIVGWAEDKDVSGSVDPFDTPGLGPWLKRDRLDDWDILVAWKLDRIARRAIAINRVFHLCQEHDKTLVCISDNIDLSTWVGRLIANVIAGVAEGELEAIRERTLASHRKLRELGRWPGGRPAYGYKAVERTDGPGWKLVHDEYSATIMREIVDRTLQGEAGNAIAQDLQARGVLPPAEYRRQMNGEKLRGGEWMGQVIRKMLKSRTLLGHVTHQQVTVINEKEGTPILKGEPLVSLEEWEELQAMLGGSSRPKNHNRSTGASPMLDVALCGECGKPLHLRTQRTERKTKVHVHRYYYCPDKHGQAIRAEIVERTVEEQFLDMFGDKPAMERVFREGENHEIEIKQAIQSIEALTPLLGAATSGTVLKSLTDQISAISNRVTYLESLPKAESGYILRATGKTYREEWESRDEQGRRSLLKRSGVTVTFLLQGKTRTTEGALQTEIKFPGDVEERLAS

SEQ ID NO: 11721 - protein, 498 aa, Unknown
  Description of Unknown: Integrase A289 sequence
  PF07508,SSF53041,PS51737,cd00338,PTHR30461:SF3, PF00239,PS51736,SM00857,G3DSA:3.40.50.1390,PTHR30461
MPTYDRSMRVIGRLRISRQSEESTSIDRQRELIQNWADTHDHEIVGWAEDIDVSGSVDPFEAPGLGPWLKRDRLGEWDILVAWKLDRIARRAIAINRVFHLCQEHDKTLVCISDNIDLSTWVGRLIANVIAGVAEGELEAIRERTLASHRKLRELGRWPGGRPAYGYKAVERTDGPGWKLVHDEYSATIMREIVDRTLQGEAGNAIAQDLQERGVLPPAEYRRQMNGEKLRGGEWMGQVIRKMLKSRTLLGHVTHQQVTVINEKEGTPILKGEPLVSLEEWEELQAMLGGSSRPKNHNRSTGASPMLDVALCGECGKPLHLRTQRTERKTKVHVHRYYYCPDKHGQALRAEIVERTVEEQFLDMFGDKPAMERVFREGENHEIEIKQSIQSIEALTPLLGAATSGTVLKSLTDQISAISNRVTYLESLPKAESGYILRPTGKTYREEWESRDEQGRRSLLKRSGVTVTFLLQGKTRTTEGALQTEIKFPGDVEERLAS

SEQ ID NO: 11722 - protein, 498 aa, Unknown
  Description of Unknown: Integrase A290 sequence
  PF07508,SSF53041,PS51737,cd00338,PTHR30461:SF3,PF00239, PS51736,SM00857,G3DSA:3.40.50.1390,PTHR30461
MRVLGRLRISRATEESTSIERQRELVEQWAAAHEHEIVGWAVDQDVSGSVDPFDAPALGPWLSDHRKHEWDILCAWKLDRLSRRAIPMNKLFGWMIDNDKTLVCVSENLDLGTWVGRMIANVIAGVAEGELEAIRERTTASHKKLRELGRWAGGPTYYGYVPKPRDGAGWELDIDPHAAGVLREIIEKSIAGQSTESIVVELNERGELSPSDYHRKRGGKPIRGTKWNTSWLRTQLKSKTLLGHMTHNGETVYDDAGLPVQKGPALIDRDTYKQLQDALQSRGINRTKRRTGASPLLGVAVCDVCDGPLYYRQTKNQKGTAMLRQYICKHGRYGNTKANGGEPYNIIQADLLEATVEELFLSKMGDLPRVERVFIPGEGHQHELETAERAVEDLTSLLGTITQEGARKRLLAQLSAAHERLAHLEELPSSEPRWETRETGETYREAWESATTEERRQILLKAGVTLKVQMKGRVPRVHPGVIVANWIEPHDIEKRLAS

SEQ ID NO: 11723 - protein, 497 aa, Unknown
  Description of Unknown: Integrase A291 sequence
  PF07508,SSF53041,PF13408,PS51737,cd00338, PTHR30461:SF3,PF00239,PS51736,SM00857,G3DSA:3.40.50.1390, PTHR30461
MRVLGRIRLSRMMEESTSVERQREFIETWARQNDHEIVGWAEDLDVSGSVDPFDTQGLGPWLKEPKLREWDILCAWKLDRLARRAVPLHKLFGMCQDEQKVLVCVSDNIDLSTWVGRLVASVIAGVAEGELEAIRERTLSSQRKLRELGRWAGGKPAYGFKAQEREDSAGYELVHDEHAANVMLGVIEKVLAGQSTESVARELNEAGELAPSDYIRARAGRKTRGTKWSNAQIRQLLKSKTLLGHVTHNGATVRDDDGIPIRKGPALISEEKFDQLQAALDARSFKVTNRSAKASPLLGVAICGLCGRPMHIRQHRRNGNLYRYYRCDSGSHSGGGGAAPEHPSNIIKADDLEALVEEHFLDEVGRFNVQEKVYVPASDHRAELDEAVRAVEELTQLLGTMTSATMKSRLMGQLTALDERIARLENLPSEEARWDYRATDQTYAEAWEEADTEGRRQLLIRSGITAEVKVTGGDRGVRGVLEFHLKVPEDVRERLSA

SEQ ID NO: 11724 - protein, 497 aa, Unknown
  Description of Unknown: Integrase A292 sequence
  PF07508,SSF53041,PF13408,PS51737,cd00338,PTHR30461:SF3,PF00239, PS51736,SM00857,G3DSA:3.40.50.1390,PTHR30461
MRVLGRIRLSRMMEESTSVERQREFIETWARQNDHEIVGWAEDLDVSGSVDPFDTQGLGPWLKEPKLREWDILCAWKLDRLARRAVPLHKLFGMCQDEQKVLVCVSDNIDLSTWVGRLVASVIAGVAEGELEAIRERTLSSQRKLRELGRWAGGKPAYGFKAQEREDSAGYELVHDEHAANVMLGVIEKVLAGQSTESVARELNEAGELAPSDYIRARAGRKTRGTKWSNAQIRQLLKSKTLLGHVTHNGSTVRDDDGIPIRKGPALISEEKFDQLQAALDARSFKVTNRSAKASPLLGVAICGLCGRPMHIRQHRRNGNLYRYYRCDSGSHSGGGGAAPEHPSNIIKADDLETLVEEHFLDEVGRFNVQEKVYVPASDHRAELDEAVRAVEELTQLLGTMTSATMKSRLMGQLTALDERIARLENLPSEEARWDYRATDQTYTEAWEEADTEGRRQLLIRSGITAEVKVTGGDRGVRGVLEFHLKVPEDVRERLSA

SEQ ID NO: 11725 - protein, 497 aa, Unknown
  Description of Unknown: Integrase A293 sequence
  PF07508,SSF53041,PF13408,PS51737,cd00338, PTHR30461:SF3,PF00239,PS51736,SM00857,G3DSA:3.40.50.1390, PTHR30461
MRVLGRIRLSRMMEESTSVERQREFIETWARQNDHEIVGWAEDLDVSGSVDPFDTQGLGPWLKEPKLREWDILCAWKLDRLARRAVPLHKLFGMCQDEQKVLVCVSDNIDLSTWVGRLVASVIAGVAEGELEAIRERTLSSQRKLRELGRWAGGKPAYGFKAQEREGSAGYELVHDEHAANVMLGVIEKVLAGQSTESVARELNEAGELAPSDYIRARAGRKTRGTKWSNAQIRQLLKSKTLLGHVTHNGSTVRDDDGIPIRKGPALISEEKFDQLQAALDARSFKVTNRSAKASPLLGVAICGLCGRPMHIRQHRRNGNLYRYYRCDSGSHSGGGGAAPEHPSNIIKADDLEALVEEHFLDEVGGFNVQEKVYVPASDHRAELDEAVRAVEELTQLLGTMTSATMKSRLMSQLTALDERIARLENLPSEEARWDYRATDQTYAEAWEEADTEGRRQLLIRSGITAEVKVTGGDRGVRGVLEFHLKVPEDVRERLSA

SEQ ID NO: 11726 - protein, 497 aa, Unknown
  Description of Unknown: Integrase A294 sequence
  PF07508,SSF53041,PF13408,PS51737,cd00338,PTHR30461:SF3,PF00239, PS51736,SM00857,G3DSA:3.40.50.1390,PTHR30461
MRVLGRIRLSRMMEESTSVERQREFIETWARQNDHEIVGWAEDLDVSGSVDPFDTQGLGPWLKEPKLREWDILCAWKLDRLARRAVPLHKLFGMCQDEQKVLVCVSDNIDLSTWVGRLVASVIAGVAEGELEAIRERTLSSQRKLRELGRWAGGKPAYGFKAQEREDSAGYELVHDEHAANVMLGVIEKVLAGQSTESVARELNEAGELAPSDYIRARAGRKTRGTKWSNAQIRQLLKSKTLLGHVTHNGSTVRDDDGIPIRKGPALISEEKFDQLQAALDARSFKVTNRSAKASPLLGVAICGLCGRPMHIRQHRRNGNLYRYYRCDSGSHSGGGGAAPEHPSNIIKADDLETLVEEHFLDEVGRFNVQEKVYVPASDHRAELDEAVRAVEELTQLLGTMTSATMKSRLMGQLTALDERIARLENLPSEEARWDYRATDQTYAEAWEEADTEGRRQLLIRSGITAEVKVTGGGRGVRGVLEFHLKVPEDVRERLSA

SEQ ID NO: 11727 - protein, 497 aa, Unknown
  Description of Unknown: Integrase A295 sequence
  PF07508,SSF53041,PF13408,PS51737,cd00338, PTHR30461:SF3,PF00239,PS51736,SM00857,G3DSA:3.40.50.1390, PTHR30461
MRVLGRIRLSRMMEESTSVERQREFIETWARQNDHEIVGWAEDLDVSGSVDPFDTQGLGPWLKEPKLREWDILCAWKLDRLARRAVPLHKLFGMCQDEQKVLVCVSDNIDLSTWVGRLVASVIAGVAEGELEAIRERTLSSQRKLRELGRWAGGKPAYGFKAQEREDSAGYELVHDEHAANVMLGVIEKVLAGQSTESVARELNEAGELAPSDYIRARAGRKTRGTKWSNAQIRQLLKSKTLLGHVTHNGSTVRDDDGIPIRKGPALISEEKFDQLQAALDARSFKVTNRSAKASPLLGVAICGLCGRPMHIRQHRRNGNLYRYYRCDSGSHSGGGGAAPEHPSNIIKADDLETLVEEHFLDEVGRFNVQEKVYVPASDHRAELDEAVRAVEELTQLLGTMTSATMKSRLMGQLTALDERIARLENLPSEEARWDYRATDQTYAEAWEEADTEGRRQLLIRSGITAEVKVTGGDRGVRGVLEFHLKVPEDVRERLSA

SEQ ID NO: 11728 - protein, 497 aa, Unknown
  Description of Unknown: Integrase A296 sequence
  PF07508,SSF53041,PF13408,PS51737,cd00338,PTHR30461:SF3,PF00239, PS51736,SM00857,G3DSA:3.40.50.1390,PTHR30461
MRVLGRIRLSRMMEESTSVERQREFIETWARQNDHEIVGWAEDLDVSGSVDPFDTQGLGPWLKEPKLREWDILCAWKLDRLARRAVPLHKLFGMCQDEQKVLVCVSDNIDLSTWVGRLVASVIAGVAEGELEAIRERTLSSQRKLRELGRWAGGKPAYGFKAQEREGSAGYELVHDEHAANVMLGVIEKVLAGQSTESVARELNEAGELAPSDYIRARAGRKTRGTKWSNAQIRQLLKSKTLLGHVTHNGSTVRDDDGIPIRKGPALISEEKFDQLQAALDARSFKVTNRSAKASPLLGVAICGLCGRPMHIRQHRRNGNLYRYYRCDSGSHSGGGGAAPEHPSNIIKADDLEALVEEHFLDEVGGFNVQEKVYVPASDHRAELDEAVRAVEELTQLLGTMTSATMKSRLMGQLTALDERIARLENLPSEGARWDYRATDQTYAEAWEEADTEGRRQLLIRSGITAEVKVTGGDRGVRGVLEFHLKVPEDVRERLSA

SEQ ID NO: 11729 - protein, 497 aa, Unknown
  Description of Unknown: Integrase A297 sequence
  PF07508,SSF53041,PF13408,PS51737,cd00338, PTHR30461:SF3,PF00239,PS51736,SM00857,G3DSA:3.40.50.1390, PTHR30461
MRVLGRIRLSRMMEESTSVERQREFIETWAQQNDHEIVGWAEDLDVSGSVDPFDTQGLGPWLKEPKLREWDILCAWKLDRLARRAVPLHKLFGMCQDEQKVLVCVSDNIDLSTWVGRLVASVIAGVAEGELEAIRERTLSSQRKLRELGRWAGGKPAYGFKAQEREDSAGYELVHDEHAANVMLGVIEKVLAGQSTESIARELNDAGELAPSDYIRARAGRKTRGTKWSNAQIRQLLKSKTLLGHVTHNGSTVRDDDGIPIRKGPALISDEKFDQLQAALDARSFKVTNRSAKASPLLGVAICGLCGRPMHIRQHRRNGNLYRYYRCDSGSHSGGGGAAPEHPSNIIKADDLEALVEEHFLDEVGGFNVQEKVYVPASDHRAELDEAVRAVEELTQLLGTMTSATMKSRLMGQLTALDERIARLENLPSEEARWDYRATDQTYAEAWEEADTEGRRQLLIRSGITAEVKVTGGDRGVRGVLEFHLKVPEDVRERLSA

SEQ ID NO: 11730 - protein, 497 aa, Unknown
  Description of Unknown: Integrase A298 sequence
  PF07508,SSF53041,PF13408,PS51737,cd00338,PTHR30461:SF3,PF00239, PS51736,SM00857,G3DSA:3.40.50.1390,PTHR30461
MRVLGRIRLSRMMEESTSVERQREFIETWARQNDHEIVGWAEDLDVSGSVDPFDTQGLGPWLKEPKLREWDILCAWKLDRLARRAVPLHKLFGMCQDEQKVLVCVSDNIDLSTWVGRLVASVIAGVAEGELEAIRERTLSSQRKLRELGRWAGGKPAYGFKAQEREGSAGYELVHDEHAANVMLGVIEKVLAGQSTESVARELNEAGELAPSDYIRARAGRKTRGTKWSNAQIRQLLKSKTLLGHVTHNGSTVRDDDGIPIRKGPALISEEKFDQLQAALDARSFKVTNRSAKASPLLGVAICGLCGRPMHIRQHRRNGNLYRYYRCDSGSHSGGGGAAPEHPSNIIKADDLEALVEEHFLDEVGGFNVQEKVYVPASDHRAELDEAVRAVEELTQLLGTMTSATMKSRLMGQLTALDERIARLENLPSEEARWDYRATDQTYAEAWEEADTEGRRQLLIRSGITAEVKVTGGDRGVRGVLEFHLKVPEDVRERLSA

SEQ ID NO: 11731 - protein, 497 aa, Unknown
  Description of Unknown: Integrase A299 sequence
  PF07508,SSF53041,PF13408,PS51737,cd00338, PTHR30461:SF3,PF00239,PS51736,SM00857,G3DSA:3.40.50.1390, PTHR30461
MRVLGRIRLSRMMEESTSVERQREFIETWARQNDHEIVGWAEDLDVSGSVDPFDTQGLGPWLKEPKLREWDILCAWKLDRLARRAVPLHKLFGMCQDEQKVLVCVSDNIDLSTWVGRLVASVIAGVAEGELEAIRERTLSSQRKLRELGRWAGGKPAYGFKAQEREDSAGYELVHDEHAANVMLGVIEKVLAGQSTESVARELNEAGELAPSDYIRARAGRKTRGTKWSNAQIRQLLKSKTLLGHVTHNGATVRDDDGIPIRKGPALISEEKFDQLQAALDARSFKVTNRSAKASPLLGVAICGLCGRPMHIRQHRRNGNLYRYYRCDSGSHSGGGGVAPEHPSNIIKADDLETLVEEHFLDEVGRFNVQEKVYVPASDHRAELDEAVRAVEELTQLLGTMTSATMKSRLMGQLTALDERIARLENLPSEEARWDYRATSQTYAEAWEEADTEGRRQLLIRSGITAEVKVTGGDRGVRGVLEFHLKVPEDVRERLSA

SEQ ID NO: 11732 - protein, 496 aa, Unknown
  Description of Unknown: Integrase A300 sequence
  PF07508,SSF53041,PS51737,cd00338,PF00239,SM00857, G3DSA:3.40.50.1390,PTHR30461
MAKQLRALVGARVSVVQGPQKVSHLAQQETGEKWVRERGHLIVGTFRDLDVSATVSPFERPDLGPWLSPEQEDEWDVLVFSKIDRMFRSTRDCVKFAEWAEQRKKILVFAEDSMTLNYRDQSDSLEKMMSELFIYIGSFFAQLELNRFKSRAKDSHRVLRGMDRWASGVPPLGFQVVDHPSGKGKGLDTDPVGKSLLYEMAGKLLEGWSFIRIAAWLNELGALTNMDRARQAKGHAPKSKPWNVSNVIDILTSPRTQGLKMTGRGKHAKTVLNAEGEPIRMAPATFDADTWKKIQEAAAKRQGNPRSRTHSANPMLGVGFCGVCGASLAQQFSRPRGGDKVYRSYRCGRTPLNCNGVSIRADDADTLMEETFMAKWGDERVTNKVFVPGEDHSEELETVVATIERLRRESDAGLIVSADDERVYLERMKSLIDRRTALEATPRRVAGWAIEELPHTYRDVWETEDHRQLLIDKGIRFELKSSKPVMSFAMFESSTS

SEQ ID NO: 11733 - protein, 495 aa, Unknown
  Description of Unknown: Integrase A301 sequence
  PF07508,SSF53041,PS51737,cd00338,PTHR30461:SF3, PF00239,PS51736,SM00857,G3DSA:3.40.50.1390,PTHR30461
MIRLSRVTDATTSPERQLESCQQLCAQRGWDVVGVAEDLDVSGAVDPFDRKRRPNLARWLAFEEQPFDVIVAYRVDRLTRSIRHLQQLVHWAEDHKKLIVSATEAHFDTTTPFAAVVIALMGTVAQMELEAIKERNRSAAHFNIRAGKYRGSLPPWGYLPTRVDGEWRLVPDPVQRERILEVYHRVVDNHEPLHLVAHDLNQRGILSPKDYFAKLQGREPKGREWSATALKRSLISEAMLGYTTLNGKTVRDDDGAPLVRAEPILTREQLEALRAELVKTDRTKPAVSTPSLLLRVLFCAVCGEPAYKFAGGGRKHPRYRCRSMGFPKHCGNGTVAMAEWDAFCEEQVLDLLGDAERLEKVWVAGSDSAVELAEVNAELVDLTSLIGSPAYRVGSPQREALDARIAALAARQEELEGLEARPSGWEWRETGQRFGDWWREQDIAAKNTWLRSMNVRLTFDVRGGLTRTIDFGDLQEYEQHLRLGSVVERLHTGMS

SEQ ID NO: 11734 - protein, 495 aa, Unknown
  Description of Unknown: Integrase A302 sequence
  PF07508,SSF53041,PS51737,cd00338,PTHR30461:SF3,PF00239, PS51736,SM00857,G3DSA:3.40.50.1390,PTHR30461
MIRLSRVTDATTSPERQLESCQQLCAQRGWDVVGVAEDLDVSGAVDPFDRKRRPNLARWLAFEEQPFDVIVAYRVDRLTRSIRHLQQLVHWAEDHKKLVVSATEAHFDTTTPFAAVVIALMGTVAQMELEAIKERNRSAAHFNIRAGKYRGSLPPWGYLPTRVDGEWRLVPDPVQRERILEVYHRVVDSHEPLHLVAHDLNRRGVLSPKDYFAKLQGREPQGREWSATALKRSLISEAMLGYATLNGKTVRDDDGAPLVRSEPILTREQLEALRAELVKTDRTKPAVSTPSLLLRVLFCAVCGEPAYKFAGGQRKNPRYRCRSMGFPKHCGNGTVAMAEWDAFCEEQVLDLLGDAERLEKVWVAGSDSAVELAEVNAELVDLTSLIGSPAYRAGSPQREALDARIAALAARQEELEGLEARPSGWEWRETGQRFGDWWREQDTSGKNTWLRSMNVRLTFDVRGGLTRTIDFGDLQEYEQHLRLGSVVERLHDGMS

SEQ ID NO: 11735 - protein, 495 aa, Unknown
  Description of Unknown: Integrase A303 sequence
  PF07508,SSF53041,PS51737,cd00338,PTHR30461:SF3, PF00239,PS51736,SM00857,G3DSA:3.40.50.1390,PTHR30461
MIRLSRVTDATTSPERQLESCQQLCAQRGWDVVGVAEDLDVSGAVDPFDRKRRPNLARWLSFEEQPFDVIVAYRVDRLTRSIRHLQQLVHWAEDHKKLIVSATEAHFDTTSPFAAVVIALMGTVAQMELEAIKERNRSAAHFNIRAGKYRGSLPPWGYLPTRVDGEWRLVPDPVQRERILEVYHRVVDNHEPLHQIAHDLNQRGILSPKDYFAKLQGREPKGREWSATALKRSLISEAMLGYTTLNGKTVRDDDGAPLVRAEPILTREQLEALRAELVKTDRTKPAVSTPSLLLRVLFCAVCGEPAYKFTGGGRKNARYRCRSWGWAQRCGNGTVAMAEWDAFCEEQVLDLLGDSERLEKVWVAGSDSAVELAEVNAELVDLTSLIGSPAYRAGSPQREALDARIAALAARQEELEGLEARPSGWEWRETGQRFGDWWRDQDTAGKNTWLRSMNVRLTFDVRGGLTRTIDFGDLQEYEQHLRLGSVVEQLHTGMS

SEQ ID NO: 11736 - protein, 495 aa, Unknown
  Description of Unknown: Integrase A304 sequence
  PF07508,G3DSA:1.10.10.2600,SSF53041,PS51737,cd00338,PF00239, PS51736,SM00857,G3DSA:3.40.50.1390,PTHR30461
MTTRAAIYLRISEDKTGEEKGVDRQLQDALAVIRERGWVQAGDPYQDNSISASKRNVRRPAYDRMVADYQAGKFDAIVCYDLDRLTRQPRQLEDWIDAAQETGLAIVTTNGEADLSTDGGRMFARVKAAVARSEIERKGARHRRANAQRVEEGIPHGGRRRYGYEPGGMVPRPEEAAVVRRCFEAVAAGQSIRSIVTDLRREGVPGGTGSGWGNSRLRYMLLNPSYAGLLHVGEEALPSEKVQPIVSRELYEEVRAILTDDQRRTSPGPGRKHLASGFVACGVEDCPNTLRVHSGFYRCQIKTLNSNDRYIDPTGAAHPSIKVDLLDARLRKEMALALLTTTPAQLRGDDAPSVAPLIAQLDRLETAVAATMADRDDGLVSPQAARARLLTLRDERLEVEAALDAARASRTSSVTLSEMARDLILSSGVPHGPTRVIREVLPRVVEAIEAMDIDRQRDALQQLLAVQVQPGRGTDRIKVWHLVAEHLNPDLIPDV

SEQ ID NO: 11737 - protein, 495 aa, Unknown
  Description of Unknown: Integrase A305 sequence
  PF07508,SSF53041,PS51737,cd00338,PTHR30461:SF3, PF00239,PS51736,SM00857,G3DSA:3.40.50.1390,PTHR30461
MRVIGRLRISRQSEESTSIDRQRELIQNWADTHDHEIVGWAEDIDVSGSVDPFEAPGLGPWLKRDRLGEWDILVAWKLDRIARRAIAINRVFHLCQEHDKTLVCISDNIDLSTWVGRLIANVIAGVAEGELEAIRERTLASHRKLRELGRWPGGRPAYGYKAVERTDGPGWKLVHDEYSATIMREIVDRTLQGEAGNAIAQDLQERGVLTPAEYRREMNGEKLRGGEWMGQVIRKMLKSRTLLGHVTHQQVTVINEKEGTPILKGEPLVSLEEWEELQAMLGGSSRPKNHNRTTAASPMLDVALCAECEKPLHLRTQRTQRKEKLHVHRYYYCPDKHGSAIRGEDVENAVENQFLEDFGDLPAMERVFREGENHEIEIKQAIQSIEALTPLLGAATSGTVLKSLTDQISALSNRVTYLESLPKAESGYILRPTGKTYREEWEERDEQGRRALLRRSGITATFMLTGKGRGGRNPAPGALQFNLRVPADAQERLAS

SEQ ID NO: 11738 - protein, 495 aa, Unknown
  Description of Unknown: Integrase A306 sequence
  PF07508,SSF53041,PS51737,cd00338,PTHR30461:SF3,PF00239, PS51736,SM00857,G3DSA:3.40.50.1390,PTHR30461
MIRLSRVTDATTSPERQLESCRQLCAQRGWDVVGVAEDLDVSGAVDPFDRKRRPNLARWLAFEEQPFDVIVAYRVDRLTRSIRHLQQLVHWAEDHKKLVVSATEAHFDTTTPFAAVVIALMGTVAQMELEAIKERNRSAAHFNIRAGKYRGSLPPWGYLPTRVDGEWRLVPDPVQRERILEVYHRVVDNHEPLHLVAHDLNRRGVLSPKDYFAKLQGREPQGREWSATALKRSMISEAMLGYATLNGKTVRDDDGAPLVRAEPILTREQLEALRAELVKTDRTKPAVATPSLLLRVLFCAVCGEPAYKFAGGGRKHPRYRCRSMGFPKHCGNGTVAMAEWDAFCEEQVLDLLGDSERLEKVWVAGSDSAVELAEVNAELVDLTSLIGSPAYRVGSPQREALDARIAALAARQEELEGLEARPSGWEWRETGQRFGDWWREQDTSGKNTWLRSMNVRLTFDVRGGLTRTIDFGDLQEYEQHLRLGSVVERLHTGMS

SEQ ID NO: 11739 - protein, 494 aa, Unknown
  Description of Unknown: Integrase A307 sequence
  PF07508,SSF53041,PS51737,cd00338,PTHR30461:SF3, PF00239,PS51736,SM00857,G3DSA:3.40.50.1390,PTHR30461
MIRLSRVTDATTSPERQLESCQQLCAQRGWDVVGVAEDLDVSGAVDPFDRKRRPNLARWLAFEEQPFDVIVAYRVDRLTRSIRHLQQLVHWAEDHKKLVVSATEAHFDTTTPFAAVVIALMGTVAQMELEAIKERNRSAAHFNIRAGKYRGSLPPWGYLPTRVDGEWRLVPDPVQRERILEVYHRVVDNHEPLHLVAHDLNRRGVLSPKDYFAKLQGREPQGREWSATALKRSLISEAMLGYATLNGKTVRDDDGAPLVRAEPILTREQLEALRAELVKTDRAKPAVSTPSLLLRVLFCAVCGEPAYKFDAGRKIPRYRCRSFGFAQRCGNGTVPIAEWDAFCEEQVLDLLGDSERLEKVWVAGSDSAVELAEVNAELVDLTSLIGSPAYRAGSPQREALDARIAALAARQEELEGLEARPSGWEWRETGQRFGDWWREQDTSAKNTWLRSMNVRLTFDVRGGLTRTIDFGDLQEYEQHLRLGSVVEQLHAGMS

SEQ ID NO: 11740 - protein, 493 aa, Unknown
  Description of Unknown: Integrase A308 sequence
  PF07508,SSF53041,PF13408,PS51737,cd00338,PTHR30461:SF3, PF00239,PS51736,SM00857,G3DSA:3.40.50.1390,PTHR30461
MRVLGRIRLSRVMEESTSVERQREIIETWARQNDHEIIGWAEDLDVSGSVDPFETPALGPWLTDHRKHEWDILVAWKLDRLSRRAIPMNKLFGWVMENDKTLVCVSENLDLSTWIGRMIANVIAGVAEGELEAIRERTKGSQKKLRELGRWGGGKPYYGYRAQEREDAAGWELVPDEHASAVLLSIIEKVLEGQSTESIARELNERGELSPSDYLRHRAGKPTRGGKWSNAHIRQQLRSKTLLGYSTHNGETIRDERGIAVRKGPALVSQDVFDRLQAALDSRSFKVTNRSAKASPLLGVLVCRVCERPMHLRQHHNKKRGKTYRYYQCVGGVEKTHPANLTNADQMEQLVEESFLAELGDRKIQERVYIPAESHRAELDEAVRAVEEITPLLGTVTSDTMRKRLLDQLSALDARISELEKMPESEARWEYREGDETYAEAWNRGDAEARRQLLLKSGITAAAEMKGREARVNPGVLHFDLRIPEDILERMAG

SEQ ID NO: 11741 - protein, 493 aa, Unknown
  Description of Unknown: Integrase A309 sequence
  PF07508,SSF53041,PF13408,PS51737,cd00338, PTHR30461:SF3,PF00239,PS51736,SM00857,G3DSA:3.40.50.1390, PTHR30461
MRVLGRIRLSRVMEESTSVERQREIIETWARQNDHEIIGWAEDLDVSGSVDPFETPALGPWLTDHRKHEWDILVAWKLDRLSRRAIPMNKLFGWVMENDKTLVCVSENLDLSTWIGRMIANVIAGVAEGELEAIRERTKGSQKKLRELGRWGGGKPYYGYRAQEREDAAGWELVPDEHASAVLLSIIEKVLEGQSTESIARELNERGELSPSDYLRHRAGKPTRGGKWSNAHIRQQLRSKTLLGYSTHNGETIRDERGIAVRKGPALVSQDVFDRLQAALDSRSFKVTNRSAKASPLLGVLICRVCERPMHLRQHHNKKRGKTYRYYQCVGGVEKTHPANLTNADQMEQLVEESFLAELGDRKIQERVYIPAESHRAELDEAVRAVEEITPLLGTVTSDTMRKRLLDQLSALDARISELEKLPESEARWEYREGDETYAEAWNRGDAEARRQLLLKSGITAAAEMKGREARVNPGVLHFDLRIPEDILERMSA

SEQ ID NO: 11742 - protein, 493 aa, Unknown
  Description of Unknown: Integrase A310 sequence
  PF07508,SSF53041,PF13408,PS51737,cd00338,PTHR30461:SF3,PF00239, PS51736,SM00857,G3DSA:3.40.50.1390,PTHR30461
MRVLGRIRLSRVMEESTSVERQREIIETWARQNDHEIIGWAEDLDVSGSVDPFETPALGPWLTDHRKHEWDILVAWKLDRLSRRAIPMNKLFGWVMENDKTLVCVSENLDLSTWIGRMIANVIAGVAEGELEAIRERTKGSQKKLRELGRWGGGKPYYGYRAQEREDAAGWELVPDEHASKVLLSIIEKVLEGQSTESIARELNERGELSPSDYLRHRAGKPTRGGKWSNAHIRQQLRSKTLLGYSTHNGETIRDERGIAVRKGPALVSQDVFDRLQAALDSRSFKVTNRSAKASPLLGVLVCRVCERPMHLRQHHNKKRGKTYRYYQCVGGVEKTHPANLTNADQMEQLVEESFLAELGDRKIQERVYIPAESHRAELDEAVRAVEEITPLLGTVTSDTMRKRLLDQLSALDARISELEKLPESEARWEYREGDETYAEAWNRGDAEARRQLLLKSGITAAAEMKGREARVNPGVLHFDLRIPEDILERMSA

SEQ ID NO: 11743 - protein, 493 aa, Unknown
  Description of Unknown: Integrase A311 sequence
  PF07508,SSF53041,PF13408,PS51737,cd00338, PTHR30461:SF3,PF00239,PS51736,SM00857,G3DSA:3.40.50.1390, PTHR30461
MRVLGRIRLSRVMEESTSVERQREIIETWARQNDHEIIGWAEDLDVSGSVDPFETPALGPWLTDHRKHEWDILVAWKLDRLSRRAIPMNKLFGWVMENDKTLVCVSENLDLSTWIGRMIANVIAGVAEGELEAIRERTKGSQKKLRELGRWGGGKPYYGYRAQEREDAAGWELVPDEHASAVLLSIIEKVLEGQSTESIARELNERGELSPSDYLRHRAGKPTRGGKWSNAHIRQQLRSKTLLGYSTHNGETIRDERGIAVRKGPALVSQDVFDRLQVALDSRSFKVTNRSAKASPLLGVLVCRVCERPMHLRQHHNKKRGKTYRYYQCVGGVEKTHPANLTNADQMEQLVEESFLAELGDRKIQERVYIPAESHRAELDEAVRAVEEITPLLGTVTSDTMRKRLLDQLSALDARISELEKMPESEARWEYREGDETYAEAWNRGDAEARRQLLLKSGITAAAEMKGREARVNPGVLHFDLRIPEDILERMSA

SEQ ID NO: 11744 - protein, 493 aa, Unknown
  Description of Unknown: Integrase A312 sequence
  PF07508,SSF53041,PF13408,PS51737,cd00338,PTHR30461:SF3,PF00239 ,PS51736,SM00857,G3DSA:3.40.50.1390,PTHR30461
MRVLGRIRLSRVMEESTSVERQREIIETWARQNDHEIIGWAEDLDVSGSVDPFETPALGPWLTDHRKHEWDILVAWKLDRLSRRAIPMNKLFGWVMENDKTLVCVSENLDLSTWIGRMIANVIAGVAEGELEAIRERTKGSQKKLRELGRWGGGKPYYGYRAQEREDAAGWELVPDEHASAVLLSIIEKVLEGQSTESIARELNERGELSPSDYLRHRAGKPTRGGKWSNAHIRQQLRSKTLLGYSTHNGETIRDERGIAVRKGPALVSQDVFDRLQAALDSRSFKVTNRSAKASPLLGVLVCRVCERPMHLRQHHNKKRGKTYRYYQCVGGVEKTHPANLTNADQMEQLVEESFLAELGDRKIQERVYVPAESHRAELDEAVRAVEEITPLLGTVTSDTMRKRLLDQLSALDARISELEKLPESEARWEYREGDETYAEAWNRGDAEARRQLLLKSGITAAAEMKGREARVNPGVLHFDLRIPEDILERMAG

SEQ ID NO: 11745 - protein, 493 aa, Unknown
  Description of Unknown: Integrase A313 sequence
  PF07508,SSF53041,PF13408,PS51737,cd00338, PTHR30461:SF3,PF00239,PS51736,SM00857,G3DSA:3.40.50.1390, PTHR30461
MRVLGRIRLSRVMEESTSVERQREIIETWARQNDHEIIGWAEDLDVSGSVDPFETPALGPWLTDHRKHEWDILVAWKLDRLSRRAIPMNKLFGWVMENDKTLVCVSENLDLSTWIGRMIANVIAGVAEGELEAIRERTKGSQKKLRELGRWGGGKPYYGYRAQEREDAAGWELVPDEHASAVLLSIIEKVLEGQSTESIARELNERGELSPSDYLRHRAGKPTRGGKWSNAHIRQQLRSKTLLGYSTHNGETIRDERGIAVRKGPALVSQDVFDRLQVALDSRSFKVTNRSAKASPLLGVLICRVCDRPMHLRQHHNKKRGKTYRYYQCVGGVEKTHPANLTNADQMEQLVEESFLAELGDRKIQERVYIPAESHRAELDEAVRAVEEITPLLGTVTSDTMRKRLLDQLSALDARISELEKMPESEARWEYREGDETYAEAWNRGDAEARRQLLLKSGITAAAEMKGREARVNPGVLHFDLRIPEDILERMSA

SEQ ID NO: 11746 - protein, 493 aa, Unknown
  Description of Unknown: Integrase A314 sequence
  PF07508,SSF53041,PF13408,PS51737,cd00338,PTHR30461:SF3,PF00239 ,PS51736,SM00857,G3DSA:3.40.50.1390,PTHR30461
MRVLGRIRLSRVMEESTSVERQREIIETWARQNDHEIIGWAEDLDVSGSVDPFETPALGPWLTDHRKHEWDILVAWKLDRLSRRAIPMNKLFGWVMENDKTLVCVSENLDLSTWIGRMIANVIAGVAEGELEAIRERTKGSQKKLRELGRWGGGKPYYGYRAQEREDAAGWELVPDEHASAVLLSIIEKVLEGQSTESIARELNERGELSPSDYLRHRAGKPTRGGKWSNAHIRQQLRSKTLLGYSTHNGETIRDERGIAVRKGPALVSQDVFDRLQVALDSRSFKVTNRSAKASPLLGVLVCRVCDRPMHLRQHHNKKRGKTYRYYQCVGGVEKTHPANLTNADQMEQLVEESFLAELGDRKIQERVYIPAESHRAELDEAVRAVEEITPLLGTVTSDTMRKRLLDQLSALDARISELEKLPESEARWEYREGDETYAEAWNRGDAEARRQLLLKSGITAAAEMKGREARVNPGVLHFDLRIPEDILERMSA

SEQ ID NO: 11747 - protein, 492 aa, Unknown
  Description of Unknown: Integrase A315 sequence
  PF07508,SSF53041,PF13408,PS51737,cd00338, PTHR30461:SF3,PF00239,PS51736,SM00857,G3DSA:3.40.50.1390, PTHR30461
MRVLGRVRLSRFNEESTSVERQREIIENWAQQNGHEVIGFAEDIDVSRSVDPFETPGLGQWLNDKTKIDQWDIVATWKLDRLATGSIYLNKTMGWCFEHEKVIVSVTENFDLSTWVGRMIANVIAGVAEGELEAIKERTQASRKKLVSIGRWTGGRPTFGYRKVEIESGGYALEPDPESSKTLHWIVDEVLNGRSAKSLVDDMNERGVYTPADFVRYRNGKETKGAKWSVTTLLSLLRSRTLLGHIMHNGQVVLDGVGEPVLAGPPLIDVDTFNRVQATLEARSRAQKVERTDASPLLGVLVCAECGDNMYHQRQVDKRYDRLYRYYKCLNRCGQQIHAEMAEQMVENQFLDDLGDAEALTRVYIPAENHQIELEEAQRLLDGLYPLLGTVTSAHAQKRLTEQISALDSKIAQLEMLPESPARTELRPTGVTYRKLWESLDSDGRRELMVKAGIQARMKVADRPQGARATGQTGAVTFHFHIPEDLHERIAS

SEQ ID NO: 11748 - protein, 492 aa, Unknown
  Description of Unknown: Integrase A316 sequence
  PF07508,SSF53041,PS51737,cd00338,PTHR30461:SF3,PF00239,PS51736 ,SM00857,G3DSA:3.40.50.1390,PTHR30461
MRISRATEESTSIERQREIVEQWASVNDHEIVGWAVDQDVSGSVDPFDAPALGPWLSDHRKHEWDILCAWKLDRLSRRAIPMNKLFGWMIDNDKTLVCVSENLDLGTWVGRMIANVIAGVAEGELEAIRERTTASHKKLRELGRWAGGPTYYGYVPKPRDGAGWELDIDPHAAGVLKEIIEKTIAGQATEAIVVELNERGELSPSDYHRKRSGKPIRGTKWNTSWLRTQLKSKTLLGHMTHNGETVYDDAGLPVQKGPPLIDRDTYKQLQDALQSRGINRTKRRTGASPLLGVAVCDVCDGPLYYRQTKNQKGTAMLRQYICKHGRYGNTKANGGEPYNIIQADLLEATVEELFLSKMGDLPRVERVFIPGEGHQHELETAERAVEDLTSLLGTITQEGARKRLLAQLSAAHERLAHLEELPSSEPRWETRETGETYREAWESATTEERRQILLKAGVTLKVQMKGRVPRVHPGVIVANWIEPHDIEKRLAS

SEQ ID NO: 11749 - protein, 492 aa, Unknown
  Description of Unknown: Integrase A317 sequence
  PF07508,SSF53041,PS51737,cd00338,PTHR30461:SF3, PF00239,PS51736,SM00857,G3DSA:3.40.50.1390,PTHR30461
MRISRATEESTSIERQREIVEQWASVNDHEIVGWAVDQDVSGSVDPFDAPALGPWLSDHRKHEWDILCAWKLDRLSRRAIPMNKLFGWMIDNDKTLVCVSENLDLGTWVGRMIANVIAGVAEGELEAIRERTTASHKKLRELGRWAGGPTYYGYVPKPRDGAGWELDIDPHAAGVLKEIIEKTIAGQATEAIVVELNERGELSPSDYHRQRSGKPIRGTKWNTSWLRTQLKSKTLLGHMTHNGETVYDDAGLPVQKGPALTDRDTYKQLQDALQSRGINRTKRRTGASPLLGVAVCDVCDGPLYYRQTKNSKGTGMLRQYICKHGRYGNTKANGGEPYNIIQADLLEATVEELFLSKMGDLPRVERVFIPGEGHQHELETAERAVEDLTSLLGTITQEGARKRLLAQLSAAHERLAHLEELPSSEPRWETRETGETYREAWESATTEERRQILLKAGVTLKVQMKGRVPRVHPGVIVANWIEPHDIEKRLAS

SEQ ID NO: 11750 - protein, 492 aa, Unknown
  Description of Unknown: Integrase A318 sequence
  PF07508,SSF53041,PS51737,cd00338,PTHR30461:SF3,PF00239, PS51736,SM00857,G3DSA:3.40.50.1390,PTHR30461
MRISRATEESTSIERQREIVEQWASVNDHEIVGWAVDQDVSGSVDPFDAPALGPWLSDHRKHEWDILCAWKLDRLSRRAIPMNKLFGWMIDNDKTLVCVSENLDLGTWVGRMIANVIAGVAEGELEAIRERTTASHKKLRELGRWAGGPTYYGYVPKPRDGAGWELDIDPHAAGVLKEIIEKTIAGQATEAIVVELNERGELSPSDYHRQRSGKPIRGTKWNTSWLRTQLKSKTLLGHMTHNGETVYDDAGLPVQKGPALIDRDTYKQLQDALESRGINRTRRRTGASPLLGVAVCDVCDGPLYYRQTKNSKGTGMLRQYICKHGRYGNTKANGGEPYNIIQADLLEATVEELFLSKMGDQPRVERVFIPGEGHQHELETAERAVEDLTSLLGTITQESARKRLLAQLAAAHERLAHLEELPSSEPRWETRETGETYREAWESATTEERRQILLKAGVTLKVQMKDRVPRVHPGVIVANWIEPHDIEKRLAS

SEQ ID NO: 11751 - protein, 492 aa, Unknown
  Description of Unknown: Integrase A319 sequence
  PF07508,SSF53041,PS51737,cd00338,PTHR30461:SF3, PF00239,SM00857,G3DSA:3.40.50.1390,PTHR30461
MRVLGRVRLSRFQEESTSVERQREIVENWAKQHDHEIIGWAEDIDVSRSVDPFDTPGLGPWFTDKTKVDQWDIVATWKLDRLATGSIYLNKMMGWCAENEKVIVSVTENFDLSTWVGRMIANVIAGVAEGELEAIKERTQASRKKLVSVGRWTGGRPTYGYRAVEIPSGGWALEPDPESSVTLAWMIDEVLAGTSANAIAKSLNERGVLTPADFVRYRNGKPTKGAKWSVTALLSLLRSRTLLGEIMHNGRTVLGDDGEPVLAGPPLIDVEKFNRVQAVLEARSLKQYMDRVDASPLLGVLVCAGCGDNMYHQRQMDKRRGVMYRYYKCLKRCGQQFHADVAEEMVENQFLNDLGDSEALTRVYIPAENHQIELEEAVRLMDGLTPLLGAVTSDHARKRLTEQISALDSKIARLEMLPESPARTELQPTGLTYRELWESLDTDGRRELMVKAGIRAAVKVEGRTVGGRGGRTTGAITFHFQIPEDLHERLAS

SEQ ID NO: 11752 - protein, 491 aa, Unknown
  Description of Unknown: Integrase A320 sequence
  PF07508,G3DSA:1.10.10.2600,SSF53041,PF13408,PS51737,cd00338, PTHR30461:SF3,PF00239,PS51736,SM00857,G3DSA:3.40.50.1390, PS00397,PTHR30461
MQSELEERKKAFVYVRVSTYEQYVKGYSISNQKRELLQYCESMNWEVIKIFIEKGVTAKNLDLRKEANAAIEEAKKGECDYIVSLKIDRIFRNTEDLLATTRILLGYDVILKFKEQETNYLDPYGKASMTIMGMVSELELSVIKDRTMSGKIEKARQGIKSPGRVIPYGFDYVDKQFVANEKANIVRMIFDDAAKGYGFTTIAYHLRSKNVPSINDLSWNNVQIKRIITNKIYIGHCCFKIKNKEIVDVLAKNIEPIVSEEIWYAANNLYLAKTQNGKITKYAYDDFIFADVLYCSCCGWKFSSKKSKRVDPKKRPAKYEDRFYRYYKCIHNDTVFENVCSNKKVLNAKKFENYFLQQLNNFIIQPKNEKTVNEKINRLNDIKLLEKSIIELNTKKKRLLDKYLSGIIEDDMYISKNSDIVQEIDYNAKKIEELKSFDDEKEFDLEYLSKLKFVINDIWDVMDNKEKRNFISSTFEKITIDNGEIIKIIFR

SEQ ID NO: 11753 - protein, 490 aa, Unknown
  Description of Unknown: Integrase A321 sequence
  PF07508,G3DSA:1.10.10.2600,SSF53041,PS51737,cd00338, PF00239,PS51736,SM00857,G3DSA:3.40.50.1390,PTHR30461
MYELKYAVYVRVSTDRDEQVSSIENQIDICRYWIEKNGYEWDENSIYKDEAVSGTAWLERHAMQLILEKVRRKELDTVVFKSIHRLGRDLRDALEIKEILLGHGVRLVTIEEGYDSYYEGKNDLKFEMYAMFASQLPKTVSVSVSAALAAKVRRGEYTGGIVPYGYKIVDQKYTINEEEAELVRKMYELYDNGLGYMKIADAINDMGVPSRTGKLWAYPSIRAIITNAAYKGDYIMQKYAEVKVDGRKKMIINPKEKWVVFENHHPAIITRDLWDRVNNSKTDKKTKRRVAIKNELRGLACCAHCRTPLALQQRMYKNKEGETRYYCYLICGRYKRMGARGCVKHSGLQYSDLRLFVLQKLKEKENDLEKVFNLNDTDKHQEKQKKLRKEKKELEIKRERLLDLYLDGGPIDKETFTKRDKNFEKIIKEKELEILKLDDVKTLVVEQQKVKEAFELLEKSEDLYSTFKKLITRIEVSQDGVINIVYRFEE

SEQ ID NO: 11754 - protein, 489 aa, Unknown
  Description of Unknown: Integrase A322 sequence
  PF07508,G3DSA:1.10.10.2600,SSF53041,PS51737,cd00338, PTHR30461:SF3,PF00239,PS51736,SM00857,G3DSA:3.40.50.1390 ,PS00397,PTHR30461
MKKAAAYARVSTKDQSKISIEGQFKTIENFAKQYGFKIVDYFSDKDSGKKMKREQLDVLLENAYKGKYDVILVEKYDRFSRAGIDGQIIIQDLEKNYNVLVIAALEPFDVSTPQGRFTRTIILASYTLEGEMISQRTKMRMKDIASKKYWMGGNPPYGFDSYQIIDEEGKKRRKLKINEEQAKIVREIFELRLKNIGYSEIAKRLNERGIKNARGKLWRGSTILDMINNPLYAGIYIYGKGNKRSRKRSSELKDAVIIENFVDPIIPKEIFEEVNKKNGKLTSALTKNKYLLKGLIYTEFGDRMLGSGGKTPSYVSSAWQYGKTRTYLGISKSKIEREVFLRVKHQLLKLDFNDEEFWEDFAETINYIKKLKINVENDKIAALRKRLEEVEEQLINLTTAIKSGIINDEIKKENEILMKEKNDLINKIKMSNVNIVEETPENLRKKWKEKIEALENYDEDKLIEIYNQLIEQIIVYKDKYIEVKFKQFE

SEQ ID NO: 11755 - protein, 488 aa, Unknown
  Description of Unknown: Integrase A323 sequence
  PF07508,SSF53041,PS51737,cd00338,PTHR30461:SF3, PF00239,PS51736,SM00857,G3DSA:3.40.50.1390,PTHR30461
MRVLGRIRLSRLSDESTSPERQREIIENWAKANDHVVVGWAEDLDVSGSVDPFDTPALGPWLTEPKLHEWDILCAWKLDRLSRRAIPMNKLFGWVMDHDKTLVCVNDNIDLSTWIGRMIANVIAGVAEGELEAIRERTKSSHRKLRELGRWPGGRPAYGYRAVEREDAAGWELEPDPVSSLILKQIIDWVLQGQSVESIAKDLTDMKEMSPSDYIRQHRTGEAPRGHPWHGRTIVKLLRSKTLLGHVTHQGMTVRDENGVPVLKGPPLIDQETFDRLQAALDAAARPKTVNRTSNASPLLGVAVCMECEGLLHHRRQRTAGKVYRYYHCPHGHTQSIPADDLETLVEERFLGVLGDHEVHERVYFAAESHEQELRQAQEAIDDLTSILAGAKSNTARERVLMQLQALDKRMVELEALPQRAAREEMQPTGEFYKDAWEQADEQGRRALLIRSGITAKAKLVGRVANQSGGALTFDLVVPEDLRERITL

SEQ ID NO: 11756 - protein, 487 aa, Unknown
  Description of Unknown: Integrase A324 sequence
  PF07508,SSF53041,PS51737,cd00338,PTHR30461:SF3,PF00239, PS51736,SM00857,G3DSA:3.40.50.1390,PTHR30461
MRVLGRIRLSRLSDESTSPERQREIIEGWAKSNDHTIVGWAEDLDVSGSVDPFDTPALGPWLSEPKLHEWDILCAWKLDRLSRRAIPMNKLFGWVMDHDKTLVCVNDNIDLSTWIGRMVANVIAGVAEGELEAIRERTTASHRKLRELGRWPGGRPSYGYRAVEREDAAGWVLEPDPVSSVVLRSIIDWVLQGQSVESIAKDLTAMGEVSPSDYVRQRAGEAPRGHPWHGRTIVKLLRSKTLLGYVTHNGTTVRDENGVPVQKGPPLVDQDTFNRLQAALDDGSRPKTVNRTSKASPLLGVALCWDCEKPLYSRRQTTAGKVYRYYHCRDGHTQSIPADDLQQLVEERFLNALGDQEVHEMVYLPAESHQAELEEAQIAVQELTSALGRMKSNYAQQRIHTQLEALDKRIQELEGLPTSEARSEMRPTGGLYKDAWEEADEQGRRELLIKSGITAKAKLEGRVPNQSGGALSFDLVVPEDLLARMSV

SEQ ID NO: 11757 - protein, 487 aa, Unknown
  Description of Unknown: Integrase A325 sequence
  G3DSA:1.10.10.60,SSF46689
MSDYLRSEKPSFSACYRRMVKVAKKNKWTPVPSERALRRRLDAEVPAEVQTLARDGKEKAKTLYPAQRRSRASLHPMQVVNMDGHKLDVFVKVPWSEAPVRMFLLGIQDLYSGKILSWRLSDSENKETVRLVIGDMVENFGIPEAIVLDNGRAFASHWISGGTANRYRFKVKDEDPRGLLTTLGVEVHWTNPFSGQSKPIERAWRDLAENISKHPFCAGAYTGNTTANKPENYGSRAIPLSDFHMHVSEQVAEHNAQAGRRAANCAGRSFDDTFAASIETAIVSQPTAAQKSLWLLASEVIRTQKGNGEIHYQGNRYWNSALTQHAGKKITIRFDPDDLHGSIKVYDLNNSLICDAQCIADTGFFDQDAARNHARARRDYLKGLKATADAQRKLSAKQLGELIYKGEKTRTEEPKPVRPKVTRIARGNLAVKEEAVADAISQEDFERGFARALRGDEPTVIQFPQGMHEPVSSEYGSKKKGGRNPAR

SEQ ID NO: 11758 - protein, 486 aa, Unknown
  Description of Unknown: Integrase A326 sequence
  PF07508,SSF53041,PS51737,cd00338, PTHR30461:SF3,PF00239,SM00857,G3DSA:3.40.50.1390,PTHR30461
MRVLGRVRLSRFSDESTSVERQREIIAKWAADNDHTVVGYAEDVDVSRSVDPFDTPALGPWFTPEQRGEWDIVACWKLDRIATGSIYLNKVMAWCGEHEKSLVSVTENFDLGTWVGRLIANVIAGVAEGELEAIRERTQASRRKLVAVGRWTGGRPTYGYRAVEQDGGGWTLEPDPESSAILRRIVDRALAGESTLSIVRGLNDEGVLSPADYVRYRNGKPTLGAKWTTTATLDLMRSRTLLGQIVHNGAVVRDDSGKPVLGGPPLIDYDTFTRLQAALDARSRTQKVERVDASPLLGVAVCWECGSNLFHQRQMNRGKPYRYYKCPNKCSQAVKADDAEAVVEDMFLDKVGGHDELERVFIPGADHSTELREAQEAVDELTKVLGTMSSNTVRTAVLGQLEALDKRIQELECLPLTEARVELQPTGRLYRDAWGSLDSDGRRELLVKAGITARLKVEGRPVGGRAPGAFYFDLVVPEDLRERMSL

SEQ ID NO: 11759 - protein, 486 aa, Unknown
  Description of Unknown: Integrase A327 sequence
  PF07508,G3DSA:1.10.10.2600,SSF53041,PF13408,PS51737,cd00338, PTHR30461:SF21,PF00239,PS51736,SM00857,G3DSA:3.40.50.1390, PTHR30461
MTATLETPPQVVAPPRLRAAVYLRMSTDKELGIDRQREDCVALCERLGWDPVLYVDNDRSAVKENVRREAYEQMCEDIRDGRIDAIITWRSDRLYRKMKSLLPLIDLIQGVNKNGKRIPIETCQTGLIDLTTDAGRMTAKILAAVAENEGEVRTARQMRAYEQIAESGRSLGAPAFGYTNDPKARVREIVPEEAAAIREGYDDVLAGCTLYSIAKKWNDRGLKTPRGNAFVATVVGRILRNPRYAGLYRFRGEIIGEGDWEPIVDVETWAMATAVLDGKNTGPKGPRVRTTLLSGIVRCGHCGNRMSASKNSNGEPIYKCKRYEVCNHGVTRVRKKVDKYVEARIVAKLEERKWVVGTKSDADQAKALHTEAETLRARKASFTDALVDGTLTPAQVKEASDKVDAKLEEIERQLARLTKSRVYDGLLGHDDLEAVWVGLPLDRKRAIIEQLCDKIVIRHVEITGRAAAKLPLGHNIDIYWHKPSDD

SEQ ID NO: 11760 - protein, 486 aa, Unknown
  Description of Unknown: Integrase A328 sequence
  PF07508,G3DSA:1.10.10.2600,SSF53041,PF13408,PS51737, cd00338,PTHR30461:SF21,PF00239,PS51736,SM00857, G3DSA:3.40.50.1390,PTHR30461
MTATLETPPQVVAPPRLRAAVYLRMSTDKELGIDRQREDCVALCERLGWDPVLYVDNDRSAVKENVRREAYEQMCEDIRDGRIDAIITWRSDRLYRKMKSLLPLIDLIQGVNKNGKRIPIETCQTGLIDLTTDAGRMTAKILAAVAENEGEVRTARQMRAYEQIAESGRSLGAPAFGYTNDPKARVREIVPEEAAAIREGYDDVLAGCTLYSIAKKWNDRGLKTPRGNAFVATVVGRILRNPRYAGLYRFRGEIIGEGDWEPIVAVETWAMATAVLDGKNTGPKGPRVRTTLLSGIVRCGHCGNRMSASKNSNGEPIYKCKRYEVCNHGVTRVRKKVDKYVEARIVAKLEERKWVVGTKSDADQAKALHTEAETLRARKASFTDALVDGTLTPAQVKEASDKVDAKLEEIERQLARLTKSRVYDGLLGHDDLEAVWVGLPLDRKRAIIEQLCDKIVIRHVEITGRAAAKLPLGHNIDIYWHKPSDD

SEQ ID NO: 11761 - protein, 485 aa, Unknown
  Description of Unknown: Integrase A329 sequence
  PF07508,G3DSA:1.10.10.2600,SSF53041,PF13408,PS51737,cd00338, PTHR30461:SF3,PF00239,PS51736,SM00857,G3DSA:3.40.50.1390, PTHR30461
MTKKVAIYTRVSTTNQAEEGFSIDEQIDRLTKYAEAMGWQVSDTYTDAGFSGAKLERPAMQRLINDIENKAFDTVLVYKLDRLSRSVRDTLYLVKDVFTKNKIDFISLNESIDTSSAMGSLFLTILSAINEFERENIKERMTMGKLGRAKSGKSMMWTKTAFGYYHNRKTGILEIVPLQATIVEQIFTDYLSGISLTKLRDKLNESGHIGKDIPWSYRTLRQTLDNPVYCGYIKFKDSLFEGMHKPIIPYETYLKVQKELEERQQQTYERNNNPRPFQAKYMLSGMARCGYCGAPLKIVLGHKRKDGSRTMKYHCANRFPRKTKGITVYNDNKKCDSGTYDLSNLENTVIDNLIGFQENNDSLLKIINGNNQPILDTSSFKKQISQIDKKIQKNSDLYLNDFITMDELKDRTDSLQAEKKLLKAKISENKFNDSTDVFELVKTQLGSIPINELSYDNKKKIVNNLVSKVDVTADNVDIIFKFQLA

SEQ ID NO: 11762 - protein, 485 aa, Unknown
  Description of Unknown: Integrase A330 sequence
  PF07508,SSF53041,cd00338,PTHR30461:SF3,PF00239, PS51736,SM00857,G3DSA:3.40.50.1390,PS00397,PTHR30461
MVTGLTDYSDCVGYCRVSTQKQFEEGHGLERYIAQLKSWGLNDNQIFWDIESGASDKRKGYNKVLDLIKSGAIKKLIIPCFDRFTRSTLQWEQASLELQKHNVTVIFLDGGSTDLTSPDDLFKMRILAAMSAAVRDKNKFNSSQGHKFRRLNEKAHMACFGYKKSENGDTLVINHDLYKDTNKTYYRVARDIIELFLEKRSLSGTVRSMCSTYMSARLWPRHLDFPHTKSALKDWLTHPMLRGNLVYFRNDPEKELIIPNKFDPILTDGEFYEVASIISQKRKTKYKKDTLVNPLMGLAVCAGCGSFMRVQTSQYVPIKNNPSKKLKKIRYLVCEGAYPRPEKPKICDRRSTFSLKLEDYIDSVISTICLRAETIADLGSIQIDRTVEETAEIKELRQQISKLVGLGDNDLNEIIQIKQTKLNNLLNALKKESAGSEGIYEKLLEYGSKPEFWQCATVDEMYVLFQDLVEKVECDCGEINVILKI

SEQ ID NO: 11763 - protein, 484 aa, Unknown
  Description of Unknown: Integrase A331 sequence
  PF07508,G3DSA:1.10.10.2600,SSF53041,PF13408,PS51737,cd00338, PF00239,PS51736,SM00857,G3DSA:3.40.50.1390,PTHR30461
MKILKYAVYVRVSTDRDEQVSSVENQIDICRYWLEKNGYEWDPNAVYFDDGISGTAWLERHAMQLILEKARRNELDTVVFKSIHRLARDLRDALEIKEILIGHGIRLVTIEENYDSLYEGGNDIKFEMFAMFAAQLPKTISVSVSAAMQAKARRGEFIGKPGLGYDVIDKKLVINEKEAEIVREIFDLSYKGYGFKKIANILNDKGTYTKFGQLWSHTTVGKILKNQTYKGNLVLNSYKTVKVDGKKKRVYTPKERLTIIEDHYPTIVSKELWNAVNSDRASKKKTKQDTRNEFRGMMFCKHCGEPITAKYSGRYAKGSKKEWVYMKCSNYIRFNRCVNFDPAHYDDIREAIIYGLKQQEKELEIHFNPKMHQKRNDKSTEIKKQIKLLKVKKEKLIDLYVEGLIDKEMFSKRDLNFENEIKEQELALLKLTDQNKRNKEEKKIKEAFSMLDEEKDMHEVFKTLIKKITLSKDKYIDIEYTFSL

SEQ ID NO: 11764 - protein, 484 aa, Unknown
  Description of Unknown: Integrase A332 sequence
  PF07508,G3DSA:1.10.10.2600,SSF53041,PF13408,PS51737, cd00338,PF00239,PS51736,SM00857,G3DSA:3.40.50.1390, PTHR30461
MKILKYAVYVRVSTDRDEQVSSVENQIDICRYWLEKNGYEWDPNAVYFDDGISGTAWLERHAMQLILEKARRNELDTVVFKSIHRLARDLRDALEIKEILIGHGIRLVTIEENYDSLYEGGNDIKFEMFAMFAAQLPKTISVSVSAAMQAKARRGEFIGKPGLGYDVIDKKLVINEKEAEIVREIFDLSYKGYGFKKIANILNDKGTYTKFGQLWSHTTVGKILKNQTYKGNLVLNSYKTVKVDGKKKRVYTPKERLTIIEDHYPTIVSKELWNAVNSDRASKKKTKQDTRNEFRGMMFCKHCGEPITAKYSGRYAKGSKKEWVYMKCSNYIRFNRCVNFDPAHYDDIREAIIYGLKQQEKELEIHFNPKMHQKRNDKSREIKKQIKLLKVKKEKLIDLYVEGLIDKEMFSKRDLNFENEIKEQELALLKLTDQNKRNKEEKKIKEAFSMLDEEKDMHEVFKTLIKKITLSKDKYIDIEYTFSL

SEQ ID NO: 11765 - protein, 484 aa, Unknown
  Description of Unknown: Integrase A333 sequence
  PF07508,G3DSA:1.10.10.2600,SSF53041,PF13408,PS51737, cd00338,PTHR30461:SF21,PF00239,PS51736,SM00857,G3DSA:3.40.50 .1390,PTHR30461
MTATLERHLDTPQQEALRVGVYLRMSTDKELGIDRQREDCLALAERLGWVPVEYIDNDRSATKENVKREGFDALSEDIRDGRIDSIITWRSDRLYRKMKDLLPLIDLIQGVNKTGKRIPIETCQTGLIDLTTDAGRMTAKILAAVSENEGEVRTARQMRAYEQIADSGRRLGAPAFGWTHDPRDPQIVPEEAAAIRQAYADVLAGCTLYSIAKKWNEDGLRTTRGNQFVGSVVGKILRSPRNAGLLTFRDEIVGEGTWEPIVDRETWEAACAVLDQKNTGKKGPRVRSTLLSGIVRCGACGNKMAAGKNSNGEPIYKCKRYEVCKHGVTRVRKKVDKYVEMSMVAKLEQRKWIVGTQVDAEQAKGLHAEAEALRARKASFGEALADGTLTPAQVKDATDRVNAKLEEIDAKLARLTRSRVFDGLLGHDDLEKVWLGLDLERKRAIIESLCDKIVIQHVGQTGRSAAKLPLGHAIKIHWHDPSND

SEQ ID NO: 11766 - protein, 484 aa, Unknown
  Description of Unknown: Integrase A334 sequence
  PF07508,G3DSA:1.10.10.2600,SSF53041,PF13408,PS51737, cd00338,PTHR30461:SF21,PF00239,PS51736,SM00857, G3DSA:3.40.50.1390,PTHR30461
MTATLERHLDTPQQEALRVGVYLRMSTDKELGIDRQREDCLALAERLGWVPVEYIDNDRSATKENVKREGFDALSDDIRDGRIDSIITWRSDRLYRKMKDLLPLIDLIQGVNKTGKRIPIETCQTGLIDLTTDAGRMTAKILAAVSENEGEVRTARQMRAYEQIADSGRRLGAPAFGWTHDPRDPQIVPEEAAAIREGYADVLAGCTLYSIAKKWSDAGLRTTRGNAFVGSVVGKILRSPRNAGLLTFRDEIVGEGTWEPIVDRETWEAACAVLDQKNTGQKGPRVRSTLLSGIVRCGACGNKMAAGKNSNGEPIYKCKRYEVCKHGVTRVRKKVDKYVEMSMVAKLEQRKWIVGTQVDAEQAKGLHAEAEALRARKASFGEALADGTLTPAQVKDATDRVNAKLEEIDAKLARLTRSRVFDGLLGHDDLEKVWLGLDLERKRAIIESLCDKIVIQHVGQTGRSAAKLPLGHAIKIHWHDPSND

SEQ ID NO: 11767 - protein, 484 aa, Unknown
  Description of Unknown: Integrase A335 sequence
  PF07508,G3DSA:1.10.10.2600,SSF53041,PF13408,PS51737,cd00338, PTHR30461:SF21,PF00239,PS51736,SM00857,G3DSA:3.40.50.1390 ,PTHR30461
MTATLERHLDTPQQEALRVGVYLRMSTDKELGIDRQREDCLALAERLGWVPVEYIDNDRSATKENVKREGFDALSDDIRDGRIDSIITWRSDRLYRKMKDLLPLIDLIQGVNKTGKRIPIETCQTGLIDLTTDAGRMTAKILAAVSENEGEVRTARQMRAYEQIADSGRRLGAPAFGWTHDPRDPQIVPEEAAAIREGYADVLAGCTLYSIAKKWSDAGLRTTRGNAFVGSVVGKILRSPRNAGLLTFRDEIVGEGTWEPIVDRETWEAACAVLDQKNTGQKGPRVRSTLLSGIVRCGACGNKMAAGKNSNGEPIYKCKRYEVCKHGVTRVRKKVDKYVEMSMVAKLEQRKWIVGTQVDAEQAKGLHAEAEALRARKASFGEALADGTLTPAQVKDATDRVNVKLEEIDAKLARLTRSRVFDGLLGHDDLEKVWLGLDLERKRAIIESLCDKIVIQHVGQTGRSAAKLPLGHAIKIHWHDPSND

SEQ ID NO: 11768 - protein, 484 aa, Unknown
  Description of Unknown: Integrase A336 sequence
  PF07508,G3DSA:1.10.10.2600,SSF53041,PF13408,PS51737, cd00338,PTHR30461:SF3,PF00239,PS51736,SM00857, G3DSA:3.40.50.1390,PS00397,PTHR30461
MKKATAYARVSTTEQSKTSIDGQLDTIRNFAKFNDIKIIEEFWDKESGGKMSRPNFDIMIENAFAGKYDLILVEKIDRFAREDIEATLLIKQLEDAGIFVMSVLEPADVTTPSGRFQRWIMLGFGKLEREIIADRTKRRMRDTAKRGYWMGGIPPYGYKTVEVKDNEGRIRKKLEIIEEEAKVIRKIFELHADGKGLSAIAEFLNNNNISTRKGKPWAKTTIYDLLKNKKYIGIYEYGKGTKRNHHSKNSKPLIIENVIPPIIDKELWEKSKKQFRTPVRISMIRNYLLRGKIFCAECGAPLVGNGGKKTMYVCSNWKSRKGDHYVGISKNKIEKHVFLYLKHLLIDNRPNFKQIANTFNYLYKTKKQSKNRKIEYIKNTLEEKYEQRKNIINAIKKGVMIETLTQEAKQIEREIKELNLQLEKLMQNVYFEITEEELEHRWNNLTEMILSDDEDTLKELYDLLIEKIEVASDGYIKIIDKDIL

SEQ ID NO: 11769 - protein, 484 aa, Unknown
  Description of Unknown: Integrase A337 sequence
  SSF53041,PF13408,cd00338,PTHR30461:SF21,PF00239,SM00857, G3DSA:3.40.50.1390,PTHR30461
MRNGDITPEEAAELERKGVLKQRDDVKILADRHDREVIFYEDNNLSAFKRNVRRPRFQDMVRDLKAGKLAGMVVYDIDRGFRQPKDLESVIDIYQDFSEKKKVRLIFDTMSGQNFDLSTGDGRFTARLYVNIANKSSEDTSRRIARDNASKARKGVYHGGGPSFGWKEDDRTKLDPKAAGLVRDIVLGHLKGDKIATCMEYLSDKGAVNPTSGKPFTWAGTKTLIFRARNFGIRIYQGEPQLDDEGNYILGDWEPIFTKDDGTPDFDLWERLEALRKGKSPEGSQEKSTVKYLLSRIVRCGRCGYPMVGKTVWVRGTKSQSFAYNCNKSNPDACGKMGVTGPRVDELVKSLVWAQVLRASKNRQVPEPQESWSKEAELKDVEGQIAELKALWEAKEVRAATYVTTLDDLESRRTQLKAERAFHTATPAIRVITPELLKNGWEGLSVERQRIIIRSVLKAVIIHPARDGKKGGPFDPARVEPVFA

SEQ ID NO: 11770 - protein, 484 aa, Unknown
  Description of Unknown: Integrase A338 sequence
  PF07508,G3DSA:1.10.10.2600,SSF53041,PF13408,PS51737, cd00338,PF00239,PS51736,SM00857,G3DSA:3.40.50.1390, PTHR30461
MEILKYAVYVRVSTDRDEQVSSVENQIDICRYWLEKNGYEWDPNAVYFDDGISGTAWLERHAMQLILEKARRNELDTVVFKSIHRLARDLRDALEIKEILIGHGIRLVTIEENYDSLYEGGNDIKFEMFAMFAAQLPKTISVSVSAAMQAKARRGEFIGKPGLGYDVIDKKLVINEKEAEVVREIFDLSYKGYGFKKIANILNDKGTYTKFGQLWSHTTVGKVLKNQTYKGNLVLNSYKTVKVDGKKKRVYTPKERLTIIEDHYPAIISKELWNAVNSDRASKKKTKQDTRNEFRGLMFCKHCGEPITAKYSGRYAKGSKKEWVYMKCSNYIRFNRCVNFDPVHYDDIREAIIYGLKQQEKELEIHFNPKMHQKRNDKSTEIKKQIKLLKVKKEKLIDLYVEGLIDKEMFSKRDLNFENEIKEQELALLKLTDQNKRNKEEKKIKEAFSMLDEEKDMHEVFKTLIKKITLSKDKYIDIEYTFSL

SEQ ID NO: 11771 - protein, 484 aa, Unknown
  Description of Unknown: Integrase A339 sequence
  PF07508,G3DSA:1.10.10.2600,SSF53041,PF13408,PS51737,cd03768, PTHR30461:SF3,PF00239,PS51736,SM00857,G3DSA:3.40.50.1390, PS00397,PTHR30461
MQTKKVAIYVRVSSLHQAIEGYSIGQQQDALTKYCEAMNWAIYNVYTDAGFSGGKIDRPAMQKLITDAKTGKFDTVLVYKLDRLSRSVQDTLFLVRDIFNENNIGFVSLQENIDTSTAMGNLFLTLLSAIAEFEREQIKERMQMGRYGRAKSGKSMMWNLTSYGYRYNKETQSMDVVPSEALIIKRIYKEYLSGKSISRIKDGLNDEGHVTRDKPWAYKRISHILTSIVYTGVTEFKGEIYEGLHEAIIDKETFELAQAEFKKRQQQTKQNKNNPRPFQAKYMLSGMIRCGYCGAPLKMRKGPVRKDGTRLMAYDCHNRWKRKHTYLTVYNNNEQCTQSGRYLKEDVEGYVINEIKKLQENPDELNKYLKQPEETKVDTKKIESQIKKIDKQIAKLNDLYLNDLITIEDLKSKADKFKSEKNILEAQLKKDENSILKLKAENVRKNLSVKDIDKMTYEEQRNLAKTLIKKVDVTKEDIKIIFDF

SEQ ID NO: 11772 - protein, 484 aa, Unknown
  Description of Unknown: Integrase A340 sequence
  PF07508,G3DSA:1.10.10.2600,SSF53041,PF13408,PS51737, cd00338,PTHR30461:SF3,PF00239,PS51736,SM00857, G3DSA:3.40.50.1390,PS00397,PTHR30461
MNKVAIYVRVSTTMQAEEGYSIDEQIDKLKSYCKIKDWTVYDIYKDGGFSGGNIERPAMERLISDAKRKKFDTVLVYKLDRLSRSQKDTLFLIEEVFDKNDISFLSLNESFDTSTAFGKAMIGILSVFAQLEREQIKERMLLGKIGRAKTGKSMMFSKVSFGYTYDKLKDELVVNQAESIIVRKIFDAYLGGLSLNKLRDYLNNNGIYRGDKPWNYQGLRRILSNPVYIGMIRYREEIYPGNHKAIIDIDDYNKTQEEIKKRQIKALEFSNNPRPFRSKYMLSGIAKCGYCGTPLQIILGSKRKDGTRNMRYQCINRFPRNTKGVTIYNDGKKCESGFYEKADIEEFVINEIRSLQINYNKLDAMFDRHPTVNSDDIKKQIITLDNKLKRLNDLYINNMIELDDLKKQTQSLRKQKTILEDELLNNPAITQEKNKKHFKEMLATKDITKLDYETQKNIVNNLINKVFVKSGYIKIEWKIPFKKA

SEQ ID NO: 11773 - protein, 484 aa, Unknown
  Description of Unknown: Integrase A341 sequence
  PF07508,G3DSA:1.10.10.2600,SSF53041,PF13408,PS51737,cd00338, PTHR30461:SF3,PF00239,PS51736,SM00857,G3DSA:3.40.50.1390,PS00397 ,PTHR30461
MNKVAIYVRVSTTMQAEEGYSIDEQIDKLTSYCKIKDWTVYDIYKDGGFSGGNIERPAMERLISDAERKKFDTVLVYKLDRLSRSQKDTLFLIEEVFGKNDISFLSLNESFDTSTAFGKAMIGILSVFAQLEREQIKERMLLGKIGRAKTGKAMMFSKVSFGYTYDKLKDELVVNQAESIIVRKIFEAYLGGLSLNKLRDYLNNNGIYRGDKPWNYQGLRRILSNPVYIGMIRYRGEIYPGNHQAIIDIDDYNKTQEEIKKRQITALEFSNNPRPFRAKYMLSGIAKCGYCGTPLRIILGSKRKDGSRNMRYQCINRFPRNTKGVTVYNDGKKCNSGFYEKADVEEFVINQIRDLQFNINKLDNLFDKHPSIDIKSIERQISSLDNKLKRLNDLYLNDMIDLEDLKKQTQLLRQQKTMLEDELLNNPAITQEKNKKYFKEFLATKDITKLDYETQKNIVNNLINKVFVKSGYIKIEWKIPFKKM

SEQ ID NO: 11774 - protein, 484 aa, Unknown
  Description of Unknown: Integrase A342 sequence
  PF07508,G3DSA:1.10.10.2600,SSF53041,PF13408,PS51737, cd00338,PTHR30461:SF3,PF00239,PS51736,SM00857, G3DSA:3.40.50.1390,PS00397,PTHR30461
MNKVAIYVRVSTTMQAEEGYSIDEQIDKLTSYCKIKDWTVYDIYKDGGFSGGNIERPAMERLISDAKRKRFDTVLVYKLDRLSRSQKDTLYLIEEIFGKNDISFLSLNESFDTSTPFGKAMIGILSVFAQLEREQIKERMLLGKIGRAKTGKSMMFSKVSFGYTYDRVKDELIVNQAEAMIVRKIFDEYLGGRSLTKLRDYLNNNQIYRGDKPWNYQGLRRILSNPVYIGMIRYREEIYPGNHQPIIDTDDYNKTQEEIKKRQIEALEFSNNPRPFRAKYMLSGIAKCGYCGTPLQIILGTKRKDGTRNMRYQCINRFPRQTKGITIYNDGKKCNSGFYEKADIEEFVIAEIRGLQLNHNKLDDMFDKHPTIDIEGIEKQITSLDNKLKRLNDLYLNDMIELDDLKKQTQSLRKQKTMLEDELQNNPAIMQEKNKKHFQEMLGTKDITTLDYETQKNIVNNLVNKVFVKSGHIKIEWKIPFKKA

SEQ ID NO: 11775 - protein, 484 aa, Unknown
  Description of Unknown: Integrase A343 sequence
  PF07508,G3DSA:1.10.10.2600,SSF53041,PF13408,PS51737,cd03768, PTHR30461:SF3,PF00239,PS51736,SM00857,G3DSA:3.40.50.1390, PS00397,PTHR30461
MQPKKVAIYVRVSSLHQAIEGYSIGQQQDALTKYCEAMNWAIYNVYTDAGFSGGKIDRPAMQKLITDAKTGKFDTVLVYKLDRLSRSVQDTLFLVRDIFNENNIGFVSLQENIDTSTAMGNLFLTLLSAIAEFEREQIKERMQMGRYGRAKSGKSMMWNLTSYGYRYNKETQSMDVVPSEALIVKRIYKEYLSGKSISRIKDGLNNEGHITRDKPWAYKRISHILTSIVYTGVTEFKGEIYEGLHEAIIDKETFELAQAEFKKRQQQTKQNKNNPRPFQAKYMLSGMIRCGYCGAPLKMRKGPVRKDGTRLMAYDCHNRWKRKHSYLTVYNNNEQCTQSGRYLKEDVEGYVINEIKKLQENPDELNKYLKQPEETKVDTKKIESQIKKIDKQITKLNDLYLNDLITIEDLKSKADKLKSEKNILEVQLKKDENSILKLKAENVRKNLSVKDIDKMTYEEQRNLAKTLIKKVDVTKEDIKIIFDF

SEQ ID NO: 11776 - protein, 484 aa, Unknown
  Description of Unknown: Integrase A344 sequence
  PF07508,G3DSA:1.10.10.2600,SSF53041,PF13408,PS51737, cd03768,PTHR30461:SF3,PF00239,PS51736,SM00857, G3DSA:3.40.50.1390,PS00397,PTHR30461
MMTTNKVAIYVRVSTTNQAEEGYSIEEQKDKLSSYCHIKDWSIYNIYTDGGFSGSNTERPALEKLIKDAKKKKFDTVLVYKLDRLSRSQKDTLYLIEDIFLENKIDFVSLLENFDTSTPFGKAMVGILSVFAQLEREQIKERMQLGKLGRAKSGKSMMWAKTSYGYDYHKETGTVTVNPWQSIIIADIFDWYLSGKSITKIRDALNDMYGEDNGGKVWNYRAVRMILANPVYCGYNQYKGEIYKGNHEPIISEEVFNKTQEELKIRQQLAAEYSNPRPFQAKYMLSGIAQCGYCYAPLKIIMGMVRKDGTRYIRYECYQRHPRKTKGVTVYNNNEKCHSGAYEKDEVEEYVLNEISKLQNDTNYLDELFSNPETESIDRDSYQKQIDELTKKLSRLNDLYIDDRISLEELQKKSAEFTTIRAFLEAELENDPTLKADKQKENMRQTLATDDILGLDYDKQKAIVRTLINKVQVTDEDIAIKWKI

SEQ ID NO: 11777 - protein, 482 aa, Unknown
  Description of Unknown: Integrase A345 sequence
  PF07508,G3DSA:1.10.10.2600,SSF53041,PF13408,PS51737,cd00338, PTHR30461:SF3,PF00239,PS51736,SM00857,G3DSA:3.40.50.1390, PS00397,PTHR30461
MNKKVALYVRVSTLEQAESGYSIGEQIDKLRKYADIKEWHVYDVYEDGGFSGSNTTRPALERLISDAKRHTFDTVLVYKLDRLSRSQKDTLFLIEDIFKANEVDLVSLNENFDTSTAFGTAMIGILSVFAQLEREQIKERMKLGKIGRARSGKAMGWHVTPFGYLYDKQTGNFVVDDLAAGVVKMIFSDYLNGMSITKLRDKLNIAGHIGKDREWSYRTLRQTLDNPTYTGLVKYDGQVFEGNHEAIIDKKTFDAVQNELDIRQKKAYAFNNNPRPFQSKYMLSGIIRCGYCGAPLVSTLGNVRKDGTRLMKYQCTKRIIKKTRTTTVYNDNKKCDSGFYMMRNIESYVVNAVSELQASPELIESMMQSTAKQPKTNIKQLESELAKISSRLKKLSDLYLNDLISIDDLKKQTTDLKENRKRIEDTIDNNKDNNDEKVGMLKLKLTGSDIKERDYQDQSTLVKAFVRKVSVTSDNIEISWNF

SEQ ID NO: 11778 - protein, 482 aa, Unknown
  Description of Unknown: Integrase A346 sequence
  PF07508,G3DSA:1.10.10.2600,SSF53041,PF13408,PS51737, cd03768,PTHR30461:SF3,PF00239,PS51736,SM00857, G3DSA:3.40.50.1390,PS00397,PTHR30461
MMNTINKVAIYVRVSTNVQAEEGYSIDEQIDKLKSYCQIKDWTVYDVYKDGGFSGGNINRPALEKMIIDAKKKRFDTVLVYKLDRLSRSQKDTLFLIEDVFSKNDISFLSLQENFDTSTPFGKALVGLLSVFAQLEREQIKERMQLGMIGRAKSGKPMMFTNVSFGYTYSPKTQQLTINQAEAVIVKQIFNEFLGGMSPLRLMAYLNENNILRNGKEWNYQGIQRILRNPVYIGKIKYNNVIYPGLHEPIIDEESYYKAQKLLDARQDEMRIKGKNRQFKAKYMLSGTAKCGYCGAPLRIKIGNKRLDGTRLKVYQCCNRYPRKYAVVTYNDNKKCNSGNYQKEDLEQYVIAEIRKLQLKPEKIDKLFNKVSKIDTVQINKQIASIDNKINRLNDLYLNDMIDIDKLKSDAEKFKEQKRVLEKELDKDLKIQEQEKNKEDFKKTIGFKDVTKLDYEEQSFIVKSLIDKILVKKGFIKILWKI

SEQ ID NO: 11779 - protein, 481 aa, Unknown
  Description of Unknown: Integrase A347 sequence
  PF07508,G3DSA:1.10.10.2600,SSF53041,PF13408,PS51737,cd03768, PTHR30461:SF3,PF00239,PS51736,SM00857,G3DSA:3.40.50.1390, PS00397,PTHR30461
MITTNKVAIYVRVSTTNQVEEGYSIDEQKDKLSSYCDIKDWNVYKVYTDGGFSGSNTDRPALESLIKDAKKRKFDTVLVYKLDRLSRSQKDTLHLIEDVFIKNGIEFLSLQENFDTSTPFGKAMIGLLSVFAQLEREQIKERMQLGKLGRAKSGKSMMWAKTSYGYDYHKETGTVTINPAQALTIKFIFESYLRGRSITKLRDDLNEKYPKHVPWSYRAVRTILDNPVYCGFNQYKGEIYPGNHEPIISKEEYDKTQSELKIRQRTAAENVNPRPFQAKYILSGIAQCGYCGAPLKIMLGVKRKDGSRLKKYECHQRHPRTLRGVTTYNDNKKCDSGFYYKDKLEASVLKEISKLQDDADYLDKIFSGDNAETIDRESYKKQIEELSKKLSRLNDLYIDDRITLEELQSKSAEFISMRGTLETELENDPALRKNKRKADMRKLLNAEKVFSMDYENQKVLVRRLINKVKVTAEDIVINWKI

SEQ ID NO: 11780 - protein, 481 aa, Unknown
  Description of Unknown: Integrase A348 sequence
  PF07508,G3DSA:1.10.10.2600,SSF53041,PF13408,PS51737, cd03768,PTHR30461:SF3,PF00239,PS51736,SM00857, G3DSA:3.40.50.1390,PS00397,PTHR30461
MKTMNKVAIYVRVSTTNQVEEGYSIDEQKDKLSSYCDIKDWNVYKVYTDGGFSGSNTDRPALESLIKDAKKRKFDTVLVYKLDRLSRSQKDTLHLIEDVFIKNGIEFLSLQENFDTSTPFGKAMIGLLSVFAQLEREQIKERMQLGKLGRAKSGKSMMWAKTSYGYDYHKETGTVTINPAQALTIKFIFESYLRGRSITKLRDDLNEKYPKHVPWSYRAVRTILDNPVYCGFNQYKGEIYPGNHEPIISKEEYDKTQSELKIRQRTAAENVNPRPFQAKYILSGIAQCGYCGAPLKIMLGVKRKDGSRLKKYECHQRHPRTLRGVTTYNDNKKCDSGFYYKDKLEASVLKEISKLQDDADYLDKIFSGDNAETIDRESYKKQIEELSKKLSRLNDLYIDDRITLEELQSKSAEFISMRGTLETELENDPALRKNKRKADMRKLLNAEKVFSMDYENQKVLVRRLINKVKVTAEDIVINWKI

SEQ ID NO: 11781 - protein, 481 aa, Unknown
  Description of Unknown: Integrase A349 sequence
  PF07508,G3DSA:1.10.10.2600,SSF53041,PF13408,PS51737,cd03768, PTHR30461:SF3,PF00239,PS51736,SM00857,G3DSA:3.40.50.1390,PS00397 ,PTHR30461
MKTMNKVAIYVRVSTTNQVEEGYSIDEQKDKLSSYCDIKDWNVYKVYTDGGFSGSNTDRPALESLIKDAKKRKFDTVLVYKLDRLSRSQKDTLHLIEDVFIKNGIEFLSLQENFDTSTPFGKAMIGLLSVFAQLEREQIKERMQLGKLGRAKSGKSMMWAKTSYGYDYHKETGTVTINPAQALTIKFIFESYLRGRSITKLRDDLNEKYPKHVPWSYRAVRTILDNPVYCGFNQYKGEIYPGNHEPIISKEEYDKTQSELKIRQRTAAENVNPRPFQAKYILSGIAQCGYCGAPLKIMLGVKRKDGSRLKKYECHQRHPRTLRGVTTYNDNKKCDSGFYYKDKLEASVLKEISKLQDDADYLDKIFSGDNAETIDRERYKKQIEELSKKLSRLNDLYIDDRITLEELQSKSAEFISMRATLETELENDPALRKNKRKADMRKLLNAEKVFSMDYEGQKVLVRGLINKVQVTAEDIVIKWKI

SEQ ID NO: 11782 - protein, 481 aa, Unknown
  Description of Unknown: Integrase A350 sequence
  PF07508,G3DSA:1.10.10.2600,SSF53041,PF13408,PS51737, cd03768,PTHR30461:SF3,PF00239,PS51736,SM00857, G3DSA:3.40.50.1390,PS00397,PTHR30461
MITTNKVAIYVRVSTTNQVEEGYSIDEQKDKLSSYCDIKDWNVYKVYTDGGFSGSNTNRPAIEQLIKDAQKKKFDTVLVYKLDRLSRSQKDTLHLIEDVFIKNGIEFLSLQENFDTSTPFGKAMIGLLSVFAQLEREQIKERMQLGKLGRAKAGKSMMWAKTSYGYDYHRETGTITINPAQALTIKFIFESYLRGRSITKLRDDLNEKYPKHVPWSYRAVRTILDNPVYCGFNQYKGEIYPGNHEPIISKEEYDKTQSELKIRQRTAAENVNPRPFQAKYILSGIAQCGYCGAPLKIMLGVKRKDGSRLKKYECHQRHPRTLRGVTTYNDNKKCDSGFYYKDKLEASVLKEISKLQDDADYLDKIFSGDNAETIDRESYKKQIEELSKKLSRLNDLYIDDRITLEELQSKSAEFISMRGTLETELENDPALRKNKRKADMRKLLNAEKVFSMDYENQKVLVRRLINKVKVTAEDIVINWKI

SEQ ID NO: 11783 - protein, 481 aa, Unknown
  Description of Unknown: Integrase A351 sequence
  PF07508,G3DSA:1.10.10.2600,SSF53041,PF13408,PS51737,cd03768, PTHR30461:SF3,PF00239,PS51736,SM00857,G3DSA:3.40.50.1390, PS00397,PTHR30461
MITTNKVAIYVRVSTTNQVEEGYSIDEQKDKLSSYCDIKDWNVYKVYTDGGFSGSNTDRPALESLIKDAKKRKFDTVLVYKLDRLSRSQKDTLHLIEDVFIKNGIEFLSLQENFDTSTPFGKAMIGLLSVFAQLEREQIKERMQLGKLGRAKSGKSMMWAKTSYGYDYHKETGTVTINPAQALTIKFIFESYLRGRSITKLRDDLNEKYPKHVPWSYRAVRTILDNPVYCGFNQYKGEIYPGNHEPIISKEEYDKTQSELKIRQRTAAENVNPRPFQAKYILSGIAQCGYCGAPLKIMLGVKRKDGSRLKKYECHQRHPRTLRGVTTYNDNKKCDSGFYYKDKLEASVLKEISKLQDDADYLDKIFSGDNAETIDRESYKKQIEELSKKLSRLNDLYIDDRITLEELQSKSAEFISMRGTLETELENDPALRKNKRKADMRKLLNAEKVFSMNYENQKVLVRRLINKVKVTAEDIVINWKI

SEQ ID NO: 11784 - protein, 481 aa, Unknown
  Description of Unknown: Integrase A352 sequence
  PF07508,G3DSA:1.10.10.2600,SSF53041,PF13408,PS51737, cd03768,PTHR30461:SF3,PF00239,PS51736,SM00857, G3DSA:3.40.50.1390,PS00397,PTHR30461
MIATNKVAIYVRVSTTSQVEEGYSIDEQKAKLSSYCDIKDWSVYKIYTDGGFSGSNTDRPALEGLIKDAKKRKFDTVLVYKLDRLSRSQKDTLYLIEDIFIKNNIAFLSLQENFDTSTPFGKAMIGLLSVFAQLEREQIKERMQLGKIGRAKAGKSMMWAKTSYGYDYHRETGTITINPAQALAVKFIFESYLRGRSITKLRDDLNEKYPKHVPWSYRAVRTILDNPVYCGFNQYKGEIYPGNHESIISKEEYDKTQSELKIRQRTAAENVNPRPFQAKYILSGIAQCGYCGAPLKIMLGVKRKDGSRLKKYECHQRHPRTLRGVTTYNDNKKCDSGFYYKDKLEAYVLTEISKLQDNAGYLDKIFSGDNAETIDRESYKKQIEELSKKLSRLNDLYIDDRITLEELQSKSAEFISMRGTLETELENDPALRKNKRKADMRKLLNAEKIFSMDYEGQKVLVRGLINKVQVTAEDIVINWKI

SEQ ID NO: 11785 - protein, 481 aa, Unknown
  Description of Unknown: Integrase A353 sequence
  PF07508,SSF53041,PS51737,cd00338,PF00239,PS51736,SM00857,G3DSA: 3.40.50.1390,PTHR30461
MNTSGGDRVALYARISQDTSGKAVGVADQLETARKFSADRGYDVVAEHSDNDISAFRGADRPGYQRVLKLARERKIDRVIVYQLTRMTRNRGERAEFIDAFHACKVNVSEAQGGDYDLSTAAGRSWVDIQGALATWESEIKSERVTAAAARRARSGRPSGDLGYGWIKHGTGASATWTEHPHEAEVVREIVDRLLAGETLRGITQSLNDRGEPAPKSASWGKTSVKKLALRESNVALRIHHRGQADEERFDGCWPALVDRAKHEKVGALLREPARQTNGTKRPGARKHLLSWGIGECGVCGGMLRVATKRGRYGRPLDLYVCDANNGCVGRSEPAVDDLVKTVVIKRLSRPDALEWLLGDDDEARRWAERVDELNRRLADAADAFADGAITGEQLRRITAKLQPDLDDALERARESAGALNVDVLRPLAGPEAAQRWDDMEMAQRRAVLEALGLRVIIDRTRPGPGFDPSSVRFVWGRSAD

SEQ ID NO: 11786 - protein, 481 aa, Unknown
  Description of Unknown: Integrase A354 sequence
  PF07508,SSF53041,PS51737,cd00338,PF00239, PS51736,SM00857,G3DSA:3.40.50.1390,PTHR30461
MNTSGGDRVALYARISQDTSGKAVGVADQLETARKFSADRGYDVVAEHSDNDVSAFRGADRPGYQRVLRLARERKIDRVIVYQLTRMTRNRGERAEFIDAFHACKVNVSEAQGGDYDLSTAAGRSWVDIQGALATWESEIKSERVTAAAARRARSGRPSGDLGYGWIKHGTGASATWTEHPHEAEVVREIVDRLLAGETLRGITQSLNDRGEPAPKSASWGKTSVKKLALRESNVALRIHHRGQVDEERFDGCWPALVDRAKHEKVGALLREPARQTNGTKRPGARKHLLSWGIGECGVCGGMLRVATKHGRYGRPLDLYVCDANNGCVGRSEPTVDNLVKTVVIKRLSRPDALEWLLGDDDEARRWAERVDELNRRLADAADAFADGAITGEQLRRITAKLQPDLDDALERARESAGALNVDVLRPLAGPEAAQRWDDMEMSQRRAVLEALGLRVIIDRTRRGPGFDPSSVRFVWGRSAD

SEQ ID NO: 11787 - protein, 481 aa, Unknown
  Description of Unknown: Integrase A355 sequence
  PF07508,G3DSA:1.10.10.2600,SSF53041,PF13408,PS51737,cd00338, PF00239,PS51736,SM00857,G3DSA:3.40.50.1390,PTHR30461
MKYAVYVRVSTDRDEQVSSVENQIDICRYWLEKNGYEWDPNAVYFDDGISGTAWLERHAMQLILEKARRNELDTVVFKSIHRLARDLRDALEIKEILIGHGIRLVTIEENYDSLYEGGNDIKFEMFAMFAAQLPKTISVSVSAAMQAKARRGEFIGKPGLGYDVIDKKLVINEKEAEIVREIFDLSYKGYGFKKIANILNDKGTYTKFGQLWSHTTVGKILKNQTYKGNLVLNSYKTVKVDGKKKRVYTPKERLTIIEDHYPTIVSKELWNAVNSDRASKKKTKQDTRNEFRGMMFCKHCGEPITAKYSGRYAKGSKKEWVYMKCSNYIRFNRCVNFDPAHYDDIREAIIYGLKQQEKELEIHFNPKMHQKRNDKSTEIKKQIKLLKVKKEKLIDLYVEGLIDKEMFSKRDLNFENEIKEQELALLKLTDQNKRNKEEKKIKEAFSMLDEEKDMHEVFKTLIKKITLSKDKYIDIEYTFSL

SEQ ID NO: 11788 - protein, 481 aa, Unknown
  Description of Unknown: Integrase A356 sequence
  PF07508,SSF53041,PF13408,PS51737,cd00338, PTHR30461:SF3,PF00239,PS51736,SM00857,G3DSA:3.40.50.1390, PTHR30461
MEESTSVERQREIIETWARQNDHEIIGWAEDLDVSGSVDPFETPALGPWLTDHRKHEWDILVAWKLDRLSRRAIPMNKLFGWVMENDKTLVCVSENLDLSTWIGRMIANVIAGVAEGELEAIRERTKGSQKKLRELGRWGGGKPYYGYRAQEREDAAGWELVPDEHASAVLLSIIDKVLEGQSTESIARELNERGELSPSDYLRHRAGKPTRGGKWSNAHIRQQLRSKTLLGYSTHNGETIRDERGIAVRKGPALVSQDVFDRLQAALDSRSFKVTNRSAKASPLLGVLICRVCERPMHLRQHHNKQRGKTYRYYQCVGGVEKTHPANLTNADQMEQLVEESFLAELGDRKIQERVYIPAESHRAELDEAVRAVEEITPLLGTVTSDTMRKRLLDQLSALDARISELEKMPESEARWDYREGDETYAEAWNRGDAEERRQLLIKSGITAAAEMKGREARVNPGVLHFDLRIPDDILERMAG

SEQ ID NO: 11789 - protein, 481 aa, Unknown
  Description of Unknown: Integrase A357 sequence
  PF07508,G3DSA:1.10.10.2600,SSF53041,PF13408,PS51737,cd03768, PTHR30461:SF3,PF00239,PS51736,SM00857,G3DSA:3.40.50.1390, PS00397,PTHR30461
MKTMNKVAIYVRVSTTSQVEEGYSIDEQKAKLSSYCDIKDWNVYKVYTDGGFSGSNTDRPALESLIKDAKKRKFDTVLVYKLDRLSRSQKDTLHLIEDVFIKNGIEFLSLQENFDTSTPFGKAMIGLLSVFAQLEREQIKERMQLGKLGRAKSGKSMMWAKTSYGYDYHKETGTVTINPAQALTIKFIFESYLRGRSITKLRDDLNEKYPKHVPWSYRAVRTILDNPVYCGFNQYKGEIYPGNHEPIISKEEYDKTQSELKIRQRTAAENVNPRPFQAKYILSGIAQCGYCGAPLKIMLGVKRKDGSRLKKYECHQRHPRTLRGVTTYNDNKKCDSGFYYKDKLEASVLKEISKLQDDADYLDKIFSGDNAETIDRESYKKQIEELSKKLSRLNDLYIDDRITLEELQSKSAEFISMRGTLETELENDPALRKNKRKADMRKLLNAEKVFSMDYENQKVLVRRLINKVKVTAEDIVINWKI

SEQ ID NO: 11790 - protein, 481 aa, Unknown
  Description of Unknown: Integrase A358 sequence
  PF07508,G3DSA:1.10.10.2600,SSF53041,PF13408,PS51737, cd03768,PTHR30461:SF3,PF00239,PS51736,SM00857, G3DSA:3.40.50.1390,PS00397,PTHR30461
MITTNKVAIYVRVSTTNQVEEGYSIDEQKDKLSSYCDIKDWNVYKVYTDGGFSGSNTDRPALESLIKDAKKRKFDTVLVYKLDRLSRSQKDTLHLIEDVFIKNGIEFLSLQENFDTSTPFGKAMIGLLSVFAQLEREQIKERMQLGKLGRAKSGKSMMWAKTSYGYDYHKETGTVTINPAQALTIKFIFESYLRGRSITKLRDDLNEKYPKHVPWSYRAVRTILDNPVYCGFNQYKGEIYPGNHEPIISKEEYDKTQSELKIRQRTAAENVNPRPFQAKYILSGIAQCGYCGAPLKIMLGVKRKDGSRLKKYECHQRHPRTLRGVTTYNDNKKCDSGFYYKDKLEAYVLKEISKLQDDADYLDKIFSGDNAETIDRESYKKQIEELSKKLSRLNDLYIDDRITLEELQSKSAEFISMRGTLETELENDPALRKNKRKADMRKLLNAEKVFSMDYESQKVLVRRLINKVKVTAEDIVINWKI

SEQ ID NO: 11791 - protein, 481 aa, Unknown
  Description of Unknown: Integrase A359 sequence
  PF07508,G3DSA:1.10.10.2600,SSF53041,PF13408,PS51737,cd03768, PTHR30461:SF3,PF00239,PS51736,SM00857,G3DSA:3.40.50.1390,PS00397 ,PTHR30461
MKTMNKVAIYVRVSTTNQVEEGYSIDEQKDKLSSYCDIKDWNVYKVYTDGGFSGSNTDRPALESLIKDAKKRKFDTVLVYKLDRLSRSQKDTLHLIEDVFIKNGIEFLSLQENFDTSTPFGKAMIGLLSVFAQLEREQIKERMQLGKIGRAKAGKSMMWAKTSYGYDYHRETGTITINPAQALTIKFIFESYLRGRSITKLRDDLNEKYPKHVPWSYRAVRTILDNPVYCGFNQYKGEIYPGNHESIISKEEYDKTQSELKIRQRTAAENVNPRPFQAKYILSGIAQCGYCGAPLKIMLGVKRKDGSRLKKYECHQRHPRTLRGVTTYNDNKKCDSGFYYKDKLEAYVLTEISKLQDNAGYLDKIFSGDNAETIDRESYKKQIEELSKKLSRLNDLYIDDRITLEELQSKSAEFISMRGTLETELENDPALRKNKRKADMRKLLNAEKIFSMDYEGQKVLVRGLINKVQVTAEDIVINWKI

SEQ ID NO: 11792 - protein, 481 aa, Unknown
  Description of Unknown: Integrase A360 sequence
  PF07508,G3DSA:1.10.10.2600,SSF53041,PF13408,PS51737, cd00338,PF00239,PS51736,SM00857,G3DSA:3.40.50.1390, PTHR30461
MKYAVYVRVSTDRDEQVSSVENQIDICRYWLEKNGYEWDPNAVYFDDGISGTAWLERHAMQLILEKARRNELDTVVFKSIHRLARDLRDALEIKEILIGHGIRLVTIEENYDSLYEGGNDIKFEMFAMFAAQLPKTISVSVSAAMQAKARRGEFIGKPGLGYDVIDKKLVINEKEAEIVREIFDLSYKGYGFKKIANILNDKGTYTKFGQLWSHTTVGKILKNQTYKGNLVLNSYKTVKVDGKKKRVYTPKERLTIIEDHYPAIVSKELWNAVNSDRASKKKTKQDTRNEFRGMMFCKHCGEPITAKYSGRYAKGSKKEWVYMKCSNYIRFNRCVNFDPVHYDDIREAIIYGLKKQEKELEIHFNPKMHQKRNDKSTEIKKQIKLLKVKKEKLIDLYVEGLIDKEMFSKRDLNFENEIKEQELALLKLTDQNKRNKEEKKIKEAFSMLDEEKDMHEVFKTLIKKITLSKNKYIDIEYTFSL

SEQ ID NO: 11793 - protein, 481 aa, Unknown
  Description of Unknown: Integrase A361 sequence
  PF07508,SSF53041,PF13408,PS51737,cd00338,PTHR30461:SF3,PF00239, PS51736,SM00857,G3DSA:3.40.50.1390,PTHR30461
MEESTSVERQREIIETWARQNDHEIIGWAEDLDVSGSVDPFETPALGPWLTDHRKHEWDILVAWKLDRLSRRAIPMNKLFGWVMENDKTLVCVSENLDLSTWIGRMIANVIAGVAEGELEAIRERTKGSQKKLRELGRWGGGKPYYGYRAQEREDAAGWELVPDEHASAVLLSIIEKVLEGQSTESIARELNERGELSPSDYLRHRAGKPTRGGKWSNAHIRQQLRSKTLLGYSTHNGETIRDERGIAVRKGPALVSQDVFDRLQAALDSRSFKVTNRSAKASPLLGVLVCRVCERPMHLRQHHNKKRGKTYRYYQCVGGVEKTHPANLTNADQMEQLVEESFLAELGDRKIQERVYIPAESHRAELDEAVRAVEEITPLLGTVTSDTMRKRLLDQLSALDARISELEKLPESEARWEYREGDETYAEAWNRGDAEARRQLLLKSGITAAAEMKGREARVNPGVLHFDLRIPDDILERMSA

SEQ ID NO: 11794 - protein, 481 aa, Unknown
  Description of Unknown: Integrase A362 sequence
  PF07508,G3DSA:1.10.10.2600,SSF53041,PF13408,PS51737, cd03768,PTHR30461:SF3,PF00239,PS51736,SM00857, G3DSA:3.40.50.1390,PS00397,PTHR30461
MITTNKVAIYVRVSTTSQVEEGYSIDEQKAKLSSYCDIKDWSVYKIYTDGGFSGSNTDRPALEGLIKDAKKRKFDTVLVYKLDRLSRSQKDTLYLIEDIFIKNNIAFLSLQENFDTSTPFGKAMIGLLSVFAQLEREQIKERMQLGKIGRAKAGKSMMWAKTSYGYDYHRETGTITINPAQALAVKFIFESYLRGRSITKLRDDLNEKYPKHVPWSYRAVRTILDNPVYCGFNQYKGEIYPGNHESIISKEEYDKTQSELKIRQRTAAENVNPRPFQAKYILSGIAQCGYCGAPLKIMLGVKRKDGSRLKKYECHQRHPRTLRGVTTYNDNKKCDSGFYYKDKLEAYVLTEISKLQDNAGYLDKIFSGDNAETIDRESYKKQIEELSKKLSRLNDLYIDDRITLEELQSKSAEFISMRGTLETELENDPALRKNKRKADMRKLLNAEKIFSMDYEGQKVLVRGLINKVQVTAEDIVINWKI

SEQ ID NO: 11795 - protein, 481 aa, Unknown
  Description of Unknown: Integrase A363 sequence
  PF07508,G3DSA:1.10.10.2600,SSF53041,PF13408,PS51737,cd03768, PTHR30461:SF3,PF00239,PS51736,SM00857,G3DSA:3.40.50.1390,PS00397 ,PTHR30461
MKTTNKVAIYVRVSTTSQVEEGYSIEEQKDKLESYCKIKDWSVYKVYTDGGFSGSNTDRPALESLIKDAKKRKFDTVLVYKLDRLSRSQKDTLHLIEDVFIKNGIEFLSLQENFDTSTPFGKAMIGLLSVFAQLEREQIKERMQLGKIGRAKAGKSMMWAKTSYGYDYHRETGTITINPAQALAIKFIFESYLRGRSITKLRDDLNEKYPKHVPWSYRAVRTILDNPVYCGFNQYKGEIYPGNHEPIISKEEYDKTQSELKIRQRTAAENVNPRPFQAKYILSGIAQCGYCGAPLKIMLGVKRKDGSRLKKYECHQRHPRTLRGVTTYNDNKKCDSGFYYKDKLEAYVLTEISKLQDNAGYLDKIFSGDNAETIDRESYKKQIEELSKKLSRLNDLYIDDRITLEELQSKSAEFISMRGTLETELENDPALRKNKRKADMRKLLNAEKIFSMDYEGQKVLVRGLINKVQVTAEDIVINWKI

SEQ ID NO: 11796 - protein, 481 aa, Unknown
  Description of Unknown: Integrase A364 sequence
  PF07508,G3DSA:1.10.10.2600,SSF53041,PF13408,PS51737, cd03768,PTHR30461:SF3,PF00239,PS51736,SM00857, G3DSA:3.40.50.1390,PS00397,PTHR30461
MIATNKVAIYVRVSTTNQVEEGYSIDEQKDKLSSYCDIKDWNVYKVYTDGGFSGSNTDRPALESLIKDAKKRKFDTVLVYKLDRLSRSQKDTLHLIEDVFIKNGIEFLSLQENFDTSTPFGKAMIGLLSVFAQLEREQIKERMQLGKLGRVKSGKSMMWAKTSYGYDYHKETGTVTINPAQALTIKFIFESYLRGRSITKLRDDLNEKYPKHVPWSYRAVRTILDNPVYCGFNQYKGEIYPGNHEPIISKEEYDKTQSELKIRQRTAAENVNPRPFQAKYILSGIAQCGYCGAPLKIMLGVKRKDGSRLKKYECHQRHPRTLRGVTTYNDNKKCDSGFYYKDKLEAYVLKEISKLQDDADYLDKIFSGDNAETIDRESYKKQIEELSKKLSRLNDLYIDDRITLEELQSKSAEFISMRGTLETELENDPALRKNKRKADMRKLLNAEKVFSMDYENQKVLVRRLINKVKVTAEDIVINWKI

SEQ ID NO: 11797 - protein, 481 aa, Unknown
  Description of Unknown: Integrase A365 sequence
  PF07508,SSF53041,PS51737,cd00338,PF00239,PS51736,SM00857,G3DSA:3 .40.50.1390,PTHR30461
MNTSGGDRVALYARISQDTSGKAVGVADQLETARKFSADRGYDVVAEHSDNDISAFRGADRPGYQRVLKLARERKIDRVIVYQLTRMTRNRGERAEFIDAFHACKVNVSEAQGGDYDLSTAAGRSWVDIQGALATWESEIKSERVTAAAARRARSGRPSGDLGYGWIKHGTGASATWTEHPHEAEVVREIVDRLLAGETLRGITQSLNDRGEPAPKSASWGKTSVKKLALRESNVALRIHHRGQADEERFDGCWPALVDRAKHEKVGALLREPARQTNGTKRPGARKHLLSWGIGECGVCGGMLRVATKRGRYGRPLDLYVCDANNGCVGRSEPAVDNLVKTVVIKRLSRPDALEWLLGDDDEARRWAERVDELNRRLADAADAFADGAITGEQLRRITAKLQPDLDDALERARESAGALNVDVLRPLAGPEAAQRWDGMEMSQRRAVLEALGLRVIIDRTRRGPGFDPSSVRFVWGRSAD

SEQ ID NO: 11798 - protein, 481 aa, Unknown
  Description of Unknown: Integrase A366 sequence
  PF07508,G3DSA:1.10.10.2600,SSF53041,PF13408,PS51737, cd03768,PTHR30461:SF3,PF00239,PS51736,SM00857, G3DSA:3.40.50.1390,PS00397,PTHR30461
MITTNKVAIYVRVSTTNQAEEGYSIEEQKDKLKSYCNIKDWNVFNVYTDGGFSGSNTERPALEQLIKDAKKKKFDTVLVYKLDRLSRSQKDTLYLIEDIFLENNIDFVSLLENFDTSTPFGKAMVGILSVFAQLEREQIKERMQLGKLGRAKAGKSMMWAKVAYGYTYHKGSGEMTINELEAIVVREIFNSYLEGMSITKLRDKINDTYPKTPAWSYRIIRQILDNPVYCGYNQYKGEVYKGNHEPIISEEDFNKTQDELKIRQRTAAEKFNPRPFQAKYMLSGIAQCGYCKAPLKIIMGAVRKDGTRFIKYECYQRHPRTTRGVTTYNNNQKCHSSSYYKQDVEDYVLREISKLQNDKKAIDELFENTNMDTIDRESIKKQIEAISSKIKRLNDLYIDDRITIDELRKKSTEFTLSKTFLKEKLENDPILKQQESKDNIKKILSCDDILTMDYDQQKIIVKGLINKVQVTADKVIIKWKI

SEQ ID NO: 11799 - protein, 481 aa, Unknown
  Description of Unknown: Integrase A367 sequence
  PF07508,G3DSA:1.10.10.2600,SSF53041,PF13408,PS51737,cd03768, PTHR30461:SF3,PF00239,PS51736,SM00857,G3DSA:3.40.50.1390,PS00397 ,PTHR30461
MNAINKVAIYVRVSTNVQAEEGYSIDEQIDKLKSYCQIKDWTVYDVYKDGGFSGGNINRPALEKMIIDAKKKRFDTVLVYKLDRLSRSQKDTLFLIEDVFSKNDISFLSLQENFDTSTPFGKALVGLLSVFAQLEREQIKERMQLGMIGRAKSGKPMMFTNVSFGYTYSPKTQQLTINQAEAVIVKQIFNEFLGGMSPLRLMAYLNENNILRNGKEWNYQGIQRILRNPVYIGKIKYNNVIYPGLHEPIIDEESYYKAQKLLDARQDEMRIKGKNRQFKAKYMLSGTAKCGYCGAPLRIKIGNKRLDGTRLKVYQCCNRYPRKYAVVTYNDNKKCNSGNYQKEDLEQYVIAEIRKLQLKPEKIDKLFNKVSKIDTVQINKQIASIDNKINRLNDLYLNDMIDIDKLKADAEKFKEQKRVLEKELDKDLKIQEQEKNKEDFKKTIGFKDVTKLDYEEQSFIVKSLIDKILVKKGFIKILWKI

SEQ ID NO: 11800 - protein, 481 aa, Unknown
  Description of Unknown: Integrase A368 sequence
  PF07508,G3DSA:1.10.10.2600,SSF53041,PF13408,PS51737, cd03768,PTHR30461:SF3,PF00239,PS51736,SM00857, G3DSA:3.40.50.1390,PS00397,PTHR30461
MITTNKVAIYVRVSTTSQAEEGYSIEEQKAKLSSYCDIKDWSVYKIYTDGGFSGSNTDRPALEGLIKDAKKRKFDTVLVYKLDRLSRSQKDTLYLIEDVFIKNNIAFLSLQENFDTSTPFGKAMIGLLSVFAQLEREQIKERMQLGKIGRAKAGKSMMWAKTSYGYDYHRETGTITINPAQALAVKFIFESYLRGRSITKLRDDLNEKYPKHVPWSYRAVRTILDNPVYCGFNQYKGEIYPGNHEPIISKEEYDKTQSELKIRQRTAAENVNPRPFQAKYILSGIAQCGYCGAPLKIMLGVKRKDGSRLKKYECHQRHPRTLRGVTTYNDNKKCDSGFYYKDKLEAYVLEEISKLQDDADFLDKIFSGDNAETIDRESYKKQIEELSKKLSRLNDLYIDDRITLEELQSKSAEFISMRATLETELENDPALRKNKRKADMRKLLNAEKVFSMDYESQKVLVRGLINKVQVTAEDIVIKWKI

SEQ ID NO: 11801 - protein, 481 aa, Unknown
  Description of Unknown: Integrase A369 sequence
  PF07508,G3DSA:1.10.10.2600,SSF53041,PF13408,PS51737,cd03768, PTHR30461:SF3,PF00239,PS51736,SM00857,G3DSA:3.40.50.1390,PS00397 ,PTHR30461
MITTNKVAIYVRVSTTNQAEEGYSIEEQKDKLKSYCNIKDWNVFNVYTDGGFSGSNTERPALEQLIKDAKKKKFDTVLVYKLDRLSRSQKDTLYLIEDIFLENNIDFVSLLENFDTSTPFGKAMVGILSVFAQLEREQIKERMQLGKLGRAKAGKSMMWAKVAYGYTYHKGSGEMTINELEAIVVREIFNSYLEGMSITKLRDKINDTYPKTPAWSYRIIRQILDNPVYCGYNQYKGEVYKGNHEPIISEEDFNKTQDELKIRQRTAAEKFNPRPFQAKYMLSGIAQCGYCKAPLKIIMGAVRKDGTRFIKYECYQRHPRTTRGVTTYNNNQKCHSSSYYKQDVEDYVLREISKLQNDKKAIDELFENTNMDTIDRESIKKQIEAISSKIKRLNDLYIDDRITIDELRKKSTEFTLSKTFLEEKLENDPILKQQESKDNIKKILSCDDILTMDYDQQKIIVKGLINKVQVTADKVIIKWKI

SEQ ID NO: 11802 - protein, 480 aa, Unknown
  Description of Unknown: Integrase A370 sequence
  PF07508,G3DSA:1.10.10.2600,SSF53041,PF13408,PS51737, cd00338,PTHR30461:SF3,PF00239,PS51736,SM00857, G3DSA:3.40.50.1390,PS00397,PTHR30461
MRTALYIRVSTEDQAREGYSIQMQKEKLHAYCVSQGWDIEGFYIDDGYSAKDLDRPAMKRMIENIQQGLIDCVLVYRLDRLTRSVLDLHNLLKLFDEHDCKFKSATEVYDTTTATGRMFITFVAALAQWERENTAERVKANMQQMVHEGKYPGGKVNFGYRLEGKKIVIDEQEAAVVRKMFDLYLEGNGDNRTATLLNRMGHRTRQGRLWTGKQVRDVLTNQVYIGRFFYMDEYHDGIIPPIIEREKFETAQKMREGRRGKHPRQVASDYIFSGVLRCARCGRVMPGKLSNHTKKNGVYARRKYTCRGTFTKLCDMPMLDEQAIEEVFLQYIREIRDASAASEVAASYEQDSDHISRQIQDIETQLDEIKKRRKRLQLAFANEVISLEELKELTSEDRKIEKELQNKLEELKEQEESSEVSPQELIEILMQFGENWNHLSDKEKKNLISMFIKEIYVQAENTRPNRWRKRKVWIERVEFL

SEQ ID NO: 11803 - protein, 480 aa, Unknown
  Description of Unknown: Integrase A371 sequence
  PF07508,G3DSA:1.10.10.2600,SSF53041,PF13408, PS51737,cd00338,PF00239,PS51736, SM00857,G3DSA:3.40.50.1390,PTHR30461
MKYAVYVRVSTDRDEQVSSVENQIDICRYWLEKNGYEWDPNAVYFDDGISGTAWLERHAMQLILEKARRNELDTVVFKSIHRLARDLRDALEIKEILIGHGIRLVTIEENYDSLYEGGNDIKFEMFAMFAAQLPKTISVSVSAAMQAKARRGEFIGKPGLGYDVIDKKLVINEKEAEVVREIFDLSYKGYGFKKIANILNDKGTYTKFGQLWSHTTVGKVLKNQTYKGNLVLNSYKTVKVDGKKKRVYTPKERLTIIEDHYPAIVSKELWNAVNRDRASKKKTKQDTRNEFRGMMFCKHCGEPITAKYSGRYAKGSKKEWVYMKCSNYIRFNRCVNFDPVHYDDIREAIIYGLKQQEKQLEIHFNPKMHQKRNDKSTEIKKQIKLLKVKKEKLIDLYVEGLIDKEMFSKRDLNFENEIKEQELELLKLTDQNKRNKEEKKIKEAFSMLDEEDMHEVFKTLIKKITLSKDKYIDIEYTFSL

SEQ ID NO: 11804 - protein, 480 aa, Unknown
  Description of Unknown: Integrase A372 sequence
  PF07508,G3DSA:1.10.10.2600,SSF53041,PF13408,PS51737, cd03768,PTHR30461:SF3,PF00239,PS51736,SM00857, G3DSA:3.40.50.1390,PS00397,PTHR30461
MTMHKVAIYVRVSTTSQADEGYSIDEQKAKLTSYCDIKDWNIYEIYTDGGFSGSNTERPALEQLIRDAKRKLFDTVLVYKLDRLSRSQKDTLYLIEDVFLENDIEFVSLLENFDTSTPFGKAMIGLLSVFAQLEREQIKERMQLGKLGRAKSGKSMQWAKTSYGYDYIKETGTLSVNQYQALIVRKMFKWYLSGMSITKLRDALNEQYGQDKEWSYRTVRAILSNPVYCGYNQFKGQIFPGTHEPIISEEDFNKTQEEIKTRQRTAAQRFNPRPFQAKYMLSGIAQCGYCSAPLAIKLGMIRKDGTRLIKYECKQRHPRKTKGVTVYNNNEKCDSGFYFKDDIEHFVLTEISKLQTDSDYIDKLFSNTDKETIDRDSYQKQIDNLTAKISRLNDLYIDDRISLEELQKRSSDFMAERSALEKELDADNSIKTVERKKDIKRVLDTKDVLTLDYEQQKAIARALISKVRVTSETIVILWKL

SEQ ID NO: 11805 - protein, 479 aa, Unknown
  Description of Unknown: Integrase A373 sequence
  PF07508,G3DSA:1.10.10.2600,SSF53041,PF13408,PS51737,cd00338, PTHR30461:SF3,PF00239,PS51736,SM00857,G3DSA:3.40.50.1390,PS00397 ,PTHR30461
MNKVAIYVRVSTTSQAEEGYSIDEQIDKLSSYCKIKDWTVYDVYKDGGFSGGNIERPAMERLISDAKRKRFDTVLVYKLDRLSRSQKDTLFLIEEVFIKNNISFLSLNESFDTSTPFGKAMIGILSVFAQLEREQIKERLMLGKVGRAKSGKPMMFSSISFGYTYDKHAKELHINQAEAVIVKKIFSEYLSGRSLTNLRDYLNDNGFTRNGRYWDYQGLKRIMKNPVYIGMIRYNGVIYPGNHQAIIDAETFDKTQIELKKRQLQAAELQNNPRPFRAKYMLSGLLRCGYCSAPLTVVLSGKTKSGSRNIFYECYNRHPKIKKGRTIYNDGKKCNSGTYNKSYLEECILNEIRLLQLNPERIDDIYDVQPTIDVDSIENQIATLNKKLDKLNDLYLNDMVSMDVLKKQTHTLRQQKKILEHELENNNVEIIKNSKRIFIETLNISDVTKLDYNIQKNIANTLIKEIVVKNGEITIQWRI

SEQ ID NO: 11806 - protein, 479 aa, Unknown
  Description of Unknown: Integrase A374 sequence
  PF07508,G3DSA:1.10.10.2600,SSF53041,PF13408,PS51737, cd03768,PTHR30461:SF3,PF00239,PS51736,SM00857, G3DSA:3.40.50.1390,PTHR30461
MAKVAIYTRVSTTLQADEGYSLEEQINKLKSYCDIKDWTVYKVYSDGGFTGSNIERPAMTNLVSDAKAKKFDTVLVYKLDRLSRSQKDTLYLIEEVFIKNDINFLSLNENFDTSSAFGKAMIGILSVFAQLEREQIKERMMLGKVGRAKSGKSMMWGKSSYGYEYHKKNGSMEIVPGEAIIVKKIFELYVSGKSITKLRDYLNENNLLTNKKVKWSYQATRGILTNPVYCGLIRYDGQIYPGLHEPIISKEMFDLTQEIIKERQMTALTNCNPRPFKAKYMLSGIGRCGYCGAPLKIMLGRIRNDGTRTIRYDCTNRFPRKTKPITVYNDYKKCNSGYYYKDDVEKVVLDRIYSLQLDNADTDKIFGKDEIIDNSKIEKEIKQINLKIEKLNDLYLNDLISLEELKSKTTNLINQKKLLEDEITDRQKKKENPLKKQAIKTISNKNIYELSYEDQALIVKSLINRIYVKENEIQIEWKN

SEQ ID NO: 11807 - protein, 479 aa, Unknown
  Description of Unknown: Integrase A375 sequence
  PF07508,G3DSA:1.10.10.2600,SSF53041,PF13408,PS51737,cd00338, PTHR30461:SF3,PF00239,PS51736,SM00857,G3DSA:3.40.50.1390, PS00397,PTHR30461
MKAALYIRVSTQEQAIEGYSISSQRQKLTAYSYSQGWEIVDYYVDEGKSAKDLDRPELKRMLDDIKQHKIDVVLVYRLDRITRSVMDLYELLGIFDKYHCKFKSATEVYDTTSATGRLFITLVASMAQWERETIAERVSMGMAEKVRQGEWHGSEAPYGFYYNIETKELVIDESEAHVVRDIFTKYLDGLSDRKIAIYLNEKKVPTRKGARWRENRIRYILTNPIYIGNLRWGVRVNREQAFQVENAVPAIIDKETFEKAQMIRNSRRRFHGRQATSDFIFSGVLKCARCGSPMKGHTHKCKNKRNKSYRCIKVLFNECDMPLISERIIEYQFLKAVKELIFKEIKIETKSSDQHIDKEKIIKNLQTELNKIEERRKKWQYAWVNEMIDDNQFKDRMNEELIKEQEIKRKLEDINVEIEEFEMDNELKELMSDALENWIRLDDHEKKQLIQIAINKIIVEKIPSNKVLERAKILEIEFN

SEQ ID NO: 11808 - protein, 479 aa, Unknown
  Description of Unknown: Integrase A376 sequence
  PF07508,SSF53041,PF13408,PS51737,cd00338, PTHR30461:SF3,PF00239,PS51736,SM00857,G3DSA:3.40.50.1390, PTHR30461
MERQREFIETWARQNDHEIVGWAEDLDVSGSVDPFDTQGLGPWLKEPKLREWDILCAWKLDRLARRAVPLHKLFGMCQDEQKVLVCVSDNIDLSTWVGRLVASVIAGVAEGELEAIRERTLSSQRKLRELGRWAGGKPAYGFKAQEREGSAGYELVHDEHAANVMLGVIEKVLAGQSTESVARELNEAGELAPSDYIRARAGRKTRGTKWSNAQIRQLLKSKTLLGHVTHNGSTVRDDDGIPIRKGPALISEEKFDQLQAALDARSFKVTNRSAKASPLLGVAICGLCGRPMHIRQHRRNGNLYRYYRCDSGSHSGGGGAAPEHPSNIIKADDLEALVEEHFLDEVGGFNVQEKVYVPASDHRAELDEAVRAVEELTQLLGTMTSATMKSRLMSQLTALDERIARLENLPSEEARWDYRATDQTYAEAWEEADTEGRRQLLIRSGITAEVKVTGGDRGVRGVLEFHLKVPEDVRERLSA

SEQ ID NO: 11809 - protein, 479 aa, Unknown
  Description of Unknown: Integrase A377 sequence
  PF07508,G3DSA:1.10.10.2600,SSF53041,PF13408,PS51737,cd00338, PTHR30461:SF3,PF00239,PS51736,SM00857,G3DSA:3.40.50.1390, PS00397,PTHR30461
MNKVAIYVRVSTKGQADEGYSIDEQIALLTSYCSIHKWKIYDTYVDAGVSGATIERPELSRLSRDAKKKKFNTMIVYDLKRLGRSQRNNIAFIEDVLEKNGIGFISLTENFDTSSPLGKAMVGILSAFGQLDRDTIRERMMMGKIGRAKAGKPMMTSTIAFGYTYDRVTSSLNINQAEAIIVKTIYNEYILGRSLTKLRDYLNENGLLRNGKPWSYQGVSRILRNPVYKGMNRFRGEVYQGTHEPIISAELFDRTQKELKKRQIEAYKRNNNRRPFRAKYMLSGIIRCGVCGSPMEITLGFKRNDGTRNMRYQCINRFPRQTKGITVYNDAQKCDTGLYEKSDIEIHVLSQVRLLQLNKAKLESMFERTDVINVEDIQNQIETLNNKMRRLNDLYLNDMIDLDDLRSQTQNFLKQKELLENELENNPALNQEQDKEQFKELLGTKDITQLDYDKQKLIIKNLIDKVFVKPGNIEIKWRI

SEQ ID NO: 11810 - protein, 479 aa, Unknown
  Description of Unknown: Integrase A378 sequence
  PF07508,G3DSA:1.10.10.2600,SSF53041,PF13408,PS51737, cd03768,PTHR30461:SF3,PF00239,PS51736,SM00857, G3DSA:3.40.50.1390,PS00397,PTHR30461
MNKVAIYVRVSTKGQAEEGYSIDEQIALLTSYCSIHKWKIHDTYVDAGISGATIERPELSRLSRDAQKKKFNTMIVYDLKRLGRSQRNNISFIEDVLEKNGIGFISLTENFDTSTPLGKAMVGILSAFGQLDRDTIRERMMMGKIGRAKSGKPMMTSTIAFGYTYDKVTSSLNINPAEAIVVKIIYNEYLSGRSLTKLRDYLNENDLLRNGKPWNYQGVSRVLRNPVYMGMVRFRGEVYQGNHDPIIDSETFEAVQKELKKRQLETYEFNKNTRPFRAKYMLSGIIKCGYCGSPMGVTLGTKRKDGTRNIRYQCVNRFPRTTKGITVYNNGQKCNSGFYEKDDIEIYVLGQVRLLQLNKTKLNKMFETPEIINVEEIENQINSLNNKMKRLNDLYLNDMISLDELKTQTYTFLKQKDLLENELNNNPAIHQEENRKQFQKLLGTKDITQLSYEEQSFAIKNLIDKVFVKPGIIDINWRI

SEQ ID NO: 11811 - protein, 479 aa, Unknown
  Description of Unknown: Integrase A379 sequence
  PF07508,G3DSA:1.10.10.2600,SSF53041,PF13408,PS51737,cd00338, PTHR30461:SF3,PF00239,PS51736,SM00857,G3DSA:3.40.50.1390,PS00397 ,PTHR30461
MKTAVYIRVSTDEQVNEGYSISAQKQKLKAFCVSQGWDVVGLYADEGISAKDTNRPYLQRMIQDIKNGEIECVLVYRLDRLTRSVFDLYKLLEVFEQHDCKFKSATEVYDTTTAMGRMFITIVAALAQWERENMGERISFGFGEKIRQGKYPLNFAPLGYDLSKEESKLYINEKEAATVRIVYNLYQSGMGFGKVAKELNAQEIYTKDRNKWTDNTTMKTIRNPIYYGSMRWNGLIYKLKHEPILTYEEWSNTQEIIKARTSQTPRSVSSRYIFSGKLKCNGCGGPMQGYYTTSKAAGGGVNQYPQYRCRNKRNGKCSKSRSLSETKLEKAFLEYLENENYLDLYEKTADKGEKELNKKEPEVDIQQLKNNLNRIENRKKKWQYAWAEDAMSFNDFKRRMDEAQKEEDEIKEKIESAEVETEEPFSKNDIIKILKDIEQNWIMLNVQEKKNLVNSIIEEVRYDQTGKTVTIDRINFKKD

SEQ ID NO: 11812 - protein, 478 aa, Unknown
  Description of Unknown: Integrase A380 sequence
  PF07508,G3DSA:1.10.10.2600,SSF53041,PF13408,PS51737, cd00338,PTHR30461:SF3,PF00239,PS51736,SM00857, G3DSA:3.40.50.1390,PTHR30461
MRVCKYRRVSTDMQREEGVSLSTQDERLDAFIKSQGWTVVADYADEGFSAKNMDRPAIQQLIQDLKRDKFDVVLVYRLDRLVRSVSDLHELLQIMDKHDVKFKSCTEVFDTTSATGRMFITIIATLAQWERETIAERVFDNMLARSEKGMRNGAPAPYGYIYKDGSLELVKEEAKWVKFIFDKYKTTGSQNIAKTLNKRGIKTRKGEVWSDFSIRYLLRNPIYAGYVRWNYRSLAKGKCTGDEVIQKIDQDNFQAIITKEEFDEIQILIKERSTVAFRSDNFYPYSGVAKCAKCGNSLTGAFKNKKSGGIYRFYKCAGRFRTGICDAPVISEEAIDIALMKCLDLPEFDLKYEEQNKIDREQLEKELTKIELKKSRIKELYLDGDISKNEYRKRMDSLIDDEIRIQKKLEIEEIEATYEEVLEWMSLIKESWNELSFETRKAAIRTIFSSLTVKIIKDPVFGRYPQLPVVEITNYKLK

SEQ ID NO: 11813 - protein, 478 aa, Unknown
  Description of Unknown: Integrase A381 sequence
  PF07508,G3DSA:1.10.10.2600,SSF53041,PF13408,PS51737,cd03768, PTHR30461:SF3,PF00239,PS51736,SM00857,G3DSA:3.40.50.1390, PS00397,PTHR30461
MNKVAIYVRVSTTNQAEEGYSIEEQIDKLKAYCMIKDWSVYDIYVDAGFSGSNIKRPAIQKLIKDTKRKVFDTVLVYKLDRLSRSQKDTLYLIEDVFLENKIDFVSLLENFDTSTAFGKAMVGILSVFAQLDREQIKERMQLGKLGRAKSGKPMMWAKVAYGYTYHIGTGKMTVNQSEAIIVKEVFSSYLNGRSITKLRDDLNEKYPKTPAWSYRTIRQMLDNPVYCGYNKYKGQVYPGNHAPIISKEIYNQVQDELKIRQQKAYEHNNNYRPFQSKYMLSGIAQCGYCKAPLKITLGTIRKDGTRFKRYQCVQRTPRKTKGATVYNNNEKCNSGFYEKDDIEAYVLESISKLQTDSNCIDELFNDEPEKLDRDALNKEIETLSNKISRLNDLYINNLITLDDLKTKTDTLQSKIDILKEKLEKDPALERQKNKQKMLKKLDTKDIFKMDYEEQKMLVRALINKVQVTADSIKILWKI

SEQ ID NO: 11814 - protein, 478 aa, Unknown
  Description of Unknown: Integrase A382 sequence
  PF07508,G3DSA:1.10.10.2600,SSF53041,PF13408,PS51737, cd03768,PTHR30461:SF3,PF00239,PS51736,SM00857, G3DSA:3.40.50.1390,PS00397,PTHR30461
MNKVAIYVRVSTTNQADEGYSIDEQIDKLKAYCEIKDWVVYKVFTDAGFTGSNIERPAMTKLISAAKKKQFDTILVYKLDRLSRSQKDTLYLIEEIFIKNGIDFLSLSENFDTSSAFGKAMIGILSVFAQLEREQIKERMMLGKVGRAKSGKTMMWAHPAYGYTYNKETSSLDIVPAEAALIKKIYELYIKGKSISKLRDYLNDNKIFVNKSVPWSHRTISYALTNPVYCGMIRYEGKLYDGLHEPIITKELFNKTQEVLAERRMEASKKNPRPFQSKYMLSGIIRCGCCNAPMKSLLGMPRKDGTRTRRYQCINRFPRKTKPVTVYNDNKKCDSGYYYMEDVEHAVLHRISTLYSDEIEASEFFEDEITFDIQKVKDEITKIESKINKLNDLYINDFISLDSLKKQSANLINEKKIIENEIEKENSKQVNNLKEDALKILATNNIHDLDYEMQSYVVKSLIDKVFVTKEDMEILFKK

SEQ ID NO: 11815 - protein, 478 aa, Unknown
  Description of Unknown: Integrase A383 sequence
  PF07508,G3DSA:1.10.10.2600,SSF53041,PF13408,PS51737,cd03768, PTHR30461:SF3,PF00239,PS51736,SM00857,G3DSA:3.40.50.1390,PS00397 ,PTHR30461
MKTTNKVAIYVRVSTTSQAEEGYSIDEQLFSLRKYCEAMNWQVYHEYVDAGFSGGKLDRPEITQLIQDAKNKLFDTILVYKLDRLSRSVPDTLYLVRDVFGKRDIGFVSLQENIDTSSAMGNLFITLLSAIAEFEREQITERMEMGKLGRAKSGKTMAWRVTAFGYDYNKETGNLELDPVKAPLVKMVFDEYMQGTSIDNIADKMNSLDYTGKDRPWAHHGVASLLDNPVYYGMNRYKDKIYKGNHEPVITKELFDLVQKERERRRQGTPESHNTPPWQRKYFATKVCRCGLCGERMKLDRGKKRKKDGFTPMVYYCKNSRPYRNATCHNVLYQRDIVEDYIIHEVAKIQNNPNILKRGEYRTKEYELERQRKQLNETIKRNTDKLSKLNNLYLNDLITLEDLKKQSDLLIKRKRYSEERLALTYQTTEDDEREYRLKSFLAFPDLLTADYETQRKAVEMIVDRVELTKDKYIIHYNF

SEQ ID NO: 11816 - protein, 477 aa, Unknown
  Description of Unknown: Integrase A384 sequence
  PF07508,SSF53041,PS51737,cd00338,PTHR30461:SF3, PF00239,PS51736,SM00857,G3DSA:3.40.50.1390,PTHR30461
MAGQRVLGRIRLSRLTEESTSAARQRELIQQWADMNEHTVVGWAEDLDVSGSIDPFDSPSLGPWFREDKRDEWDILVAWKLDRIGRRAIALNRVFGWMMDHNKTLVCVSDNIDLSTWVGRLVANVIAGVAEGELEAIRERTRAGRKKILESGRWPGGVVPYGLRPVPNPGGGWKLEVDPEPASVIHRIVEEIIAGSAVEAVANRLDEDGIPAPKGGTWLPSTIWKLCGSNHLLGHARYGGKSVRDAEGRPVLNAEPILTWDQWDALQRALEARRRGGSRTRDTSPLLGVAVCYECDKPLFHKIYKRDYGRRLYRYYHCRDKTHNQQVEAEVVETLLEESFLQRIGDLPVLERVFIPSENHEIELEEARRAIEELTPLLATVTSATMRKSLLEQLSALDSRLTELEALPTREAHWEYRETGQTYAEAWKEADTEGRRQILLRSGITLAVILAGKARNSGGSLKFDFRVPEDIEKRLSA

SEQ ID NO: 11817 - protein, 477 aa, Unknown
  Description of Unknown: Integrase A385 sequence
  PF07508,G3DSA:1.10.10.2600,SSF53041,PS51737,cd00338, PTHR30461:SF21,PF00239,PS51736,SM00857,G3DSA:3.40.50.1390 ,PTHR30461
MEATTKAAVYLRQSIDRTGEGLAVDRQREDCLKLCEDKGWEPVEYVDNDVSASTGKPRPAYKQMLADIRSGAVQAVVAWNLDRLHRRPIELEEFIELANKHKVALATVSGDTDLSTDSGRFYARMLGVVARHEMERKSARQKAAHRQRVKQGRPWWSGPPPFGYEADEGHENIRINKEEAKLIRKAYRDVLKGVAIHTIAKEWNAQGVKTRRGNDWAGPTVRQFLANPRNAGLKVYLGEVVGKAPWPAIIDEATYKSYMAYVKAPGRGPGKPLARKHLLSGIARCGRCGGRMGVGMTGRKYYDENGKEHRVDTYACKICFKVSRDRRKTDEVVRAVMIKLLSQPDALALAARPELPNVQELLEEANTIRDRMDNLAVEFADGGITASQMRIANERLQDRLEEVERKLVDVNSRRVLDGVIGVKDVAARWDSLPVERRRAIVETIATVTIQPTVRGRPFDPSLIEIRRRFPEEAPNGL

SEQ ID NO: 11818 - protein, 477 aa, Unknown
  Description of Unknown: Integrase A386 sequence
  PF07508,G3DSA:1.10.10.2600,SSF53041,PF13408,PS51737, cd00338,PTHR30461:SF3,PF00239,PS51736,SM00857, G3DSA:3.40.50.1390,PS00397,PTHR30461
MMNRNKVAIYVRVSTQGQVDEGYSLDEQVDLLTNYCKLKAWTLYDVYVDPGISGKNMHRPEIERLTRDAKHKLFDIVLIYDLKRLGRSQKENIVLVEDVFNKNGIRLVSFTENFDASTPVGKMVFGMLSAYAELDRANIAERMMMGKIGRAKAGKAMSWGMPPFAYDYNKETGNLELDEAKAPIVEMIFSDYLKGASVNQIVQKLNSMDYNGKDHEWKHHAVTVILENPSYCGMTRYIDQIYEANHKPIIDKVTFDLVQIERKKRLSKYHDNDLVGPFQRKYIGSKFCYCGLCGANLKSEKDKRNKHTGIRPISFYCPNTRSRGTNDCTNKRFRQDILEGYILKEVAKLQQQPEKLRVIKPKKDAENESKLDNYKNKIRQNTSKLSKLNELYINDLMPIDELKKRSKTLYDENEFLEKQIEQLSSTTREDELRNKIDTFLAFPDILTADYETQKQAIEIVVSRVEVTKNGIDIFFNF

SEQ ID NO: 11819 - protein, 477 aa, Unknown
  Description of Unknown: Integrase A387 sequence
  PF07508,G3DSA:1.10.10.2600,SSF53041,PF13408,PS51737,cd03768, PTHR30461:SF3,PF00239,PS51736,SM00857,G3DSA:3.40.50.1390, PS00397,PTHR30461
MITTRKVAIYVRVSTTNQAEEGYSIQGQIDSLIKYCEAMGWIIYEEYTDAGFSGGKIDRPAMSKLITDAKHKRFDTILVYKLDRLSRSVRDTLYLVKDVFNQNNIHFVSLQENIDTSSAMGNLFLTLLSAIAEFEREQITERMTMGKIGRAKSGKTMAWTYTPFGYDYNKEKGELILDPAKAPIVKMIYTDYLKGMSIQKIVDKLNKMDYNGKDCTWFPHGVKHLLDNPVYYGMTRYNNKLFPGNHQPIITKELFDKTQRERQRRRLGIEENHYTIPFQAKYMLSKFLRCRQCGSRMGLELGRPRKKEGKRSKKYYCLNSRPKRTASCDTPLYDAETLEDYVLHEIAKIQKDPSIASRQKHIEDHELKYKRERIEANINKTVNQLSKLNNLYLNDLITLEDLKTQTNTLIAKKRLLENELDKTCDNDDELDRQETIADFLALPDVWTMDYEGQKYAVELLVQRVKVDRDNIDIHWTF

SEQ ID NO: 11820 - protein, 476 aa, Unknown
  Description of Unknown: Integrase A388 sequence
  PF07508,G3DSA:1.10.10.2600,SSF53041,PS51737,cd00338, PF00239,SM00857,G3DSA:3.40.50.1390,PTHR30461
MHFMQNRGSGPDAECDIYVRISQDLTGDELGVQRQEQRCRALAAQLKLNVRHVWVDNDLSATKKSVVRPDFEAMLQSKPQAIVCWHTDRLIRVTRDLERVIELGVNVYAVEAGHLDLSTPAGRAVARTVTAWATYEGEQKAARQKLANQQAAQQGRPYTAGIRPFGYADDHMTLIAEEAAAIVEGAQMILGGESLSAVARKWTESGLQSPRSKVTGANGWTLRGVKNVLTSPRYIGQSTYLGEVMGEGQWPPILDPEVYYSVVAILNNPERFSGGKRTGRTPDNLLSGIALCGYDGCTDTVNARGYRGVPVYGCGLTHTRTPRSIADDRASKATLARLMFPDFLGQILETQNAQDGHSGAQLQSQAQELRERLDGLAVAYAEGTISLSQMTAGSAALQKKLEAIESELVSAAGIPPLDPVKGVAGLIEGWPTLPLPTRRAWVDFCCIVTLNPARGRHMSSMTADDHVTIEWRDVSE

SEQ ID NO: 11821 - protein, 476 aa, Unknown
  Description of Unknown: Integrase A389 sequence
  PF07508,SSF53041,PS51737,cd00338,PTHR30461:SF3,PF00239,PS51736, SM00857,G3DSA:3.40.50.1390,PTHR30461
MYPFDMRVLGRIRLSRITEESTSAARQREIIQQWSDMNDHQIVGWAEDLDVSGSIDPFETPALGPWLAEDRRDEWDILVSWKLDRVGRRAIPLNRLFGWMLEHDKTLVCVNDNIDLSTWVGRLVANVIAGVAEGELEAIRERTKAGRQAVLRAGRWPGGPTPYGLRPARADVGARLEIVPEQAEVIHRIVREVCAGSSIEAVANRLNEDGVPSPKNGEWLPSTLWKIVTAKYLLGHATYEGNTVYDAEGRPVLNADPILTQDEWDDLQAAVAARRVNYTVRSKTTSPLHGVVYCLICDLPMFHKRMDRPYGKRHYRYYHCRDKQHGVFIDAEQVESAVEDTFIHVLGDVTVKERAWLPAEDHELEREEAERAIDDISALLGTMTSETVRSRLSTQLAALDSRLRELEGLPSREARWEYRETGQTYADAWREADTEERRQLLLRSGITAAVHVRGKTRNSGGAWEFEFRIPDAVKSL

SEQ ID NO: 11822 - protein, 476 aa, Unknown
  Description of Unknown: Integrase A390 sequence
  PF07508,G3DSA:1.10.10.2600,SSF53041,PS51737,cd00338, PF00239,SM00857,G3DSA:3.40.50.1390,PTHR30461
MSFMQNRGSGQVAECDIYVRISQDLTGDEYGVQRQEKRCRALAAQLGLNVRHVWVDNDLSATKKNVVRPDFEALLQSNPQAIVCWHTDRLIRVTRDLERVIELGINVYAVEAGHLDLSTPAGRAVARTVTAWATYEGEQKAARQKLANQQAAQQGRPYTAGIRPFGYGDDHMTIIADEAAAIVEGAQMILAGESLSAVARKWDEAKLQSPRSKVTGAKGWTLRGVKQVLTSPRYAGMATYLGEVMGQAQWPPILDPEVHYSVVAILNSPERFSGGKRTGRTPGTLLAGIGQCGYDGCTDTVNGRGYRGVLVYGCKDTHTRTPRSIADDRVSKATLARLMFPDFLGQILESQNAQDGQSGAQLHSQAQELRDRLDGLAVAYAEGAISLSQMTAGSTALQKKLEEIESQMVSSAGIPPLDPVKGIAGLIEGWPTLPLPTRRAWVDFCCIVTLNPAKGRHLTSMSVDDHVTIEWRDVSE

SEQ ID NO: 11823 - protein, 476 aa, Unknown
  Description of Unknown: Integrase A391 sequence
  PF07508,G3DSA:1.10.10.2600,SSF53041,PS51737,cd00338, PTHR30461:SF21,PF00239,SM00857,G3DSA:3.40.50.1390 ,PTHR30461
MRGMNNRGSGSEAEADLYLRISQDVTGDELGVQRQETKCRELCKQLGLNVRHVWVDNDLSATKKSVVRPDFEAMLRSQPQAIVCWHTDRLIRVTRDLERVIELGVNVYAVEAGHLDLSTPAGRAVARTVTAWATYEGEQKAARQKLANQQAAQQGRPYTAGIRPFGYGDDHMTIMAEEAAAIVDGANMILAGESLSAVARKWSEAGLQSPRSKAAEAKGWTLRGVKKVLTSPRYIGQSTYLGEVMGKAQWPPILDPEIHYGVVAILNNPERFSGGRRTGRVAATLLAGIGQCGYDGCDDTVNGRGYRGVPVYGCGLTHTRTPRSIADDRASKATLARLMFPDFLGQILSSQNAQDGTSSAALQAEAEELRKRLDGLAMAYAEGAISLSQMTAGSGALQKKLEAIDAELVSSAGIPPLDPVKGVAGLIEGWPGLPLPTRRAWVDFCCVVTLNPAKGRHLTSMTTDDHVSIEWRDVEE

SEQ ID NO: 11824 - protein, 474 aa, Unknown
  Description of Unknown: Integrase A392 sequence
  PF07508,G3DSA:1.10.10.2600,SSF53041,PS51737,cd03768, PF00239,PS51736,SM00857,G3DSA:3.40.50.1390,PS00397, PTHR30461
MNLMDENTPKNVGIYVRVSTEEQAKEGYSISAQKEKLKAYCISQGWDSYKFYIDEGKSAKDIHRPSLELMLRHIEQGIIDTVLVYRLDRLTRSVRDLYSLLDYFDKYQAVFRSATEVYDTGSATGRLFITLVAAMAQWERENLGERVKMGQVEKARQGQFSAPAPFGFTKEGESLVKNPEEGEVLLDMIDKIKKGYSLRELADYLDESDAIPKRGYKWHIASILVILKNPVLYGGFRWAGEILEGAFEGYISKKEFEQLQKMLHDRQNFKRRETSSIFIFQAKILCPNCGSRLTCERSIYFRKKDNKNVESNHYRCQACALNKKPAIGISEKKFEKALIEYMQNANFKREPKIPQEKQQDYDKLHQKIISIEKQRKKYQKAWSMELMTDQEFEQLMAETKEALQKALAKLEQNDLHPIEKPLNIERAKELAKMFRENWSVLTGEEKRQTVQELIKHIEFEKKDNKARILDIHFY

SEQ ID NO: 11825 - protein, 474 aa, Unknown
  Description of Unknown: Integrase A393 sequence
  PF07508,G3DSA:1.10.10.2600,SSF53041,PF13408,PS51737,cd00338, PTHR30461:SF3,PF00239,PS51736,SM00857,G3DSA:3.40.50.1390, PS00397,PTHR30461
MKCVAYIRVSTDEQAKHGYSIAAQKERLEAYCVSQEWDLIDTFVDDGYSAKDLNRPHFKEMMERVKNDDIDVLLVYRLDRLTRSVLDLYEILKILDTHNCMFKSATEVYDTTNAMGRLFITLVAAIAQWERENTAERVKLGMEKKTKLGKWKGGMPPYGYKILNKELEVNQDEEPLIKYIFHLSKTLGFYTIAKKLTEQGFTTRKGGDWHVDTVRDIANNPIYAGYLTFNDPKDSKKPPRQQTLYDGQHSRIIPREEFWSLQDLLDKRRTFGGKRETSNYYFSSVLRCARCGSSMSGHKGSQGVKTYRCSGKKAGKKCTSHIIKEDNLVLTVLNSLEEITKQIIGDTNQNNISQQKITELETELKLIQKLMKKQKVMFENDVISINELIAKTENLRHQEKQLSEEISKYQKANNTNTEEIKFIMENIHSLWNDANDFERKQIISTIFNQLVIDTEDEYKRGTGASRKIIIVSAK

SEQ ID NO: 11826 - protein, 473 aa, Unknown
  Description of Unknown: Integrase A394 sequence
  PF07508,G3DSA:1.10.10.2600,SSF53041,PS51737,cd00338, PF00239,SM00857,G3DSA:3.40.50.1390,PTHR30461
MNHRGSGPDAETDIYVRISQDLTGDELGVQRQEERCRALCAQLGLKVRHVWVDNDLSATKKDVVRPDFEAMLQSKPQAIVCWHTDRLIRVTRDLERVIELGINVYAVEAGHLDLSTPAGRAVARTVTAWATYEGEQKAARQKLANQQAAQQGRPYTAGIRPFGYGEDHMSIMAEEAAAIVEGAQMILAGESLSAVARRWDEAKLQSPRSKVTGAKGWTLRGVKKVLTSPRYVGQSTYLGEVMGEAQWPPILDPEVHYSVVAILNSPERFSGGKRTGRTPGTLLAGIGLCGYDDCTDTVNGRGYRGVPVYGCTATHTRTPRSIADDRASKATLARLMFPDFLGQILETQSAQDGRSGAQLQSQAQELRNRLDGLAVAYAEGSISLSQMTAGSTALQKKLEEIESEMVSSAGIPPLDPVKGVAGLIEGWPGLPLPTRRAWVDFCCIVTLNPAKGRHMTSMSVDDHVTIEWRDVEE

SEQ ID NO: 11827 - protein, 473 aa, Unknown
  Description of Unknown: Integrase A395 sequence
  PF07508,G3DSA:1.10.10.2600,SSF53041,PS51737,cd00338,PF00239, SM00857,G3DSA:3.40.50.1390,PTHR30461
MQNRGSGQVAECDIYVRISQDLTGDEYGVQRQEKRCRALAAQLGLNVRHVWVDNDLSATKKNVVRPDFEALLQSNPQAIVCWHTDRLIRVTRDLERVIELGINVYAVEAGHLDLSTPAGRAVARTVTAWATYEGEQKAARQKLANQQAAQQGRPYTAGIRPFGYGDDHMTIIADEAAAIIEGAQMILAGESLSAVARAWDEAKLQSPRSKVTGAKGWTLRGVKQVLTSPRYAGMATYLGEVMGRAQWPPILDPEVHYSVVAILNSPERFSGGKRTGRTPGTLLAGIGQCGYDGCTDTVNGRGYRGVLVYGCKDTHTRTPRSIADDRASKATLARLMFPDFLGQILESQNAQDGPSGAQLQSQAQELRDRLDGLAVAYAEGAISLSQMTAGSTALQKKLEEIESQMVSTAGIPPLDPVKGIAGLIEGWPNLPLPTRRAWVDFCCIVTLNPAKGRHLTSMTVDDHVTIEWRDVEE

SEQ ID NO: 11828 - protein, 473 aa, Unknown
  Description of Unknown: Integrase A396 sequence
  PF07508,G3DSA:1.10.10.2600,SSF53041,PS51737,cd00338, PF00239,SM00857,G3DSA:3.40.50.1390,PTHR30461
MQNRGSGQVAECDIYVRISQDLTGDEYGVQRQEKRCRALAAQLGLNVRHVWVDNDLSATKKNVVRPDFEALLQSNPQAIVCWHTDRLIRVTRDLERVIELGINVYAVEAGHLDLSTPAGRAVARTVTAWATYEGEQKAARQKLANQQAAQQGRPYTAGIRPFGYGDDHMTIIADEAAAIVEGAQMILAGESLSAVARKWDAAKLQSPRSKVTGAKGWTLRGVKQVLTSPRYAGMATYLGEVMGQAQWPPILDPEVHYSVVAILNSPERFSGGKRTGRTPGTLLAGIGQCGYDGCTDTVNGRGYRGVLVYGCKDTHTRTPRSIADDRASKATLARLMFPDFLGQILESQNAQDGQSGAQLQSQAQELRDRLDGLAVAYAEGAISLSQMTAGSTALQKKLEEIESQMVSSAGIPPLDPVKGIAGLIEGWPTLPLPTRRAWVDFCCIVTLNPAKGRHLTSMSVDDHVTIEWRDVSE

SEQ ID NO: 11829 - protein, 473 aa, Unknown
  Description of Unknown: Integrase A397 sequence
  PF07508,G3DSA:1.10.10.2600,SSF53041,PS51737,cd00338,PF00239, SM00857,G3DSA:3.40.50.1390,PTHR30461
MQNRGSGQVAECDIYVRISQDLTGDEYGVQRQEKRCRALAAQLGLNVRHVWVDNDLSATKKNVVRPDFEAMLQSKPQAIVCWHTDRLIRVTRDLERVIELGINVYAVEAGHLDLSTPAGRAVARTVTAWATYEGEQKAARQKLANQQAAQQGRPYTAGIRPFGYGDDHMTIIADEAAAIVEGAQMILAGESLSAVARKWDEAKLQSPRSKVTGAKGWTLRGVKQVLTSPRYAGMATYLGEVMGQAQWPPILDPEVHYSVVAILNSPERFSGGKRTGRTPGTLLAGIGQCGYDGCTDTVNGRGYRGVLVYGCKDTHTRTPRSIADDRASKATLARLMFPDFLGQILESQNAQDGQSGAQLQSQAQELRDRLDGLAVAYAEGAISLSQMTAGSTALQKKLEEIESQMVSSAGIPPLDPVKGIAGLIEGWPTLPLPTRRAWVDFCCIVTLNPAKGRHLTSMTVDDHVTIEWRDVSE

SEQ ID NO: 11830 - protein, 473 aa, Unknown
  Description of Unknown: Integrase A398 sequence
  PF07508,G3DSA:1.10.10.2600,SSF53041,PF13408,PS51737, cd03768,PTHR30461:SF3,PF00239,PS51736,SM00857, G3DSA:3.40.50.1390,PS00397,PTHR30461
MRNKVAIYVRVSTASQADEGYSIDEQKSKLEAYCEIKDWKIYDTYIDGGFSGANTQRPELERLISDAKRKKIDIVLVYKLDRLSRSQKDTLFLIEDVFAKNDVAFISLQENFDTSTPFGKASIGMLSVFAQLEREQIKERMMLGKEGRAKNGKSMSWTTIPFGYDYSKETGILSVNPTQALIVKRIFTEYLNGKSVVKIIRDLNAEGHVGRKRPWGETITKYLLKNETYLGKSKYKGKVFEGQHDAIISQELFDLVQLEVEKRQISAFEKYNNPRPFRAKYMLSGLMKCGYCGASLGLYVAPKNKNGVSKYKYQCRHRYHKDKAIRCNSGWYSKDELEKRVIKELERLKFDPKYKKETLAKKDETIKVEDIKKQLERINKQVSKLTELYLDEVITRKDLDEKNAKIKTERQYLEEQLENQKSNVMSIRKRKLSRLLKDFDIEKLSYEEASKIVKSVIKEIVVTKDDMTITLDF

SEQ ID NO: 11831 - protein, 473 aa, Unknown
  Description of Unknown: Integrase A399 sequence
  PF07508,G3DSA:1.10.10.2600,SSF53041,PF13408,PS51737,cd00338, PTHR30461:SF3,PF00239,PS51736,SM00857,G3DSA:3.40.50.1390, PTHR30461
MSPDKPLRAVGYVRLSKATDTSTSPERQRRDIARFIEARGWETVATVEDIDVSATRRRLDRPGIHELRRIFSRKAADVVVVSRLDRIARNVADVSTLLDEGIAIVSASEAFDTSTAQGRAMAQVAQVFAELEAKTIGLRVSSSRGHLPAIGRWPGGPTPYGFTTDELPGGGGRTLVHHPDEAPIVRRMVTRAIEGAGPSAIARELNADGIPSRRGVEWNVRTVGRILRHGSLRGYATVKGDKVRDEIGLPVVIWPPLITPEEARQLDAALARTPHPGSYGDGGPEPLLQGLALCSSCGSPMTPRHFRRPDLAAMYVCQSRNRGRLCDRPQTANAARLEGVAERLFLASYGRIPVVETVEEATVPDGLPEVLQAIEETTDAMRAPGADVMALAERLVALNGERERLKALPHTTTRSKATGELYADLWERSGTVERRELMRGLQAFVIVHPARARGHWNDDRVELVDYMAGQLDD

SEQ ID NO: 11832 - protein, 472 aa, Unknown
  Description of Unknown: Integrase A400 sequence
  PF07508,G3DSA:1.10.10.2600,SSF53041,PS51737,cd00338, PF00239,PS51736,SM00857,G3DSA:3.40.50.1390,PTHR30461
MGKRAVIYTRVSRDDTGEGQSNQRQETECRRLTDYRRMDVVAVEADISISASKGLERPAWLRVLGMVERGEVDYVIAYHMDRVTRSMTELEQLIEMCLKYEVGLATVSGDIDLTTDVGRMVARIIGAVARAEVERKAARQKLANAQRAAEGKPHVAGVRPFGYADDHRQVITIEAQAIRAAAEAALAGESMIGIAESWDQAGLHSARARRGHDKGSRPTKAGWSARGVRNVLVNPRYAGIRLYNGERVGQGDWEPILDVETHLRLVEKLTDPSRRKGTVKAGRTPTSLLTAIARCSVCEGTVRASSVRGRLTYSCRNSHAHVDREVADLMTQEWVIDRLAQPEVLAKLAPSGDDRVDQAKAVVEKRREALKTYARLLATGAMDEEQFIEASAVARREVEEAEAILSQAGTGDLLAGLDVGSDAVGPQFLALSLARQRGIVERLVDVTLLPASKARKVVTPEAERVVLADRAA

SEQ ID NO: 11833 - protein, 472 aa, Unknown
  Description of Unknown: Integrase A401 sequence
  PF07508,G3DSA:1.10.10.2600,SSF53041,PS51737,cd00338, PTHR30461:SF21,PF00239,PS51736,SM00857,G3DSA:3.40.50.1390 ,PTHR30461
MMNRGGPTIRADIYVRISLDRTGEELGVERQEESCRELCKSLGMEVGQVWVDNDLSATKKNVVRPAFEAMLVSNPQAIICWHTDRLIRVTRDLERVIDLGVNVHAVMAGHLDLSTPAGRAVARTVTAWATYEGEQKAERQKLANIQNARAGKPYTPGIRPFGYGEDHMTVVGDEADAIRDGAKMILDGWSLSAVARYWEELGLQSPRSMAAGGKGWSLRGVKKVLTSPRYVGRSSYLGEVVGDALWPPILDPDVYYGVVAILNNPERFSGGARTGRTPGTLLSGIGQCGYDDCKDTVGGRGYRGVLVYGCKDTHTRTPRSIADARASNATLARLMFPDFLPGLLASGQTESGESAASMHAEAQTLRERLDGLATAYAEGAINLSQMTAGSEALRKKLEIVEAELVGSAGIPPFDPVAGVAGLISGWPDLPLPTRRAWVDFCCVVTLNPQRGRHLSSMTVDDHVTIEWRDVAE

SEQ ID NO: 11834 - protein, 472 aa, Unknown
  Description of Unknown: Integrase A402 sequence
  PF07508,G3DSA:1.10.10.2600,SSF53041,PF13408,PS51737, cd00338,PTHR30461:SF3,PF00239,PS51736,SM00857, G3DSA:3.40.50.1390,PTHR30461
MIPMKIIGYVRLSRASREESTSVVRQREIIEKTCAARDFELVDIVEDVDVSATKTRLDRPGLSEVRERIRAGHADAVMVWRLDRIARSVVDFGVLLDDGLDIISATEPLDTASPMGRAMAEVLQVFARLEAKTIGVRISASQEHLRKVGRFPGGVIPYGYRAVPHPDGVGRALEPHPAEAAVVRRMADEVLAGDSVYAVTTRLNRDGIPARRGTKWSTTSVQRILRSNAVLGRVKVRGELLRDDATGLPSVVWEPLLSVAEVERLRALTDWTPTPGRSEATAEGKRRKASRLLSGLIFCPGCGYPLTAKSRHTTGAPIYVCEARARGRVCPGGIAIECERVEEEVARQFLAVVGRWSLVEPRISVREVSGLAAVEEALRSTTDALRAPDANLPALFERLTKLRTERDRLAALPEEPVVEMLETGRTFAEAWAETDTAGRRSLLLNSGVSISIARAPQRGKWNPERVSVAFHG

SEQ ID NO: 11835 - protein, 472 aa, Unknown
  Description of Unknown: Integrase A403 sequence
  PF07508,SSF53041,PF13408,PS51737,cd00338,PTHR30461:SF3,PF00239, PS51736,SM00857,G3DSA:3.40.50.1390,PTHR30461
MGAMRILGYVRLSRASREESTSVVRQREIIAKTCAARDFELVDIIEDVDVSATKTRLERPGLSEIRARIKAGEADAVMVWRLDRIARSVVDFGVLLDEGLDIISATEPLDTASPMGRAMAEVLQVFARLEAKTIGVRISASQEHLRRVGRFPGGVIPYGYRAVPHPDGVGRALEPHPEEAAVVRRMADEVLGGASVYAVTTGLNRDGIRPRRASEWTPTSVQRILRSNAVLGRVKVRGELLRDDATGLPLQVWEPILRVEEVERLRALTDWTPTPGRSEATAEGRRTKATRLLSGLIFCPGCGYPLTAKSRRSTGAPLYVCEARARGRVCPGGVAIECERVEEEVARQFLAVVGRWQAVEPRVSVREVSGLAAVEEALRATTDALRAPDADLPVLLERLTKLRAERDRLAALPEEPVVELVDSGRTFAQAWADQDVSGRRALLANSGAEITIERAPQRGKWSPERVRVAFHG

SEQ ID NO: 11836 - protein, 472 aa, Unknown
  Description of Unknown: Integrase A404 sequence
  PF07508,G3DSA:1.10.10.2600,SSF53041,PF13408,PS51737, cd03768,PTHR30461:SF3,PF00239,PS51736,SM00857, G3DSA:3.40.50.1390,PS00397,PTHR30461
MAKVAIYARVSTLNQADEGYSIQGQVESLTKYCEAMSWTIHDTYIDAGFSGGKLERPEINRLINDVKLKKFDTVLVYKLDRLSRNVKDTLFLVKEIFTDNDIHFVSLKENIDTSSAMGSLFLTLLSAIAEFEREQIKERMMFGKLGRAKSGKTMSWTTSPYGYTYDKEQGKLIAIPSQAIVVKKLFDYYISGMSIANMLRKMNAEEQIGRTAEWSINAMKNILRNEVYYGMVKYRGQLFKGEHEPFISKKTFELAQIERERRKQYFSKKFKNTSPFKAKYMLSGLLRCGCCSQPLISNVQRKSANGRTNIFYQCKERYNKDLSKRCTESGRFRKEILEEFVINELSKIKINNKYVENFSKDEPKIDINNLKKEINSIEQKLEKVSELYIDGIVTRDILIKKSEKLIKQKEFVQKQIDEMDTVSEKDKMNIIKKTIDRWNPEKTSYEDTTLLVRKLVKYIVVDEERIDIFLNF

SEQ ID NO: 11837 - protein, 472 aa, Unknown
  Description of Unknown: Integrase A405 sequence
  PF07508,G3DSA:1.10.10.2600,SSF53041,PF13408,PS51737,cd03768, PTHR30461:SF3,PF00239,PS51736,SM00857,G3DSA:3.40.50.1390,PS00397 ,PTHR30461
MIATNKVAIYVRVSTISQAEEGYSIDEQINKLKAYCDIKDWSIYDVYSDGGFSGASTNRPALERLINDAMKKEFDTVIVYKLDRLSRSQKDTLYLIEEIFNKYDIAFYSLAENFDTSTAFGKAMVGILSVFAQLEREQIKERMLLGKLGRAKAGHSMMWTNPPFGYRISKGDKVVSINPVQSVIVKRIFSEYIAGKPISKILTDLDTEGHVGRSKPWSLTTIKDILKNPTYWGKIRYQGELYDGLHEPIISEEEFKLAQVELRRRQDETFSRTNNPRPFQSKYMLSGLLKCGYCGSTLRIYVAHKRKDGTYPPLKYQCANRFSKDTKKRCNSRQYDKSELEATIISKLNQLRLNNDIEVVTKPNINKDELKQEIQAIATKLNRLTDLYVDGIINRDDLQKRRLALENQKSILESELAIDHDELLTRRKQTILEELGRLNLIEGSYVEQTTIVRKVVKEILVKTGSIDLMLDI

SEQ ID NO: 11838 - protein, 472 aa, Unknown
  Description of Unknown: Integrase A406 sequence
  PF07508,G3DSA:1.10.10.2600,SSF53041,PF13408,PS51737, cd03768,PTHR30461:SF3,PF00239,PS51736,SM00857, G3DSA:3.40.50.1390,PTHR30461
MQTKRKVAIYSRVSTLHQAEEGYSIGQQIEALTKYCQAMGWAIYDNYSDGGFSGGKLERPAMQKMIQDAESGKFDTVVVYKLDRLSRNVRDTLYLVKDVFNANNVDFVSLQENIDTKSAMGNLFITLLSAIAEFEREQIKERMQLGVKGRAKSGKTTSWTTPPFGYEYNTNTQLMTINHYQAEIVRDMFDKIISGWSIMGITTHLRKTNSKKWTHVRVKRILENVAYIGKVKYRDEIFDGEHAPILTEEVFYKAQKALEERTNKKDNTRPFQGLYMLSNIAKCGYCGTPLKIDSYKPRKDGTRKRTYTCINRNPKRIKTAIYNDGKQCKESGRYDVKDVEKYVLTEISKLQLNPKSIESLYRDKPEENITAHQERLKKLETKLSKLNDLYINELISMEVLKQKSAELLKEKSSLETFINNNKRKTNNKPAFEKVAKMDDIFKMSYDDQKRIVKTLIKRVEVKRDEINVIFKL

SEQ ID NO: 11839 - protein, 472 aa, Unknown
  Description of Unknown: Integrase A407 sequence
  PF07508,G3DSA:1.10.10.2600,SSF53041,PF13408,PS51737,cd03768, PTHR30461:SF3,PF00239,PS51736,SM00857,G3DSA:3.40.50.1390, PTHR30461
MNTKRKVAIYSRVSTLHQAEEGYSIGQQIEALTKYCQAMGWVIYDNYSDGGFSGGKLERPAMQKMIQDAKSGKFDTVVVYKLDRLSRNVRDTLYLVKDVFNANNVDFVSLQENIDTKSAMGNLFITLLSAIAEFEREQIKERMQLGVKGRAKSGKTTSWTTPPFGYEYDTNTQLMTINHYQAEIVRDIFDKIISGWSIMGITTHLRKTNNKKWTHVRVKRILENVAYIGKVKYRDEIFDGEHAPILTEEIFYKAQKALEERTSKKDNTRPFQGLYMLSNIAKCGYCGTPLKIDSYKPRKDGTRKRTYTCINRNPKRIKTATYNDGKQCKESGRYDVKDVERYVLNEISKLQLNPKSIESLYIDKPEENITAHQERLKKLETKLSKLNDLYINELISMEALKQKSAELLKEKSSLETFINNNKRKINNKPAFEKVAKMDDVFKMSYDDQKKIVKTLIKRVEVKRDEINVIFKL

SEQ ID NO: 11840 - protein, 471 aa, Unknown
  Description of Unknown: Integrase A408 sequence
  PF07508,G3DSA:1.10.10.2600,SSF53041,PF13408,PS51737, cd00338,PTHR30461:SF3,PF00239,PS51736,SM00857, G3DSA:3.40.50.1390,PS00397,PTHR30461
MKVVLYVRVSTQEQVEEGYSIDSQLANLRKFAESQNWEVIGEYVDEGFSAKNLKRPSIENLMNDVPKKKFDVVLVYKLDRLVRSVLDLHNLLNLFDKHGVMFRSATEMFDTTSAMGRFFISIVGSMAAWERENLGERVFVNMKHKAEEGKRPGGKAPFGYDASKDSLVINEDEAQWVRWIFNEYRTKGKDMISFELNSRGVRTKNGRLWSNSVLDYLINNPVYAGYIRWNRRDISGKVKEDIVLVKGDHEPIISQEVFDEAQRIQKKRYVFKEKGNKHYPFTGILKCERCGMPLYAERAKRKNGYRIYYKCSGRFNHNICKLPVIPTEVIENEFLRLLKADVLYSEPEKEIDTSSIRKQLKALERKIERMKELYIEGDIEKDDYNVRMREAKQKELALWQTLDDNTHYFTKEQFIELASNIRAVWQEATDEERKKAVHAIMDYIYVDVTKESQRTVGSLPEIAFTRTKVLS

SEQ ID NO: 11841 - protein, 471 aa, Unknown
  Description of Unknown: Integrase A409 sequence
  PF07508,G3DSA:1.10.10.2600,SSF53041,PS51737,cd00338,PF00239, PS51736,SM00857,G3DSA:3.40.50.1390,PTHR30461
MGGVRAIIYNRVSSDPTGRGRSVADQETENRAICERNGWTIGEVLTDNDRSATRFATRERPEYRRLTEILQRGDVLVTWEASRAQRDLEAYVALRNLCAERGVLWCYSGKVYDLTVGDDRFVTGLDALLAEKEAEQTRERIMRGHRTNLAAGGAHGHVPFGYRIVRDPTTGRPLQRVPDEATAPLVQEAARRVLAGESVRSIVADLKVRTPGKPWSTSTLRRMLMNPTYAGYRTHRGEIARKGTWEPLIAQDDHDRLVALFGSRRTVPRGAAPKYLLTGIAVCGVCGGRLIMRQQGSVPAAKKRVDGKLWFYGCEGGHVGRDREKVDDAVTRVVVALLSNPDELAKLAEPSDATPAGDDVDDVAELRQRLTDAVDAYDAGKLSIEMLARIEARLQPRIEAAEERSKARYLSPVVAQVAAAPDSAGAWSALTLADKREFLRATMHIEVQRVRSRWELGVEVYPLRMAPHADA

SEQ ID NO: 11842 - protein, 471 aa, Unknown
  Description of Unknown: Integrase A410 sequence
  PF07508,G3DSA:1.10.10.2600,SSF53041,PF13408,PS51737, cd03768,PTHR30461:SF3,PF00239,PS51736,SM00857, G3DSA:3.40.50.1390,PTHR30461
MRKVAIYSRVSTINQAEEGYSIQGQIEALTKYCEAMEWKIYKNYSDAGFSGGKLERPAITELIEDGKNNKFDTILVYKLDRLSRNVKDTLYLVKDVFTANNIHFVSLKENIDTSSAMGNLFLTLLSAIAEFEREQIKERMQFGVMNRAKSGKTTAWKTPPYGYRYNKDEKTLSVNELEAANVRQMFNMIISGCSIMSITNYARDNFVGNTWTYVKVKRILENETYKGLVKYREQTFSGDHQAIIDEKTYNKAQIALAHRTDTKTNTRPFQGKYMLSHIAKCGYCGAPLKVCTGRAKNDGTRRQTYVCVNKTESLARRSVNNYNNQKICNTGRYEKKHIEKYVIDVLYKLQHDKEYLKKIKKDDNIIDITPLKKEIEIIDKKINRLNDLYINDLIDLPKLKKDIEELNHLKDDYNKAIKLNYLDKKNEDSLGMLMDNIDIRKSSYDVQSRIVKQLIDRVEVTMDNIDIIFKF

SEQ ID NO: 11843 - protein, 471 aa, Unknown
  Description of Unknown: Integrase A411 sequence
  PF07508,G3DSA:1.10.10.2600,SSF53041,PF13408,PS51737,cd03768, PTHR30461:SF3,PF00239,PS51736,SM00857,G3DSA:3.40.50.1390, PTHR30461
MRKVAIYSRVSTINQAEEGYSIQGQIEALTKYCEAMEWKIYKNYSDAGFSGGKLERPAITELIEDGKNNKFDTILVYKLDRLSRNVKDTLYLVKDVFTANNIHFVSLKENIDTSSAMGNLFLTLLSAIAEFEREQIKERMQFGVMNRAKSGKTTAWKTPPYGYRYNKDEKTLSVNELEAANVRQMFDMIISGCSIMSITNYARDNFVGNTWTHVKVKRILENETYKGLVKYREQTFSGDHQAIIDEKTYNKAQIALAHRTDTKTNTRPFQGKYMLSHIAKCGYCGAPLKVCTGRAKNDGTRRQTYVCVNKTESLARRSVNNYNNQKICNTGRYEKKHIEKYVIDVLYKLQHDKEYLKKIKKDDNIIDITPLKKEIEIIDKKINRLNDLYINDLIDLPKLKKDIEELNHLKDDYNKAIKLNYLDKKNEDSLGMLMDNIDIRKSSYDVQSRIVKQLIDRVEVTMDNIDIIFKF

SEQ ID NO: 11844 - protein, 471 aa, Unknown
  Description of Unknown: Integrase A412 sequence
  PF07508,G3DSA:1.10.10.2600,SSF53041,PF13408,PS51737, cd03768,PTHR30461:SF3,PF00239,PS51736,SM00857, G3DSA:3.40.50.1390,PTHR30461
MRKVAIYSRVSTINQAEEGYSIQGQIEALTKYCEAMEWKIYKNYSDAGFSGGKLERPAITELIEDGKNNKFDTILVYKLDRLSRNVKDTLYLVKDVFTANNIHFVSLKENIDTSSAMGNLFLTLLSAIAEFEREQIKERMQFGVMNRAKSGKTTAWKTPPYGYRYNKDEKTLSVNELEAANVRQMFNMIISGCSIMSITNYARDNFVGNTWTHVKVKRILENETYKGLVKYREQTFSGDHQAIIDEKTYNKAQIALAHRTDTKTNTRPFQGKYMLSHIAKCGYCGAPLKVCTGRAKNDGTRRQTYVCVNKTESLARRSVNNYNNQKICNTGRYEKKHIEKYVIDVLYKLQHDKEYLKKIKKDDNIIDITPLKKEIEIIDKKINRLNDLYINDLIDLPKLKKDIEELNHLKDDYNKAIKLNYLDKKNEDSLGMLMDNINIRKSSYDVQSRIVKQLIDRVEVTMDNIDIIFKF

SEQ ID NO: 11845 - protein, 471 aa, Unknown
  Description of Unknown: Integrase A413 sequence
  PF07508,G3DSA:1.10.10.2600,SSF53041,PF13408,PS51737,cd03768, PTHR30461:SF3,PF00239,PS51736,SM00857,G3DSA:3.40.50.1390, PTHR30461
MRKVAIYSRVSTINQAEEGYSIQGQIEALTKYCEAMEWKIYKNYSDAGFSGGKLERPAITELIEDGKNNKFDTILVYKLDRLSRNVKDTLYLVKDVFTANNIHFVSLKENIDTSSAMGNLFLTLLSAIAEFEREQIKERMQFGVMNRAKSGKTTAWKTPPYGYRYNKDEKTLSVNELEAANVRQMFDMIISGCSIMSITNYARDNFVGNTWTHVKVKRILENETYKGLVKYREQTFSGDHQAIIDEKTYNKAQIALAHRTDTKTNTRPFQGKYMLSHIAKCGYCGAPLKVCTGRAKNDGTRRQTYVCVNKTESLARRSVNNYNNQKICNTGRYEKKHIEKYVIDVLYKLQHDKEYLKKIKKDDNIIDITPLKKEIEIIDKKINRLNDLYINDLIDLPKLKKDIEELNHLKDDYNKAIKLNYLDKKNEDSLGMLMDNLDIRKSSYDVQSRIVKQLIDRVEVTMDNIDIIFKF

SEQ ID NO: 11846 - protein, 470 aa, Unknown
  Description of Unknown: Integrase A414 sequence
  PF07508,G3DSA:1.10.10.2600,SSF53041,PS51737,cd00338, PTHR30461:SF21,PF00239,PS51736,SM00857,G3DSA:3.40.50.1390, PTHR30461
MMNRGGPTVRADIYVRISLDRTGEELGVERQEESCRELCKSLGMEVGQVWVDNDLSATKKNVVRPDFEAMIASNPQAIVCWHTDRLIRVTRDLERVIDLGVNVHAVMAGHLDLSTPAGRAVARTVTAWATYEGEQKAERQKLANIQNARAGKPYTPGIRPFGYGDDHMTIVTAEADAIRDGAKMILDGWSLSAVARYWEELKLQSPRSMAAGGKGWSLRGVKKVLTSPRYVGRSSYLGEVVGDAQWPPILDPDVYYGVVAILNNPDRFSGGPRTGRTPGTLLAGIALCGECGKTVSGRGYRGVLVYGCKDTHTRTPRSIADGRASSSTLARLMFPDFLPGLLASGQAEDGQSAASKHSEAQTLRERLDGLATAYAEGAISLSQMTAGSEALRKKLEVIEADLVGSAGIPPFDPVAGVAGLISGWPTTPLPTRRAWVDFCLVVTLNTQKGRHASSMTVDDHVTIEWRDVAE

SEQ ID NO: 11847 - protein, 470 aa, Unknown
  Description of Unknown: Integrase A415 sequence
  PF07508,SSF53041,PS51737,cd00338,PTHR30461:SF21,PF00239,PS51736 ,SM00857,G3DSA:3.40.50.1390,PTHR30461
MTISGGTDEALFYFRISLDATGERLGVERQEPPCLELCRSKGFTPGKAYIDNDLSATKEGVVRPEFEALLRDLKLRPRPVIVWHTDRLVRVTKDLERVISTGVNVYAVHAGHFDLSTPAGRAVARTLTAWAQYEGEQKALRQKEANLQRAQMGKPWWPRRPFGLEKDGELNEPEALSLRKAYADLLSGASLTDLAADLNAAGHTTNKGGAWTSTSLRPVLMNARNAAIRTYDGEEIGPANWKAIVPEETWRAAVRLLSSPSRKTGGGGKRLHLMTGVAKCSVCDSDVKVEWRGKKGEPTAYTVYACRGKHCLSHRQKWVDDRVETLVLERLSQEDAAAVWAVDNDTELADVREEVVTMRERLEAFAEDYADGAISRAQMQAGSARVREKLEAAEAQMAYLAAGSPLGELIASNDVEKTWESLTLDRKRAVIEAMTRKVTLYPRGRGIRSHRPEDCQVEWVDERPRLSAVS

SEQ ID NO: 11848 - protein, 470 aa, Unknown
  Description of Unknown: Integrase A416 sequence
  PF07508,G3DSA:1.10.10.2600,SSF53041,PS51737,cd00338, PF00239,PS51736,SM00857,G3DSA:3.40.50.1390,PTHR30461
MSKRAVIYTRVSRDDTGEGQSNQRQEAECRRLTDYRRLDVVAVEADISISASKGLERPAWLRVLGMIERGEVDYVIAYHMDRVTRSMTELEQLIEMCLKYDVGVATVSGDIDLTTDVGRMVARIIGAVARAEVERKSARQKLANAQRAAEGKPHVSGIRPFGYADDHRQVVTIEAQAIRAAAEAALAGESMIGIAESWSKDGLLSARARRGHDKGNRPTKAAWSARGVRNVLVNPRYAGIRLYNGERVGQGDWEPILDVETHLRLVEKLTDPTRRKGTVKTGRVAASLLTAIARCEVCGQTVRASSVRGRQTYACRNSHAHVDRSTADLMTQEWVISRLADPDTLAKLAPSGDDRVDEAKATIEKRREALKTYARLLATGAMDEDQFTEASAVARSEMQEAEAVLTEAGTGDLLAGLDVGSDAVGPQFLALSLARQRGIVEALVDVTLRPASKARKVVTPEHERVVLADR

SEQ ID NO: 11849 - protein, 470 aa, Unknown
  Description of Unknown: Integrase A417 sequence
  PF07508,G3DSA:1.10.10.2600,SSF53041,PS51737,cd00338,PF00239, PS51736,SM00857,G3DSA:3.40.50.1390,PTHR30461
MSKRAVIYTRVSRDDTGEGQSNQRQEAECRRLTDYRRLDVVAVEADISISASKGLERPAWLRVLGMIERGEVDYVIAYHMDRVTRSMTELEQLIEMCLKYDVGVATVSGDIDLTTDVGRMVARIIGAVARAEVERKSARQKLANAQRAAEGKPHVSGIRPFGYADDHRQVVTIEAQAIRAAAEAALAGESMIGIAESWSKDGLLSARARRGHDKGNRPTKAAWSARGVRNVLVNPRYAGIRFYNGERVGQGDWEPILDVETHLRLVEKLTDPTRRKGTVKTGRVAASLLTAIARCEVCGQTVRASSVRGRQTYACRNSHAHVDRSTADLMTQEWVISRLADPDTLAKLAPSGDDRVDEAKATIEKRREALKTYARLLATGAMDEDQFTEASAVARSEMQEAEAVLTEAGTGDLLAGLDVGSDAVGPQFLALSLARQRGIVEALVDVTLRPASKARKVVTPEHERVILADR

SEQ ID NO: 11850 - protein, 470 aa, Unknown
  Description of Unknown: Integrase A418 sequence
  PF07508,G3DSA:1.10.10.2600,SSF53041,PS51737,cd03768, PTHR30461:SF3,PF00239,PS51736,SM00857,G3DSA:3.40.50.1390, PS00398,PTHR30461
MPIVVYVDEGVSGGAELDKRPDLARLMREWQPGDVVLFWKLDRLARSMVHFVDIMRLAEKAGVALVSIADNIDLSTDEGKFLAHILATFAEFERSQIRSRTANARRHMIKVGRWTGGRVPYGLKAAPHPDGVGKTLVRDPFAVAIIRRIYELVMGVNHPEGKGLAITTIAASLQAEGVPSPRVHTSTKANPAPAAWSSKAIRVIMESPTVVGHDTDPYTGRVIRGEDGKPVQVWAPALTVEEQAQVLERIGPSVKRAKAGDRHWLYGVAVCGVCGGNMKRTNGGKFQPDVVIFRCRGTLKAPHGNVSVRAEELARWVDAKVLERLGPGQAVKREFVEGTGPAGDLERLKEYLEELEEDRKAGMYSAPGAIERFRQSYAETTRQIAELEANPPTEPGWQLVPTGRTFAEEWAAKPLAERGRYLFDAEASVAVRPPEVKRTVEPLDKRCTLDLGELEDMALELESVVADAME

SEQ ID NO: 11851 - protein, 470 aa, Unknown
  Description of Unknown: Integrase A419 sequence
  PF07508,SSF53041,PS51737,cd00338,PF00239,PS51736,SM00857,G3DSA: 3.40.50.1390,PTHR30461
MGSYCQFMRAIIYCRVSSDPHARGKSVTEQEADCRATSKAHGWDIGEVLVDNDRGASRYSRKDRPAYRRLAELLAPGDVLVTWEASRAQRDLSAYLQLRDLCAERGVLWSYSGRTYDLARGDDRFTTGLDALLSEKEVEVTRERVLRSMRANAAAGRPHGKLPYGYMIVRDPHTGKTLDRVANPDTAPTFREAVQRVLDGDSLYAVCQDFNARGVPAPRPRRDGTPAKWIPVTLRKILESPTYAGLRLSNGEVIGQATWEPLISMEEHERLKALFADPHRLTHRGSEPQWLLAGIARCGVCGATVKRIKSRGVQTYTCRDGFHTARMVTTVEDYVVEAMMRRLEGQDLVGQIDSDNAEYASAVEAVRALRQRIDSFTDAAADGEVTPTALARIEAKLLPQIERAEGRVRALAHSPAVAKIAGAGARERWEALTVRDRRDLVRALVDVQIHRVGKGRRNVPIGEGIGLTWL

SEQ ID NO: 11852 - protein, 470 aa, Unknown
  Description of Unknown: Integrase A420 sequence
  PF07508,SSF53041,PF13408,PS51737,cd00338, PTHR30461:SF3,PF00239,PS51736,SM00857,G3DSA:3.40.50.1390, PTHR30461
MRVIGYVRLSRASREESTSVVRQRDIITRTASARDLDLVGIVEDVDVSATKSRLDRPGLDEVRARVRAGEADAVLVWRLDRIARSVVDFGTLLDDGLDIISATEPLDTASPMGRAMAEVLQVFARLEAKTIGLRVAASQEHLRKIGRWPGGVLPYGYRAVPHPEGAGRALEPDPAESAVVRRMADECLSGRPVYAIAQGLNADGIPPRRASSWSPTSVQRILRSNAVLGRVKVRGDLLRDDAGVPVQVWAPLLDVDEVERLRALTDWSPIPGRSAATAAGKRRKASRLLSGLLYCPGCGGPLVARTRRDTALYSCGASARGRACPGGVAVEADRVEAEVARRFLAAFGRLEVVEARESSAPVAGLAAVEEAIRDTTDALRDPAADVPVLVDRLTSLRAERDRLAALPSAPTVALVETGESFATAWDRLDVAGRRRMLTAAGLEVEIGRGLRGRWTPDRIQARVAGQDLPV

SEQ ID NO: 11853 - protein, 470 aa, Unknown
  Description of Unknown: Integrase A421 sequence
  PF07508,G3DSA:1.10.10.2600,SSF53041,PF13408,PS51737,cd03768, PTHR30461:SF3,PF00239,PS51736,SM00857,G3DSA:3.40.50.1390, PTHR30461
MHQAIEGYSIEQQRDSLTKYCEAMEWNIYDIYIDAGFSGGKLERPAMDKLIREAEAGKFDTVAVYKLDRLSRSVQDTLHLIRDVFKEHDIDFVCLQENIDTKSAMGNLFLTLLSAIAEFEREQITERMAMGRHGRAKSGKSMMWARPAYGYRYDRESQTVSVVQSEAMIVKRIYKEYLEGKSVSQIKNDLNSEGHITKEKPWVYKRITYILQSRVYTGVNEYKGEIYDGKHEAIIDTETFELTQMEFAKRQQQTKDKKNNPRPFQAKYMLSGLARCGYCKAPLKLRLGAVRKDGTRAMVYDCHNRWNRKVTYLTIYNDNKQCTESGRYQKADLEAYVLDKIKELQLNPDTIREKMDLNEKPTANTEEIKKQIAKINQQIDKLNDLYLNDLITVEKLKERAGKLKKERELLEVELSKNSDHLFKAKKKQLNDLLMNKDIDSMTYEEQRNLVKMLIYKVDVTKEDINIIFDF

SEQ ID NO: 11854 - protein, 470 aa, Unknown
  Description of Unknown: Integrase A422 sequence
  PF07508,SSF53041,PS51737,cd00338,PF00239, PS51736,SM00857,G3DSA:3.40.50.1390,PTHR30461
MSKRAVIYTRVSRDDTGEGRSNDRQEAECRRLTDYKRLDVVAVEADISISAYSGKARPAWKRVLNMVRAGEVDYVIAYHMDRMTRSMLDLEELILLCEEHNVGIATAVGDIDLTSDMGRMVARILAAVARAEVERKSARQKLANAQRAAEGKPHVSGIRPFGYGDDHLTLIPEEADAIRDAARRALAGETMISIAKSWTEAGLISARARRGHDKGKRATEAGWSARGVRNVLISPRYAGIRTYNGEPVGEGDWEPILDRETHLALVDTLGDPARRKGAVKMGRRPTSLLTAFALCEVCDGPVRASAIRGRQTYTCRAGHGHADRAIADAEVSAATIALLASPQWMTLIVPSGDERVEEAKAEVDDLKLKLKTYAELLANDVMDVEQFTQATATARAKLKGAEELLSRAGMGPMFVGLSLGTPAVADQWEGLGLDRQRAIVQGLLSVKVRRKAKGMSFEDQIVVEPRYVAA

SEQ ID NO: 11855 - protein, 469 aa, Unknown
  Description of Unknown: Integrase A423 sequence
  PF07508,G3DSA:1.10.10.2600,SSF53041,PS51737,cd03768, PTHR30461:SF3,PF00239,PS51736,SM00857,G3DSA:3.40.50.1390 ,PTHR30461
MYYERSYLRSCQVSSYEQATEGYSIHEQERKLKAFCEVQNWNEFKVFTDAGVSGGSMNRPALKRIMDNLEYYDLVLVYKLDRLTRNVKDLLEMLETFEKYNVAFKSATEVFDTTTAIGKLFITMVGAMAEWERATIRERALFGSRAAVREGNYIREAPFCYDNVDGKLVPNEHKWVIDYLVEQFKHGVSGNEIARQMNLKKINVPKVKKWNRTSIIRLMKNPVLRGHTKYGDMYIENTHEPVLSESDYKRIIDIIENKTHRSKVKHHAIFRGVLTCPQCHNKLHLYAGKITDKKGYSYEVRRYKCDTCSKDKNVQTISFNESEVEDKFIELLKTYDMNKFKVDIVEESTPKVDYDIDKIMKQREKLTRSWSLGYIEDDEYFSLMDETKEILDKVERAGVEIESTQTVTNEQLNMIDSILIKGWSKLNVEQKEELILSTVKEIVFDFVPRKDNENGKVNTLDIREITFKF

SEQ ID NO: 11856 - protein, 468 aa, Unknown
  Description of Unknown: Integrase A424 sequence
  PF07508,G3DSA:1.10.10.2600,SSF53041,PS51737,cd00338, PTHR30461:SF3,PF00239,SM00857,G3DSA:3.40.50.1390,PTHR30461
MRAIIYNRVSSDPTGRGRSVADQEAENRAVCERNGWTIGEVLTDNDRSATRFATRDRPEYRRLTEILRRGDVLVTWEASRAQRDLEAYVALRNLCAERGVMWCYSGKVYDLTVGDDRFVTGLDALLAEKEAEQTRERIMRGHRSNLAAGGAHGHVPFGYRIVRDATTGRPLRRVPDETTAPLVQDAARRVLAGESVRSIVADLKVRTPGKPWSTSTLRRMLMNPTYAGYRTHHGEIACKGTWEPLITQEDHDRLVALFGSRRGVPRGAAPKYLLTGIAVCGVCGGKLIMRQQGSVAAAKKRADGKLWFYGCEYGHVGRDRAKVDDAVTRVVVALLSDPGELAKLAEPVDDEPAVDDGDDVAELRQRLADAVDAYDAGKISIEMLARIEARLQPRIEAAEGRSKARFVSPVVAQVAAALDPAAAWAALQLEEKREFLRATMHIEVQRVRSRWELGVEAYPLRMASRIDA

SEQ ID NO: 11857 - protein, 468 aa, Unknown
  Description of Unknown: Integrase A425 sequence
  PF07508,G3DSA:1.10.10.2600,SSF53041,PS51737,cd00338,PF00239, PS51736,SM00857,G3DSA:3.40.50.1390,PTHR30461
MRAIIYNRVSSDPTGRGRSVADQETENRAICERNGWTIGEVLTDNDRSATRFATRERPEYRRLTEILQRGDVLVTWEASRAQRDLEAYVALRNLCAERGVLWCYSGKVYDLTVGDDRFVTGLDALLAEKEAEQTRERIMRGHRTNLAAGGAHGHVPFGYRIVRDPTTGRPLQRVPDEATAPLVQEAARRVLAGESVRSIVADLKVRTPGKPWSTSTLRRMLMNPTYAGYRTHRGEIARKGTWEPLIAQDDHDRLVALFGSRRTVPRGAAPKYLLTGIAVCGVCGGRLIMRQQGSVPAAKKRADGKLWFYGCEGGHVGRDREKVDDAVTRVVVALLSNPDELAKLAEPSDATPAGDDVDDVAELRQRLTDAVDAYDAGKLSIEMLARIEARLQPRIEAAEERSKARYLSPVVAQVAAAPDSAGAWSALTLADKREFLRATMHIEVQRVRSRWELGVEVYPLRMAPHADA

SEQ ID NO: 11858 - protein, 468 aa, Unknown
  Description of Unknown: Integrase A426 sequence
  PF07508,G3DSA:1.10.10.2600,SSF53041,PS51737,cd00338, PF00239,PS51736,SM00857,G3DSA:3.40.50.1390,PTHR30461
MRAIIYNRVSSDPTGRGRSVADQETENRAICERNGWTIGEVLTDNDRSATRFATRERPEYRRLTEILQRGDVLVTWEASRAQRDLEAYVALRNLCAERGVLWCYSGKVYDLTVGDDRFVTGLDALLAEKEAEQTRERIMRGHRTNLAAGGAHGHVPFGYRIVRDPTTGRPLQRVPDEATAPLVQEAARRVLAGESMRSIVADLKVRTPGKPWSTSTLRRMLMNPTYAGYRTHRGEIARKGTWEPLIAQDDHDRLVALFGSRRTVPRGAAPKYLLTGIAVCGVCGGRLIMRQQGSVPAAKKRADGKLWFYGCEGGHVGRDREKVDDAVTRVVVALLSNPDELAKLAEPSDETPAGDDVDDVAELRQRLTDAVDAYDAGKLSIEMLARIEARLQPRIEAAEERSKARYLSPVVAQVAAAPDPAGAWAALTLADKREFLRATMHIEVRRVRSRWELGVEVYPLRMAPHADA

SEQ ID NO: 11859 - protein, 468 aa, Unknown
  Description of Unknown: Integrase A427 sequence
  PF07508,G3DSA:1.10.10.2600,SSF53041,PS51737,cd00338, PTHR30461:SF3,PF00239,PS51736,SM00857,G3DSA:3.40.50.1390 ,PTHR30461
MRAIIYNRVSSDPTGRGRSVADQETENRAICERNGWTIGEVLTDNDRSATRFATRERPEYRRLTEILQRGDVLVTWEASRAQRDLEAYVALRNLCAERGVLWCYSGKVYDLTVGDDRFVTGLDALLAEKEAEQTRERIMRGHRTNLAAGGAHGHVPFGYRIVRDPTTGRPLQRVPDEAAAPLVQEAARRVLAGESVRSIVADLKVRTPGKPWSTSTLRRMLMNPTYAGYRTHRGEIARKGTWEPLITQDDHDRLVALFGSRRTVPRGAAPKYLLTGIAVCGVCGGRLIMRQQGSVPAAKKRADGKLWFYGCEGGHVGRDREKVDDAVTRVVVALLSNPDELAKLAEPSDEAPAGDDVDDVAELRQRLTDAVDAYDAGKLSIEMLARIEARLQPRIEAAEERSKARYLSPVVAQVAAAPDPAGAWAALTLADKREFLRATMHIEVQRVRSRWELGVEVYPLRMAPHTDA

SEQ ID NO: 11860 - protein, 468 aa, Unknown
  Description of Unknown: Integrase A428 sequence
  PF07508,G3DSA:1.10.10.2600,SSF53041,PS51737,cd00338, PF00239,PS51736,SM00857,G3DSA:3.40.50.1390,PTHR30461
MRAIIYNRVSSDPTGRGRSVADQETENRAICERNGWTIGEVLTDNDRSATRFATRERPEYRRLTEILQRGDVLVTWEASRAQRDLEAYVALRNLCAERGVLWCYSGKVYDLTVGDDRFVTGLDALLAEKEAEQTRERIMRGHRTNLAAGGAHGHVPFGYRIVRDPTTGRPLQRVPDEAAAPLVQEAARRVLAGESVRSIVADLKVRTPGKPWSTSTLRRMLMNPTYAGYRTHRGEIARKGTWEPLITQDDHDRLVALFGSRRTVPRGAAPKYLLTGIAVCGVCGGRLIMRQQGSVPAAKKRADGKLWFYGCEGGHVGRDREKVDDAVTRVVVALLSNPDELAKLAEPSDETPAGDDVDDVAELRQRLTDAVDAYDAGKLSIEMLARIEARLQPRIEAAEERSKARYLSPVVAQVAAAPDPAGAWAALTLADKREFLRATMHIEVRRVRSRWELGVEVYPLRMAPHTDA

SEQ ID NO: 11861 - protein, 468 aa, Unknown
  Description of Unknown: Integrase A429 sequence
  PF07508,G3DSA:1.10.10.2600,SSF53041,PS51737,cd00338,PF00239, PS51736,SM00857,G3DSA:3.40.50.1390,PTHR30461
MRAIIYNRVSSDPTGRGRSVADQETENRAICERNGWTIGEVLTDNDRSATRFATRERPEYRRLTEILQRGDVLVTWEASRAQRDLEAYVALRNLCAERGVLWCYSGKVYDLTVGDDRFVTGLDALLAEKEAEQTRERIMRGHRTNLAAGGAHGHVPFGYRIVRDPTTGRPLQRVPDEATAPLVQEAARRVLAGESMRSIVADLKVRTPGKPWSTSTLRRMLMNPTYAGYRTHRGEIARKGTWEPLIAQDDHDRLVALFGSRRTVPRGAAPKYLLTGIAVCGVCGGRLIMRQQGSVPAAKKRADGKLWFYGCEGGHVGRDREKVDDAVTRVVVALLSNPDELAKLAEPSDETPAGDDVDDVAELRQRLTDAVDAYDAGKLSIEMLARIEARLQPRIEAAEERSKARYLSPVVAQVAAAPDPAGAWAALTLADKREFLRATMHIEVQRVRSRWELGVEVYPLRMAPHADA

SEQ ID NO: 11862 - protein, 468 aa, Unknown
  Description of Unknown: Integrase A430 sequence
  PF07508,G3DSA:1.10.10.2600,SSF53041,PS51737,cd00338, PTHR30461:SF3,PF00239,SM00857,G3DSA:3.40.50.1390,PTHR30461
MRAIIYNRVSSDPTGRGRSVADQEAENRAVCERHGWTIGEVLTDNDRSATRFATRDRPEYRRLTEILRRGDVLVTWEASRAQRDLEAYVALRNLCAERGVLWCYSGKVYDLTVGDDRFVTGLDALLAEKEAEQTRERIMRGHRSNLAAGGAHGHVPFGYRIVRDATTGRPLRRVPDETTAPLVQDAARRVLAGESVRSIVADLKARTPGKPWSTSTLRRMLMNPTYAGYRTHHGEIACKGTWEPLITQEDHDRLVALFGSRRGVSRGAAPKYLLTGIAVCGVCGGKLIMRQQGSVPAAKKRADGKLWFYGCEHGHVGRDRAKVDDAVTRVVVALLSDPGELAKLAEPVDDAPVVDDGDDVAELRQRLADAVDAYDAGKISIEMLARIEARLQPRIEAAEERNKARFVSPVVAQVAAALDPAAAWGALQLEEKREFLRATMHIEVQRVRSRWELGVEVYPLRMASRIDA

SEQ ID NO: 11863 - protein, 466 aa, Unknown
  Description of Unknown: Integrase A431 sequence
  PF07508,SSF53041,PS51737,cd00338,PF00239,PS51736, SM00857,G3DSA:3.40.50.1390,PTHR30461
MRRMRAIIYCRVSSDPHARGKSVSEQEVDCRATAKAHGWDVGEVLVDNDRGASRYSRKDRPAYRRLAELLAPGDVLVTWEASRAQRDLSAYLQLRDLCAERGVLWSYSGRTYDLARGDDRFTTGLDALLSEKEVEVTRERVLRSMRANAAAGRPHGKLPYGYMIVRDPHTGRTLDRVANPDTAPTFREAVQRVLDGDSLYAVCQDFNARGVRAPRPRRDGTPAKWIPVTLRKILESPTYAGLRSHNGEVIGEATWEPLLSMEEHERLKALFADPHRLTHRGSEPQWLLAGIARCGVCGATVKRIKSRGIQTYTCRAGFCAARMVTTVDDYVTEAVMRRLEGQDLVGQIDSDNAEYATAVEAVRALRQRLDSFTDAAAEGEVTPSALARIEAKLLPQIERAEGRARALAHSPAVAKIAGTGARERWDALAVRDRRDLVRALVDVQIHRVGKGRRNVPIGEGIGLTWL

SEQ ID NO: 11864 - protein, 465 aa, Unknown
  Description of Unknown: Integrase A432 sequence
  PF07508,G3DSA:1.10.10.2600,SSF53041,PF13408,PS51737, cd00338,PTHR30461:SF3,PF00239,PS51736,SM00857, G3DSA:3.40.50.1390,PS00397,PTHR30461
MKLRAAIYVRVSTMEQAEEGYSISAQTEKLKSYANAKDYQVVKVFTDPGYSGAKLERPGLQNMIKSIESKEIDVVLVYKLDRLSRSQKNTLFLIEDVFLKNHVQFTSMQESFDTSTSFGRAMIGILSVFAQLERDAITERMQMGAKERAKAGMWRGGPQSRLPFGYRYIDGVLLVDDYEAMIVKYMYTEFIKGTPLTKIQSKVAAKFPVKETLIYPSIMKNILQNNIYIGKIKYAGETYEGLHEHILDTETYDKAQQLWEHRNTNKKKYFESKYLLSGILYCGHCGGKMASTGAGLLKSGERVTDYICYSKKGTPSHMVVDRNCPSKRHRVNRLDPKIVELLKTITFEEMQKDNSFTDNTTTIKSEIESLDTKISKLLDLYQDGLVPIDVLNDRISKLNDDKELLQETLISQKKQIHPEEIAKNIQTAKDFDWANSDSAAKRAMVRALINKVELTNEDMKIEWNI

SEQ ID NO: 11865 - protein, 465 aa, Unknown
  Description of Unknown: Integrase A433 sequence
  PF07508,G3DSA:1.10.10.2600,SSF53041,PS51737, cd03768,PTHR30461:SF3,PF00239,PS51736, SM00857,G3DSA:3.40.50.1390,PS00397,PTHR30461
MAVGIYIRVSTEEQAKEGYSISAQREKLKAYCQVQDWNDFRFYVDEGISAKDTNRPQLQLMLQHIKEGMIDTVLVYRLDRLTRSVVDLYKLLELFGKHNCTFKSATEVYDTSTAMGRLFITLVAALAQWERENLAERVRMGQIQKAREGQYSAKAPFGFDKDENERLIINEDEKRVILDMIDKIKEGYSIRQLADYLNNSGIPPIRGYQWHIASILSILKNPALYGAVKWRDEIIEGAHEGIITKKEYQHLLKLLESRQNFKKRETYSIFIFQMKIICPQCGNRLASERTRYYRKRDNKIVESNQYRCQACTLNKRKSIGVSERKMEKAFVRYMNEFKIEYTPELPKKENDEREKIQAQLMKIEHQRAKYQKAWANDFITDEEFSALMKETRSIYEELTHKLETLQPEEEQTVDKEKIKRIVTNFKLNWSYLSPDEKRQFINTFVESIQFEKQDGTVQILDVNFY

SEQ ID NO: 11866 - protein, 465 aa, Unknown
  Description of Unknown: Integrase A434 sequence
  PF07508,G3DSA:1.10.10.2600,SSF53041,PF13408,PS51737, cd00338,PF00239,PS51736,SM00857,G3DSA:3.40.50.1390, PTHR30461
MRAVLYLRQSVAREDSISLELQETAGREYCKQRGYTITAVEADPGISGRTWKRPAVLRVMGMIESKEADVIVLWKWSRLSRSRLDWAVAADKVESAGGRIESATEPLDVSTSAGRLARGMLTEFAAFESERIGDIWKETHERRVRQGLPANGKPRFGYQYTKGEGFSPDPITGPVLADLYRRYLSGQSVYSLVKYLNDGPIRPVTGYGVSSDGLWSARTLRRILDQGFGAGFITRHGERIPGVHEPVITAAEWEEYLSRRETRRVNRTSERSPYLLSGLIRCSCGSRMNAGQFGADRKPKYRCKASADKQTHSGGYVMTDYVERAVFEWLTEVAADVDAAAGQAAKMTKQTKAAGDQSAKIARQLLKLDARLDQLTNKMLDGTIPQATYERLRDENLDQRKTLEKALHDASTTVSKPAAIIAPELLKAWPVLPVESRRDILSRLIEYVEVSPGRPRAKVVVRPRW

SEQ ID NO: 11867 - protein, 464 aa, Unknown
  Description of Unknown: Integrase A435 sequence
  PF07508,G3DSA:1.10.10.2600,SSF53041,PS51737,cd00338,PF00239 ,SM00857,G3DSA:3.40.50.1390,PTHR30461
MSSRYEGRRAVIYTRVSKDRAGGRSVAEQEAECRIVCQREGWSVADVLSDNDVGASRWSKGDRPNYDRLSRILQPGDVLVTWEASRAQRDLAAYNDLRQLCTERDVLWCYSGRVFDLTRSDDRFMTLLDIGLAEKEVDQTRERIMRTLRANLQAGKPHGIRPYGYRSIRDPDTGKPIGREPDPVEGPIVRGIVDRFLSGVPLRRIAIDLNASGVKPQRAEEWTASLLGKMLQKPAYAGLLTHHGEIVGPGTWPAIITEDEHYRIMAILKDPARRTQRGTSPKSLVTNIAVCGKCGSTVRRKTKAGRTVYVCRDIGCVTMTASDVDEYVEEWMFKLLSDPRVHRRVSQQGDSKASADALAKIDGIRARMDEYAVEAAKGDISPRAFALMEKQWLTEIAELEQVANQALIHPRLADLTGPYVEAVWADMDLDLQRDIVRSTLEVTLYPQKLQREQDKPPIEVLWRT

SEQ ID NO: 11868 - protein, 464 aa, Unknown
  Description of Unknown: Integrase A436 sequence
  PF07508,G3DSA:1.10.10.2600,SSF53041,PF13408,PS51737, cd03768,PTHR30461:SF3,PF00239,PS51736,SM00857, G3DSA:3.40.50.1390,PS00397,PTHR30461
MKRAALYIRVSTMEQAKEGYSIPAQTDKLKAFAKAKDMAVAKVYTDPGFSGAKMERPALQEMISDIQNKKIDVVLVYKLDRLSRSQKNTLYLIEDVFLKNNVDFISMQESFDTSTPFGRATIGMLSVFAQLERDTITERMHMGRTERAKQGYYHGSGIVPLGYDYVHGELIINDYEAQIIQEIYDLYVNQGKGQQYITKRMVAKYPDKVKTLTIVKYALTNPLYIGKISWDGKVYDGHHSPIIDKSMYDKAQEIIARMAQKGGEQHGNQLGLLLGITYCGKCGAKVFRYVSGGKKYRYNYYMCRSVKKMLPSLVKDWNCKQPSLRQEVVEKKVIDSLKSLDFKKIERELKQVENKTKSKITTINNQISKKHNEKQKILDLYQYGTFDVTMLNERMKKIDNEINALTANIANLEGTKSESLINKLETLKTFNWETETTENKILIIKEFVERIELFDDEVIIKYKF

SEQ ID NO: 11869 - protein, 463 aa, Unknown
  Description of Unknown: Integrase A437 sequence
  PF07508,G3DSA:1.10.10.2600,SSF53041,PS51737, cd00338,PTHR30461:SF3,PF00239,PS51736, SM00857,G3DSA:3.40.50.1390,PS00397,PTHR30461
MRVAIYVRVSTDEQAKEGFSIPAQRERLRAFCESQGWEIVQEYIEEGWSAKDLNRPQMQRLLKDIKKGNIDIVLVYRLDRLTRSVLDLYLLLQTFEKYNVAFRSATEVYDTSTAMGRLFITLVAALAQWERENLAERVKFGIEQMIDEGKKPGGHSPYGYKFDKDFNCTIIEDEANTVRMIYRMYCDGYGYRSIADRLNELGVKPRIAKEWNHNSVRDILTNDIYIGTYRWGNKVVLNNHPPIISESLFRKAQKEREKRGVDRTRVGKFLLTGLLYCGNCDGHKMQGSFDKREQKTYYRCLKCNRITNEKNILEPLLDEIQLLITSKEYFMSKFTDQYDHQEMIDVSALTKELEKIKRQKEKWYDLYIDENNPIPKEELFAKINELNKKEEEIYSKLSEVELEDKEPVEEKYNRLSKMLDFKKQFEQANFFTKKELLLSIFERVVIYREKGKFKKITLDYTLK

SEQ ID NO: 11870 - protein, 463 aa, Unknown
  Description of Unknown: Integrase A438 sequence
  PF07508,G3DSA:1.10.10.2600,SSF53041,PS51737,cd03768, PTHR30461:SF3,PF00239,PS51736,SM00857,G3DSA:3.40.50.1390, PTHR30461
MKVAIYTRVSSAEQANEGYSIHEQKRKLISFCEVNDWDRYEVFSDPGVSGGSMKRPSLQKLFDRLEEFDLVLVYKLDRLTRNVRDLLEMLEVFEKNNIAFKSATELFDTTSAIGKLFITMVGAMAEWERETIRERSLIGARAAVRSGKYIKVQPFCYDLVDQKLKPNQYAEYIRFIVDKLLSGKSANEVVRLLESKKKPPGITKWNRKTVLGWMRNPILRGHTKHGDLLIKNTHEPIISEDEHSKMLDIIDKRTHKSKTKHNSIFRGVIECPQCQNKLYLVSSIQKRANGGSYEVRRYTCATCHKNKEVKDVSFNESEIEREFINTLLKKGTDNFMVNIPKPKDYDIENNKEKILEQRANYTRAWSLGYIKDEEYFVLMDETDKLLKDIEEKESPRINIELNEQQIRSVKNLLIKGFKMATAENKEELITSTVDLIKIDFIPRRLNKEGNINTVKINEIHFKY

SEQ ID NO: 11871 - protein, 463 aa, Unknown
  Description of Unknown: Integrase A439 sequence
  PF07508,SSF53041,PS51737,cd00338,PF00239,PS51736,SM00857,G3DSA:3 .40.50.1390,PTHR30461
MRAIIYCRVSSDPHARGKSVSEQEVDCRATAKAHGWDVGEVLVDNDRGASRYSRKDRPAYRRLAEILSPGDVLVTWEASRAQRDLSAYLQLRDLCAERGVLWSYSGRTYDLARGDDRFTTGLDALLSEKEVEVTRERVLRSMRANAAAGRPHGKLPYAYMIIRDPHTGRTLDRVANPDTAPTFREAVQRVLDGDSLYAVCQDFNARGVPAPRPRRDGTPAKWIPVTLRKILESPTYAGLRSHNGEVIGEATWEPLISREEHERLKALFADPHRLTHRGSEPQWLLAGIARCGVCGATVKRIKSRGIQTYTCRSGFCAARMVTTVDDYVTEAVMRRIEGQDLVGQIDSDNAEYAAAVDAVRALRQRLDSFTDAAAEGEVTPAALARIEAKLLPQIERAEGRVRALAHSPAVAKIAGTGARERWEALTVRDRRDLVRALVDVQIHRVGKGRRNVPIGEGIGLTWL

SEQ ID NO: 11872 - protein, 463 aa, Unknown
  Description of Unknown: Integrase A440 sequence
  PF07508,SSF53041,PS51737,cd00338,PF00239, PS51736,SM00857,G3DSA:3.40.50.1390,PTHR30461
MRAIIYCRVSSDPHARGKSVTEQEADCRATSKAHGWDIGEVLVDNDRGASRYSRKDRPAYRRLAETLAPGDVLVTWEASRAQRDLSAYLQLRDLCAERGVLWSYSGRTYDLARGDDRFTTGLDALLSEKEVEVTRERVLRSMRANAAAGRPHGKLPYGYMIVRDPHTGKTLDRVANPDTAPTFREAVQRVLDGDSLYAVCQDFNARGVPAPRPRRDGTPAKWIPVTLRKILESPTYAGLRLSNGEVIGQATWEPLISMEEHERLKALFADPHRLTHRGSEPQWLLAGIARCGVCGATVKRIKSRGVQTYTCRDGFCAARMVTTVEDYVVEAMMRRLEGQDLVGQIDSDNAEYASAVEAVRALRQRLDSFTDAAADGEVTPAALARIEAKLLPQIERAEGRVRALAHSPAVAKIAGAGARERWEALTVRDRRDLVRALVDVQIHRVGKGRRNVPIGEGIGLTWL

SEQ ID NO: 11873 - protein, 463 aa, Unknown
  Description of Unknown: Integrase A441 sequence
  PF07508,SSF53041,PS51737,cd00338,PTHR30461:SF21,PF00239,PS51736, SM00857,G3DSA:3.40.50.1390,PTHR30461
MVYLRQSEDRADDGLGVDRQREECMRLLTSRGWTLQREYVDNDVSATKSKPRPQFEEMMKAVDAGEVDVIVSRHLDRLLRRLAELERTLERCAPVGAAIITASDGIDTSTDGGRTTARILASVAQGEIERKSARQLSQARQAAKAGKWVGGRRPFGYEADGMTIRDCEADLVRQGYADILAGESLAEVARRWNTAGMTGPQYGKPWTFTTVREVLTNARHAGLRRHGPTQAEIRRNPEVGIVAKAEWPPLVDEMTWRAAVRIIADPSKRRGPTRGYGMLTGVCECGVCGAPVRRGTARRGIPAYKCETGKHVSRRCELVDMYVSGVVLRVLKRPDAVDLWTPERPDAADLLSKVDVLRSRIEDIGEDYADGLIDRAEFRAMRERAMSNLAEVEGMIAAAGATSPLSIVASADIDADWLAMSIAQKRALISALCTVVLLPAGQGARKFDTQTVVFRPRNPAVQM

SEQ ID NO: 11874 - protein, 463 aa, Unknown
  Description of Unknown: Integrase A442 sequence
  PF07508,SSF53041,PS51737,cd00338,PF00239, PS51736,SM00857,G3DSA:3.40.50.1390,PTHR30461
MRAIIYCRVSSDPHARGKSVSEQEVDCRATAKAHGWDVGEVLVDNDRGASRYSRKDRPAYRRLAETLAPGDVLVTWEASRAQRDLSAYLQLRDLCAERGVLWSYSGRTYDLARGDDRFTTGLDALLSEKEVEVTRERVLRSMRANAAAGRPHGKLPYGYMIVRDPHTGRTLDRVANPDTAPTFREAVQRVLDGESLYAVCQDFNARDVPAPRPRRDGTPAKWIPVTLRKILESPTYAGLRSHNGEVIGEATWEPLISREEHERLKALFADPHRLTHRGSEPQWLLAGIARCGVCGATVKRIKSRGIQTYTCRAGFCAARMVTTVDDYVTEAVMRRLEGQDLVGQIDSDNSEYATAIDAVRALRQRLDSFTDAAAEGEVTPSALARIEAKLLPQIERAEGRVRALAHSPAVAKIAGTGARERWEALTVRDRRDLVRALVDVQIFRVGKGRRNVPIGEGIGLTWL

SEQ ID NO: 11875 - protein, 463 aa, Unknown
  Description of Unknown: Integrase A443 sequence
  PF07508,SSF53041,PS51737,cd00338,PF00239,PS51736,SM00857, G3DSA:3.40.50.1390,PTHR30461
MRAIIYCRVSSDPHARGKSVSEQEVDCRATAKAHGWDVGEVLVDNDRGASRYSRKDRPAYRRLTETLAPGDVLVTWEASRAQRDLSAYLQLRDLCAERGVLWSYSGRTYDLARGDDRFTTGLDALLSEKEVEVTRERVLRSMRANAAAGRPHGKLPYGYMIVRDPHTGRTLDRVANPDTAPTFREAVQRVLDGESLYAVCQDFNARGVPAPRPRRDGTPAKWIPVTLRKILESPTYAGLRSHNGEVIGEATWEALISMEEHERLKALFADPHRLTHRGSEPQWLLAGIARCGVCGATVKRIKSRGIQTYTCRDGFCAARMVTTVEDYVVEAMMRRLEGQDLVGQIDSDNVEYAAAVDAVRALRQRLDSFTDAAAEGEVTPAALARIEAKLLPQIERAEGRVRALAHSPAVAKIAGAGARERWDALAVRDRRDLVRALVDVQIHRVGKGRRNVPIGEGIGLTWL

SEQ ID NO: 11876 - protein, 463 aa, Unknown
  Description of Unknown: Integrase A444 sequence
  PF07508,G3DSA:1.10.10.2600,SSF53041,PS51737,cd03768, PTHR30461:SF3,PF00239,PS51736,SM00857,G3DSA:3.40.50.1390, PS00397,PTHR30461
MTVGIYIRVSTEEQVRDGFSISAQREKLKAYCVAQDWDKFKFYVDEGVSAKDTNRPQLSIMLDHIKKGLINTVLVYRLDRLTRSVMDLYKLLDTFDKYNCAFKSATEVYDTSTAMGRMFITIVAALAQWERENLGERVRMGQLEKARQGEYSAKAPFGFDKNEHSKLIINLEESKVVLDMVRKIEEGYSIRQLADHLDGYTKPIRGYKWHIRTVLDILSNHAMYGAIRWSNEIIENAHPGIIKKDRFMKVQQLLSSRQNFKKRKTTSIFIFQMKLLCPNCGNHLTCERVMYHRKKDNQDIEHNRYRCQACVLNKKKAFSSSEKKIEVSFLNYVEKYRFKQVPEFQTEDNEIDILKKQLSKVERQREKFQKAWSNDLMTDEEFANRMKETKQALESIKEKLKSLSPNKNEDIDDDVIKEIINNIKSNWSHLSSDEKKQFINMFIESIKIDKKDGVTEVLDIEFY

SEQ ID NO: 11877 - protein, 463 aa, Unknown
  Description of Unknown: Integrase A445 sequence
  PF07508,G3DSA:1.10.10.2600,SSF53041,PS51737, cd03768,PTHR30461:SF3,PF00239,PS51736, SM00857,G3DSA:3.40.50.1390,PS00397,PTHR30461
MTVGIYIRVSTEEQVRDGFSISAQREKLKAYCIAQDWNSFKFYVDEGISAKDTNRPQLNTMLEHIKQGLINTVLVYRLDRLTRSVMDLYKLLDTFDKYNCAFKSATEVYDTSTAMGRMFITIVAALAQWERENLGERVRMGQLEKARQGEYSAKAPFGFDKNEHSKLIINPEESKVVLDMVGKIEEGYSIRQLADHLDSYIKPIRGYKWHIRTILNILSNHAMYGAIRWSNEIIENAHPGIITKDRFMKVQQLLSSRQNFKKRKTTSIFIFQMKLLCPNCGNHLTCERVRYHRKKDNKDIEHNRYRCQACVLNKKKAFSSSETKIEKAFLDYIDDYRFTKVPEFKKEDDEKEILKKKLSKIERQREKFQKAWSNDLMTDEEFAERMKETKNTLEEIKSELNKLGLSQNEKIDSETVRRIVNDIKNKWSLLSSLEKKQFMNLFVKNIQLKKINEKNIVVNITFY

SEQ ID NO: 11878 - protein, 463 aa, Unknown
  Description of Unknown: Integrase A446 sequence
  PF07508,G3DSA:1.10.10.2600,SSF53041,PS51737,cd00338, PF00239,PS51736,SM00857,G3DSA:3.40.50.1390,PTHR30461
MRAIIYCRVSSDPHARGKSVSEQEVDCRATAKAHGWDVGEVLVDNDRGASRYSRKDRPAYRRLTETLAPGDVLVTWEASRAQRDLSAYLQLRDLCAERGVLWSYSGRTYDLARGDDRFTTGLDALLSEKEVEVTRERVLRSMRANAAAGRPHGKLPYGYMIVRDPHTGRTLDRVANPDTAPTFREAVQRVLDGDSLYAVCQDFNDRGVPAPRPRRDGTPAKWIPVTLRKILESPTYAGLRSHNGEVIGEATWEPLISREEHERLKALFADPHRLTHRGSEPQWLLAGIARCGVCGATVKRIKSRGIQTYTCRDGFCAARMVTTVEDYVVEAVMRRLEGQDLVGQIDSDNAEYATAVDAVRALRQRLDSFTDAAAEGEVTPAALARIEAKLLPQIERAEGRVRALAHSPAVAKIAGAGARERWEALAVRDRRDLVRALVDVEIHRVGKGRRNVPIGEGIGLTWL

SEQ ID NO: 11879 - protein, 463 aa, Unknown
  Description of Unknown: Integrase A447 sequence
  PF07508,SSF53041,PS51737,cd00338,PF00239,PS51736, SM00857,G3DSA:3.40.50.1390,PTHR30461
MRAIIYCRVSSDPHARGKSVSEQEADCRATAKAHGWDVGEVLVDNDRGASRYSRKERPAYRRLAEILSPGDVLVTWEASRAQRDLSAYLQLRDLCSERGVLWSYSGRTYDLARGDDRFTTGLDALLSEKEVEVTRERVLRSMRANAAAGRPHGKLPYGYMIVRDPHTGQSIERVPNPDTAPTFREAAQRILDGESLYAVCNDFNDRGVPAPRPRRDGTPAKWIPVTLRKILESPTYAGLRWTHGEVIGPATWEPLISMEEHERLKALFADPNRLTHRGSEPQWLLAGIARCGVCGATVKRIKSRGVQTYMCRDKFCACRKVTTVEDYVVEAMMRRLEGQDLVGQIDSDNSEYAAAIDAVRALRQRLDSFTDAAAEGEVTPAALARIEAKLLPQIERAEGRVRALAHSPAVAKIAGTGARERWELLSVRDRRDLVRALVDVQIFRVGKGRRNVPIGEGIGLTWL

SEQ ID NO: 11880 - protein, 463 aa, Unknown
  Description of Unknown: Integrase A448 sequence
  PF07508,SSF53041,PS51737,cd00338,PF00239, PS51736,SM00857,G3DSA:3.40.50.1390,PTHR30461
MRAIIYCRVSSDPHARGKSVSEQEVDCRATAKAHGWDVGEVLVDNDRGASRYSRKDRPAYRRLAETLAPGDVLVTWEASRAQRDLSAYLQLRDLCAERGVLWSYSGRTYDLARGDDRFTTGLDALLSEKEVEVTRERVLRSMRANAAAGRPHGKLPYGYMIVRDPHTGRTLDRVANPDTAPTFREAVQRVLDGESLYAVCQDFNARDVPAPRPRRDGTPAKWIPVTLRKILESPTYAGLRSHNGEVIGEATWEPLISREEHERLKALFADPHRLTHRGSEPQWLLAGIARCGVCGATVKRIKSRGIQTYTCRAGFCAARMVTTVDDYVTEAVMRRLEGQDLVGQIDSDNSEYATAIDAVRALRQRLDSFTDAAAEGEVTPSALARIEAKLLPQIERAEGRVRALAHSPAVAKIAGTGARERWDALTVRDRRDLVRALVDVQIFRVGKGRRNVPIGEGIGLTWL

SEQ ID NO: 11881 - protein, 463 aa, Unknown
  Description of Unknown: Integrase A449 sequence
  PF07508,SSF53041,PS51737,cd00338,PF00239,PS51736,SM00857, G3DSA:3.40.50.1390,PTHR30461
MRAIIYCRVSSDPHARGKSVTEQEADCRATAKAHGWEIGEVLVDNDRGASRYSRKDRPAYRRLAEILAPGDVLVTWEASRAQRDLSAYLQLRDLCSERGVLWSYSGRTYDLARGEDRFTTGLDALLSEKEVEVTRERVLRSMRANAAAGRPHGKLPYGYMIVRDPHTGQSIERVPNPETAPTFREAAQRVLDGESLYAVCNDFNARGVPAPRPRRDGTPAKWIPVTLRKILESPTYAGLRWTHGEVIGPATWEPMISMEEHERLKALFADPHRLTHRGSEPQWLLAGIARCGVCGATVKRIKSRGSQTYTCRDGFCAARLVTTVDDYVTEAVMRRLEGQDLVGQIDSDNAEYAAAIDAVRALRQRLESFTDAAADGEVTPAALARIEAKLLPQIERAEGRVRALAHSPAVAKIAGTGARERWELLAVRDRRDLVRALVDVQIFRVGKGRRNVPIGEGIGLTWL

SEQ ID NO: 11882 - protein, 462 aa, Unknown
  Description of Unknown: Integrase A450 sequence
  PF07508,G3DSA:1.10.10.2600,SSF53041,PF13408,PS51737, cd00338,PTHR30461:SF3,PF00239,PS51736,SM00857, G3DSA:3.40.50.1390,PTHR30461
MGKSITVIPAKKVQTSVLHQDRKKIKVAAYCRVSTDQEEQLSSYENQVNYYREFISKHEDYELVDIYADEGISATNTKKRDAFNRLIQDCRAGKVDRILVKSISRFARNTLDCIKYVRELKELGVGVTFEKENIDSLDSKGEVLLTILSSLAQDESRSISENATWGIRKKFERGEVRVNTTKFMGYDKDENGRLIINPQQAETVKFIYEKFLEGYSPESIAKYLNDNEIPGWTGKANWYPSAIQKMLQNEKYKGDALLQKTFTVDFLTKKRVQNDGQVNQYYVENSHEAIIDEETWETVQLEMARRKTYRDEHQLKSYIMQSEDNPFTTKVFCGACGSAFGRKNWATSRGKRKVWQCNNRYRIKGVEGCYSSHLDEATLEQIFLKALELLSENIDLLDGKWEKILAENRLLDKHYSMALSDLLRQEQIDFNPSDMCRVLDHIRIGLDGEITVCLLEGTEVDL

SEQ ID NO: 11883 - protein, 462 aa, Unknown
  Description of Unknown: Integrase A451 sequence
  PF07508,G3DSA:1.10.10.2600,SSF53041,PF13408,PS51737,cd00338, PTHR30461:SF3,PF00239,PS51736,SM00857,G3DSA:3.40.50.1390, PTHR30461
MGKSITVIPAKKVQNIVQHQVRKKINVAAYCRVSTDQDEQLSSYENQVNYYRDYISKHEDYELVDIYADEGISATNTKKRDAFNRLIQDCRAGKVDRILVKSISRFARNTLDCIKYVRELKELGVGVTFEKENIDSLDSKGEVLLTILSSLAQDESRSISENATWGIRKKFERGEVRVNTTKFMGYDKDDNGRLIINPQQAETVKFIYEKFLEGYSPESIAKYLNDNEIPGWTGKANWYPSAIKKMLQNEKYKGDALLQKTFTVDFLTKKRVQNDGQVNQYYVENSHEAIIDKDTWELVQLELERRKAYREEHQLKSYIMQNDDNPFTTKVFCAECGSAFGRKNWATSRGKRKVWQCNNRYRVKGQIGCQNNHIDEETLEKAVVIAVELLSENVDLLHGKWNKILEENRPLEKHYCTKLAEMINKTSWEFDSYEMCQVLDSITISEDGQISVKFLEGTEVDL

SEQ ID NO: 11884 - protein, 462 aa, Unknown
  Description of Unknown: Integrase A452 sequence
  PF07508,SSF53041,PF13408,PS51737,cd00338, PF00239,PS51736,SM00857,G3DSA:3.40.50.1390,PTHR30461
MRAIIYCRVSSDPNARGKSVAEQESECRDTAASHGWTVGQVLIDNDRGASRYSRKDRPAYRKLNEILSPGDVLVTWEASRAQRDLQAYLQLRDLCSERGVLWCYSGRVYDLARGDDRFVTGLDALLSEKEVEQTRERVLRSVRANAAAGRPHGKLPYGYMIVRDPDTGQPMDRVPNPDTAPVVREIVTRVLAGESLYSLCRELNDRGIPGPRPKRDGSKSQWIPVTMRKIIESPTYAGLRTHQGQVVGRATWEPLVTMDEHERMKGLLADPRRLTQRGSEPRWLLSGIVRCGVCGSKMNRLKNRGCDSYVCKNGSHTSRKIETIDTYVTEAVIRRLEGQELVGQIDDDDAEYAAAVEAVRALQQRLDAFADSAADGELSPAALARVESRLRPQLEAAEARMRALVQSPVVAQMAGDGARERWERLDLHSRRELIRALVDIRIHQVGVGRRGLIGEGVEFTWL

SEQ ID NO: 11885 - protein, 462 aa, Unknown
  Description of Unknown: Integrase A453 sequence
  PF07508,G3DSA:1.10.10.2600,SSF53041,PF13408,PS51737,cd00338, PF00239,PS51736,SM00857,G3DSA:3.40.50.1390,PTHR30461
MRAIIYCRVSSDPKMRERSVQEQEIDCRAVASANGWDVGEVLIDNDRGASRYSRGDRPAYRRLAEILQPGDVLVTWEASRAQRDLGAYLQLRTLCEQRGVPWSYAGKLHDLTRGDDRFVTGLDALLSEKEVEQTRERVLRSVRANAAAGRPHGKLPYGYMIVRDPDTGQPVDRVPNPDTAPIVREIVTRVLAGDSLYSLCRELNERGVPGPRPKRDGSKSQWIPVTMRKIIESPTYAGLRTHQGQIVGPATWEPLVTMDEHERVKGLLADPRRLTQRGSEPRWLLSGIVRCGVCGSKMNRLKNRGCDSYVCKNGSHTSRKIETIDAYVTEAVIRRLEGQELVGQIDDDDAEYAAAVEAVRALQQRLDAFADSAADGELSPAALARVESRLRPQLEAAEARMRALVQSPVVAQMAGDGARERWERLDLHSRRELIRALVDIRIHQVGIGRRGLIGEGVEFTWL

SEQ ID NO: 11886 - protein, 462 aa, Unknown
  Description of Unknown: Integrase A454 sequence
  PF07508,G3DSA:1.10.10.2600,SSF53041,PF13408,PS51737, cd00338,PTHR30461:SF3,PF00239,PS51736,SM00857, G3DSA:3.40.50.1390,PTHR30461
MGKSITVIPAKKVQTSVQHQVRKKVNVAAYCRVSTDQDEQLSSYENQVNYYRDYISKHEDYELVDIYADEGISATNTKKRDAFNRLIQDCRAGKVDRILVKSISRFARNTLDCIKYVRELKELGVGVTFEKENIDSLDSKGEVLLTILSSLAQDESRSISENATWGIRKKFERGEVRVNTTKFMGYDKDESGRLIINPQQAETVKFIYEKFLEGYSPESIAKYLNDNEIPGWTGKANWYPSAIQKMLQNEKYKGDALLQKTFTVDFLTKKRVQNDGQVNQYYVENSHEAIIDKDTWELVQLELDRRKDYREEHQLKAYIIQNDDNPFTTKVFCKACGSAFGRKNWTTSRGKRKVWQCNNRYRVKGQIGCQNNHIDEETLEKAVVMAVELLSENVDLLHGKWNKILEENRPLEKYYSMKLAGIINKPSWEFDSYEMCQVLDSITISEDEQISVNFLEGTEVDL

SEQ ID NO: 11887 - protein, 461 aa, Unknown
  Description of Unknown: Integrase A455 sequence
  PF07508,G3DSA:1.10.10.2600,SSF53041,PS51737,cd03768, PTHR30461:SF3,PF00239,PS51736,SM00857,G3DSA:3.40.50.1390, PTHR30461
MKVAIYTRVSTLEQKEKGHSIEEQERKLRAYSDINDWKIHKVYTDAGYSGAKKDRPALQEMLNEIDNFDLVLVYKLDRLTRSVKDLLEILELFENKNVLFRSATEVYDTTSAMGRLFVTLVGAMAEWERTTIQERTAMGRRASARKGLAKTVPPFYYDRVNDKFVPNEYKKVLRFAVEEAKKGTSLREITIKLNNSKYKAPLGKNWHRSVIGNALTSPVARGHLVFGDIFVENTHEAIISEEEYEEIKLRISEKTNSTIVKHNAIFRSKLLCPNCNQKLTLNTVKHTPKNKEVWYSKLYFCSNCKNTKNKNACNIDEGEVLKQFYNYLKQFDLTSYKIENQPKEIEDVGIDIEKLRKERARCQTLFIEGMMDKDEAFPIISRIDKEIHEYEKRKDNDKGKTFNYEKIKNFKYSLLNGWELMEDELKTEFIKMAIKNIHFEYVKGIKGKRQNSLKITGIEFY

SEQ ID NO: 11888 - protein, 461 aa, Unknown
  Description of Unknown: Integrase A456 sequence
  PF07508,G3DSA:1.10.10.2600,SSF53041,PS51737,cd03768, PTHR30461:SF3,PF00239,PS51736,SM00857,G3DSA:3.40.50.1390, PTHR30461
MKVAIYTRVSTLEQKEKGHSIEEQERKLRAYSDINDWKIHKVYTDAGYSGAKKDRPALQEMLNEIDNFDLVLVYKLDRLTRSVKDLLEILELFENKNVLFRSATEVYDTTSAMGRLFETLVGAMAEWERTTIQERTAMGRRASARKGLAKTVPPFYYDRVNDKFVPNEYKKVLRFAVEEAKKGTSLREITIKLNNSKYKAPLGKNWHRSVIGNALTSPVARGHLVFGDIFVENTHEAIISEEEYEEIKLRISEKTNSTIVKHNAIFRSKLLCPNCNQKLTLNTVKHTPKNKEVWYSKLYFCSNCKNTKNKNACNIDEGEVLKQFYNYLKQFDLTSYKIENQPKEIEDVGIDIEKLRKERARCQTLFIEGMMDKDEAFPIISRIDKEIHEYEKRKDNDKGKTFNYEKIKNFKYSLLNGWELMEDELKTEFIKMAIKNIHFEYVKGIKGKRQNSLKITGIEFY

SEQ ID NO: 11889 - protein, 461 aa, Unknown
  Description of Unknown: Integrase A457 sequence
  PF07508,G3DSA:1.10.10.2600,SSF53041,PS51737,cd03768,PTHR30461:SF3 ,PF00239,PS51736,SM00857,G3DSA:3.40.50.1390,PTHR30461
MKVAIYTRVSTLEQKEKGHSIEEQERKLRAYSDINDWKIHKVYTDAGYSGAKKDRPALQEMLNEIDNFDLILVYKLDRLTRSVKDLLEILELFENKNVSFRSATEVYDTTSAMGRLFVTLVGAMAEWERTTIQERTAMGRRASARKGLAKTVPPFYYDRVNDKFVPNEYKKVLRFAVEEAKKGTSLREITMKLNNSKYKAPLGKNWHRSVIRSALISPVARGHLVFGDIFVENTHEAIISEEEYKEIKQRISEKTNSTIVKHNAIFRSKLLCPNCNQKLTLNTVKHTPKNKEVWYSKLYFCVNCKNTKNKNACNIDEREVLKQFYNYLKQFDLTSYKTKNQPKETEDVGIDIEKLRKERARCQTLFIEGMMNKDEAFPIISRIDQEIRDYENRKSDNKSKSFDYEKIKNFKYSLLNGWELMEDELKTEFIKMAIKNIHFEYVRGIKGKRQNSLRITGIEFY

SEQ ID NO: 11890 - protein, 461 aa, Unknown
  Description of Unknown: Integrase A458 sequence
  PF07508,G3DSA:1.10.10.2600,SSF53041,PF13408,PS51737, cd03768,PTHR30461:SF3,PF00239,PS51736,SM00857, G3DSA:3.40.50.1390,PS00397,PTHR30461
MNVAIYCRVSTLEQKEHGYSIEEQERKLKQFCEINDWNVADVFVDAGFSGAKRDRPELQRMMNDIKRFDLILVYKLDRLTRNVRDLLDLLEIFEQNNVAFRSATEVYDTSTAMGRLFVTLVGAMAEWERETIRERTQMGKLAALKKGIMLTTPPFYYDRVDNKFVPNKYKEIVLFAYEEALKGKSAKSIARKLNNSDIPPPNNRKWEDRSITRALRSPFTRGHFEWGGVYLENNHEPIITEEMYEKVKDRLEERTNTKKVKHTSIFRSKLVCPTCHNKLTMNTHKVTLKDRVYYNKHYYCNNCKETPNVKPVYIRAEEVERVFYEYLQHQDLTQYEVVEDTEEKEVAIDINKVMQQRKRYHKLYANGLMNEDELAELIEETDAAIEEYKKQNENKEVKQYSDEDITEYKSLLLEMWEISSDEEKAEFIQMAIKNIFIEYVLGKNDNKKKRRSLKIKDIEFY

SEQ ID NO: 11891 - protein, 461 aa, Unknown
  Description of Unknown: Integrase A459 sequence
  PF07508,G3DSA:1.10.10.2600,SSF53041,PS51737, cd03768,PTHR30461:SF3,PF00239,PS51736, SM00857,G3DSA:3.40.50.1390,PS00397,PTHR30461
MNVAIYCRVSTLEQKEHGYSIEEQERKLKSFCEINDWTVSDVFVDAGFSGAKRDRPELQRMMNNIKRFDLVLVYKLDRLTRNVRDLLDLLEIFEQNNVAFRSATEVYDTSTAMGRLFVTLVGAMAEWERETIRERTQMGKLAALKKGIMLTTPPFYYDRVDNKFVPNKYKEVVLFAYEEALKGKSAKSIARKLNNSDIEPPNNRKWEDRSITRALRSPFTRGHFEWGGVYLENNHEPIITEEMYEKVKDRLEERTNTKKIKHVSIFRSKLVCPTCHNKLTMNTHKVNLKDRVYYNKHYYCNNCKETPNLKPVYIRAEEVERVFYEYLQHKDLTQYEVVEDTEEKEVAIDINKVMQQRKRYHKLYANGLMNEDELAELIEETDAAIEEYKKQNENKEVKQYSDEDITEYKSLLLEMWDISSDEEKAEFIQMAIKNIFIEYVLGKNDNKKKRRSLKIKDIEFY

SEQ ID NO: 11892 - protein, 460 aa, Unknown
  Description of Unknown: Integrase A460 sequence
  PF07508,G3DSA:1.10.10.2600,SSF53041,PF13408,PS51737, cd00338,PTHR30461:SF3,PF00239,PS51736,SM00857, G3DSA:3.40.50.1390,PTHR30461
MKCAIYRRVSTDEQAEKGFSLENQLLRLQAFAESQGWEVVHDYMDDGYSGKNMNRPQIKRMLHDLKSNKFDIVLVYRLDRFTRSVKDLNDLLEVFKEHEVDFKSATESIDTATATGRMILNMMVSTAQWERETISERVKDVVRKKKDLGLISTGYPPYGYAMNDGVISQVPHEVEIVKFVFEKAKVYGFQKISKLLNEQGLVTRNGTKWLISTASRIAHNPFYSGEMRYKRDGETSTVPINVEGYEPVITKEEHKEVLKAIKKRNRNQTRAKSNEVYPFSGIVLCPECGHPMKGTRVSSRGYYYKYYRCDRASDHFCNGKLIRYEKLDKAFAEYIHDAFQIDRIEIKEETNTKDIQREIKRCKSKIERLKDLYVDGDISKKKYKNDVGELNEKIYDLEQKLLSAENKISHDHIRENLKRLSEFWGLIDDNTKMESIRGVFDTITVEIQGNDVVITDHTLL

SEQ ID NO: 11893 - protein, 460 aa, Unknown
  Description of Unknown: Integrase A461 sequence
  PF07508,G3DSA:1.10.10.2600,SSF53041,PF13408,PS51737,cd03768, PTHR30461:SF3,PF00239,PS51736,SM00857,G3DSA:3.40.50.1390, PS00397,PTHR30461
MKKVKRTALYIRVSTTEQAQEGYSIGEQKERLEQYVKAMGWIISGEYIDPGFSGSNTDRPALNKLIDEINQHDIVLVYKLDRLSRSQKDTMLLIEDVFLKNDVDFVSMSESFDTSTPFGRAAIGLLATFAQLERENIKERMTMGMRGRAKKGYWKGTNRPPIGYDYIDGNLIINDYEAMQIRELYSIAANGIPGMNYNVRNMARYLSEKYTNKYGNWSDHSGISYTIHNKVYIGFVKYNDDFYPGQHQPIVDNKLFEKANARLDSYLSQFGEHVTYNKYMLSGITYCGICGKPYYRRNSQTKLNGIKKEYGYYSCEGRKSNVQNKCPSKIFQQKELEQSVVNQIQKLKYHDFKSETIQDNTSILLNQVKALDIKQERLIDLYSIGSISKDQINDRIKALNSEREKIKTLLSRPKKLNTSEILSISSQIEESDYSTKCDMVHTLVDKVIIDGNQTRIYWRF

SEQ ID NO: 11894 - protein, 459 aa, Unknown
  Description of Unknown: Integrase A462 sequence
  PF07508,G3DSA:1.10.10.2600,SSF53041,PS51737,cd03768, PTHR30461:SF3,PF00239,PS51736,SM00857,G3DSA:3.40.50.1390, PTHR30461
MTEIASTKARKRCAVYCRVSSDERLDQEFNSIDAQKEAGHAFIASQRAEGWIAVADDYDDPGYSGGNTERPALKRLMADIQRGLIDIVVVYKIDRLTRSLADFSKMVEVFERQGVSFVSVTQQFNTTTSMGRLTLNILLSFAQFEREVTGERIRDKIAAAKKKGLWMGGVPPLGYDVANRQLVINEAEAAVVRRIFEEMLSIGSPTQIAARLTAEGITTKAWTTQDGRVRTGTRIDKKYIHKVLRNRIYLGELSSRGQWYPGVHEPIIERQLWDQVHAVLARDSHARSVETKIRSRTDALLRGLLYAPSGERMYPTYSRKNGRKYHYYVSKSESRFGAPGKSYERLPAGEIEAAVVAQIRTVLTSPESIAAVVRHVQRQGAPIDEATVVMAMGRLNDVWDQLFPVEQHRIANLMIERIDLVHTAEMQGIRVKWRELGWDALIGEFAPRSIGAELLEVEA

SEQ ID NO: 11895 - protein, 458 aa, Unknown
  Description of Unknown: Integrase A463 sequence
  PF07508,G3DSA:1.10.10.2600,SSF53041,PS51737,cd03768, PTHR30461:SF3,PF00239,PS51736,SM00857, G3DSA:3.40.50.1390,PTHR30461
MKVAIYTRVSTLEQKEKGHSIEEQERKLRAYSDINDWTIQGVYVDAGYSGAKTDRPELNRLKENLSKIDLVLVYKLDRLTRNVKDLLDLLEIFERENVSFRSATEVYDTSTAMGRLFVTLVGAMAEWERETIRERAMMGKQAAIRKGMILTPPPFYYDRVDNKYIPNKYKDVVVWAYEEVKKGNSAKGIARKLNASDIPPPNGIQWEDRTITRALRSPLSKGHYFWGDIFIENSHEPIITDEMYNEIKERLNERVNAKTITHTSVFRGKLICPNCNGRLCLNTSYRKLKRGDVIHKNYYCNNCKVNKSGAFSFTEKEALKVFYDYLSKLDLSKYKAKEKEDKKIVTIDINKVMEQRKRYHKLYANGMMQEEELFELIKETDEKISEYEKQKERVPKKRLDVSKIKNFKNILLDSWNAFTLEDKEDFIKMAIKSIEIEYIHVKRGKTKHSIKIKNIDFY

SEQ ID NO: 11896 - protein, 458 aa, Unknown
  Description of Unknown: Integrase A464 sequence
  PF07508,G3DSA:1.10.10.2600,SSF53041,PS51737,cd03768, PTHR30461:SF3,PF00239,PS51736,SM00857,G3DSA:3.40.50.1390, PTHR30461
MNYERSYLRSCQVSTLEQKEHGYSIEEQERKLKSFCEINDWSVSDVFIDAGFSGAKRDRPELQRMMNDIKRFDLVLVYKLDRLTRNVRDLLDLLEVFEQNNVAFRSATEVYDTSTAMGRLFVTLVGAMAEWERETIRERVMMGKRAAIKQGMILTPPPFYYDRVDNTYIPNDYKKVVLWAYDEVMKGNSSKAIARKLNDSDIPPPNGKRWEDRTITRALRNPITRGHYTWGDVFIENSHEPIITEEMYQQIKERLEERINTKIVSHVSVFRGKFICPRCGGTLTMNTATRKRKKGYVTYKTYYCNTCKTKKQSFGFSENEALRVFRDYLSKLDLDKYEVKTKQKDDVVTIDIDKIMEQRKRYHKLYAKGLMQEEELFELIKETDETIAEYEKQKELVPRKSLDIDKIKKFKNALLESWKIFSLEDKADFIKMAIKSIDIDYVKLKNRHSIKINDIEFY

SEQ ID NO: 11897 - protein, 458 aa, Unknown
  Description of Unknown: Integrase A465 sequence
  PF07508,G3DSA:1.10.10.2600,SSF53041,PS51737,cd03768, PTHR30461:SF3,PF00239,PS51736,SM00857, G3DSA:3.40.50.1390,PTHR30461
MNYERSYLRSCQVSTLEQKEHGYSIEEQERKLKSFCKINDWSVSDVFIDAGFSGAKRDRPELQRMMNDIKRFDLVLVYKLDRLTRNVRDLLDLLEVFEQNNVAFRSATEVYDTSTAMGRLFVTLVGAMAEWERETIRERVMMGKRAAIKQGMILTPPPFYYDRVDNTYIPNDYKKVVLWAYDEVMKGNSSKAIARKLNDSDIPPPNGKRWEDRTITRALRSPITRGHYTWGDVFIENSHEPIITEEMYQQIKERLEERINTKIVSHVSVFRGKFICPRCGGTLTLNTVTRKRKKGYVTYKTYYCNTCKAKKESFGFSENEALRVFRDYLSELDLDKYKVKTKQNDDVVTIDIDKIMEQRKRYHKLYAKGLMQEEELFELIKETDETIAEYEKQKELVPRKSLDIDKIKKFKNALLESWEIFSLEDKADFIKMAIKSIDIEYVKLKNRHSIKINDIEFY

SEQ ID NO: 11898 - protein, 458 aa, Unknown
  Description of Unknown: Integrase A466 sequence
  PF07508,G3DSA:1.10.10.2600,SSF53041,PS51737,cd03768, PTHR30461:SF3,PF00239,PS51736,SM00857,G3DSA:3.40.50.1390, PTHR30461
MNYERSYLRSCQVSTLEQKEHGYSIEEQERKLKSFCKINDWSVSDVFIDAGFSGAKRDRPELQRMMNDIKRFDLVLVYKLDRLTRNVRDLLDLLEVFEQNNVAFRSATEVYDTSTAMGRLFVTLVGAMAEWERETIRERVMMGKRAAIKQGMILTPPPFYYDRVDNTYIPNDYKKVVLWAYDEVMKGNSSKAIARKLNDSDIPPPNGKRWEDRTITRALRNPITRGHYTWGDVFIENSHEPIITEEMYQQIKERLEERINTKIVSHVSVFRGKFICPRCGGTLTMNTATRKRKKGYVTYKTYYCNTCKTKKQSFGFSENEALRVFRDYLSKLDLDKYEVKTKQKDDVVTIDIDKIMEQRKRYHKLYAKGLMQEEELFELIKETDETIAEYEKQKELVPRKSLDIDKIKKFKNALLESWKIFSLEDKADFIKMAIKSIDIDYVKLKNRHSIKINDIEFY

SEQ ID NO: 11899 - protein, 458 aa, Unknown
  Description of Unknown: Integrase A467 sequence
  PF07508,G3DSA:1.10.10.2600,SSF53041,PS51737,cd03768, PTHR30461:SF3,PF00239,PS51736,SM00857, G3DSA:3.40.50.1390,PTHR30461
MNYERSYLRSCQVSTLEQKEHGYSIEEQERKLKSFCEINDWSVSDVFIDAGFSGAKRDRPELQRMMKDIKKFDLVLVYKLDRLTRNVRDLLDLLEIFEQNNVAFRSATEVYDTSTAMGRLFVTLVGAMAEWERETIRERVMMGKRAAIKQGMILTPPPFYYDRVDNTYIPNDYKKVVLWAYDEVMKSNSSKAIARKLNDSDIPPPNGKRWEDRTITRALRSPITRGHYTWGDVFIENSHEPIITEEMYQQIKERLEERINTKIVSHVSVFRGKFICPRCGGTLTLNTTTRKRKKGYVTYKTYYCNTCKGKKESFGFAENEALRVFHDYLSKLDLEKYKVKTKQKDNVVTIDIDKIMEQRKRYHKLYAKGLMQEEELFELIKETDETIAEYEKQKELAPRKMLNVDKIKKFKSVLLESWEIFSLEDRADFIKMAIKSIDIEYVKLKNRHSIEIKDIEFY

SEQ ID NO: 11900 - protein, 458 aa, Unknown
  Description of Unknown: Integrase A468 sequence
  PF07508,G3DSA:1.10.10.2600,SSF53041,PS51737,cd03768, PTHR30461:SF3,PF00239,PS51736,SM00857,G3DSA:3.40.50.1390, PTHR30461
MNYERSYLRSCQVSTLEQKEHGYSIEEQERKLKSFCEINDWSVSDVFIDAGFSGAKRERPELQRMMKDIKRFDLVLVYKLDRLTRNVRDLLDLLEIFEQNNVAFRSATEVYDTSTAMGRLFVTLVGAMAEWERETIRERVMMGKRAAIKQGMILTPPPFYYDRVDNTYIPNDYKKVVLWAYDEVLKGVSSKAIARKLNDSDIPPPNGKKWEDRTITRALRSPIARGHYTWGDVFIENSHEPIITEEMYQQIKERLEERINTKIVSHVSVFRGKFICPKCGGTLTLNTVTRKRKKGYVTYKTYYCNTCKTRKQSFGFAENEALRVFRDYLSKLDLEKYKVKTKQKDDVVTIDIDKIMEQRKRYHKLYAKGLMQEEELFELIKETDETIAEYEKQKELVPRKSLDIDKIKKFKNALLESWKIFSLEDKADFIKMAIKSIDIDYVKLKNRHSIKINDIEFY

SEQ ID NO: 11901 - protein, 458 aa, Unknown
  Description of Unknown: Integrase A469 sequence
  PF07508,G3DSA:1.10.10.2600,SSF53041,PS51737,cd03768, PTHR30461:SF3,PF00239,PS51736,SM00857, G3DSA:3.40.50.1390,PTHR30461
MNYERSYLRSCQVSTLEQKEHGYSIEEQERKLKSFCEINDWSISDVFIDAGFSGAKRDRPELQRMMKDIKRFDLVLVYKLDRLTRNVRDLLDLLEIFEQNNVAFRSATEVYDTSTAMGRLFVTLVGAMAEWERETIRERVMMGKRAAIKQGMILTPPPFYYDRVDNTYIPNDYKKVVLWAYDEVLKGVSSKGIARKLNDSDIPPPNGKRWEDRTITRALRSPITRGHYTWGDVFIENSHEPIITEEMYQQIKERLEERINTKIVSHVSVFRGKFICPRCGGTLTMNTATRKRKKGYVTYKTYYCNTCKGKKESFGFAENEALRVFRDYLSKLDLDKYEVKTKQKDDVVTIDIDKVMEQRKRYHKLYAKGLMQEEELFELIKETDETIAEYEKQKELVPRKTLDVDKIKKFKNVLLESWKIFSSEDKADFIKMAIKSIDIEYVKFKNRHSIKINDIEFY

SEQ ID NO: 11902 - protein, 458 aa, Unknown
  Description of Unknown: Integrase A470 sequence
  PF07508,G3DSA:1.10.10.2600,SSF53041,PS51737,cd03768, PTHR30461:SF3,PF00239,PS51736,SM00857,G3DSA:3.40.50.1390, PTHR30461
MNYERSYLRSCQVSTLEQKEHGYSIEEQERKLKSFCEINDWSVSDVFIDAGFSGAKRERPELQRMMKDIKRFDLVLVYKLDRLTRNVRDLLDLLEIFEQNNVAFRSATEVYDTSTAMGRLFVTLVGAMAEWERETIRERVMMGKRAAIKQGMILTPPPFYYDRVDNTYIPNDYKKVVLWAYDEVLKGVSSKAIARKLNDSDIPPPNGKKWEDRTITRALRSPIARGHYTWGDVFIENSHEPIITEEMYQQIKERLEERINTKIVSHVSVFRGKFICPKCGGTLTLNTVTRKRKKGYVTYKTYYCNTCKTRKQSFGFAENEALRVFRDYLSKLDLEKYKVKTKQKDDVVTIDIDKIMEQRKRYHKLYAKGLMQEEELFELIKETDETIAEYEKQKELVPRKTLDIDKIKKFKNVLLESWEIFSLEDKADFIKMAIKSIDIEYVKLKNRHSIKINDIEFY

SEQ ID NO: 11903 - protein, 456 aa, Unknown
  Description of Unknown: Integrase A471 sequence
  PF07508,SSF53041,PS51737,cd00338,PF00239, PS51736,SM00857,G3DSA:3.40.50.1390,PTHR30461
MADQLETARKFSADRGYDVVAEHSDNDISAFRGADRPGYQRVLKLARERKIDRVIVYQLTRMTRNRGERAEFIDAFHACKVNVSEAQGGDYDLSTAAGRSWVDIQGALATWESEIKSERVTAAAARRARSGRPSGDLGYGWIKHGTGASATWTEHPHEAEVVREIVDRLLAGETLRGITQSLNDRGEPAPKSASWGKTSVKKLALRESNVALRIHHRGQADEERFDGCWPALVDRAKHEKVGALLREPARQTNGTKRPGARKHLLSWGIGECGVCGGMLRVATKRGRYGRPLDLYVCDANNGCVGRSEPAVDNLVKTVAIKRLSRPDALEWLLGDDDEARRWAERVDELNRRLADAADAFADGAITGEQLRRITAKLQPDLDDALERARESAGALNVDVLRPLAGPEAAQRWDDMEMAQRRAVLEALGLRVIIDRTRRGPGFDPSSVRFVWGRSAD

SEQ ID NO: 11904 - protein, 455 aa, Unknown
  Description of Unknown: Integrase A472 sequence
  PF07508,G3DSA:1.10.10.2600,SSF53041,PF13408,PS51737, cd00338,PTHR30461:SF3,PF00239,PS51736,SM00857, G3DSA:3.40.50.1390,PS00397,PTHR30461
MANEIKQVALYIRVSTDQQAKHGDSLDEQQHTLNEYVRQQGNMRVFKTYIDDGISGQKLYRDEFQKLLDDVKKGKIDTILFTKLDRWFRNLRHYLNIQEILDKNNVTWLAVTQPFFNTETAMGRSFVNQSMGFAELEAQMTSERIRAVFDNKIRKGEVVSGKVPLGYDIKDKHLVPNEKAEIVKEIFQYYLETGSMRATVRHLENHFSMTRDYQSVRQMLTNRKYIGELRDNKNFCEPIIDRDVFERVQLQLSKNIRMNKKRDYMFTGLLVCSECGCNYSATAVISRYVRKDGTTNPNERHLYRCTKNRNNVKKCSNKKGIYETTLENFLLENIEKQAEELSVKMQQESEVKKTKNTNDKIKKKIDRLKKAYLNEVITLEEYKKDREELEALLIPEQDNKISKIDLNSLHNYSTAEFRDGYKQLTVSEKSSLWRQVIKNIVVYPDGNLKINFLGY

SEQ ID NO: 11905 - protein, 455 aa, Unknown
  Description of Unknown: Integrase A473 sequence
  cd00569,G3DSA:1.10.10.60,SSF46689,PF02796
MSGSHNIKLTLEQRQKLVRMHSEGTTVVDLAEQFGVSRPTVYNVLEKMGKTNHKKIDFYVDKKSENKEEMNPSPTILDEIKTTNFLGITIDTEGGTSNPKIRKTLDKSFKLLDVVEFVKVTKFKLNTVMFDYFWQVVVGKSRLHVSTAVLEWFGYLGEYRKQKEAFLKILRRNEISYRELTKKDKEIELYPTIKEELQTVNEGAQACSKFLIMEPDDLKMAIMQLKTKNGHTIRQYYIDLEKLLKMYTEYTLYFNHREAQRKITGLEEMMVKMDLERKQEREVDRQLILRQEQYMRSLGISLEEVKDQNEELLDNNKGLKKNVKGLRSEVKDVKRKLGIAVEDRAPLPVDEEIQERFVLIKRNDEQHYQYYTIRAQHGYTERRIKIQRVLFPQLEILLDFKANPNSKSLYNRIKKELKIKSVQFSGNNIDLEGSEVIEEELIEEMKVINDQKYNI

SEQ ID NO: 11906 - protein, 455 aa, Unknown
  Description of Unknown: Integrase A474 sequence
  PF07508,G3DSA:1.10.10.2600,SSF53041,PF13408,PS51737, cd00338,PTHR30461:SF3,PF00239,PS51736,SM00857, G3DSA:3.40.50.1390,PTHR30461
MKCAIYRRVSTDEQAEKGFSLENQLLRLQAFAESQGWEVVHDYMDDGYSGKNMNRPQIKRMLHDLKSNKFDIVLVYRLDRFTRSVKDLNDLLEVFKEHEVDFKSATESIDTATATGRMILNMMVSTAQWERETISERVKDVVRKKKDLGLISTGYPPYGYAMNDGVISQVPHEVEIVKFVFEKAKVYGFQKISKLLNEQGLVTRNGTKWLISTASRIAHNPFYSGEMRYKRDGETSTVPINVEGYEPVITKEEHKEVLKAIKKRNRNQTRAKSNEVYPFSGIVLCPECGHPMKGTRVSSRGYYYKYYRCDRASDHFCNGKLIRYEKLDKAFAEYIHDAFQIDRIEIKEETNTKDIQREIKRCKSKIERLKDLYVDGDISKKKYKNDVGELNEKIYDLEQKLLSAENKISHDHIRENLKRLSEFWGLIDDNTKMESIRGVFDTITVENTRERRLYH

SEQ ID NO: 11907 - protein, 453 aa, Unknown
  Description of Unknown: Integrase A475 sequence
  PF07508,G3DSA:1.10.10.2600,SSF53041,PF13408,PS51737,cd03768, PTHR30461:SF3,PF00239,PS51736,SM00857,G3DSA:3.40.50.1390, PS00397,PTHR30461
MTKAAIYIRVSTQDQVENYSIEVQRERIRAYCTAKGWDIYDEYIDGGYSGSNLDRPDIKRLLNDLKKIDVVVVYKLDRLSRSQRDTLELIEEHFLKNNVDFVSITETLDTSTPFGKAMIGILSVFAQLERETIAERMRMGHIKRAENGLRGNGGDYDPSGYTRVDGHLILKPDEAKHIKRAFDLYEQYHSITRVQEVLKEEGYTVWRFRRYRDILSNILYIGRVTFSGKEYKGQHEPIISSEQFKRVQVLLKRHKGHNAHKAKQSLLSGLITCSCCGEKYVAYSTGKSKDVESKRYYYYICRAKRFPSEYDERCMNKTWSRKKLEEVIFDELKNLTVKQSVSQKKEKKINYEKLIKDIDKKMERLLDLFTNTTNISRQLLETKMDKLNSEKEHLILKQQSYEQEFSISKDMITTINESLETMDFRAKQVMINTFIQEIHIDHDVVDIIWRWRF

SEQ ID NO: 11908 - protein, 452 aa, Unknown
  Description of Unknown: Integrase A476 sequence
  PF07508,G3DSA:1.10.10.2600,SSF53041,PF13408,PS51737, cd00338,PTHR30461:SF3,PF00239,PS51736,SM00857, G3DSA:3.40.50.1390,PS00397,PTHR30461
MLRVALYIRVSTEEQALNGDSIRTQIEALEQYSKENDFNIVGKYIDEGCSATNLKRPNLQRLLRDVEKDKVDLVLMTKIDRLSRGVKNYYKIMETLEKHKCDWKTILENYDSSTAAGRLHINIMLSVAENEAAQTSERIKFVFQDKLRRKEVISGTIPIGYKIENKHLVIDKEKKYIVKAIFDEYEKSGSVRTLIETINNLHGELYSYNKIKNILRNELYIGIYNKRGFYVEDYCEPIISKKQFKQIQRILEKNKKTTPNKNIHYHIFSGLLKCKECGYTLKGNSSNVGEKLYLSYRCSTFYLNKNCVHNVTHNEKHIENYLLTNLKPQLHKHMVKLEAQNEKIRRNKKSNKKDEKKKIMKKLDKIKDLYLEDLIDKETYRKDYEKLQSQLDNITEEQESQIIDTSHIKKFLDIDINEMYSDLSRVERRRFWLSIIDYIEIDNNKNITINFI

SEQ ID NO: 11909 - protein, 452 aa, Unknown
  Description of Unknown: Integrase A477 sequence
  PF07508,G3DSA:1.10.10.2600,SSF53041,PF13408,PS51737, cd03768,PTHR30461:SF3,PF00239,PS51736, SM00857,G3DSA:3.40.50.1390,PS00397,PTHR30461
MKAAIYIRVSTQEQVENYSIQAQTEKLTALCRSKDWDVYDIFIDGGYSGSNMNRPALNEMLSKLHEIDAVVVYRLDRLSRSQRDTITLIEEYFLKNNVEFVSLSETLDTSSPFGRAMIGILSVFAQLERETIRDRMVMGKIKRIEAGLPLTTAKGRTFGYDVIDTKLYINEEEAKQLQLIYDIFEEEQSITFLQKRLKKLGFKVRTYNRYNNWLTNDLYCGYVSYKDKVHVKGIHEPIISEEQFYRVQEIFTRMGKNPNMNRDSASLLNNLVVCSKCGLGFVHRRKDTMSRGKKYHYRYYSCKTYKHTHELEKCGNKIWRADKLEELIINRVNNYSFASRNVDKEDELDSLNEKLKIEHAKKKRLFDLYINGSYEVSELDSMMNDIDAQINYYESQIEANEELKKNKKIQENLADLATVDFDSLEFREKQLYLKSLINKIYIDGEQVTIEWL

SEQ ID NO: 11910 - protein, 452 aa, Unknown
  Description of Unknown: Integrase A478 sequence
  PF07508,G3DSA:1.10.10.2600,SSF53041,PF13408,PS51737, cd03768,PTHR30461:SF3,PF00239,PS51736,SM00857, G3DSA:3.40.50.1390,PS00397,PTHR30461
MKAAIYIRVSTQEQIENYSIQAQTEKLTALCRSKDWDVYDIFIDGGYSGSNMNRPALNEMLSKLHEIDAVVVYRLDRLSRSQRDTITLIEEYFLKNNVEFVSLSETLDTSSPFGRAMIGILSVFAQLERETIRDRMVMGKIKRIEAGLPLTTAKGRTFGYDVIDTKLYINEEEAKQLQMIYDIFEEEKSITTLQKRLKKLGFKVKSYSSYNNWLTNDLYCGYISYADKVHTKGVHEPIISEEQFYRVQEIFSRMGKNPNMNRDSASLLNNLVVCGKCGLGYVHRRKDTVSRGKKYHYRYYSCKTYKHTHELEKCGNKIWRADKLEELIIDRVNNYSFASRNVDKEDELDSLNEKLKTEHTKKKRLFDLYISGSYEVSELDAMMSDIDAQINYYEAQIEANEELKKNKKIQENLADLATVDFDSLEFREKQLYLKSLINKIYIDGEQVTIEWL

SEQ ID NO: 11911 - protein, 451 aa, Unknown
  Description of Unknown: Integrase A479 sequence
  PF07508,G3DSA:1.10.10.2600,SSF53041,PF13408,PS51737, cd03768,PTHR30461:SF3,PF00239,PS51736, SM00857,G3DSA:3.40.50.1390,PS00397,PTHR30461
MTKAAIYIRVSTQDQIENYSIEVQRERIRAFCKAKNWDIYDEYIDGGYSGSNLERPGIKKLITDLKNIDAVVVLKLDRLSRSQRDTLELIEEHFLKNKVDFVSITETLDTSTPFGKAMIGILSVFAQLERETIAERMRMGHVKRAENGLRGNGGDYDPAGYTRKDGQLIIKEDEATHIKRVFDLYEQYYSITKVQEVLKEEGYPIWRFRRYRDILSNTLYIGRVTFSGKEYEGQHEPIVTSEQFKRVQTLLKRHKGHNAHKAKQSLLSGLIACSCCGENYVAYSTGKSKDTESKRYYYYICRAKRFPAEYEERCMNKTWSRKKLEEVVISELKSLTEEKKQTNKKEKKVNYEKLIKDIDKKMERLLDLFMNTTNISKNLLEQQMEKLNLEKEKLLLKQQRSEEESISHEVTLTAIDDAFETLDFKEKQVIINNFIEKIYINQNNVKIIWRF

SEQ ID NO: 11912 - protein, 450 aa, Unknown
  Description of Unknown: Integrase A480 sequence
  PF07508,G3DSA:1.10.10.2600,SSF53041,PF13408,PS51737, cd03768,PTHR30461:SF3,PF00239,PS51736,SM00857, G3DSA:3.40.50.1390,PS00397,PTHR30461
MLEVCMKIAVYVRVSTLEQAESGYSIGEQTEKLTAYCRVKDWQVAKIYTDPGFSGSSLDRPAMQQLIGDCKLGVFDAVLVYKLDRLSRSQKDTLYLIEDVFNAYNIHFMSLSENFDTSTPFGKAMIGLLSVFAQLEREQIKERMQMGKLGRVKAGKISAWSNVPFGYTKVKDSYDVDPLRADIVRRIYADYLAGKSITKIMKELNREGHIGKGVAWSYRTVRQVLGNVTYTGRIIFKGQVYDGLHTGIISKADWDEVQRVLKIRQLDQARKSNNPRPFQARYMLSGLLKCHYCGATLAIAKSHTKNGPLWRYVCPTRHANKYHRNNAARYRIPPVNCELTYKYKDDLEEAVLREVKKVALDPDAVVASQDDGQPKIDKQAIKAQLAKIKRQQAKLVDLYLLSDDLMLTSFTIGPKSLKSKLMLSRHNLSMMPKRPTPLKRRRPMLHRLIS

SEQ ID NO: 11913 - protein, 450 aa, Unknown
  Description of Unknown: Integrase A481 sequence
  cd00569,G3DSA:1.10.10.60,SSF46689,PF02796
METKPRLTVEQRTNVVKKYQDGCSVAEITREFKISRPTVYKILSKVNLTSKNEIFSEKEDGNKDMENTTFLGVNIDTINGPFDFKIKKALKRSLKLLNVVEFIKVTKFNLNLVMFDYFWQVVVGNRSTLVGRPVLEWFGYEGEYFKQRQNFKKMLRNNSIQYRELTQNDNEIELYPTVKQELQELNAGAQACAKFLIMEPDDLKMAIMQLKTKNGDTIRQYYIDLEKLLKLYVEYTLYFNHRESQRKITNLEEMMADMRLDMKEERKIREEDREKDRELIQQQTQYMRSLGISLEEVKDQNEELLDNNRGLKKEVKKVQYKLGIAVEDRAPLPVNEDKQERFILLKRNDNEHFQYYTIRAQHKYTERRIKVQKTLFPHLQILLDFMANPNSKSLYVRIKDTLKTKNVQFNGNNIDLEGSEVTEEELLEEMKVINDQKYKILKLSPKKVFD

SEQ ID NO: 11914 - protein, 449 aa, Unknown
  Description of Unknown: Integrase A482 sequence
  G3DSA:1.10.10.60,SSF46689
MEITTGNKSRLTKEERQAVFQMRCNNVPITQIANKFKVSRPTIYSIIEMERKNQTKNDFFFEKEDLNKDMSNLISSEIKTTFLGVTIDTENGSSNPKINKALNTSLDLLDIVQFIKVTKFKINSVMFDYFWQVVVGNQCTLVGTVVLEWFGYEGEYRKQRQNFKKMLSNNNISYSELSYKDKEIELYPAIQEELQLLPHDGARACSKFLVMKPRDLKMAIMQLKTKNGHTIRDYYIDLEELLKMYTEYTLYFNHRKAQYKITNLEKMMVDLKLTNKNIEESNRRQEQYMRSLGISLEEVKDQNEILIEKSEILENQNNGLKKQNQNIQRKLGIAVEDRAPLPVDEKKQERFILIKRNDSEHFQYYTIRAQHGYTERRIKVQKTLFPHLQILLDFQANPNSKSLYTRIKDTLKAKNVQFSGNNIDLTESEVSEEELVEEMKVINDQRYNV

SEQ ID NO: 11915 - protein, 446 aa, Unknown
  Description of Unknown: Integrase A483 sequence
  G3DSA:1.10.10.60,SSF46689,PF02796
METVKPRLTLCDRTEVIKLYNGGVPVIKISEQFKVSRPTIYKIVEEVKKDQKKIDFFILKEDENKDIMEPNIENLKVNFLGIKIDPENGSEDPRINKALSKGHQLLDIMEFIKVTKFKLNMVMFDYFWQSVVGNRPSLMTMTIFQWFGYEGEYYTQKQNFKKMLKNNDIRYDELSINDDNIYQYAGIKEELQMISNKGARQNAKFIIMEPKNLKRAIMQLKTKNGHIIRDYYIDLEELLKLYVEYTLYFNHRTSQRKITNLEQMMAKMDLDREKDRELLLRQEQYMRSLGISLEEVKDQNEELLNNNKGLKKNVKGLRFEVRDVKRKLGIAVEDRAPLPVDEKKQERFVLIKRNDNEHYQYYTIQAQHGYTERRIKVQRVLFPHLQILLDFTANPNSKTLYVRIKDTLKAKNVQFSGNNIDLEGSEVTEEELIEEMKVTSESKRNI

SEQ ID NO: 11916 - protein, 446 aa, Unknown
  Description of Unknown: Integrase A484 sequence
  PF07508,G3DSA:1.10.10.2600, SSF53041,PS51737,cd00338,PTHR30461:SF3,PF00239, PS51736,SM00857,G3DSA:3.40.50.1390,PTHR30461
MSGSVDPFDTPGLGPWLKRDRLDDWDILVAWKLDRIARRAIAINRVFHLCQEHDKTLVCISDNIDLSTWVGRLIANVIAGVAEGELEAIRERTLASHRKLRELGRWPGGRPAYGYKAVENENGPGWKLVHDEYSATIMREIVDRTLQGEAGNAIAQDLQARGVLPPAEYRRQMNGEKLRGGEWMGQVIRKMLKSRTLLGHVTHQQVTVINEKEGTPILKGEPLVSLEEWEELQAMLGGSSRPKNHNRSTGASPMLDVALCGECGKPLHLRTQRTERKTKVHVHRYYYCPDKHGQAIRAEIVERTVEEQFLDMFGDKPAMERVFREGENHEIEIKQAIQSIEALTPLLGAATSGTVLKSLTDQISAISNRVTYLESLPKAESGYILRATGKTYREEWESRDEQGRRSLLKRSGVTVTFLLQGKTRTTEGALQTEIKFPGDVEERLAS

SEQ ID NO: 11917 - protein, 444 aa, Unknown
  Description of Unknown: Integrase A485 sequence
  cd00569,G3DSA:1.10.10.60,PF02796
MIRPRLTKEQRNEIVNLYTSGTPIVQLSRQFKVTRPTIYNVIESQGNTNHKKIDFYSEKVDENKDMSELNFTVKTDFLGVTIDTENGSSNPKINKALSASFQLLDIMEFVKVTKFKLNMTMFDYFWQVVVGNQSTLVGRLVLEWFGYDGEYFKQKQNFKKMLKNNNIQYHELTKDNKEIEQYPTFQQELQLLPHNGARTCSKFLIMQPKDLKMAIMQLKTKNGHIIREYYIDLEELLKLYTEYTLYFNHRESQRKITDLEQMMADLKVTNKNIEESNKKLEESNQRQEQYMRSLGISLEEVKDQNEELLDSNITLKQEVKKVQHKLGIAVKDRAPLPVDEDKQERFVLIKRNDPDYYPYYTIRAQEGYTNRKLRVEQLHFPNLEVLLDFKCNPNSKSLYTRIKENLKAEGVIFKGNNIDLEDSHTTEKEFIKKMKVINNQKLYV

SEQ ID NO: 11918 - protein, 444 aa, Unknown
  Description of Unknown: Integrase A486 sequence
  SSF53041,PS51737,cd00338,PF00239,PS51736, SM00857,G3DSA:3.40.50.1390,PTHR30461
MKRAVIYTRVSRDDTGEGQSNQRQERECRRLTDYKRLDVVAVEQDISVSAFSGKERPAWKRVLDMVRAGEVDYVIAYHMDRMTRSMTDLEELIVLCEEHGVGIATAVGEIDLTSDMGRMVARILAAVARAEVERKSARQKLANAQRAAEGKPHSGGQRPFGYARDHMTVVEDEAVLIKTGAERALAGEPLISISKDWGMTARGVKNVLTNPRYAGIRMYLGERVGEAEWPAILDLEVHLRLVEALTDPARTKGTVKMGRTPTSLLTGLAACSVCKGKVRGSSVRGRLTYACRSSHAHIDRADVDTLALGAVINRLSSPAWVETLAPAGDDRLAKAKLVAEEKREALKMYARLLASGAMDEEQFTEASRVARDAMKEAEQTLSQAADGAALSGLDLGTDRVEKQLLALPLARQRGIVEQLLTIEILPQVKSRLAPLSSVERVIIS

SEQ ID NO: 11919 - protein, 444 aa, Unknown
  Description of Unknown: Integrase A487 sequence
  cd00569,G3DSA:1.10.10.60,SSF46689,PF02796
MQGSYKNKLTSEQRNTIVQMFNDGVPVFTLAKQFEISRPTVYNVLEKAGNTNHKKIEFYVGKSDKNKEEMEIISEKFENIILNGTNTPSKTNFLGITIDTENGSNNPKVRKALNASFNLLDITQFVKVTKFKLNMTMFDYFWQVVVGNTRVHLVSRVLEWFGYTGEIKEQRKNFIRMLKRNGIEYTELTQKDKEIELYPTIQEEVQLLPSNVTNSKFLIMEPDDLKMAIMQLKTKNGHIIRQYYIDLEKLLRVYTEYTLYFNHREATRKITDLEQTMRELKESNQRQEKYMRSLGIQLEDVKDQNEVLIDNNKDLKKEVKKVQHKLGIAVVDRAPLPLSEDKQERFVLIKRNDDEYYSYYTIRAQYKYTERRIKTQRLLFPNLEILLDFKANPNSKTLYTRIKEKLVGAGVLFEGNNIEIEGTKVTQDELIEEMKVTSNQKYNV

SEQ ID NO: 11920 - protein, 444 aa, Unknown
  Description of Unknown: Integrase A488 sequence
  SSF53041,PS51737,cd00338,PF00239,PS51736, SM00857,G3DSA:3.40.50.1390,PTHR30461
MKRAVIYTRVSRDDTGEGQSNQRQERECRRLTDYKRLDVVAVEQDISVSAFSGKERPAWKRVLDMVRAGEVDYVIAYHMDRMTRSMTDLEELIVLCEEHGVGIATAVGEIDLTSDMGRMVARILAAVARAEVERKSARQKLANAQRAAEGKPHSGGQRPFGYARDHMTVVEGEAVLIKTGAERALAGEPLISISKDWGMTARGVKNVLTNPRYAGIRMYLGERVGEAEWPAILDLEVHLRLVEALTDPARTKGTVKMGRTPTSLLTGLAACAVCKGKVRGSSVRGRLTYACRSSHAHIDRADVDTLALGAVINRLSSPAWVETLAPAGDDRLAKAKLVAEEKREALKMYARLLASGAMDEEQFTEASRVARDAMKEAEQTLSQAADGAALSGLDLGTDRVEKQLLALPLARQRGIVEQLLTIEILPQVKSRLAPLSSVERVIIS

SEQ ID NO: 11921 - protein, 444 aa, Unknown
  Description of Unknown: Integrase A489 sequence
  SSF53041,PS51737,cd00338,PF00239,PS51736, SM00857,G3DSA:3.40.50.1390,PTHR30461
MKRAVIYTRVSRDDTGEGQSNQRQERECRRLTDYKRLDVVAVEQDISVSAFSGKERPAWKRVLDMVRAGEVDYVIAYHMDRMTRSMTDLEELIVLCEEHGVGIATAVGEIDLTSDMGRMVARILAAVARAEVERKSARQKLANAQRAAEGKPHSGGQRPFGYARDHMTVVEDEAVLIKAGAERALAGEPLISISKDWGMTARGVKNVLTNPRYAGIRMYLGERVGEAEWPAILDLEVHLRLVEALTDPARTKGTVKMGRTPTSLLTGLAACSVCKGKVRGSSVRGRLTYACRSSHAHIDRADVDTLALGAVINRLSSPAWVETLAPAGDDRLAKAKLVAEEKREALKMYARLLASGAMDEEQFTEASRVARDAMKEAEQTLSQAADGAALSGLDLGTDRVEKQLLALPLARQRGIVEQLLTIEILPQVKSRLAPLSSAERVIIS

SEQ ID NO: 11922 - protein, 444 aa, Unknown
  Description of Unknown: Integrase A490 sequence
  SSF53041,PS51737,cd00338,PF00239,PS51736, SM00857,G3DSA:3.40.50.1390,PTHR30461
MKRAVIYTRVSRDDTGEGQSNQRQERECRRLTDYKRLDVVAVEQDISVSAFSGKERPAWKRVLDMVRAGEVDYVIAYHMDRMTRSMTDLEELIVLCEEHGVGIATAVGEIDLTSDMGRMVARILAAVARAEVERKSARQKLANAQRAAEGKPHSGGQRPFGYARDHMTVVEDEAVLIKTGAERALAGEPLISISKDWGMTARGVKNVLTNPRYAGIRMYLGERVGEAEWPAILDLEVHLRLVEALTDPARTKGTVKMGRTPTSLLTGLAACSVCKGKVRGSSVRGRLTYACRSSHAHIDRADVDTLALGAVINRLSSPAWVETLAPAGDDRLAKAKLVAEEKREALKMYARLLASGAMDEEQFTEASRVARDAMKEAEQTLSQAADGAALSGLDLGTDRVEKQLLALPLARQRGIVEQLLTIEILPQVKSRLAPLSSAERVIIS

SEQ ID NO: 11923 - protein, 440 aa, Unknown
  Description of Unknown: Integrase A491 sequence
  SSF53041,PS51737,cd00338,PF00239,PS51736,SM00857,G3DSA:3.40.50. 1390,PTHR30461
MIYTRVSRDDTGEGQSNQRQERECRRLTDYKRLDVVAVEQDISVSAFSGKERPAWKRVLDMVRAGEVDYVIAYHMDRMTRSMTDLEELIVLCEEHGVGIATAVGEIDLTSDMGRMVARILAAVARAEVERKSARQKLANAQRAAEGKPHSGGQRPFGYARDHMTVVEDEAVLIKTGAERALAGEPLISISKDWGMTARGVKNVLTNPRYAGIRMYLGERVGEAEWPAILDLEVHLRLVEALTDPARTKGTVKMGRTPTSLLTGLAACSVCKGKVRGSSVRGRLTYACRSSHAHIDRADVDTLALGAVINRLSSPAWVETLAPAGDDRLAKAKLVAEEKREALKMYARLLASGAMDEEQFTEASRVARDAMKEAEQTLSQAADGAALSGLDLGTDRVEKQLLALPLARQRGIVEQLLTIEILPQVKSRLAPLSSAERVIIS

SEQ ID NO: 11924 - protein, 440 aa, Unknown
  Description of Unknown: Integrase A492 sequence
  SSF53041,PS51737,cd00338,PF00239,PS51736, SM00857,G3DSA:3.40.50.1390,PTHR30461
MIYTRVSRDDTGEGQSNQRQERECRRLTDYKRLDVVAVEQDISVSAFSGKERPAWKRVLDMVRAGEVDYVIAYHMDRMTRSMTDLEELIVLCEEHGVGIATAVGEIDLTSDMGRMVARILAAVARAEVERKSARQKLANAQRAAEGKPHSGGQRPFGYARDHMTVVEGEAVLIKTGAERALAGEPLISISKDWGMTARGVKNVLTNPRYAGIRMYLGERVGEAEWPAILDLEVHLRLVEALTDPARTKGTVKMGRTPTSLLTGLAACAVCKAKVRGSSVRGRLTYACRSSHAHIDRADVDTLALGAVINRLSSPAWVETLAPAGDDRLTKAKVLVEEKREALKVYARLLASGAMDEEQFTEASRVARDAMKEAEQTLSQAADGAALSGLDLGTDRVEKQLLALPLARQRGIVEQLLTVEILPQVKSRLAPLSSAERVIIS

SEQ ID NO: 11925 - protein, 440 aa, Unknown
  Description of Unknown: Integrase A493 sequence
  SSF53041,PS51737,cd00338,PF00239,PS51736, SM00857,G3DSA:3.40.50.1390,PTHR30461
MIYTRVSRDDTGEGQSNQRQERECRRLTDYKRLDVVAVEQDISVSAFSGKERPAWKRVLDMVRAGEVDYVIAYHMDRMTRSMTDLEELIVLCEEHGVGIATAVGEIDLTSDMGRMVARILAAVARAEVERKSARQKLANAQRAAEGKPHSGGQRPFGYARDHMTVVEDEAVLIKAGAERALAGEPLISISKDWGMTARGVKNVLTNPRYAGIRMYLGERVGEAEWPAILDLEVHLRLVEALTDPARTKGTVKMGRTPTSLLTGLAACSVCKGKVRGSSVRGRLTYACRSSHAHIDRADVDTLALGAVINRLSSPAWVETLAPAGDDRLAKAKLVAEEKREALKMYARLLASGAMDEEQFTEASRVARDAMKEAEQTLSQAADGAALSGLDLGTDRVEKQLLALPLARQRGIVEQLLTIEILPQVKSRLAPLSSAERVIIS

SEQ ID NO: 11926 - protein, 439 aa, Unknown
  Description of Unknown: Integrase A494 sequence
  G3DSA:1.10.10.60,SSF46689,PF02796
MQGNYKNKLTQQQRKNIVQMYNEGIPVFTLSKQFEVSRPTIYNVLEKAGNTTHKKIEFYIEKENKNKEEMEPKIEIIKTNFLGVTIDIENGSNNPQVLKALNSSFKLLDVVEFVKVTKFKLNLTMFDYFWQVVIGNTRVHLASRVLEWFGYEGEIKEQRKNFIRMLKRNNIDYQELTQKDKESSQYPTIQEELQLLPSNVTNSKFLLMEPDDIKMAIMQLKTKNGHTIRQYYIDLEKLLKLYTEYTLYFNHREATRKITDLEQTMRRLEESNQRQEKYMRSLGISLEEVKDQNEELLDDNKGLKKNVKGLRSEVKDVKRKLGIAVEDRAPLPANEDKQERFVLIKRNDDQHFQYYIIRAQNGYTTSRIKIQKVLFPHLEILLDFKANPNSKSLYNRIKEELKIKSVQFNGNNIDLEGSEVTEEELMEEMKVINDQKYNV

SEQ ID NO: 11927 - protein, 438 aa, Unknown
  Description of Unknown: Integrase A495 sequence
  G3DSA:1.10.10.60,PF02796
METKNVKHRLTLEEYTSVYDKYEQGMSVSKLSEKFKISRPTVYTILEKVRKDQKKNEFFIKNEEENKDNEIMTSNNTNFLGIVIDTENGSNNPKINKALNASFDLLDIMKFVEVTKFKLNTTMFDYFWQVVVGNRRVHLSPMVLTWFGYEGEIKEQKKAFIKMLQRNEIEYYQLTQKDQEIELYSTIKTEIAKMPSCDAVKSKFLIMAPNDIKMAIMQLKTKNGHTIRQYYIDIEELLKLYTEYTLYFNHRESQRKITNLEKMMTDMKLERQKDRELIQQQTQYMKSLGISLEEVKDQNEELLDETRGLKKQNKKIQHKLGIAVEDRAPQPEDESKRERFVLIKRNDPEYYLYYTIRAQEGYTTRKLKFEKANFPNLEVLLDFKCNPNSKTLYNRIKENLKVKNVTFKGNNIDLEGSEVDENKLVEEMKVINDSKRDI

SEQ ID NO: 11928 - protein, 438 aa, Unknown
  Description of Unknown: Integrase A496 sequence
  G3DSA:1.10.10.60,SSF46689,PF02796
MEPKQRLLPNQKLDIIKMYQNGYTVAQLTREFKVSRPTVYKILSQVNFEPKNENFFENVEQDKEMENTTFLGVTIDTEGGPRDFKVKKALKRSASLLDIIQFVEVTKFKLNMVMFDYFWQVMIGNRSSHITRPILEWFGYDGEYYTQRQNFTRMLKRNNISFNELISSDQEIKLYPTIQQELATYNEGAQACAKFLVMEPDDLKMAIMQLKTKNGDKIRQYYIDLEKLLKLYTEYTLYFNHREATRKITSLEKMMANMNLNLEEERKTREIERQKDRELIQQQTKYMRSLGISLEEVKDQNDELLDNNRGLKKEVKKVQHKLGIAVEDRAPQPEDESKRERFVLIKRNDPEYYPYYTIRAQEGYTTRKLKIENANFPNLEVLLDFKCNSKTLFNRIKENLKEKNVTFKGNNIDLEGSIIDEQELVEEMKVINDSKRDV

SEQ ID NO: 11929 - protein, 437 aa, Unknown
  Description of Unknown: Integrase A497 sequence
  cd00569,G3DSA:1.10.10.60
MELSNKFKLTPAQREDIVKKYTNGTSVLSISKEYNVSRQTVYTIIEKVKYPHKKNDFFINKLEDNKVYENMTSSTTNFLGITIDTENGSTNPKVRKALDTSFKLLDITQFIEVTKFKLNMVMFDYFWQVVVGQVTGVHLHSSILEWFGYEGLIKDQKKSFIKMLQRNTINYKQLTEKDEEIKLYPTIQEELQLIPTNVKHTKFIIMEPDDLKMAIMQLKTKNGHIIRQYYIDLEKLLKMYTEYTLYFNHRESQRKITNLEQMMADIKLERQKDREIMLRQEQYMRSLGISLEEVKDQNETLIDNNTTLKKEVKKVQHKLGIAVEDRAPLPADESKRERFVLIKRNDSDYYPYYTIRAQEGYTIRKLKTEKLHFPNLEVLLDFKCNPNSKSLYTRIKENLKSKGVTFKGNNIDLEDSEVDEEKLVEEMKATDSSKRDI

SEQ ID NO: 11930 - protein, 434 aa, Unknown
  Description of Unknown: Integrase A498 sequence
  cd00569, G3DSA:1.10.10.60,SSF46689,PF02796
METKPRLTIEQRANVFKKYQDGCSVAEITREFKISRPTVYKILSKVNLTSKNEIFSEKEDGNKDMDSSTTFLGVNIDTINGPFDFKIKKALKRSLKLLDIMEFVEITKFKLNMVMFDYFWQVVVGNRSSPVGRPVLEWFGYEGEYFNQKKCFKKMLKNNAIQYRELTQGDKEIDEYPTIQQELQELNSGAQACSKFLIMEPDDLKMAIMQLKTKNGDTIRQYYIDLEKLLKLYVEYTLYFNHRESQRKITNLEEMMAKMDLDMKIREETRELEREKDRQYMRSLGISLEEVKDQNEELLDNNKGLKKNVKDIKRKLGIAVEDRAPLPVDEDKQERFVLLKRNDDQHYQYYTVRAQYGYTERKIKTNRLLFPQLEILLDFTAHPNSKSLYNRIKVELKTRNVQFNGNNIDLEGSEVTQEELIEEMKVINDQKYEI

SEQ ID NO: 11931 - protein, 434 aa, Unknown
  Description of Unknown: Integrase A499 sequence
  G3DSA:1.10.10.60,SSF46689
MQGSYKNKLTLEQRNTIVQMFNDGVPVFTLSKQFEVSRPTVYNILEKAGNMNHKKIEFYIPKSNKNKEEMKPISEKIILSDTNTPFKTNFLGVTIDPENGSSNPKIRKALNASTQLLDIIEFVKVTKFKLNMTMFDYFWQVVVGNTRVHLVSRVLEWFGYEGEIKEQRKNFIRMLKRNGIEYHELTQKDKEIEMYPTIQEELQLLPKNVTNSKFLLMEPDDIKMAIMQLKTKNGHIIRQYYIDLEKLLKMYTEYTLYFNHREATRQITDLQQTMRELRESNQRQEQYMRSLGISLETVKDQNEELLGDNKEIKRKLGIAVKDRAPLPVNKDKQERFVLLKRNDDEYYPYYTIRAQEGYTERRIKTQKVLFPNLEILLDFKANPNSKTLYTRIKEKLKDSGVLFEGNNIEIEGSEVTEKELIDEMKVINDSKRNL

SEQ ID NO: 11932 - protein, 434 aa, Unknown
  Description of Unknown: Integrase A500 sequence
  PF07508,G3DSA:1.10.10.2600,SSF53041,PS51737,cd03768, PTHR30461:SF3,PF00239, PS51736,SM00857, G3DSA:3.40.50.1390,PS00397,PTHR30461
MNVAIYVRVSTLEQKEHGHSIEEQERKLKSFCEINDWNESDVFVDAGFSGAKRDRPELQRMMNDIKRFDLVLVYKLDRLTRNVRDLLDFLEIFEQNNVAFRSATEVYDTSTAMGRLFVTLVGAMAEWERETIRERVMMGKRAAIKQGMILTPPPFYYDRVDNTYIPNDYKKVVLWAYDEVLKGVSSKGIARKLNDSDIPPPNGKRWEDRTITRALRSPITRGHYTWGDVFIENSHEPIITEEMYQQIKERLEERINTKIVSHVSVFRGKFICPKCGGTLTMNTATKKRKKGYVTYKTYYCNTCKGKKESFGFAENEALRVFRDYLSKLDLGKYEVKTKQKDDVVTIDIDKIMEQRKRYHKLYAKGLMQEEELFELIKETDETIAEYEKQKELVPKKTLDIDKIKNSKMYCWNHGKYSRWMIKQISLRWPLSLST

SEQ ID NO: 11933 - protein, 431 aa, Unknown
  Description of Unknown: Integrase A501 sequence
  cd00569,G3DSA:1.10.10.60
MELSNKFKLTPAQREDIVKKYTNGTSVVSISKEYNVSRQTVYTIIEKVKYPHKKNDFFINKLEDNKVYENMTSSTTNFLGITIDTENGSTNPKVRKALDTSFKLLDITQFIEVTKFKLNMVMFDYFWQVVVGNQCLHVSTLILNWFGYEGDYRKQKESFIKILKRNTIEYRELTQKDKEIKMYPTIQEELQLLPHDAAKSRSKFLIMAPHDLKMAIMQLKTKNGHIIRQYYIDLEELLKVYTEYTLYFNHRESQRKITNLEQMMADIKLERQKDREIMLRQEQYMRSLGITLEEVKDQNEVLIDDNKEVKRKLGIAVEDRAPLPADESKRERFVLIKRNDPDYYPYYTIRAQEGYTIRKLKTEKLHFPNLEVLLDFKCNPNSKSLYTRIKENLKSKGVTFKGNNIDLEDSEVDEEKLVEEMKATDSSKRDI

SEQ ID NO: 11934 - protein, 430 aa, Unknown
  Description of Unknown: Integrase A502 sequence
  cd00569,G3DSA:1.10.10.60,SSF46689,PF02796
MSGSHNIKLTFDQRQTIAKLHASGTTVVALSEQFGVSRPTVYKILEKMETKVEKEPYSIISTNLLGIIIDTKNGPTNPKINKALNASFKLLDITKFIEITEFKLNMVMFDYFWQIVVGQVTGLHVSTSILQWFGYQGEYKAQKDAFLRILKRNNISYQELTQKDKEIEMYPTIQEELQLIPSNVKHSKFLIMEPDDLKMAIMQLKTKNSNIIRQYYIDLEKLLKMYTEYTLYFNHYESNRKISTLEESMSQLNLTISKQEQIMIRQEQYMHSLGISLEEVKDQNDELLDKTTYLTKQNTGLQTEVKKVQYKLGIAVEDRAPLPLDEDKQERFVLIKRNNNEYYSYYTIRAQYKYTERRIKAQKVLFPNLEILLDFKANPNSKSLYTRIKDELKAKGVQFSGNNIDLEDSEVTEEKLMEEMKVINDQKYNV

SEQ ID NO: 11935 - protein, 430 aa, Unknown
  Description of Unknown: Integrase A503 sequence
  cd00569, G3DSA:1.10.10.60,SSF46689,PF02796
MSGSHNIKLTFDQRQTIAKLHASGTTVVALSEQFGVSRPTVYKILEKMEKKVEKEPYSIISTNLLGIIIDTKNGPTHPKINKALNASFKLLDITKFIEITEFKLNMVMFDYFWQIVVGQVTGLHVSTSILQWFGYTGEYKAQKDAFLRILKRNNISYQELTQKDKKIEMYPTIQEELQLIPSNVKHSKFLIMEPDDLKMAIMQLKTKNGNTIRQYYIDLEKLLKMYTEYTLYFNYYESNRKISTLEESMSQLNLTISKQEQIMIRQEQYMHSLGISLEEVKDQNDELLDKTTYLTKQNTGLQTEVKKVQYKLGIAVEDRAPLPLDEDKQERFVLIKRNNNEYYPYYTIRAQYKYTERRIKTQKVLFPNLEVLLDFKANPNSKSLYTRIKDELKAKGVQFNGNNIDLEESEVTEKELMEEMKVINDQKYNV

SEQ ID NO: 11936 - protein, 430 aa, Unknown
  Description of Unknown: Integrase A504 sequence
  PF07508,G3DSA:1.10.10.2600,SSF53041,PF13408,PS51737, cd00338,PTHR30461:SF3,PF00239, PS51736, SM00857,G3DSA:3.40.50.1390,PTHR30461
MSTDQEEQLSSYENQVNYYREFISKHEDYELVDIYADEGISATNTKKRDAFNRLIQDCRAGKVDRILVKSISRFARNTLDCIKYVRELKELGVGVTFEKENIDSLDSKGEVLLTILSSLAQDESRSISENATWGIRKKFERGEVRVNTTKFMGYDKDENGRLIINPQQAETVKFIYEKFLEGYSPESIAKYLNDNEIPGWTGKANWYPSAIQKMLQNEKYKGDALLQKTFTVDFLTKKRVQNDGQVNQYYVENSHEAIIDEETWETVQLEMARRKTYRDEHQLKSYIMQSEDNPFTTKVFCGACGSAFGRKNWATSRGKRKVWQCNNRYRIKGVEGCYSSHLDEATLEQIFLKALELLSENIDLLDGKWEKILAENRLLDKHYSMALSDLLRQEQIDFNPSDMCRVLDHIRIGLDGEITVCLLEGTEVDL

SEQ ID NO: 11937 - protein, 430 aa, Unknown
  Description of Unknown: Integrase A505 sequence
  PF07508,G3DSA:1.10.10.2600,SSF53041,PF13408,PS51737, cd00338,PTHR30461:SF3,PF00239,PS51736,SM00857, G3DSA:3.40.50.1390,PTHR30461
MSTDQEEQLSSYENQVNYYREFISKHEDYELVDIYADEGISATNTKKRDAFNRLIQDCRAGKVDRILVKSISRFARNTLDCIKYVRELKELGVGVSFEKENIDSLDSKGEVLLTILSSLAQDESRSISENATWGIRKKFERGEVRVNTTKFMGYDKDDNGRLIINPQQAETVKFIYEKFLDGYSPESIAKYLNDNEIPGWTGKANWYPSAIQKMLQNEKYKGDALLQKTITVDFLTKKRVQNDGQVNQYYVENSHEAIIDKDTWELVQLELERRKAYREEHQLKSYIMQNDDNPFTTKVFCAECGSAFGRKNWATSRGKRKVWQCNNRYRVKGQIGCQNNHIDEETLEKAVVIAVELLSENVDLLHGKWNKILEENRPLEKHYCTKLAEMINKTSWEFDSYEMCQVLDSITISEDGQISVKFLEGTEVDL

SEQ ID NO: 11938 - protein, 430 aa, Unknown
  Description of Unknown: Integrase A506 sequence
  PF07508,G3DSA:1.10.10.2600,SSF53041,PF13408,PS51737,cd00338, PTHR30461:SF3,PF00239,PS51736,SM00857,G3DSA:3.40.50.1390 ,PTHR30461
MSTDQEEQLSSYENQVNYYREFISKHEDYELVDIYADEGISATNTKKRDAFNRLIQDCRAGKVDRILVKSISRFARNTLDCIKYVRELKELGVGVTFEKENIDSLDSKGEVLLTILSSLAQDESRSISENATWGIRKKFERGEVRVNTTKFMGYDKDENGRLIINPQQAETVKYIYEKFLEGYSPESIAKYLNDNEIPGWTGKANWYPSAIQKMLQNEKYKGDALLQKTFTVDFLTKKRIANDGQVNQYYVENSHEAIIDKDTWELVQLELARRKAYREEHQLKSYIMQNDDNPFTTKVFCKECGSAFGRKNWTTSRGKRKVWQCNNRYRVKGQIGCQNNHIDEETLEKAVVMAVELLSENVDLLHGKWNKILEENRPLEKHYSTKLAEVINKPSWEFDSYEMCQVLDSITISEDGQITVRFHEGTEVDL

SEQ ID NO: 11939 - protein, 430 aa, Unknown
  Description of Unknown: Integrase A507 sequence
  PF07508,G3DSA:1.10.10.2600,SSF53041,PF13408,PS51737, cd00338,PF00239,PS51736,SM00857,G3DSA:3.40.50.1390, PTHR30461
MERHAMQLILEKAKKRELQMVLFKSIHRLARDLKDALEIKEILIANGIRLVTIEEGYDSHYEGKNDMKFEMFAMFASQYPKTLSVSISAALSAKVRRGEHTGGRLPFGYSDRDKKYVINEEEAEIVREIYDMYSKGIGYIGITKILNERGVPSKTGGKWQMSSVQRIIKNPIYKGDYILNQYTTVKISGRKKQIKNPEEKWTIFKNHHPAIVSEEQWELVNRPRSAKKRRPALWNEFRGIMFCAHCGSAMQVVYSAKKNKNGTKEEWRYLKCSRYKRYGRDECVRHAPIQYREFREFILDNLKEKEKQLETEFNLNEEISNADKKNKLQREIQRIEEKRKKLIDLYMEELIEKEEFLSRRNELEKIIKEKEVQFVSMEDKNEVKRTQDEFRKAFALLDESKNLYEEFKRIIDRIEIFENGDIKIVYRIEM

SEQ ID NO: 11940 - protein, 430 aa, Unknown
  Description of Unknown: Integrase A508 sequence
  PF07508,G3DSA:1.10.10.2600,SSF53041,PF13408,PS51737, cd00338,PTHR30461:SF3,PF00239,PS51736,SM00857,G3DSA:3. 40.50.1390,PTHR30461
MSTDQEEQLSSYENQVNYYREYISKHEDYELVDIYADEGISATNTKKRDAFNRLIQDCRAGKVDRILVKSISRFARNTLDCIKYVRELKELGVGVTFEKENIDSLDSKGEVLLTILSSLAQDESRSISENATWGIRKKFERGEVRVNTTKFMGYDKDENGRLIINPQQAETVKFIYEKFLEGYSPESIAKYLNDNEIPGWTGKANWYPSAIQKMLQNEKYKGDALLQKTFTVDFLTKKRVQNDGQVNQYYVENSHEAIIDKDTWELVQLELARRKAYREEHQLKSYIMQNDDNPFTTKVFCKECGSAYGRKNWTTSRGKRKVWQCNNRYRVKGQSGCQNNHIDEETLEKAVVMAVELLSENVDLLHGKWNKILEENRPLEKHYSTKLADMINKPSWEFDSYEMCQTLDSITIVEDGQITVRFLEGTEVEL

SEQ ID NO: 11941 - protein, 430 aa, Unknown
  Description of Unknown: Integrase A509 sequence
  PF07508,G3DSA:1.10.10.2600,SSF53041,PF13408,PS51737, cd00338,PTHR30461:SF3,PF00239,PS51736,SM00857, G3DSA:3.40.50.1390,PTHR30461
MSTDQEEQLSSYENQVNYYREFISKHEDYELVDIYADEGISATNTKKRDAFNRLIQDCKAGKVDRILVKSISRFARNTLDCIKYVRELKELGVGVTFEKENIDSLDSKGEVLLTILSSLAQDESRSISENATWGIRKKFERGEVRVNTTKFMGYDKDENGRLIINPQQAETVKYIYEKFLEGYSPESIAKYLNDNEIPGWTGKANWYPSAIQKMLQNEKYKGDALLQKTFTVDFLTKKRIANDGQVNQYYVENSHEAIIDKDTWELVQLELARRKAYREEHQLKSYIMQNDDNPFTTKVFCKECGSAFGRKNWTTSRGKRKVWQCNNRYRVKGQIGCQNNHIDEETLERAVVMAVELLSENVDLLHGKWNKILEENRPLEKHYSTKLAEMINKPSWEFDSYEMCQVLDSITISEDGQISVKFLEGTEVDL

SEQ ID NO: 11942 - protein, 430 aa, Unknown
  Description of Unknown: Integrase A510 sequence
  PF07508,G3DSA:1.10.10.2600,SSF53041,PF13408,PS51737,cd00338, PTHR30461:SF3,PF00239,PS51736,SM00857,G3DSA:3.40.50.1390, PTHR30461
MSTDQEEQLSSYENQVNYYRDYISKHEDYELVDIYADEGISATNTKKRDAFNRLIQDCRAGKVDRILVKSISRFARNTLDCIKYVRELKELGVGVTFEKENIDSLDSKGEVLLTILSSLAQDESRSISENATWGIRKKFERGEVRVNTTKFMGYDKDENGRLIINPGQAETVKFIYEKFLEGYSPESIAKYLNDNEIPGWTGKANWYPSAIQKMLQNEKYKGDALLQKTFTVDFLTKKRVQNDGQVNQYYVENSHEAIIDKDTWELVQLELARRKDFREEHQLKAYIIQNDDNPFTTKVFCKACGSAFGRKNWTTSRGKRKVWQCNNRYRVKGQIGCQNNHIDEETLEKAVVMAVELLSENVDLLHGKWNKILEENRPLEKHYCTKLAEMINKPLWEFDSYEMCQVLDSITISEDGKISAKFLEGTEVDL

SEQ ID NO: 11943 - protein, 430 aa, Unknown
  Description of Unknown: Integrase A511 sequence
  PF07508,G3DSA:1.10.10.2600,SSF53041,PF13408,PS51737, cd00338,PTHR30461:SF3,PF00239,PS51736,SM00857, G3DSA:3.40.50.1390,PTHR30461
MSTDQEEQLSSYENQVNYYREFISKHEDYELVDIYADEGISATNTKKRDAFNRLIQDCKAGKVDRILVKSISRFARNTLDCIKYVRELKELGVGVTFEKENIDSLDSKGEVLLTILSSLAQDESRSISENATWGIRKKFERGEVRVNTTKFMGYDKDENGRLIINPQQAETVKYIYEKFLEGYSPESIAKYLNDNEIPGWTGKANWYPSAIQKMLQNEKYKGDALLQKTFTVDFLTKKRIANDGQVNQYYVENSHEAIIDKDTWELVQLELARRKAYREEHQLKSYIMQNDDNPFTTKVFCKECGSAFGRKNWTTSRGKRKVWQCNNRYRVKGQIGCQNNHIDEETLEKAVVMAVELLSENVDLLHGKWNKILEENRPLEKHYSTKLAEVINKPSWEFDSYEMCQVLDSITISEDGQISVKFLEGTEVDL

SEQ ID NO: 11944 - protein, 430 aa, Unknown
  Description of Unknown: Integrase A512 sequence
  PF07508,G3DSA:1.10.10.2600,SSF53041,PF13408,PS51737,cd00338, PTHR30461:SF3,PF00239,PS51736,SM00857,G3DSA:3.40.50.1390 ,PTHR30461
MSTDQEEQLSSYENQVNYYRDYISKHEDYELVDIYADEGISATNTKKRDAFNRLIQDCRAGKVDRILVKSISRFARNTLDCIKYVRELKELGVGVTFEKENIDSLDSKGEVLLTILSSLAQDESRSISENATWGIRKKFERGEVRVNTTKFMGYDKDENGRLIINPGQAETVKFIYEKFLEGYSPESIAKYLNDNEIPGWTGKANWYPSAIQKMLQNEKYKGDALLQKTFTVDFLTKKRVQNDGQVNQYYVENSHEAIIDKDTWELVQLELARRKDFREEHQLKAYIIQNDDNPFTTKVFCKACGSAFGRKNWTTSRGKRKVWQCNNRYRVKGQIGCQNNHIDEETLEKAVVMAVELLSENVDLLHGKWNKILEENRPLEKHYCTKLAEMINKPLWEFDSYEMCQVLDSITISEDGQISAKFLEGTEVDL

SEQ ID NO: 11945 - protein, 429 aa, Unknown
  Description of Unknown: Integrase A513 sequence
  cd00569,G3DSA:1.10.10.60,SSF46689,PF02796
MIRPRLNKEQRNEVIEKYTQGIPIAHISRQFKVTRPTIYNVIESQGNTSHKKIDFYVDKLEKNKDMSTSEIKTNFLGVAIDTENGSNNPKIRKALDNSFKLLDIMEFVKITKFKLNMVMFDYFWQVVIGNHSTLIGSMVLEWFGYTGEYKKQRQNFKKMLSNNNICYDELTHKNIDHELYPIIQHELSGMSNCDIVKSKFLIMEPDDLKMAIMQLKTKNGHTIRQYYIDLEKLLKMYVEYTLYFNHRESQRKITNLEQMMGDMKLEREKDRQYMRSLGITLEEVRDQNDELLDNNRGLKKDVKEVKRKLGIAVKDRAPQPDDESKRERFVLIKRNDPEYYPYYTIRAQEGYTTRKLKFEKENFPNFEVLLDFKFNPNSKTLFNRIKENLRTKGVIFDRNNIDLEEAEIDEEKLIEEMKVINDQKLNIRI

SEQ ID NO: 11946 - protein, 429 aa, Unknown
  Description of Unknown: Integrase A514 sequence
  G3DSA:1.10.10.60,SSF46689
MTLYPIHKLTLDERQNIIDLYNSGTTIAYLSRQFKVSRPTIYSIIQKRLNDQKEIDFYTAKIEENKDLNMENPTTNFLGITIDSENSSSNPKINKALNKSLSLLNIIQFIEVTKFKINSVMFDYFWQVVVGNHSVHLVTMIFDWFGYEGENKEQKRNFKKMLKNNNISYRELTHKDNEIELYPSIKKELSKMATCDIVKSKFLIMEPKDLKMAIMQLKTKNGHTIRQYYIDLEELLKLYTEYTLYFNHRESQRKITDLEKMMADMNLTMQRQEKYMQSMGIQLEDVKDQNEELLDKTRGLKKQNKQIQRKLGIAVEDRAPQPEDESKRERFILMKRNNDEYYPYYTIRAQDGYTTRKIKIQKNYFPDLEILLDFKCNPNSKTLYNRIKENLKTKGVEFTGNNIDLRESQVLEEELIKEMEVINDQRYNV

SEQ ID NO: 11947 - protein, 429 aa, Unknown
  Description of Unknown: Integrase A515 sequence
  cd00569, G3DSA:1.10.10.60,SSF46689,PF02796
MSGSHNIKLTLDQRQTIAKLHASGTTVVALSEQFGVSRPTVYKILEKMETKVEKEPYSIISTNLLGIVIDTKNGPMNPKINKALNASFKLLDITKFIEITEFNLNMVMFDYFWQIVVGNTHVHLARRILEWFGYEGEYFEQKRLFQRMLKRNNISYQELTQKDKEIEMYPTIQEELQLIPSNVKNSKFLIMEPDDLKMAIMQLKTKNSNIIRQYYIDLEKLLKMYTEYTLYFNHYESNRKISTLEESMSQLNLTISKQEQIMIRQEQYMHSLGISLEEVKDQNDELLDKTTYLTKQNTGLQTQVKKVQYKLGIAVEDRAPLPLDEDKQERFVLIKRNNNEYYPYYTIRAQYKYTERRIKAQKILFPNLEILLDFKANPNSKSLYTRIKDELKAKGVQFSGNNIDLEDSEVTEEKLMEEMKVINDQKYNV

SEQ ID NO: 11948 - protein, 429 aa, Unknown
  Description of Unknown: Integrase A516 sequence
  PF07508,G3DSA:1.10.10.2600,SSF53041,PS51737,cd00338, PTHR30461:SF21,PF00239,SM00857, G3DSA:3.40.50.1390, PTHR30461
MEVGQVWVDNDLSATKKNVVRPDFEAMIASKPQAIVCWHTDRLIRVTRDLERVIDLGVNVHAVMAGHLDLSTPAGRAVARTVTAWATYEGEQKAERQKLANIQNARLGKPYTPGIRPFGYGEDHMTVVTAEADAIRDGAKMILDGWSLSAVARYWEELKLQSPRSTAAGGKGWSLRGVKKVLTSPRYVGRSSYLGEVVGDALWPPILDPDVYYGVVAILNNPDRFSGGPRTGRTPGTLLSGIGQCGYDDCKDTVGGRGYRGVLVYGCKDTHTRTPRSIADARASNATLARLMFPDFLPGLLASGQTESGESAASMHAEAQTLRERLDGLATAYAEGAINLSQMTAGSEALRKKLEVVESELVGSAGIPPFDPVAGVAGLISGWPDLPLPTRRAWVDFCCVVTLNPQRGRHLSNMTVDDHVTIEWRDVAE

SEQ ID NO: 11949 - protein, 429 aa, Unknown
  Description of Unknown: Integrase A517 sequence
  cd00569,G3DSA:1.10.10.60,SSF46689
MSGSHNIKLTLTQRQTIARLHSEGTTVVALAEQFGVSRPTIYKILGKMETKIEKEPYSIISTNLLGIVIDTKNGSNNPKINKALNASFKLLDIMEFVKITKFKLNMVMFDYFWQVVVGNTRSHLGSRVLEWLGYEGEDKVQKRKFIEMLKRNGISYQELTQKDKEIEMYPTIQEELQLLPSNIKNSKFLIMEPDDLKMAIMQLKTKNGDIIRQYYIDLEKLLKMYTEYTLFFNHYESERKISTLEESMSQLNLTISRQEHIMLQQTQYMRSLGISLEEVKDQNEVLIDQNDELLDNNRGLKKEVKKVQRKLGIAVEDRAPLPEDVDKQERFVLIKRNDDQHFQYYTIRAQCKYTERKIKAQKMLFPHSEVLLDFKANPNSKTLYDRIRDSLKAKNVVFKGNNIDIEDAEIDEQELIDEMKVINDQRYNI

SEQ ID NO: 11950 - protein, 429 aa, Unknown
  Description of Unknown: Integrase A518 sequence
  PF07508,G3DSA:1.10.10.2600,SSF53041, PF13408,PS51737,cd00338,PTHR30461:SF3,PF00239, PS51736,SM00857,G3DSA:3.40.50.1390,PTHR30461
MSTDQDEQLSSYENQVRYYQDYIRQNPLYELVDIYADEGISGTNTKKRTEFNRLIGDCRKGKVDRIIVKSISHFSRNTLDCLKYVRELKELGIGVTFEKENIDSLDAKGEVLLTILSSLAQDESRSISENATWGIRKKFERGEVRVNTTKFVGYDKGENGNLIINEEQAKIVRRIFRDFLQGETPESIARTLKEEGVPGWNGKVNWYPTTIQRMLQNEKYMGDALLQKTYTVDFLTKKRSENQGQVNQYYIEGNHEAIINKEEWELVQLEVDRRNQFRQDNHINFYIIQCEQNPFTCKVFCKECGGLFGRKNWTTSRGKRPVWQCNNRYKVKGVQGCTNRHIDEETLQQAFLRAIEILHENKGQLLGKWAIFDEEQKLEKYHAAQLKELLDSEQEAFDGRKMCQVLEKITLGEDGSITIKFLEGTEVNL

SEQ ID NO: 11951 - protein, 428 aa, Unknown
  Description of Unknown: Integrase A519 sequence
  PF07508,G3DSA:1.10.10.2600,SSF53041,PF13408,PS51737,cd00338, PTHR30461:SF3,PF00239,PS51736,SM00857,G3DSA:3.40.50.1390 ,PTHR30461
MSTDQDEQLSSYENQVNYYRDFISKHEDYELVDIYADEGISATNTKKRDAFNRLIQDCRDGKVDRILVKSISRFARNTLDCIKYVRELKDLGIGVTFEKENIDSLDSKGEVLLTILSSLAQDESRSISENATWGIRKRFERGEVRVNTTKFMGYDKDKDGNLIINREQAEVVRYIYERFLKGYTPESIARDLNDRDVPGWSGKANWYPSSILKMLQNEKYKGDALLQKTYTVDFLTKKRTENDGQVNQFYVANNHEGIIDHEMWETVQLEIARRKAFREEHGIPFYHLQNEDNPFMTKVFCAECGDAFGRKNWTTSRGKRKVWQCNNRYRVTGVMGCSNNHIDEEMLEKAFMEAVSILKDYKADVLDKLEKLSKGDNLLNKHYAKFMKQLLDLDHYDCTIMCQVLDNITISESGQITVTFLEGTEVDL

SEQ ID NO: 11952 - protein, 427 aa, Unknown
  Description of Unknown: Integrase A520 sequence
  PF07508,SSF53041,PS51737,cd00338,PTHR30461:SF3, PF00239,PS51736,G3DSA:3.40.50.1390,PTHR30461
MIVAYRVDRLTRSIRHLQQLVHWAEDHKKLIVSATEAHFDTTSPFAAVVIALMGTVAQMELEAIKERNRSAAHFNIRAGKYRGSLPPWGYMPARVDGEWRLLVDPVQRERILEVYHRVVDNHEPLHQIAHDLNQRGLPSPKDYFAKLQGREPKGREWSATALKRSLISEAMLGYATLNGKTVRDDDGAPLVRAEPILTREQLESLRAELVKADRAKPAVSTPSLLLRVLFCAVCGEPAYKFTGGGRRNSRYRCRSWGWAQRCGNGTVAMAEWDAFCEEQVLDLLGDAERLEKVWVAGSDSAVELAEVNAELVDLTSLIGSPAYRVGSPQREALEARIAALAARQEELEGLEARPSGWEWRETGQRFADWWGQQDTSGKNTWLRSMNVRLTFDVRGGLTRTIDFGDLQEYEQHLRLGSVVEQLHAGMS

SEQ ID NO: 11953 - protein, 426 aa, Unknown
  Description of Unknown: Integrase A521 sequence
  cd00569,G3DSA:1.10.10.60,SSF46689,PF02796
MLRPRLNKEQRNEVINLYTQGIPIAHISRQFKVTRPTIYNVIESQGNTSHKKIDFYFEKKGENKDMSELQKINFLGVDIDTENGSSNPKIRKALNASFNLLDITQFIEVTKFKLNTTMFDYFWQVVVGNTRVHLATRVLEWFGYEGELREQKRLFLRMLKRNNISYKELTQKDKEIELYPTIQEELQLIPSNITNSKFVIMEPRDLKMAIMQLKTKNGHIIRDYYIDLEELLKMYVEYTLYFNHREASRKITNLEQMMVDMKLERERDRQYMRSLGITLEEVRDQNDELLDNNRGLKKEVKKVQHKLGIAVEDRAPLLEDESKRERFVLIKRNDPEYYPYYTIRAQEGYTTRKLKFEKTNFPNLEVLLDFKCHPNSKTLFNRIKENLKTKNVVFKGNNIDLEEAKIDEQELVEEMKVINDQKLDIK

SEQ ID NO: 11954 - protein, 425 aa, Unknown
  Description of Unknown: Integrase A522 sequence
  PF07508,SSF53041,PS51737,PTHR30461:SF3,PF00239, PS51736,G3DSA:3.40.50.1390,PTHR30461
MAYRVDRLTRSIRHLQQLVHWAEDHKKLVVSATEAHFDTTTPFAAVVIALMGTVAQMELEAIKERNRSAAHFNIRAGKYRGSLPPWGYLPTRVDGEWRLVPDPVQRERILEVYHRVVDNHEPLHLVAHDLNRRGVLSPKDYFAKLQGREPQGREWSATALKRSLISEAMLGYATLNGKTVRDDDGAPLVRAEPILTREQLEALRAELVKTSRAKPAVATPSLLLRVLFCAVCGEPAYKFTGGGRKNARYRCRSWGWAQRCGNGTVAMAEWDAFCEEQVLDLLGDSERLEKVWVAGSDSAVELAEVNAELVDLTSLIGSPAYRVGSPQREALDARIAALAARQEELEGLEARPSGWEWRETGQRFGDWWREQDISGKNAWLRSMNVRLTFDVRGGLTRTIDFGDLQEYEQHLRLGSVVERLHAGMS

SEQ ID NO: 11955 - protein, 424 aa, Unknown
  Description of Unknown: Integrase A523 sequence
  G3DSA:1.10.10.60,PF02796
MKRVNKLNKQDKESIFDLYLKGYTITGLCKQFNVSRPTIYKVINVGKEEEQNDFCVDIKEESKGKIMTNTNFLGLTIDAENGPKDRRICKVLNQGFKLLDIMEFIKATKFDLNMIMFDYFWQVVVGNQWVHLHPLVLEWFGYEGEIKEQRKNFIKMLKRNNIPYQELTRTNKEIELYPTIKDELSLLPHDAARACIKFLIMCPKDLKMAIMQLKTKNGNAIREYYINLEELLKLYVEYTLYFNHRESQRKITDLEQMMADLKLSNKRQEQYMRSLGISLEEVKDQNDSLLGETKDLKKQNNTIQRKLGIAVEDRAPLPEDKKKRERFLLLKLNDPEYLPYYTIRAQYAYTLTKLKNYRTWYPNLEVLLDFKCNPNSKTLYVRIKESLKAKGVVFDGNNIDLKDAIEEEELLEEMKVINEQKYDV

SEQ ID NO: 11956 - protein, 421 aa, Unknown
  Description of Unknown: Integrase A524 sequence
  PF07508,G3DSA:1.10.10.2600,SSF53041,PF13408, PS51737,cd03768,PTHR30461:SF3,PF00239,PS51736, SM00857,G3DSA:3.40.50.1390,PTHR30461
MQQLIKDADTGLYDAVLVYKLDRLSRSQKDTLYLIEDVFQKNNIHFISLSENFDTSTAFGKAMIGILSVFAQLEREQIKERMSMGRVGRAKSGKIMEFNNPAFGYEVDGDNYKVDPLRAEIVKRIYKMYLSGTSINKIKETLNLEGHIGNKKNWSDTRIRYILSNPTYLGKIRYDGKTYDGKFSPIIDEETFNKTQNELKERQTATYKRFNMKLRPFQSKYMLSGLLRCGYCGATLFVNSYVYNGKRKLRYNCPSTYKSKQKTRTYKIMDPNCPFKLVYAKDLEPAVINEIKNLALNPQSIQKPVKKKPDIDVEAIQKELAKVRKQQQRLIDLYVISDDVNIDNISKKSADLKLQEETLKKQLAPLEEPNDDDKIVAFNEILAQIKDIDSLDYDKQKFIVKKLIKKIDVWNDNKIKIHWNI

SEQ ID NO: 11957 - protein, 419 aa, Unknown
  Description of Unknown: Integrase A525 sequence
  G3DSA:1.10.10.60,SSF46689,PF02796
MSSHKLTIEEHQTIIDLYNNGTTISYLSRQFKVSRPTIYTILNKVRNDHKEIDFYVDKLDENKDMDSNTNVTNFLGITIDNENGSNNRKINKALNSSFKLLDIIKFVEVTKFKINTLMFDYFWQVIVGNITYTPVSISVLEWFGYTGEYYKQRQNFKKMLKNNNIPYRELTQKDKEIELYPTIQEELQLIPTNVKHSKFLIMEPKDLKMAIMQLKTKNGHIIRKYYIDLEELLKAYTEYTLYFNHRESLRKITGLEQKMTEMTQYMRSLGISLEEVKDQNQELLGKTKGLKKQNKLIQRKLGIAVEDRAPQPEDESKRERFVLIKRNDPEYYPFYIIRAQEGYTKRKLKSEKNNFPNLEVLLDFKCSPNSKSLYTRIKENLKIKNVTFINNNIDLEDASMTEEELIEEMKVINESKREI

SEQ ID NO: 11958 - protein, 418 aa, Unknown
  Description of Unknown: Integrase A526 sequence
  G3DSA:1.10.10.60,PF02796
MNFKYYNEIIDKIVALKQQGIGSRQIAKQLNIGKSTVNQYYSAWIELEDSNKEIITDTEQEDKTFEDNLNVLCEHPDYSVSNLAKRLRHAHRANNQLRKIQREIADTDFNFKEMLVGIEKAVDKVQVSKYSPRVYPAVASKQNGAVEVLFSDWQIGKVAQHYNTEIGIRALEDYGQQVRTFILDKQRTKNVDKVVFASLGDIVEDHMKHGIQSAVACDTGLSEQISNAIVYIWEYVLEPILQLGVPVEFVGIAGNHGSSQHKGMDIYKAGLYSYDYAIYTALKQLAKVGKYDNITFNIPHGAFGHVEIYGNTVIYEHGYFNSATEKSMSDQMKKRGQQIKKHVEYFRIGDMHHVCSYDCHKMVLNGAFFGVDTAATEYSGVLGFSSIPAQVIMWHEPEDNIGKSSVKEFKTIQLAIVE

SEQ ID NO: 11959 - protein, 418 aa, Unknown
  Description of Unknown: Integrase A527 sequence
  G3DSA:1.10.10.60,PF02796
MNFKYYNEIIDKIVALKQQGIGSRQIAKQLNIGKSTVNQYYSAWIELEDSNKEIITDTEQEDKTFEDNLNVLCEHPDYSVSNLAKRLRHAHRANNQLRKIQREIADTDFNFKEMLVGIEKAVDKVQVSKYSPRVYPAVASKQNGIVEVLFSDWQIGKVAQHYNTEIGIRALKDYGQQVRTFILDKQRTKNVDKVVFASLGDIVEDHMKHGIQSAVACDTGLSEQISNAIVYIWEYVLEPILQLGVPVEFVGIAGNHGSSQHKGMDIYKAGLYSYDYAIYTALKQLAKVGKYDNITFNIPHGAFGHTEIYGNTVIYEHGYFNSATEKSMSDQMKKRGQQIKKHVEYFRIGDMHHICSYDCHKMILNGAFFGVDTAATEYSGVLGFSSVPSQVIMWHEPEDNIGKSSVKEFKTIQLAIVE

SEQ ID NO: 11960 - protein, 415 aa, Unknown
  Description of Unknown: Integrase A528 sequence
  G3DSA:1.10.10.60,SSF46689
METKKKLTTQQRLDIIKFYQEGTTIIQLSSDFKVSRPTIYNILKKANLTSQNEIFYKNQNINKDMEDNTTFLGVSIDTINGPYDFKIKKALKCSASLLDITQFIQITKFKLNMTMFDYFWQVMVGNRSSLVGRPILEWFGYEGEYFNQKKCFKKMLKNNAIEFRELTQEDKEIDQYPAIQQELQELNQGARTCAKFLIMEPDDLKMAIMQLKTKKGDIIRQYYIDLEKLLKLYVEYTLYFNHRESQRKITDLEYKMDEMTKYMRSLGISLETVKDQNEELLDKNNELLDDNKEVKRKLGIAVKDRAPLPDDKKKQERFVLLKRNDEDYMPYYTIRAQDSYTTRRLRTQNELFPNLQILLDFKANPNSKSLYIRIKDKLKDLGVTFEGNNIDLNGVIEEEKLIEEMKVINDAKKNI

SEQ ID NO: 11961 - protein, 413 aa, Unknown
  Description of Unknown: Integrase A529 sequence
  PF07508,G3DSA:1.10.10.2600,SSF53041, PF13408,PS51737,cd00338,PF00239,PS51736, SM00857,G3DSA:3.40.50.1390,PTHR30461
MSVKKIRVNKQKHKQRICAYIRVSTTNGSQLESLENQKHYFENLYSNRDDIDFVGVYHDRGISGSKDNRPNFQAMIENCRKGMIDIIHTKSIARFARNTVTVLEISRELKAIGVDIFFEEQNIHTLSSEGEVMLSVLASIAEDELRSMSGNQRWAFQKKFQRGELVINTKRFLGYDIDENGELIINPEEALIVRKIFALYLEGYGTHRIAKLLNEKGVATVTGAKWHDTTIRQMLSNEKYNGSVLLQKYFHDGVNGPKKLNQGELEQYLIEDNHEAIISMEDWQAVQVKLNSRRWQQGRNKTYKFTGLLKCQHCGSTLKRQVSYKKKIVWCCSKYIKEGKATCQGMRVPEVDISNWEITSPVTVIERDRNGEKYYSYTGQESADQCSSSGQEENQSSRILPSVHRPRRAAIKL

SEQ ID NO: 11962 - protein, 413 aa, Unknown
  Description of Unknown: Integrase A530 sequence
  PF07508,G3DSA:1.10.10.2600,SSF53041,PF13408, PS51737,cd00338,PF00239,PS51736, SM00857,G3DSA:3.40.50.1390,PTHR30461
MSVKKIRVNKQKNKQRICAYIRVSTTNGSQLESLENQKQYFINLYSNRDDIDFVGVYHDRGISGSKDNRPNFQAMIENCRKGMIDVIHTKSIARFARNTVTVLEISRELKAIGVDIFFEEQNIHTLSSEGEVMLSVLASIAEDELRSMSGNQRWAFQKKFQRGELVINTKRFLGYDLDENGELIINPEEALIVRQIFALYLEGYGTHRIAKLLNEKGVATVTGAKWHDTTIRQMLSNEKYNGSVLLQKYFHDGVNGPKKLNQGELEQYFIEDNHEAIISMEDWQTVQAKLNRRRWQQGRNKTYKFTGLLKCQHCGSTLKRQVSYKKKIVWCCSKYIKEGKAACQGMRVPEVDISNWTVTSPVKVIERDRDGEKYYSYSSQESADQYSSSGQEENQSSRILSSVHRPRRTAIKL

SEQ ID NO: 11963 - protein, 413 aa, Unknown
  Description of Unknown: Integrase A531 sequence
  PF07508,G3DSA:1.10.10.2600,SSF53041,PF13408,PS51737, cd00338,PF00239,PS51736,SM00857,G3DSA:3.40.50.1390, PTHR30461
MSVKKIRVNKQKHKQRICAYIRVSTTNGSQLESLENQKHYFENLYSNRDDIDFVGVYHDRGISGSKDNRPNFQAMIENCRKGMIDIIHTKSIARFARNTVTVLEISRELKAIGVDIFFEEQNIHTLSSEGEVMLSVLASIAEDELRSMSGNQRWAFQKKFQRGELVINTKRFLGYDIDENGELIINPEEALIVRKIFALYLEGYGTHRIAKLLNEKGVATVTGAKWHDTTIRQMLSNEKYNGSVLLQKYFHDGVNGPKKLNQGELEQYLIEDNHEAIISMEDWQAVQVKLNSRRWQQGRNKTYKFTGLLKCQHCGSTLKRQVSYKKKIVWCCSKYIKEGKAACQGMRVPEVDISNWEITSPITVLERDRNGEKYYSYSGQESADQRSSSGQEENQGSRILSSVHRPRRTAIKL

SEQ ID NO: 11964 - protein, 413 aa, Unknown
  Description of Unknown: Integrase A532 sequence
  PF07508,G3DSA:1.10.10.2600,SSF53041,PF13408,PS51737, cd00338,PF00239,PS51736,SM00857, G3DSA:3.40.50.1390,PTHR30461
MSVKKIRVNNQKHKQRICAYIRVSTTNGSQLESLENQKQYFENLYSNRDDIDFVGVYHDKGISGSKDNRPNFQAMIENCRKGMIDVIHTKSIARFARNTVTVLEISRELKAIGVDIFFEEQNIHTLSSEGEVMLSVLASIAEDELRSMSSNQRWAFQKKFQRGELVINTKRFLGYDVDENGELIINPEEALIVRQIFALYLEGYGTHRIAKLLNEKGVGTVTGAKWHDTTIRQMLSNEKYNGSVLLQKYFHDGVNGPKKLNQGELEQYFIEDNHEPIISMEDWQTVQEKLNSRRWQQGKNKTYKFTGLLKCQHCGSTLKRQVSYKKKIVWCCSKYIKEGKAACQGMRVPEVDISNWTVTSPVKVIERDRDGEKYYSYSGQESAEHRSTSGQKENQCSRILPSVHRSRRTAIKL

SEQ ID NO: 11965 - protein, 413 aa, Unknown
  Description of Unknown: Integrase A533 sequence
  PF07508,G3DSA:1.10.10.2600,SSF53041,PF13408,PS51737, cd00338,PF00239,PS51736,SM00857,G3DSA:3.40.50.1390, PTHR30461
MSVKKIRVNRQKHRKRVCAYIRVSTTNGSQLDSLENQKQYFEKLYSNRDDIDFIGVYHDRGISGSKDNRPNFQAMIEDCCRGKIDVIHTKSIARFARNTVTVLEISRELKAIGVDIFFEEQNIHTLSSEGEVMLSVLASIAEDELRSMSGNQRWAFQKKFQRGELVINTKRFLGYDVDENGELIINPEEALIVREIFALYLAGNGTHRIAKQLNEKGVATVTGAKWHDTTIRQMLSNEKYKGSVLLQKYFHDGVNGPKKLNQGELEQYLIEDNHEAIISKEDWQVVQDKLNSRGWQQGRNKTYKFTGLLKCQYCGSTLKRQVSYKKKIVWCCSKYIKEGKVACQGMRVPEVDISNWEINSPVTVIERDRNGEKYYSYSGQESADQRFSSGQEENQGSRILSSVHRPRRTAIKL

SEQ ID NO: 11966 - protein, 413 aa, Unknown
  Description of Unknown: Integrase A534 sequence
  PF07508,G3DSA:1.10.10.2600,SSF53041,PF13408,PS51737, cd00338,PF00239,PS51736,SM00857, G3DSA:3.40.50.1390,PTHR30461
MSVKKIRVNRQKHRKRVCAYIRVSTTNGSQLESLENQKQYFENLYSNRDDIDFVGVYHDRGISGSKDNRPNFQAMIEDCRKGMIDIIHTKSIARFARNTVTVLEISRELKAIGVDIFFEEQNIHTLSSEGEVMLSVLASIAEDELRSMSGNQRWAFQKKFQRGELVINTKRFLGYDVDENGELIINPEEALIVREIFALYLAGNGTHRIAKQLNEKGVATVTGAKWHDTTIRQMLSNEKYKGSVLLQKYFHDGVNGPKKLNQGELEQYLIEDNHEAIISKEDWQAVQDKLNSRRWQQGRNKTYKFTGLLKCQHCGSTLKRQVSYKKKIVWCCSKYIKEGKAACKGMRVPEVDISNWTVTSPVTVIERDRDGEKYYSYSSQESADQYSSSGQEENQGSRILSSVHRPRRTAIKL

SEQ ID NO: 11967 - protein, 413 aa, Unknown
  Description of Unknown: Integrase A535 sequence
  PF07508,G3DSA:1.10.10.2600,SSF53041,PF13408,PS51737, cd00338,PF00239,PS51736,SM00857,G3DSA:3.40.50.1390, PTHR30461
MSVKKIRVNRQKHRKRVCAYIRVSTTNGSQLDSLENQKQYFENLYSNRDDIDFMGVYQDRGISGSKDKRPDFQAMIEECRKGKIDVIHTKSIARFARNTVTVLEISRELKAIGVDIFFEEQNIHTLSSEGEVMLSVLASIAEDELRSMSGNQRWAFQKKFQRGELVINTKRFLGYDIDENGELIINPEEAFIVRQIFALYLEGYGTHRIAKLLNEKGVATVTGAKWHDTTIRQMLSNEKYNGSVLLQKYFHDGVNGPKKLNQGELEQYLIEDNHEAIISKEDWQTVQDKLNSRRWQQGRNKTYKFTGLLKCQHCGSTLKRQVSYKKKIIWCCSKYIKEGKVACQGMRVPEVDISNWVITSPVTVIERDGNEEKYYSYSGQESEDQRSSSGQEENQGSRILSSVHRPRRTAIKL

SEQ ID NO: 11968 - protein, 413 aa, Unknown
  Description of Unknown: Integrase A536 sequence
  PF07508,G3DSA:1.10.10.2600,SSF53041,PF13408,PS51737, cd00338,PF00239,PS51736,SM00857, G3DSA:3.40.50.1390,PTHR30461
MSVKKIRVNKQKHKQRICAYIRVSTTNGSQLESLENQKQYFENLYSNRDDIDFVGVYHDRGISGSKDNRPNFQAMIEDCRKGMIDIIHTKSIARFARNTVTVLEISRELKAIGVDIFFEEQNIHTLSSEGEVMLSVLASIAEDELRSMSGNQRWAFQKKFQRGELVINTKRFLGYDLDENGELIINPEEALIVRQIFALYLEGHGTHRIAKLLNEKGVATVTGAKWHDSTIRQMLSNEKYNGSVLLQKYFHDGVNGPKKLNQGELEKYFIEDNHEAIISMEDWQTVQDKLSSRRWQKGRNKTYKFTGLLKCQHCGSTLKRQVSYKKKIVWCCSKYIKEGKVTCQGMRVPEVDISNWEITSPVTVIERDRNGEKYYSYTGQESADQCSSSGQEENQSSRILPSVHRPRRAAIKL

SEQ ID NO: 11969 - protein, 413 aa, Unknown
  Description of Unknown: Integrase A537 sequence
  PF07508,G3DSA:1.10.10.2600,SSF53041,PF13408,PS51737, cd00338,PF00239,PS51736,SM00857,G3DSA:3.40.50.1390, PTHR30461
MAVRLIKAKQDHKKQRICAYVRVSTTNSSQLDSLENQKTYFETLYANREDVDFLGVYYDKGISGAKEKRPNFQAMLEVCRQGQIDLIHTKSISRFARNTMTVLEVSRELKVLGVGIYFEEQNINTLSNEGEVMLSVLASLAEEELESMSTNQRWAFQKKFQRGEVVINTKRFMGYDVDVDGELVINEAEAQIVRRIFHLYLDGMGLHRIAKLLNEEGVTTVSNAKWHDTTVGHMLRNEKYKGAALLQKTYLDGVNGKRRLNQGEVAQYLIEDNHEPIVSKEVWQAVQHKLDSNTWKQGPNKHYLFTSMLRCQYCGSTLKRQVSYKKQIVWCCSKYIKEGKASCQGMRVPEKAIEEWKLKTPVTVIERTEYGQKHYSYSSQENAADGHPSASHQNQSGRLLSGVHRPRRTAIKL

SEQ ID NO: 11970 - protein, 413 aa, Unknown
  Description of Unknown: Integrase A538 sequence
  PF07508,G3DSA:1.10.10.2600,SSF53041,PF13408,PS51737, cd00338,PF00239,PS51736,SM00857, G3DSA:3.40.50.1390,PTHR30461
MSVKKIRVNRQKHRKKVCAYIRVSTTNGSQLESLENQKQYFENLYSNRDDIDFVGVYHDRGISGSKDNRPNFQAMIENCRKGMIDIIHTKSIARFARNTVTVLEISRELKAIGVDIFFEEQNIHTLSSEGEVMLSVLASIAEDELRSMSGNQRWAFQKKFQRGELVINTKRFLGYDIDENGELIINPEEAFIVRQIFALYLEGYGTHRIAKLLNEKGVATVTGAKWHDTTIRQMLSNEKYNGSVLLQKYFHDGVNGPKKLNQGELEQYLIEDNHEAIISKEDWQTVQDKLNSRRWQQGRNKTYKFTGLLKCQHCGSTLKRQVSYKKKIIWCCSKYIKEGKVACQGMRVPEVDISNWVITSPVTVIERDGNEEKYYSYSGQESEDQRSSSGQEENQGSRILSSVHRPRRTAIKL

SEQ ID NO: 11971 - protein, 413 aa, Unknown
  Description of Unknown: Integrase A539 sequence
  PF07508,G3DSA:1.10.10.2600,SSF53041,PF13408,PS51737, cd00338,PTHR30461:SF3,PF00239,PS51736,SM00857, G3DSA:3.40.50.1390,PTHR30461
MAVRLIKAKSEQKKQRVCAYVRVSTTNSSQLDSLENQKTYFETLYANSEDVDFLGVYYDKGISGAKEKRPSFQAMLEACRQGQIDLIHTKSISRFSRNTMTVLEVSRELKVLGVGIYFEEQNINTLSNEGEVMLSVLASLSEEELESMSTNQRWAFQKKFQRGEMVSNTKRFMGYDVDDDGELVINEAEAQIVRRIFHLYLDGMGMHRIAKLLNEEGVPTVSNAKWHNTTVGHMLRNEKYKGAALLQKTYLHGVNGKRRLNQGKVAQYLIEDNHEPIVSKEVWQAVQDKLDSNTWKQGPNKHYRFTSMLRCQYCGSTLKRQVSYKKQIVWSCSKYIKEGKASCQGMRVPEKAIEDWRLKTPVTVIERNEYGQKHYSYSSQENAVDSHPSASHQNQSGRLLSSVHRPRRTAIKL

SEQ ID NO: 11972 - protein, 413 aa, Unknown
  Description of Unknown: Integrase A540 sequence
  PF07508,G3DSA:1.10.10.2600,SSF53041,PF13408,PS51737, cd00338,PF00239,PS51736,SM00857, G3DSA:3.40.50.1390,PTHR30461
MSVKKIRVNKQKHKQRICAYIRVSTTNGSQLESLENQKHYFENLYSNRDDIDFVGVYHDRGISGSKDNRPNFQAMIENCRKGMIDIIHTKSIARFARNTVTVLEISRELKAIGVDIFFEEQNIHTLSSEGEVMLSVLASIAEDELRSMSGNQRWAFQKKFQRGELVINTKRFLGYDIDENGELIINPEEALIVRKIFALYLEGYGTHRIAKLLNEKGVATVTGAKWHDTTIRQMLSNEKYNGSVLLQKYFHDGVNGPKKLNQGELEQYLIEDNHEAIISMEDWQAVQVKLNSRRWQQGRNKTYKFTGLLKCQHCGSTLKRQVSYKKKIVWCCSKYIKEGKAACQGMRVPEVDISNWTVTSPVKVIERDRDGEKYYSYSGQESADQRSTSGQKESQCSRILPSVHRPRRTAIKL

SEQ ID NO: 11973 - protein, 412 aa, Unknown
  Description of Unknown: Integrase A541 sequence
  PF07508,G3DSA:1.10.10.2600,SSF53041,PF13408,PS51737, cd00338,PTHR30461:SF3,PF00239,PS51736,SM00857, G3DSA:3.40.50.1390,PTHR30461
MRIVRRIQPMMTPQKPKLRVAAYARVSDSRLHHSLSTQVSYYSRLIQSHPDWELVGVYYDEGISGKEQSNRQGLQDLLKACDDGKIDRILTKSIARFGRNTVDLLSTVRVLRQKNIGITFEKEGIDSLSSEGELMLTLLASVAQEESHNISENLRWQIKKKFEQGQPHTPQDIYGYRWNGENYVIEPDEAKVVRQVFQWFLDGDNAPMITKKLNEQGVLTRLGNPFTVSSVREFFKQEAYFGRLVLQKTYREPFSRNPKRNNGQKNKYIVEDAHEAIVSKSYFDVVLQEKERRYKVMYQESHMHKGTFRELIECSHCGKIMITRVDSKKVHRTIRYCCRTRDRFGTSSCPSKTLSEKRILATFEDKIGFKPDKNWVTENIKKVIYDSSVGLITVFPIKGRKYELKVRKEHFL

SEQ ID NO: 11974 - protein, 412 aa, Unknown
  Description of Unknown: Integrase A542 sequence
  PF07508,G3DSA:1.10.10.2600,SSF53041,PF13408,PS51737,cd00338, PTHR30461:SF3,PF00239,PS51736,SM00857,G3DSA:3.40.50.1390, PTHR30461
MRTVRLIQPRMTPQKPKLRVAAYARVSDSRLHHSLSTQVSYYSRLIQSHPDWELVGVYYDEGISGKEQSNRQGLQDLLKACDDGKIDRILTKSIARFGRNTVDLLSTVRVLRQKNIGITFEKEGIDSLSSEGELMLTLLASVAQEESHNISENLRWQIKKKFEQGQPHTPQDIYGYRWNGENYVIEPDEAKVVRQVFQWFLDGDNVPMITKKLNEQGVLTRLGNPFTVSSVREFFKQEAYFGRLVLQKTYREPFSRNPKRNNGQKNKYIVEDAHEAIVSKSYFDVVLQEKERRYKVMHQESHMHKGTFRELIECSHCGKIMITRVDSKKVHRTIRYCCRTRDRFGTSSCPSKTLSEKRILATFEDKIGFKPDKNWVTENIKKVIYDSSVGLITVFPIKGRKYELKVRKEHFL

SEQ ID NO: 11975 - protein, 412 aa, Unknown
  Description of Unknown: Integrase A543 sequence
  PF07508,G3DSA:1.10.10.2600,SSF53041,PF13408,PS51737, cd00338,PTHR30461:SF3,PF00239,PS51736,SM00857, G3DSA:3.40.50.1390,PTHR30461
MRIVRRIQPMMTPQKPKLRVAAYARVSDSRLHHSLSTQVSYYSRLIQSHPDWELVGVYYDEGFSGKEQSNRQGLQDLLKACDDGKIDRILTKSIARFGRNTVDLLSTVRVLRQKNIGITFEKEGIDSLSSEGELMLTLLASVAQEESHNISENLRWQIKKKFEQGQPHTPQDIYGYRWNGENYVIEPDEAKVVRQVFQWFLDGDNAPMITKKLNEQGVLTRLGNPFTVSSVREFFKQEAYFGRLVLQKTYREPFSRNPKRNNGQKNKYIVEDAHEAIVSKSYFDVVLQEKERRYKVMYQESHMHKGTFRELIECSHCGKIMITRVDSKKVHRTIRYCCRTRDRFGTSSCPSKTLSEKRILATFEDKIGFKPDKNWVTENIKKVIYDSSVGLITVFPIKGRKYELKVRKEHFL

SEQ ID NO: 11976 - protein, 411 aa, Unknown
  Description of Unknown: Integrase A544 sequence
  PF07508,G3DSA:1.10.10.2600,SSF53041,PF13408,PS51737,cd00338, PTHR30461:SF3,PF00239,PS51736,SM00857,G3DSA:3.40.50.1390, PTHR30461
MRTVRRIQPIKSPCKPRFKVAAYARVSDSRLHHSLSTQISYYNRLIQAHPDWELVGIYYDEGISGKEQSNRQGFLNLIKDCEDGKIDRIITKSIARFGRNTVELLTTVRQLRLKNIGVTFEKENIDSLSSEGELMLTLLASVAQEESQNLSENIRWRIQKKFEKGIPHTPQDMYGYRWDGEQYQIEPNEAKVIRKVFKWYLDGDSVQQIVDKLNQEQVLTRLGNPFTVASIREFFKQEAYFGRLVLQKTYREAFSRNPKRNKGQRNKYIIENAHEPIVTKEYFDLVLHEKERRNQLMHQESHLNKGIFRDKISCSECGCLMIVKVDSKQVNKTVRYYCRTRNRFGASSCSCRTLGEKRLLASFKSKLGIVPDKEWVENNIKHIEYDFGYRILRVTPVKGRKYLIEIREGRY

SEQ ID NO: 11977 - protein, 411 aa, Unknown
  Description of Unknown: Integrase A545 sequence
  PF07508,G3DSA:1.10.10.2600,SSF53041,PF13408,PS51737, cd00338,PTHR30461:SF3,PF00239,PS51736,SM00857, G3DSA:3.40.50.1390,PTHR30461
MRTVRRIQPIKSPCKPRFKVAAYARVSDSRLHHSLSTQISYYNRLIQAHPDWELVGIYYDEGISGKEQCNRQGFQNLIKDCDDGKIDRIITKSIARFGRNTVELLTTVRQLRLKNIGVTFEKENIDSLSSEGELMLTLLASVAQEESQNMSENIKWRVQKKFEKGIPHTPQDMYGYRWDGEQYQIEPNEAKVIRKVFKWYLEGDSVQQIVDKLNQEQVLTRLGNPFTVASIREFFKQEAYFGRLVLQKTYRESFSRNPKRNKGQRNKYIIENAHEPIVTKEYFDLVLHEKERRYQLMSQESHLNKGIFRDKISCSECGCLMIVKVDSKQVNKTIRYYCRTRNRFGASSCSCRTLGEKRLLASFKSKLGIVPDKEWVENNIKHIDYDFGQRIIWVIPVKGRKYPIEIREGRY

SEQ ID NO: 11978 - protein, 411 aa, Unknown
  Description of Unknown: Integrase A546 sequence
  PF07508,G3DSA:1.10.10.2600,SSF53041,PF13408,PS51737,cd00338, PTHR30461:SF3,PF00239,PS51736,SM00857,G3DSA:3.40.50.1390, PTHR30461
MRTVRRIQPIKSPCKPRFKVAAYARVSDSRLHHSLSTQISYYNRLIQAHPDWELVGIYYDEGISGKEQSNRQGFQNLIKDCDDGKIDRIITKSIARFGRNTVELLTTVRQLRLKNIGVTFEKENIDSLSSEGELMLTLLASVAQEESQNMSENIKWRVQKKFEKGIPHTPQDMYGYRWDGEQYQIEPNEAKVIRKVFKWYLEGDSVQQIVDKLNQEQVLTRLGNPFTVASIREFFKQEAYFGRLVLQKTYRESFSRNPKRNKGQRNKYIIENAHEPIVTKEYFDLVLHEKERRYQLMSQESHLNKGIFRDKISCSECGCLMIVKVDSKQVNKTIRYYCRTRNRFGASSCSCRTLGEKRLLASFKSKLGIVPDKEWVENNIKHIDYDFGQRIIWVIPVKGRKYPIEIREGRY

SEQ ID NO: 11979 - protein, 407 aa, Unknown
  Description of Unknown: Integrase A547 sequence
  PF07508,G3DSA:1.10.10.2600,SSF53041,PF13408,PS51737, cd00338,PF00239,PS51736,SM00857,G3DSA:3.40.50.1390, PTHR30461
MKPGKIRVCAYARVSTMTEKQQESLTNQQAYYNHFYHNKKDVDFIGVYYDQGISGKLAKRPGFQQMLEDCRAGKIDVIHTKSISRFARNTELLLAVSRELKTIQVDIFFEEQNLHTLSNEGEVMLTVLASYAEEELRNMSENQRWAFQKKFQRGELVINTKRFLGYDKDENGELIINPEEAKIVKRIYNLYLSGMGVHVIAKLFNEEKLSTVDGGKWYSSTITNILKNEKYKGDAILQKYYFAEIKAKQRLNQGQVQQYLLTDNHEAIVSREDWEAVQKRLKQKRKAKLSIDYNRRYPLSGLLKCEHCGSTLKRQKYYKGKVVWVCSKYIREGKASCIGMRVPDSAVQDWSIDEPTVVKEENISGKKHYSYSCQENYTSRAESTHSENPDGGLLPSVHRPRRTAIKL

SEQ ID NO: 11980 - protein, 405 aa, Unknown
  Description of Unknown: Integrase A548 sequence
  SSF53041,PS51737,cd00338,PF00239,PS51736, SM00857,G3DSA:3.40.50.1390,PTHR30461
MAVEQDISVSAFSGKERPAWKRVLDMVRAGEVDYVIAYHMDRMTRSMTDLEELIVLCEEHGVGIATAVGEIDLTSDMGRMVARILAAVARAEVERKSARQKLANAQRAAEGKPHSGGQRPFGYARDHMTVVEDEAVLIKTGAERALAGEPLISISKDWGMTARGVKNVLTNPRYAGIRMYLGERVGEAEWPAILDLEVHLRLVEALTDPARTKGTVKMGRTPTSLLTGLAACSVCKGKVRGSSVRGRLTYACRSSHAHIDRADVDTLALGAVINRLSSPAWVETLAPAGDDRLAKAKLVAEEKREALKMYARLLASGAMDEEQFTEASRVARDAMKEAEQTLSQAADGAALSGLDLGTDRVEKQLLALPLARQRGIVEQLLTIEILPQVKSRLAPLSSAERVIIS

SEQ ID NO: 11981 - protein, 403 aa, Unknown
  Description of Unknown: Integrase A549 sequence
  G3DSA:1.10.10.60,SSF46689,PF02796
MPRPSIQNVLDLRRDEVLELLGRGIPAEDVAKKFGVSRRTLYRWLERQGLTVQKIREEYQKLKEERERRKRERLAAIGEIPEDFEKFVEIEEVRKFLDWLKARRVTTAVDIVRTLHRVCLDLGIHPMLLLEDEGKEKLTSLLAKYNEMYKKWTVESIKANLRLWYKFNEKMPPAILSLEAYKSNMAHLAWFNVSDRAVILETAFRLLDKEQFDKVRAALLFLFYTGSRAEALTNVRFEAREVQVDGKRITAIIAITREKGRHGKKQWEKPLHPVIYEKYIKGRLPFSQAELKWLRRVLKAIYREALKGQESSVKYEYAMKHVIHIWRHTAAMSMLHATDWNVGLVAEILGWESPDILLKIYGRMPPEWKIAQALGVTVERPPFRFVYGNEEERLKELRILELP

SEQ ID NO: 11982 - protein, 403 aa, Unknown
  Description of Unknown: Integrase A550 sequence
  PF07508,G3DSA:1.10.10.2600,SSF53041, PF13408,PS51737,cd00338,PTHR30461:SF3,PF00239, PS51736,SM00857,G3DSA:3.40.50.1390,PTHR30461
MKTVTKIQQRVSPFQSKKKVAAYIRVSHSNLEHSFSNQVSYYNDFIQNKREWEFVGVYADFAISGKSQKERPEFRRLISDCRNGKINCILTKSISRFGRNTLELLETVRELRRLEIEVVFEKENIRTLSVDGELLLTLLASFAQEESTSLSQNIKWRVKERFKQGLPYIPQAIYGYRWNGEKYIIKPHEAEIVRKVFTWYLDGLGVPSIAKKLNDMGETTRLGNIFTKSILYEFFKQEAYFGRLVLQKTYRNDFNRSPKRNTGQRTKYIVDNAHEAIISKELFDKAQAEKKIRSKGRCYRKCYDDAFFKDKVFCQQCGRDMLITKEKKFGYRYNCRTRQQYGISTCPSKTLSERRLVRTVKEQLGDYLGSIQKVMFDSSSNQVTLYFDDDNIQILTLKRGQLK

SEQ ID NO: 11983 - protein, 402 aa, Unknown
  Description of Unknown: Integrase A551 sequence
  PF07508,G3DSA:1.10.10.2600,PF13408,PS51737,PTHR30461:SF3, PTHR30461
MRMSRGELIGFNGCLGYDYHAEDKSLSVNEEEAETVRYIFNRYIEGAGCFVIARELENLGYKTAGGKTKWFDSSVRGIIKNEKYVGDIRAGKTFTVDPISKRRLKNLGEEDQFYIRDHHEPIISREVFDKAHEILNIRAESYKRYERGKSSRNKFTRQYAFSCIMECGYCGARLTRRHWMGKNGYSKIIWQCVTYARKGHKNCPYCKGVAESLIEEAFVKSYQYLFETNRYLIDDFMLKLEQNLSRKNYEKERDELSRKLSDLSKKRNALIDMKLDSVIDDQAYESKYYDLTDKINLAITKLESIEKSIVDDLDEKERLQEIRKVLSNNQTIETFDRKVFESIVSKVIVGGFDAEGNACPYNVTFILKSGLSDYPYTIGMKPEPNEVIPSNNHSPHKENPTC

SEQ ID NO: 11984 - protein, 402 aa, Unknown
  Description of Unknown: Integrase A552 sequence
  PF07508,G3DSA:1.10.10.2600,SSF53041,PF13408,PS51737, cd00338,PTHR30461:SF3,PF00239,PS51736,SM00857, G3DSA:3.40.50.1390,PTHR30461
MKQIKTIQAQKVTTIKRLKVAAYTRVSHTSLLQSLSNQISHYSQMIQANPEWDYVGVYSDSAISGRSQAHRRDFQQLLEDCHKGKIDLILTKSISRFGRNTVELLETVRELKRLGISVRFEKEKIDTLTAEGELLLTLLASMAQEESQSISQNIRWRVKKRFEEGKPYIPQDIFGYRWNGEEYMIEPHEASIVRQVFEWYMEGLSAPKIAKRLDDRGERTRLGNRFTQRVIYNMFDQEAYCGRLILQKTFRDHFSSRSIPNDGQMAKYIVENAHEAIVTPEYFQLVNQEKKRRARRRVSKHDALARLQGKVYCEHCGLDMILTLETKSNQEKRVRYYCRTRDGKGVEACLGRTVTEEQLFQAFGESINIEDIHHISFNSVTNEAKVTYRNGKEKHVIIQKGR

SEQ ID NO: 11985 - protein, 402 aa, Unknown
  Description of Unknown: Integrase A553 sequence
  PF07508,G3DSA:1.10.10.2600,SSF53041,PF13408,PS51737,cd00338, PTHR30461:SF3,PF00239,PS51736,SM00857,G3DSA:3.40.50.1390 ,PTHR30461
MKRIKTIQAQKLTAIKKLKVAAYTRVSHTSLLQSLSNQVSHYSQLIQSNPEWSYVGVYSDSAISGRCQAHRRDFQNLLEDSRKGKIDLILTKSISRFGRNTVELLETVRELKRLGISVRFEKENIDTLTAEGELLLTLLASMAQEESQSISQNIRWRVKKCFEEGKPYIPQDIFGYRWSGEEYVIEPHEASIVRQVFEWYMEGLSAPKIAKRLDARGERTRLGNRFTKRVIYNMFDQEAYYGRLILQKTFRDNFGSRSIPNDGQMAKYIVENAHEAIVTPEFFQQVNQEKKRRAKRRPSKHDALAKLQGKVYCEHCGLDMLLSVETKSNQEKRVRYYCRTRDAKGVEACLGRTITEEQLFQAFGETLKAEDIHHISFNSVTNEAKATYRNGEEKHIIIQKGR

SEQ ID NO: 11986 - protein, 402 aa, Unknown
  Description of Unknown: Integrase A554 sequence
  PF07508,G3DSA:1.10.10.2600,SSF53041,PF13408,PS51737, cd00338,PTHR30461:SF3,PF00239,PS51736,SM00857, G3DSA:3.40.50.1390,PTHR30461
MKQIKTIQAQKVTTIKRLKVAAYTRVSHTSLLQSLSNQVSYYSQMIQANPEWDYVGVYSDSAISGRSQAHRRDFQQLLEDCRKGKVDLILTKSISRFGRNTVELLETVRELKRLGISVRFEKEKIDTLTAEGELLLTLLASMAQEESQSISQNIRWRVKKRFEDGKPYIPQDIFGYRWNGEEYVIEPHEASIVRQVFEWYMEGLSAPKIAKRLDDRGERTRLGNRFTKRIIYNMFDQEAYCGRLILQKTFRDHFGSRSIPNDGQMAKYIVENAHEAIVTPEYFQQVNQEKKRRARRRVSKHDALAKLQGKVYCEHCGLDMILTLETKSNQEKRVRYYCRTRDAKGVEACLGRTVTEEQLFQAFGESINTEDIHHISFNSVTNEAKATYRNGEEKHVIIQKGR

SEQ ID NO: 11987 - protein, 399 aa, Unknown
  Description of Unknown: Integrase A555 sequence
  G3DSA:1.10.10.60,SSF46689
MSKFHSIFDLNTVWILDYENFLKLGMIYIHAFGVVIGFLIGFSKLYSSDGFSKSYGSVLQSAAFFLILNNGILIDQGALRNENKILNGSYYGLVLYSSLAVLVCFNYVLDSLDNPWIHCKRILGIIPVTILLSYFIPELYFISFIDILGFAISIFTFIWSLKSVLKTNKSILFFNLPFLSFLISICFVLDLLGTIFNKKDFFLLAEIIPGSVICYTILLERFFPSLFGKVTFTIQDVSLVKDYKFETIPIIETKEQKKYKYPPRDLLEGIDLTIIQNKMNHFLDIKGFKDEEIRLPDFATDLGLTTHQASNYLNKFIKMSFTDFLNYHRIVEVITFMEKKTDFNLLNIALECGFNSASSFHRSCVKFTGKSPRDLKNYIQSNKGSSFTILQKPKVQSYS

SEQ ID NO: 11988 - protein, 392 aa, Unknown
  Description of Unknown: Integrase A556 sequence
  G3DSA:1.10.10.60,SSF46689
MSIDTLGIDDEIVLTTIANINAHYKEKRKFVDIAKMQDIAPDILTVRFLNQGLETPTHYLKELRKDLAKRLVFEGELSLEEIAKTLSYDKTSNFYVWYLSVFGERPTKVRARMGLKSKRPSLGLVNAVISSIVENIDLNPHLYKDVNVLINDSIYTTTYIRQKFIELHGVTPRAYLLNKQLEYVAEQIKNHGYKETRLLEMTIYNAPTGLNKAFKAKYGMTTSEFGESKSIGMWAKVHGENVWILPSLMEEIIDNVTENLLENRPHLTELRELYGVNTSSWERMFTLYTGMLPSKARLFIRLEIVVYFLQNTRWKFSKILRKVGSDYEYDIRRYLMANYGLTPAEIRKHKGPLTRRNKTKQFVRFVKTNADLCIREDDIRLGKIKETELCTL

SEQ ID NO: 11989 - protein, 392 aa, Unknown
  Description of Unknown: Integrase A557 sequence
  G3DSA:1.10.10.60,SSF46689
MSIDTLGIDDEIVLTTIANINAHYKEKRKFVDIAKMQNIAPDVLTVRFLNQGLETPTHHLKELRKDLAKRLVSDGELSLEEIAKTLGYDKTSNFYVWYLSVFGERPTKVRARMGLKSKRPSLGVVDAVISSIVEKIDLNPYLYKDVNVLINDSVYTTTYIRQKFIELHGVTPRAYLLNKQLEYVAEQIKTHGYKETRLLEMTIYNAPTGLNKAFKAKYGMTTSEFGESKSIGMWAKVHGENVWILPSLMEEIVDNVTENLLENRPHLTELREFYGVNTSSWERMFTLYTGMLPSKARLFIRLEIVVYFLQNTRWKFSKILRKVGSDYEYDIRRHLMANYGLTPAEIRKHKGPLTRRNKTKQFVRFVKTNADLCIREDDIRLGKIKETELCTL

SEQ ID NO: 11990 - protein, 392 aa, Unknown
  Description of Unknown: Integrase A558 sequence
  G3DSA:1.10.10.60,SSF46689
MSIELPIAEDPITALTFKNIEKYYKEKRKFTDIAKLQKTCPNAITKRFENQGFETPTHYLKELRKELAKTLVTEGKLSLSEIAETLGYDKTMNFYVWYQSVFGERPTKVRARMGLKSKTPSSGVIDAIAKSIATKIDLNPNFYKDVTELMEEHGYSNVYIKRKFIEMYGKTPRAHLLDRQLEYVADQIKTHGYKEARLMGMTMHNAPTGLNKAFKAKYGMTTSDYGESLSIGTWAKVHGENVWVMPSLMDEILDNVTENLLDDRLNLYQLREFYGLNSHSWERMFTLYTGMLPSKVRQCIRLELIVYFLQNTRWKFTKILRKVGSDYEYDVRRQLTENYGLTPVEIRKLKGPLTRRYNTEQFIRFVKTNADLCIREDDIRLGKIEVTEPCTL

SEQ ID NO: 11991 - protein, 370 aa, Unknown
  Description of Unknown: Integrase A559 sequence
  PF07508,G3DSA:1.10.10.2600,SSF53041,PS51737,cd00338, PF00239,PS51736,SM00857,G3DSA:3.40.50.1390,PTHR30461
MVRRNSKITRQQKKIRDAFVSERTVEIIPAKREFTDVKTKKLRVAAYCRVSTFDESQSGSFELQKQTYTERINSNPDWIMAGIYADQGASGTSIKRREQFQQMLHDCRCGKIDLIIVKSVSRFARNQLDFISIYRELKALSPPVGIYIEDINLNTLDTNSEFILGIMAIVAQGESEQKSASITWSVIERFKRGIPMIPTHNLLGYTKDQYGRVVIDETEAKIVRLIYDSYIEGMTASEIASTLMTNHIPTVTGLERWTSLAVYNILRNEKYKGEIIMQKTYTVDCFSHKTRKNNGEKPKYRLKNGIPSIIPESRWDLVQELLKQPRRKSKSTSEIFVPKLYIKKLKSGKLRDFVVLDPSWKSEDIHEVFK

SEQ ID NO: 11992 - protein, 370 aa, Unknown
  Description of Unknown: Integrase A560 sequence
  PF07508,G3DSA:1.10.10.2600,SSF53041,PS51737,cd00338, PTHR30461:SF3, PF00239,PS51736,SM00857, G3DSA:3.40.50.1390,PTHR30461
MVRRNSKITRQQKKIRDAFISERTVEIIPAKREFTDVKTKKLRVAAYCRVSTFDESQSGSFELQKQTYTERINSNPDWIMAGIYADQGASGTSIKRREQFQQMLHDCRSGKIDLIIVKSVSRFARNQLDFISIYRELKALSPPVGIYIEDINLNTLDTKSEFILGIMAIVAQGESEQKSASITWSVIERFKRGIPMIPTHNLLGYTKDQYGRVVIDETEAKIVRLIYDSYIEGMTASEIASTLMTNHIPTVTGLERWTSLAVYNILRNEKYKGEIIMQKTYTVDCFSHKTRKNNGEKPKYRLKNGIPSIIPESRWDLVQELLKQPRRKSKSTSEIFVPKLYIKKLKSGKLRDFVVLDPSWKSEDIHEVFK

SEQ ID NO: 11993 - protein, 367 aa, Unknown
  Description of Unknown: Integrase A561 sequence
  PF07508,G3DSA:1.10.10.2600,SSF53041,PF13408,PS51737, cd00338,PTHR30461:SF3,PF00239,PS51736,SM00857, G3DSA:3.40.50.1390,PTHR30461
MIQAHPDWELVGIYYDEGISGKEQSNRQGFLNLIKDCEDGKIDRIITKSIARFGRNTVELLTTVRQLRLKNIGVTFEKENIDSLSSEGELMLTLLASVAQEESQNLSENIRWRIQKKFEKGIPHTPQDMYGYRWDGEQYQIEPNEAKVIRKVFKWYLDGDSVQQIVDKLNQEQVLTRLGNPFTVASIREFFKQEAYFGRLVLQKTYREAFSRNPKRNKGQRNKYIIENAHEPIVTKEYFDLVLHEKERRNQLMHQESHLNKGIFRDKISCSECGCLMIVKVDSKQVNKTVRYYCRTRNRFGASSCSCRTLGEKRLLASFKSKLGIVPDKEWVENNIKHIEYDFGYRILRVTPVKGRKYLIEIREGRY

SEQ ID NO: 11994 - protein, 361 aa, Unknown
  Description of Unknown: Integrase A562 sequence
  PF07508,G3DSA:1.10.10.2600,SSF53041,PS51737,cd00338, PTHR30461:SF3,PF00239,PS51736,SM00857,G3DSA:3.40.50.1390 ,PTHR30461
MKKVITIQATPSIIRSSSDDFSLKKRRVAGYARVSTDHEDQATSYESQMRYYSEYINGRDDWEFVKMYSDEGISGTNTKLRTGFKAMVEDALNGKIDLIITKSVSRFARNTVDSLTTVRQLKEVGVEIYFEKENIWTLDSKGELLITIMSSLAQEESRSISENVTWGLRKQFAEGKVHFPYTNVLGFKAGEDGAIVVDQDEAKTVRYIFQQALIGKSPYHIAKDLTEQGILSPSGKSHWNATTIKRMLRNEKYKGDALLQKTYTIDFLTKKKNINRGELPQYYVENNHEAIVDRETFDAVQQVLDNKGRKSSTTIFSSKLVCGDCGHFFGSKVWHSTSKYRRVIYQCNDKYKSSGKKSIES

SEQ ID NO: 11995 - protein, 360 aa, Unknown
  Description of Unknown: Integrase A563 sequence
  PF07508,G3DSA:1.10.10.2600,SSF53041,PS51737,cd00338, PTHR30461:SF3,PF00239,PS51736,SM00857,G3DSA:3.40.50.1390, PTHR30461
METNKQNEIRNAYEHSAQVQCIPASIKKTTEHSEEDPLVVAPYCRVSTDNKDQLASYELQCQYYKEYVSKHPGWRLYDIYADEGISGTSVKKRTDFLRMIDDCKAGKIDMIIVKNIARFARNVVDCVATVRMLKALDKPVAVYFEDIAINTLTQTGELLMVVMAAIAQGESEAKSESVKWGFQKRFEKGLPKLADLYGYTRDKRLLEIYEPEANVVRLIYQMFYDDKTIPEICYILNQQGIPSPRGGQWTYSTVKTILTNEKYSGDVLMQKTVTVDIFSHRSIRNDGRANQFFIQGYHEAIIPRELWLEVQQILKGENVVPVPSVDEVADLSASDVPRILDGFFVIKPRKDGNNEYLRQL

SEQ ID NO: 11996 - protein, 358 aa, Unknown
  Description of Unknown: Integrase A564 sequence
  PF07508,G3DSA:1.10.10.2600,SSF53041,PS51737,cd03768, PTHR30461:SF3,PF00239,PS51736,SM00857, G3DSA:3.40.50.1390,PTHR30461
MRKVAIYSRVSTINQAEEGYSIQGQIEALTKYCEAMEWKIYKNYSDAGFSGGKLERPAITELIEDGKNNKFDTILVYKLDRLSRNVKDTLYLVKDVFTANNIHFVSLKENIDTSSAMGNLFLTLLSAIAEFEREQIKERMQFGVMNRAKSGKTTAWKTPPYGYRYNKDEKTLSVNELEAANVRQMFDMIISGCSIMSITNYARDNFVGNTWTHVKVKRILENETYKGLVKYREQTFSGDHQAIIDEKTYNKAQIALAHRTDTKTNTRPFQGKYMLSHIAKCGYCGAPLKVCTGRAKNDGTRRQTYVCVNKTESLARRSVNNYNNQKICNTGRYEKNTSKNMLLMFFINFNTIKNILKK

SEQ ID NO: 11997 - protein, 351 aa, Unknown
  Description of Unknown: Integrase A565 sequence
  G3DSA:1.10.10.60,SSF46689
MDMDAQVHRATYPKIAYRLMERDFSGWDRANMQSAWADAVIRGDLCTPEELMERDTVSIKEWMGVLDIGVDCWAEHFPVLLMTETGIESMGLGAAYLVVAPDMRSVVTGFSLHWPNIDTNLTIDIENAKGGLNFRLYYHTLSGWVGACFNASAIGLFRKALIAVSGLRTGDGHTVTIHCDKPESGYLYEEHLKCPVTWEKRDDGKLGMTFFVPDHVLDRKNPHSDPAMYEYMSETLWQRTTAISKRAGESTSYTSLVRLTLSSSMKIPSQQEVADRHQWSVRSLQQNLKDEGSSWQELLDTEIINRAKVALSGGSSVDAAAASLGISPSNFRRKFKAVTGQTPNKYQANYD

SEQ ID NO: 11998 - protein, 350 aa, Unknown
  Description of Unknown: Integrase A566 sequence
  G3DSA:1.10.10.60,SSF46689
MDLQKICDRISQEFETDIVMGANLLIQMIQRQKITSDTPVQVVPAVKAVPTVQPVQPVQAVPAVQAVQPVQVVPAIKAVPAIQPVQAVQAVSTVQPVKAVQPVQPVQPVQPVQPVQAVQAVSTVQPVKAVQPVQPVQPVQPVQPVQPVQPVQPVQPVQVVQPVQAVQAVQPVQVVPAVRAVPAVQPVQTVQPVQTGNLSQSVQVPEINPVLFSYLVPLIPLIQMYHIAQKNDVPKNPQVQKQDACQPTSDGKFKIPINNTKTIKKSTSEKSTSEKKTIPKKRTSLKYVKRSRLSEKERNLLESQYSKDKYASPEIRDELAKKIGKSPRQIQIWFQNRRCKDRKLFFEKNN

SEQ ID NO: 11999 - protein, 344 aa, Unknown
  Description of Unknown: Integrase A567 sequence
  PF07508,G3DSA:1.10.10.2600,SSF53041, PF13408,PS51737,cd00338,PTHR30461:SF3,PF00239, PS51736,G3DSA:3.40.50.1390,PTHR30461
MDRILVKSISRFARNTLDCIKYVRELKELGIGVTFEKENIDSLDSKGEVLLTILSSLAQDESRSISENSTWGIRKKFERGVVQVNTTNFMGYDKDEKGNLIINHEQANVVRYIFDRFLEGYSPEFISKELRKQEIPGCTGKARWCPSAIWKMLKNEKYKGDALLQKTYTVDFLTKKRIDNDGQVNQYYIENNHEPILDREKWEIVQLEIARRKKFREQHKLQFYIMQKENNPFTTKVFCAECGSAFGRKNWTTSRGKRKVWQCNNRYKIKGQIGCLNNHIDEEMLEKAVMMAVSILKENRELLQSKWNKLIETDSRLKQYYSNRLRDIVSRKNGILMGLKCAGF

SEQ ID NO: 12000 - protein, 342 aa, Unknown
  Description of Unknown: Integrase A568 sequence
  G3DSA:1.10.10.60,SSF46689
MAAITRRRWEKEEDESLVNLVLEKTKKGETLDYIFGLASAKLNRTILACSNRWYDHFHDTYQAELAIVKQGNPTTNDYSGPWTAHDEERLLENMVSFLIQDLGVIDSLKRSAQILKRSLQSCSNRWYNNVLKKNKLTVENMVAQGKKAAAMIKEESEVQEKVQDPQQKENRTFKNQRGLLTQKQLDGWSPEKRFEFYKMMRLAEICGHNLDDILALAAVTYNKSKSECEMTWENYFKDDEILKAMFEKEQNEKAENEVREEQSTMELEDVIPEDYTIKVEEDSTQKEVITEAVMNPEEILGLVKSLIARNKELEAEVKELRGIRVKKEEYEAILVKIQSLVK

SEQ ID NO: 12001 - protein, 340 aa, Unknown
  Description of Unknown: Integrase A569 sequence
  G3DSA:1.10.10.60,SSF46689,PF02796
MVTFETVMEIKILHKQGMSSRAIARELGISRNTVKRYLQAKSEPPKYTPRPAVASLLDEYRDYIRQRIADAHPYKIPATVIAREIRDQGYRGGMTILRAFIRSLSVPQEQEPAVRFETEPGRQMQVDWGTMRNGRSPLHVFVAVLGYSRMLYIEFTDNMRYDTLETCHRNAFRFFGGVPREVLYDNMKTVVLQRDAYQTGQHRFHPSLWQFGKEMGFSPRLCRPFRAQTKGKVERMVQYTRNSFYIPLMTRLRPMGITVDVETANRHGLRWLHDVANQRKHETIQARPCDRWLEEQQSMLALPPEKKEYDVHLDENLVNFDKHPLHHPLSIYDSFCRGVA

SEQ ID NO: 12002 - protein, 337 aa, Unknown
  Description of Unknown: Integrase A570 sequence
  SSF53041,cd00338,PTHR30461:SF3,PF00239,PS51736, SM00857,G3DSA:3.40.50.1390,PTHR30461
MKTAIIYCRQSNKKNSRHGMVSNMSMKELSLDSQEEMCKLFCNTNGYNILKIIRETTSGRDMTRMEQLQEIINKMSPGQTLIVYDTTRFSRNTLQALSILDKFDKKNIHIYSVSEKCGYDTTQDRNIMRMLLSKSELESDQISDRIKRSVEFRKSKGIKIGQSTFGYESFYDNNGMRKERINSQEMQIIDQINKYLSNNKNYNYIAQQLNRQKKFYREKEWTAQNLKYVINTFKKKQILNSEQKNCSHHMDEKEDCNQYDDNGDEDNEDYQVSETENETENDEKDKEYKDTTYYNLKRKNPSDNDDIIEQKNKKQKITYEPLRRSERIKNMEEKLNN

SEQ ID NO: 12003 - protein, 330 aa, Unknown
  Description of Unknown: Integrase A571 sequence
  PF07508,G3DSA:1.10.10.2600,SSF53041,PF13408,PS51737, PTHR30461:SF3,PF00239,PS51736, G3DSA:3.40.50.1390, PTHR30461
MIEDVFIKNGIEFLSLQENFDTSTPFGKAMIGLLSVFAQLEREQIKERMQLGKLGRAKAGKSMMWAKTSYGYDYHKETGTMTINPVQALAIKFIFESYLSGRSITKLRDDLNEKYPKEKPWNYRAVRVILDNPVYCGYNQYLGEIYKGNHEPIISKETYDKTQEELKIRQRTALENLNPRPFQAKYMLSGIAQCGYCLAPLKIIMGVKRKDGSRFKKYECHQRHPRKLRGVTTYNDNKKCDSGFYYKDDLEAYVLQEVNKLQHDSEYLETIFSDNRKESIDRESYQKQIRELSKKLSRLNDLYIDDRITLEELQSKSSEFLSMRALLEKS

SEQ ID NO: 12004 - protein, 328 aa, Unknown
  Description of Unknown: Integrase A572 sequence
  G3DSA:1.10.10.60,SSF46689
MLITKKTHTRSANMSYNHLTLTERARIEVLRQENYSLRSIARKLKRSVSTISREISRNNLNQSYQAETAQKNYETKRKLCGRPTRFTPELGNIIKYYLKCHWSPEQIVGRLLQNQICFKTIYRWINSNMINFELISCLRQKGKRQKPKETRGKFNIGRPISQRPKEIKKRNTFGHWEADTIVSSRGKSKGCIATFAERKSRYYYCVLMPDRSSNSMETAINNLIKHLPKGAVKTITVDRGKEFSCYQNIENQFNINVYFADPYSAWQRGTNENTNGLLREFFPKKTDLAKVNQEQLNYALDSINYRPRKCLNWKFPYEVLCDELLHLN

SEQ ID NO: 12005 - protein, 328 aa, Unknown
  Description of Unknown: Integrase A573 sequence
  G3DSA:1.10.10.60,SSF46689
MLITTKTHTRSANMSYNHLTLTERARIEVLRQENYSLRSIARKLKRSVSTISREISRNNLNQSYQAKTAQKNYETKRKLCGRPTRFTPELGNIIKYYLKCHWSPEQIVGRLLQNQICFKTIYRWINSNMINFELISCLRQKGKRQKPKETRGKFNIGRPISQRPKEVKKRNTFGHWEADTIVSSRGKSKGCIATFAERKSRYYYCVLMPDRSSNSMETAINNLIKHLPKDAVKTITVDRGKEFSCYQNIENQFNINVYFADPYSAWQRGTNENTNGLLREFFPKKTDLAKVNQEQLNYALDSINYRPRKCLNWKFPYEVLCDELLHLN

SEQ ID NO: 12006 - protein, 323 aa, Unknown
  Description of Unknown: Integrase A574 sequence
  G3DSA:1.10.10.60,SSF46689
MSGIYKISFNGNNKRDCYIGQAQDFTARMYNHRHHLRRGTHFAPKLQRAYDENGHENMRVEILELCEVEVLTQREQHYLDTIKPRYNPTLIASEPPMRGKAHSDDAKQRISDAVRKFSHKQELAIVSSHIGLGFSTTTIALQFGCSEPTIRTILRKHGIDTGASRRPKGRAKKAGRKVKFDAAQEQAIARSYQSGKSTAEVAQEFGCSQPTVVKMLDKLGIERRRGQFNETEQQDIVRQYKNGKTTEDIAAQYGCNHSTIGDELRRAGVELRGRGRKRLLTDKQERQALALRDKGRSVSEVAAKFGCSPQAMRNILNKHRESA

SEQ ID NO: 12007 - protein, 314 aa, Unknown
  Description of Unknown: Integrase A575 sequence
  PF07508,G3DSA:1.10.10.2600, SSF53041,PS51737,cd00338,PF00239,PS51736, SM00857,G3DSA:3.40.50.1390,PTHR30461
MNERKDIVENVTVIQKQRAIKDYAVGIYARVSTSHKAQMDSLSAQVSGLTRLAAVHRTWFVADIFIDVASAKTGSTRSEFNRMINECEHGNLDIILTKSLSRFGRDAKEGLEAIRRIRAAGKRIIFEKDKIDTETVKDELLISIIEACDQAENDWRSENIRLGLKYRAEDGTSGLYNRACYGYKKDKNGMLIIDEEEARVVRRIYDWYLEGYSIGGIIDKLEEKKIKTSKGKERWSKRAIESTLTREKYTGDVAIADPGGSENRYLYKQHHEGIISKEQFKAVQLEMELRSNVEIGEDGKARRKSKKYSSKILK

SEQ ID NO: 12008 - protein, 313 aa, Unknown
  Description of Unknown: Integrase A576 sequence
  PF07508,G3DSA:1.10.10.2600,SSF53041,PS51737, cd00338,PTHR30461:SF3,PF00239,PS51736, SM00857,G3DSA:3.40.50.1390,PTHR30461
MKTVKKIQQIRPVKNKKLRVAAYARVSHSELLQSLSNQVSYYSELIQNHSEWEYKGVYVDSAITGRNIKQRKEYQRLIQDCKEGKIDVILTKSISRFGRNTIDLLKTIRELRRLNVSVRFEKENIDTMTTDGELLLTLLVSIAEEESKAIGQNIKWRVKEKFQQGLPHSPQDMYGYRWQEDAYVIEPHEASIIQQIYEWYLNGYSPTQIAKILNEKREKTRKGNAFTRSVIHNILSQDTYTGRLILQKTYRVAHKGRSVMNQGEHTKYIVEQAHEPIISKEQFEEVQQVKATRSNHYQKGAKHGEKDCHHRSS

SEQ ID NO: 12009 - protein, 309 aa, Unknown
  Description of Unknown: Integrase A577 sequence
  G3DSA:1.10.10.60,SSF46689
MIYRISMVSCTLLHNYKFVVYMFTFPNGKSYIGRTCDFTRRLRTHLKKSSGCKYVRNCFNKYGRGSVDITILKKGLKGAYLANQWEKFFIASFDTLAPKGLNMTPGGDGVCFTQEICDKISKALKGRKLSKEHRLACSIAHKKRWATYTISEYTRNKLRNVNKGRKFTKEHCLNISKARKALNIRLTAEQKQHLRNINMGKKMDPEVVRRTVAKRIANGNHLHTQATKDRIAYAKRGISLSEEHKQNLRIGHQNSTFDHSTKRKYKDEEILRVLKECDQDRNKAASILNVHYNTVFRCLKRNNLTKICS

SEQ ID NO: 12010 - protein, 307 aa, Unknown
  Description of Unknown: Integrase A578 sequence
  G3DSA:1.10.10.60,SSF46689
MTKEVWGEIEGYPNHKISSLGRLKSFGVKKEGVIINGFVDKDGYRRHFMRYKNKSKNKLAHRLVAETFIPNPENKTQVNHKDGNKLNNKVDNLEWCNCQENITHACKTGLRKNKGEHNIKSKLKGYEVNQIKHALSSGVKPKDLAKEYGVTRSTIYDIKNKKTWFGYNENLEIKLLSNNAILPKRANDFDSGLDLYVSETTTIKAGETKAVKTDVAINLPHGYEAQVRPRSGKSLKTKLRVALGTIDQTYNKEIGIITDNIGDEDIAVEKGERLAQLVVAPVAYPTPKQVDWFENESDRGAYGSTGE

SEQ ID NO: 12011 - protein, 307 aa, Unknown
  Description of Unknown: Integrase A579 sequence
  G3DSA:1.10.10.60,SSF46689
MVLWEEAVNEKDPSNKLRLIALIYGLQIFSFLLLRPILRSILRIGLSFSFLKYILFAVFTSITFLISFEEFWSLTFFGGILTFAVALFLSAESSFVIFKQKLGFRPHFFSLIPLSLGFIFFGNVLANLFLNGNLNYLSYLVYDIILIFIFKKYRRTQDLKPDKSPDDLQINPLADIISKQSAPRDTLFLRDRDLANLESRLESFIKEKLFLKPNLSQGDLADYLGLSRYETSRYLNLYKRVSFYDLINKLRIQEAQKLIAENISNLTQIASLTGFGSYATFFKAYLKFAGSIPKNALDERKRDRFES

SEQ ID NO: 12012 - protein, 305 aa, Unknown
  Description of Unknown: Integrase A580 sequence
  G3DSA:1.10.10.60,SSF46689
MKRGIEVNIIKSFNNTIDYLETVLDDEIDEKKVAQLSGYSYSMVSRLFSILTETTLSEYLRSRRLTEAAVILRDTDEKIIDVAFKFGYESSDSFGTAFKNFHGFTPSEVRNGKPFKLVSRVQLSLSVRGGRSMNITIQKKKAFTVAGINENSINSSLCSGIWGKLFSKVSHEEISKFGTGESVGVCHDILNLDNHDVLESNTISYMAGYIVNDVDKARSIGLDVLEVEEAEYAVVELIGSVPDCIHNGWKYALEVSSLSMGMFISGKPDFDIIIEGDMDSKDYKMELWIPITKAKKIPVNLSDTF

SEQ ID NO: 12013 - protein, 305 aa, Unknown
  Description of Unknown: Integrase A581 sequence
  PF07508, G3DSA:1.10.10.2600,SSF53041,PS51737,cd00338,PTHR30461:SF3, PF00239,PS51736,SM00857,G3DSA:3.40.50.1390,PTHR30461
MKQIRKIIQIRLPEQKKLKVAAYARVSHTRLLQSLSNQVSYYNQIIGKNPEWEFKGVYVDEVISGRNASKRKEYQRLLSDCRKGEVDIILTKSISRFGRNTVELLKTIRELKQLNISVRFEKENIDTLTTDGELLLTLLSTLAEEESKAISENIKWKVKKQFEQGLPYIKQDMYGYRFKETKYEIEPREAEVVKQVYAWYLEGEQPTFIARKLNEQGIKTRKGNRFSRSIIHRILGQEAYTGTLVLQKTYHVGHKGRSVENKGERTKYIVENAHEAIISREMFEEVQQEKARRSLHNKKKEGRHD

SEQ ID NO: 12014 - protein, 304 aa, Unknown
  Description of Unknown: Integrase A582 sequence
  PF07508,G3DSA:1.10.10.2600,SSF53041,PS51737, cd03768,PTHR30461:SF3,PF00239,PS51736, SM00857,G3DSA:3.40.50.1390,PTHR30461
MYSKTHKRCDVLLCSILTQNWSKKQMSKKAAIYTRVSTTNQAEEGYSIDEQIDKLKMYCEAMDWKVSEIYTDAGFSGSKLTRPGMEKMITDIGLKKFDTVIVYKLDRLSRSVRDTLYLVKDVFTKNEIDFISLSESIDTSSAMGSLFLTILSAINEFERENIKERMTMGKIGRAKSGKSMMWAKTAFGYSHNQETGILEINPLEASIVEQIFNEYLKGTSITKLRDKLNEDGHIAKELPWSYRTIRQTLDNPVYCGYIKYKNNTFEGLQSSDLSDILLLLPNLSLLLPNLTCVSKLDTSCIHFV

SEQ ID NO: 12015 - protein, 298 aa, Unknown
  Description of Unknown: Integrase A583 sequence
  PF07508,PS51737,PTHR30461
MSLRAYGWTNDGKIVESEADEIRSWARHVIDGGAIRPLVAELNERGVATVTGKSWAAPTITRALTAPRMVGLRERNGELEDAPIEPILDRDTWDEVVAILTDPARKKFASRKNPPTLLAGILQCGRCGRNLHATGPSYACSARYGGCGEISTSQRLADTEVTERVLIRITGDEWLTALSDARRESAETFETTIAEAENRMVHLAEVFGEGGNQQAFDAGVAKAREVAEEARGRIALLDATAALPATVTDAEVVEWWADAPIDTRRQVIRVVVDHIDVRAKADAEPGAGVGDRMHFHWA

SEQ ID NO: 12016 - protein, 298 aa, Unknown
  Description of Unknown: Integrase A584 sequence
  PF07508,PS51737,PTHR30461
MSLRAYGWTNDGKIVESEADEIRSWAQHVIDGGAIRPLVAELNERGVATVTGKSWAAPTITRALTAPRMVGLRDRNGELEDAPIEPILDRDTWDEVVAILTDPARKKFASRKNPPTLLAGILQCGRCGRNLHATGPSYACSARYGGCGEISTSQRLADTEVTERVLIRITGDEWLTALSDARRESAETFETTIAEAENRMVHLAEVFGEGGNQQAFDAGVAKAREVAEEARGRIALLDATAALPATVTDAEVVEWWADAPIDTRRQVIRVVVDHIDVRAKADAEPGAGVGDRMHFHWA

SEQ ID NO: 12017 - protein, 298 aa, Unknown
  Description of Unknown: Integrase A585 sequence
  PF07508, PS51737,PTHR30461
MSLRAYGWTNDGKIVESEADEIRSWARHVIDGGAIRPLVAELNERGVATVTGKSWAAPTITRALTAPRMIGMRERDGELEDAPIEPILDRETWDEVVAILTDPARKKFASRKNPPTLLAGILRCGRCGRNLHATGPSYACSARYGGCGEISTSQRLADTEVTERVLIRITGDEQLEQIREARERTAGHYEQQIAEAEDRITHLADVFGSGAQHREAFDTGVGSAQQVIDAGRAQLALIHTFAAVEHVTEDEVAAWWSDAPLDVRRDVIRVVIDHIDVRAKADAEPGAGVGDRMHFHWA

SEQ ID NO: 12018 - protein, 298 aa, Unknown
  Description of Unknown: Integrase A586 sequence
  PF07508,PS51737,PTHR30461
MSLRAYGWTNDGKIVESEADEIRSWARHVIDGGAIRPLVAELNERGVATVTGKSWAAPTITRALTAPRMVGLRERNGELEDAPIEPILDRDTWDEVVAILTDPARKKFASRKNPPTLLAGILQCGRCGRNLHATGPSYACSARYGGCGEISTSQRLADTEVTERVLIRITSDEWLTALSDARRESAETFETTIAEAENRMVHLAEVFGEGGNQQAFDAGVAKAREIAEEARGRIALLDATAALPDTVTDAEVVEWWADAPIDTRRQVIRVVVDHIDVRAKADAEPGAGVGDRMHFHWA

SEQ ID NO: 12019 - protein, 298 aa, Unknown
  Description of Unknown: Integrase A587 sequence
  PF07508,PS51737,PTHR30461
MSLRAYGWTNDGKIVESEADEIRSWARHVIDGGAIRPLVAELNERGVATVTGKSWAAPTITRALTAPRMVGLRERDGELEDAPIEPILDRDTWDEVVAILTDPARKKFASRKNPPTLLAGILRCGRCGRNLHATGPSYACSARYGGCGEISTSQRLADTEVTERVLIRITGDEWLTALSDARRESAETFETAIAEAENRMVHLAEVFGEGGNQQAFDAGVAKAREVAEEARGRIALLDATAALPDTVTDAEVVEWWADAPIDTRRQVIRVVVDHIDVRAKADAEPKAGVGDRMHFHWA

SEQ ID NO: 12020 - protein, 298 aa, Unknown
  Description of Unknown: Integrase A588 sequence
  PF07508,PS51737,PTHR30461
MSLRAYGWTNDGKIVDSEADEIRSWAQHVIDGGAIRPLVADLNDRGVATVTGKSWAAPTITRALTAPRMIGMRERDGELEDAPIEPILDRETWDEVVAILTDPARKKFASRKNPPTLLAGLLRCAKCGRNLHATGPSYACSARYGGCGEISASQRLADNEVTERVLIRITGDEWLAALSDARRESAETFETTIAEAENRIVHLAEVFGEGGNQQAFDAGVAKAREVAEEARGRIALLDATAALPAAVTDAEIVQWWTDAPIDTRRQVIRVVVDHIDVRAKADAEPGAGVGDRMHFHWA

SEQ ID NO: 12021 - protein, 298 aa, Unknown
  Description of Unknown: Integrase A589 sequence
  PF07508,PS51737,PTHR30461
MSLRAYGWTNDGKIVESEADEIRSWARHVIDGGAIRPLVAELNERGVATVTGKSWAAPTITRALTAPRMVGLRERNGELEDAPIEPILDRDTWAEVVAILTDPARKKFASRKNPPTLLAGILQCGRCGRNLHATGPSYACSARYGGCGEISTSQRLADTEVTERVLIRITGDEWLTALSDARRESAETFETTIAEAENRMVHLAEVFGEGGNQQAFDAGVAKAREVAEEARGRIALLDATAALPATVTDAEVVEWWADAPIDTRRQVIRVVVDHIDVRAKADAEPGAGVGDRMHFHWA

SEQ ID NO: 12022 - protein, 286 aa, Unknown
  Description of Unknown: Integrase A590 sequence
  SSF53041,cd00338,PTHR30461:SF3,PF00239,SM00857, G3DSA:3.40.50.1390,PTHR30461
MTNHTKYTTNPIDTIYVYTRVSTKAQHDKHSFKNQIFSCQQYLNECYPNHQNVSLKYSDIGSNYNDKNILYGLNELIKKLPNNSLIIVSDISRLGRNYKHTQRIFKKVQRTNSFIMSVHGNICYGINERMDKEFRNIAKISKKDSDLKAYYAKATHNRIKAAGGYPGGRTPYGYKTIRDNDNIPFLHENNQERTIINKMIEYEINEYTHKEIADALNANSILNRKNLWTQKSVKNILDRENQKYKPIHISSYNTRQYALNTEYPFNSNTDITTTRPFKRRHSISST

SEQ ID NO: 12023 - protein, 283 aa, Unknown
  Description of Unknown: Integrase A591 sequence
  PF07508,G3DSA:1.10.10.2600,SSF53041,PS51737,cd03768, PTHR30461:SF3,PF00239,PS51736,SM00857,G3DSA:3.40.50.1390, PS00397,PTHR30461
MNKVAIYVRVSTTNQADEGYSIDEQIDKLKAYCEIKDWVVYKVFTDAGFTGSNIERPAMTKLISAAKKKQFDTILVYKLDRLSRSQKDTLYLIEEIFIKNGIDFLSLSENFDTSSAFGKAMIGILSVFAQLEREQIKERMMLGKVGRAKSGKTMMWAHPAYGYTYNKETSSLDIVPAEAALIKKIYELYIKGKSISKLRDYLNDNKIFVNKSVPWSHRTISYALTNPVYCGMIRYEGKLYDGLHEPIITKELFNKTQEVLAERRMEASKKILDLSNQNICYQE

SEQ ID NO: 12024 - protein, 275 aa, Unknown
  Description of Unknown: Integrase A592 sequence
  SSF53041,cd00338,PF00239,PS51736,SM00857, G3DSA:3.40.50.1390,PTHR30461
MAKNKQTAIAYYRVSTAKQGAEGNGIEAQRAAVERLVDTHHFKIAAEFTEVESGTRKRRPELVKALAACREQQATLLIAKIDRLARNVAFIATLMESGVGFKCADMPEIDKFTIHILAAVAEREAELISARTEEALSVVKAKLGEGSHVSKSGRTIEKLGAPDTRIGAAAAGKSHPLAADQYAQSIAKDIDCACAKGKPESLRDLAEILTGRGVPTRQQWWLKSQTTRVDPARKARVQAAVWHPSSVRNVLKRLQSLEKLPESAAFLVVREDAAA

SEQ ID NO: 12025 - protein, 273 aa, Unknown
  Description of Unknown: Integrase A593 sequence
  PF07508,SSF53041,cd03768,PF00239,PS51736, SM00857,G3DSA:3.40.50.1390,PTHR30461
MILLGDTLYIKEKHHPRGFLIMSTVRHIAYRRVSTVQVRNGKAQSTERQMHNLGIDFDLEFEDHVTGTKFEARKQLQECLNTLQKEDHLHIHSIDRLARNTKDLLSIVEDLIARKVVVHFHKEGLVFGGDSDPMQAAIGQVLLSVIGAIHTFQATMIQESVKEGLRVAKSKGIKLGGANPKWKESMEKNKHNHKTTRLSEESKIKRSPVTQMIKDMIDYSQNRLTLDEIASNLNNKGITTSQGKSFSKATVSRIIKQDGLDYKKKNKYTTISA

SEQ ID NO: 12026 - protein, 266 aa, Unknown
  Description of Unknown: Integrase A594 sequence
  G3DSA:1.10.10.60,SSF46689
MSQCAASPNCSKTPSKFKRGMCGAHHRAYLRRARDEGVWRGHVPAGPVQEHLKALADAGVSAQRVSWVTGLSLNTLLQIPERESLWSTTADKIFAVRVDGNFREGGRGMIPVLGSRRRLQSLHSRGFTVAHLAERLGMSVTATTRILRPDDPRSVDRVESGTARKIDALWRELQLAAPPQGPACTKARRRAAKLGWPDPLAWEENEIDDPRARPRIDPTHLTKGRLEEYKKLRDQGLTKKEIAKRFNLNESTLYDWINRQKAKGNL

SEQ ID NO: 12027 - protein, 266 aa, Unknown
  Description of Unknown: Integrase A595 sequence
  G3DSA:1.10.10.60,SSF46689
MSQCAASPNCSKTPSKFKRGMCGAHHRAYLRRARDEGVWRGHVPAGPVQEHLKALADAGVSAQRVSWVTGLSLNTLLQIPERETLWSTTADKILAVRVDGNFREGGRGMIPVLGSRRRLQSLHSRGFTVVHLAERLGMSITATTRILRPDDPRSVDRVESGTARKIDALWRELQLAAPPQGAACTKARRRAAKLGWPDPLAWEENEIDDPRARPRIDPTLLTKGRLEEYKRLRDEGLTKKEIAKRFGLNESTLYDWINRQKKKGNL

SEQ ID NO: 12028 - protein, 266 aa, Unknown
  Description of Unknown: Integrase A596 sequence
  G3DSA:1.10.10.60,SSF46689
MSQCAASPNCSKTPSKFKRGMCGAHHRAYLRRARDEGVWRGHVPAGPVQEHLKALADAGVSAQRVSWVTGLSLNTLLQIPERESLWSTTADKIFAVRVDGNFREGGRGMIPVLGSRRRLQSLHSRGFTVAHLAERLGMSVTATTRILRPDDPRSVDRVESGTARKIDALWRELQLAAPPQGPACTKARRRAAKLGWPDPLAWEENEIDDPRARPRIDPTLLTKGRLEEYKKLRDQGLTKKEIAKRFNLNESTLYDWINRQKAKGNL

SEQ ID NO: 12029 - protein, 266 aa, Unknown
  Description of Unknown: Integrase A597 sequence
  G3DSA:1.10.10.60,SSF46689
MSQCAASPNCSKTPSKFKRGMCGAHHRAYLRRARDEGVWRGHVPAGPVQEHLKALADAGVSAQRVSWVTGLSLNTLLQIPERETLWSTTADKILAVRVDGNFREGGRGMIPVLGSRRRLQSLHSRGFTVAHLAERLGMSITATTRILRPDDPRSVDRVESGTARKIDALWRELQLAAPPRGAACTKARRRAAKLGWPDPLAWEENEIDDPRARPRIDPTLLTKGRLEEYKRLRDEGLTKKEIAKRFGLNESTLYDWINRQKKKGNL

SEQ ID NO: 12030 - protein, 266 aa, Unknown
  Description of Unknown: Integrase A598 sequence
  G3DSA:1.10.10.60,SSF46689
MSQCAASPNCSKTPSKFKRGMCGAHHRAYLRRARDEGVWRGHVPAGPVQEHLKALADAGVSAQRVSWVTGLSLNTLLQVSERETLWSTTADKILAVRVDGNFREGGRGMIPVLGSRRRLQSLHSRGFTVAHLAERLGMSITATTRILRPDDPRSVDRVESGTARKIDALWRELQLAAPPQGAACTKARRRAAKLGWPDPLAWEENEIDDPRARPRIDPTLLTKGRLEEYKRLRDEGLTKKEIAKRFGLNESTLYDWINRQKKKGNL

SEQ ID NO: 12031 - protein, 266 aa, Unknown
  Description of Unknown: Integrase A599 sequence
  G3DSA:1.10.10.60,SSF46689
MSQCAASPNCSKTPSKFKRGMCGAHHRAYLRRARDEGVWRGHVPAGPVQEHLKALADAGVSAQRVSWVTGLSLNTLLQIPERETLWSTTADKILAVRVDGNFREGGRGMIPVLGSRRRLQSLHSRGFTVVHLAERLGMSITAATRILRPDDPRSVDRVESGTARKIDALWRELQLAAPPQGAACTKARRRAAKLGWPDPLAWEENEIDDPRARPRIDPTLLTKGRLEEYKRLRDEGLTKREIAKRFGLNESTLYDWINRQKAKGNL

SEQ ID NO: 12032 - protein, 266 aa, Unknown
  Description of Unknown: Integrase A600 sequence
  G3DSA:1.10.10.60,SSF46689
MSQCAASPNCSKTPSKFKRGMCGAHHRAYLRRARDEGAWRGHVPAGPVQEHLKALADAGVSAQRVSWVTGLSLNTLLQIPERESLWSTTADKIFAVRVDGNFREGGRGMIPVLGSRRRLQSLHSRGFTVAHLAERLGMSVTATTRILRPDDPRSVDRVESGTARKIDALWRELQLAAPPQGPACTKARRRAAKLGWPDPLAWEENEIDDPRARPRIDPTHLTRGRLEEYKKLRDQGLTKKEIAKRFNLNESTLYDWINRQKAKGNL

SEQ ID NO: 12033 - protein, 266 aa, Unknown
  Description of Unknown: Integrase A601 sequence
  PF07508,G3DSA:1.10.10.2600,SSF53041,PS51737, cd00338,PTHR30461:SF3,PF00239,PS51736, SM00857,G3DSA:3.40.50.1390,PS00397,PTHR30461
MKVAIYVRVSTTLQAEIGYSIDEQRAKLEAFCSLKEWMPYKVYTDRGISGSTINRPALNCLIDDALNHLFDCVLVYDLKRLSRSQRDTLYLIEEIFEKNNIAFVSLTENFDTSTAFGKAIVGILSAFGQLEREQIKERMQLGKIGRAKTGKPMTWSDKFCPFGYAYIDDEYKTNEYSRWVKYIFDRFLAGDTINTIANDMTSRKILNKKWHYTTVKWILENPVYTGKIRWRGKLYQGNHKAIISQEAYDLAQKMIPATKRSPNILK

SEQ ID NO: 12034 - protein, 262 aa, Unknown
  Description of Unknown: Integrase A602 sequence
  SSF53041,cd00338,PTHR30461:SF3,PF00239,PS51736, SM00857,G3DSA:3.40.50.1390,PS00397,PTHR30461
MTTQSTLTVARAYVRVSTESQTLSGHSLETQETRIKDYCTYKKLNLIKVYCDSGISAKEMTKRPALLQLLEDAKKGEVIIVSDLSRLSRSTKDSLTILESLREKGVQLCCLNPDIDFTTSTGMFTFTILAAINKMERERIAYNVSVNLQRLSQEGHLRSSPPFAFRFVAKDKPFEPVPEQQEVILKIIEFFKEDPCISRVVDKLNEEGYNKVLNLNKKTITKERKFTRYLVTTILVDYNVIEPSESMKGRKSIEERIKSRSE

SEQ ID NO: 12035 - protein, 260 aa, Unknown
  Description of Unknown: Integrase A603 sequence
  G3DSA:1.10.10.60,SSF46689
MNNTNYSKNAGTALDAGMALDADMALDADMALAADGLVKLASSFRNNHLSSIALASSFGNNHPSENIQPIATPFLLYQTVSQNYPKLHLRNYPDLHLRNYPDLHLRNYPDLHLRFDNASLYAMQKICTSTPNASKENISLQQARPVLPISLAASDQAGRFMQSIASITENSHKNNSLSDFGRTVETPKKHTKINNTSRMILLSVYDKNKYISRAIKKQLAHRTGLTEKQIQNWFQNKRTSDKIKAENDKFMKSVTQKMNN

SEQ ID NO: 12036 - protein, 257 aa, Unknown
  Description of Unknown: Integrase A604 sequence
  PF07508,G3DSA:1.10.10.2600,SSF53041,PS51737,cd00338,PF00239, PS51736,SM00857,G3DSA:3.40.50.1390,PTHR30461
MSVKKIRVNKQKHKQRICAYIRVSTTNGSQLESLENQKHYFENLYSNRDDIDFVGVYHDRGISGSKDNRPNFQAMIENCRKGMIDIIHTKSIARFARNTVTVLEISRELKAIGVDIFFEEQNIHTLSSEGEVMLSVLASIAEDELRSMSGNQRWAFQKKFQRGELVINTKRFLGYDLDENGELIINPEEALIVRQIFALYLEGYGTHRIAKLLNEKGVATVTGAKWHDSTIRQMLSNEKYNGFGLIAEVFSRWCEWS

SEQ ID NO: 12037 - protein, 255 aa, Unknown
  Description of Unknown: Integrase A605 sequence
  G3DSA:1.10.10.60,SSF46689
MKNNNKWSIEEEQQLANIVLSCMQNKKKLIEALREAEKEIPNRTFSACQTKWTDKVKFEYAEQIKEIKEKINAEKDIELKKHEMRKEKNKQENINKRKEKKFKSKEKNKTKKEVKIEKKKGRINTWSLEEDTILANSVLSYLQYRNSASQGIVVASRKLPNRSLEACKARWNTALRHEYRQQVSNIKAIKSKQWTGKEDSILLRGLEENSRNRVSFEQAIRYVNAELIKLGYDRSLSACKARWATIKYDYPYIMY

SEQ ID NO: 12038 - protein, 254 aa, Unknown
  Description of Unknown: Integrase A606 sequence
  PF13408,G3DSA:3.40.50.1390
MSTDQDEQLSSYENQVNYYRDFISKHEDYELVDIYADEGISATNTKKRDALLQKTYTVDFLTKKRTENDGQVNQFYVANNHEGIIDNEMWETVQLEIARRKAFREEHGIPFYHLQNEDNPFMTKVFCTECGDAFGRKNWTTSRGKRKVWQRNNRYRITGVMGCSNNHIDEEMLEKAFMKAVNILQDHKADVLDKLERLRKGDNLLHKHYAKFMKQLLDIDHFDCTIMCQVLDNITISESGQITVAFLEGTEVDL

SEQ ID NO: 12039 - protein, 253 aa, Unknown
  Description of Unknown: Integrase A607 sequence
  PF07508,G3DSA:1.10.10.2600,SSF53041, PS51737,cd00338,PF00239,PS51736,SM00857, G3DSA:3.40.50.1390,PTHR30461
MNIRKIEAKNNNRKKRICAYVRVSTTNGSQLDSLENQKVYFEKLYAERDDVEFLGVFCDKGISGSKYDRPDFQTMLDACRKGQIDVIHTKSISRFARDLINVLEISRELKTLGIDIFFEEQNIHTLSNEGEVVLTVLASLAEEELQSMSGNQRWSFRRKFQKGELLINAKRFLGYDLNEKGELVINKAEAQIVRTIFYSYLEGMGTHRIAKKLNEGKVPTVTGKKWYDSTIRNILKNENTKDLYYFKNTFMMV

SEQ ID NO: 12040 - protein, 252 aa, Unknown
  Description of Unknown: Integrase A608 sequence
  G3DSA:1.10.10.60,SSF46689
MTRGKCRRSGCSNLTRSSGGKAFCDKHRKAMGPTGYVDPAPAIEHLNLLHERGMSWDAISEVLGMSRRGTQLVRLGKSTRMQAKTVQRILGIPVPEKFVDEGMCPVNPIGARRRIGALMALGHSHRDISKAAGIHQNQLWRVFRNDSIRSSTARAISDVFGWMQFETGGSIRSKRWAQEHGYPTPFSWEENEIDDPRARPRIDPTLLTKGRLEEYKRLRDEGLTKKEIAKRFGLNESTLYDWINRQKAKGNL

SEQ ID NO: 12041 - protein, 252 aa, Unknown
  Description of Unknown: Integrase A609 sequence
  G3DSA:1.10.10.60,SSF46689
MTRGKCRRSGCSNLTRSSGGKAFCDKHRKAMGPTGYVDPAPAIEHLNLLHERGMSWDAISEVLGMSRRGTQLVRLGKSTRMQAKTVQRILDIPVPEKFVDEGMCPVNPIGARRRIGALMALGHSHRDISKAAGIHQNQLWRVFRNDSIRSSTARAISDVFGWMQFETGGSIRSKRWAQEHGYPTPFSWEENEIDDPRARPRIDPTLLTKGRLEEYKRLRDEGLTKKEIAKRFGLNESTLYDWINRQKKKGNL

SEQ ID NO: 12042 - protein, 251 aa, Unknown
  Description of Unknown: Integrase A610 sequence
  G3DSA:1.10.10.60,SSF46689
MKYGKCRRPNCQNSTRSRGSNALCEKHLRTRPRGYVDPAKAVEHLNALHDKGMTWDAISDVLGMSRHALQRVRLGKTPRMQARTVQRILEVPIPGAPVAVGMAYVPSIGSRRRVGALMALGHARPDICRISGVHSSQMYTLFKKDVIRATTAKAVSDAFNRMQFETGSSIRSKKWAEAHGYPTPFSWEESEIDDPRARPRIDPTLLTKGRLEEYKKLRDQGLTKKEIAKRFNLNESTLYDWINRQKAKGNL

SEQ ID NO: 12043 - protein, 251 aa, Unknown
  Description of Unknown: Integrase A611 sequence
  SSF53041,cd00338,PTHR30461:SF3,PF00239, PS51736,SM00857,G3DSA:3.40.50.1390,PS00397, PTHR30461
MRAFAYVRVSTEEQADSGHSIELQPARITSYCQTYGLELVDVITDPGVSGSTPLARRAGGRELLRRLEAGEAEGVVVVRLDRLFRDALDGLQFFARSRAVVHSVAERIDTGSPAGRLQLTILLATAQYERDIAAARATENTRGLRAAGRVYGSTPYGCVAIAGQLYRDPATWAQRELICEWRANGLPLQAIRERLREDRVQAPGGGTWWSKSTLSNLIATHHDLAHLPELPAHGAPADTARPDVEDSCATA

SEQ ID NO: 12044 - protein, 251 aa, Unknown
  Description of Unknown: Integrase A612 sequence
  G3DSA:1.10.10.60,SSF46689
MKYGKCRRPNCQNSTRSRGSNALCEKHLRTRPRGYVDPAKAVEHLNALHDKGMTWDAISDVLGMSRHALQRVRLGKTPRMQARTVQRILEVPIPGAPVAVGMAYVPSIGSRRRVGALMALGHARPDICRISGVHSSQMYTLFKKDVIRATTAKAVSDAFNRMQFETGSSIRSKKWAEAHGYPTPFSWEESEIDDPRARPRIDPTLLTKGRLEEYKRLRDEGLTKKEIAKRFGLNESTLYDWINRQKAKGNL

SEQ ID NO: 12045 - protein, 250 aa, Unknown
  Description of Unknown: Integrase A613 sequence
  SSF53041,PF00239,SM00857,G3DSA:3.40.50.1390, PTHR30461
MKQVNQVLSQVFPYVFNNIPENIKYAAIYCRKSNAGAGNELSFSVQKNICETFCKERNLEIICCVIETISGKNMNQMVELNELLQQIQKDTVIVVCDVTRFSRNVLQGLQAIDKLLKKDSTIYAVCNCCCYNDKYIDRHQFRSLLNQAELEHDQITDRINRSVKHRRRIGHKIGKAKYGYEIYYDNKGIRREKKHKLEQKTVSTIRRLLNSGKKLSDIVDYLNNANDANNDFRGKEWNTSRVKYVSKSSV

SEQ ID NO: 12046 - protein, 248 aa, Unknown
  Description of Unknown: Integrase A614 sequence
  SSF53041,PS51737,cd00338,PTHR30461:SF3,PF00239, PS51736,SM00857,G3DSA:3.40.50.1390,PTHR30461
MRVLGRLRLSRSTEESTSIERQREIVTAWAQSNGHTLVGWAEDVDVSGAIDPFDTPSLGPWLDERRGEWDILCAWKLDRLGRDAIRLNKLFGWCQEHGKTVASCSEGIDLSTPVGRLIANVIAFLAEGEREAIRERVTSSKQKLREVGRWGGGKPPFGYMGVPNPDGQGHILVVDPVAKPVVRRIVDDILDGKPLTRLCTELTEERYLTPAEYYATLKAGAPRQKAEPDETPAKWRQPALRGRGLHHL

SEQ ID NO: 12047 - protein, 243 aa, Unknown
  Description of Unknown: Integrase A615 sequence
  SSF53041,cd00338,PF00239,SM00857,G3DSA:3.40.50.1390
MIKKYVVYSRQSKKSGMKGQMTLETADAIIRHFLNTQGEEGVDYEVVKVFKEVSSSYGSKSANRINFNEAYELCKQNGYTLLVSTASRLARNTAFGAKIIEEIDVVIASNPTASKTMKNIMLVLAEDESIQQSERRRATYQAKKEKCKKLGIKCEWGGNSEKWREKYFANKAAGKHSTTKLFKPSPQKDKLVVDIKTAISYGSPKSFVELADKLNKNEVFTLGNKPWNGRSLATFSKRNGIEL

SEQ ID NO: 12048 - protein, 241 aa, Unknown
  Description of Unknown: Integrase A616 sequence
  G3DSA:1.10.10.60,SSF46689
MYPVDKESRIRLMEDLDKWINEHYLEKVTVKDLSHQLGVFIPDVYRLFAEQRNTTPGEYLRRKRLVKAKALLESGIRPTLAGAHVGYSHFQSFVKEYKAYFKRHPREDYSDTLEVPTMDSYSKETMDRYYPSELREKILNYLRKNIKVNFNYADVEKKFGLPDRSLSEMFEHYYGKSYREWRKDTRMKLAKELLHKNPSVKISDLATTVGSCSATYLRKQYQEVYGVNIVELRETLRGVRV

SEQ ID NO: 12049 - protein, 241 aa, Unknown
  Description of Unknown: Integrase A617 sequence
  G3DSA:1.10.10.60,SSF46689
MYPVDKESRIRLMEDLDKWINEHYLEKVTVKDLSHQLGVFIPDVYRLFAEQRNTTPGEYLRRKRLVKAKALLESGIRPTLAGAHVGYSHFQSFTKEYKAYFKRHPREDYTDSLEVPTMDSYSKETMDRYYPNELREKILNYLLKNIKVNFNYADVEKKFGLPDRSLSEMFEHYYGKTYREWRKDTRMKLAKELLHKNPSIKITDLATTVGSCSATYLRKQYQEVYGVNIVELRETLRGACV

SEQ ID NO: 12050 - protein, 241 aa, Unknown
  Description of Unknown: Integrase A618 sequence
  SSF53041,PF00239,PS51736, SM00857,G3DSA:3.40.50.1390,PTHR30461
MSQLGAIYCRKSSVGKYAIKELSLNVQNDVCKEYCVKNNISVQEDMRIAETVSAREMSKMVELEKLIKKLGENAVLVVSNVSRFSRNVQQAIPVLELLRKNNIFVHSVNDNCRYDNDFNNRHHFRQMLSQAEFESDQISDRANKSIESRRKKGCKIGKSRFGYESFYDKNGLRRERENKAEQLVLELLTVYKERGHSARECAIFLNEKNCTFRKKEWNAVRVNYVLRSVDSGGEKKELGGV

SEQ ID NO: 12051 - protein, 240 aa, Unknown
  Description of Unknown: Integrase A619 sequence
  PF07508,SSF53041,cd00338,PF00239,PS51736, SM00857,G3DSA:3.40.50.1390,PTHR30461
MAKKYVTYKRVSTKRQGESGLGLEAQQRDLKLYFDTYAGEDFEVLGEFTDVDSGTNDSRVEYLKALEMVKSEGATLIVAKLDRISRKVSTIACLIEEIDFKVASMPNADKFQLHLYAALSEQERDFISLRTKAALSVKKSQGVLLGGANPKQRASFQANRLNHKSYRNNQKALEKAQPIVSEVTKMVEYSKDGLTQQEITDNLNSKGIKTASGKEWTVANVSKLIKKHGIPYKKKSRWNK

SEQ ID NO: 12052 - protein, 240 aa, Unknown
  Description of Unknown: Integrase A620 sequence
  G3DSA:1.10.10.60,SSF46689
MSAVCYFILIKKPISFQFLKDFLILNYGDVLLLKHSEHECLKMYSDKYIEFELNDNTVRNYLLCSNNLGNQSLDKCPHLLKKSFAYPDLLIRMIDNISDQNHIHSDFREAVTFSLLSIFNDVDNFRAFLTSGMPTFSGKVRSIFLSDVSKHWKLRDLTDYLYMSESLIKKKLLLENTSFSKLLLDTRMAFAIKLLKQNHSVKQVSESCGFSSTSYFVCLFRQYYNCTPREYAKHQLLSGK

SEQ ID NO: 12053 - protein, 238 aa, Unknown
  Description of Unknown: Integrase A621 sequence
  SSF53041,cd03768,PF00239,PS51736,SM00857, G3DSA:3.40.50.1390,PTHR30461
MTIYAYKRCSTNEDKQDTARQLYGKTFDEVVIEYASGKNEKGRPLFKELKDKLLSGDELHFNDLSRAGRNTKELLSTIEDLVDRNVKVVFHTENLTFVSGGQDPMAGAMSKMLLTMLASVNELFLTQTKIAVKQGLERVRQESPEKLSKNRDSQWHKTFTENRAKGLHKYQTTKVSRTNDKQLLLVNRVKSMISDSNGQLTQKQMCEKLTLEGFTNSNGGVISQGSLAKLIKKYNLNS

SEQ ID NO: 12054 - protein, 237 aa, Unknown
  Description of Unknown: Integrase A622 sequence
  SSF53041,cd00338,PF00239,SM00857,G3DSA:3.40.50.1390,PTHR30461
MDNKKYVAYYRASTESQRDGIGLEVQKSSVEAFVKSYGGTIVEEVSEIISGGAQVREGFDKALELCKKHSAVLLVHRIDRLSRAGFMTIAKLEEKGVPFIEADSPHDSEFSKNIKFLIAKEEKDKTQRRVKDALGQIKANIESDGYHITKAGDRITSLGNPQNLSDMARERSKVIRKAKAIANENNRRAYAMASRMKSNKSTLKQIADYLNKNGFETSKGNKFYPIQVSNLIKLYEN

SEQ ID NO: 12055 - protein, 237 aa, Unknown
  Description of Unknown: Integrase A623 sequence
  PF07508,G3DSA:1.10.10.2600,SSF53041,cd03768,PTHR30461:SF3, PF00239,PS51736,SM00857,G3DSA:3.40.50.1390, PTHR30461
MQSEEGISLDTQLKKIQDYCSYKGFELFNKIYKDEGLSGKNMERPELKKLLDDVQKDDYVIIYELSRLSRNTRDALNILEQINNKGGFLICLNPDIDFSSPAGKMMYTVLSAFHQLERETTSQRVSMNMKNLSKQNLLRSRPPFGYKFISKDKPMIEDEEQQKVVKVIKEKYEELKNITAVTEYLNSNGYNKCFKKEGQKFYVQTVKNILSDYGVINTNRKKISDKFLDTRKNAIKQ

SEQ ID NO: 12056 - protein, 235 aa, Unknown
  Description of Unknown: Integrase A624 sequence
  G3DSA:1.10.10.60,SSF46689
MKAEFRDKLFKDTLKWIDNNFHRSIRAKDIGDQLGMSMNNVTDLFRRQLDTTPGEYLRVVRMKHAKQLLMKGVRPTSVYKQTGYSSYRAFTRVYQIHFGVQPSQDYHYFMGVITEPMATPQMDTLYPFALRKRIVDYVKDNIQCNYTLRDLESRFKLPGSCLGEMFVHYYDQTYTDWRKSLRMRMASDLIRDNPKIDVTRIHGQLGICSFQYFVTLFKQHYRTHPQSYANAFKRK

SEQ ID NO: 12057 - protein, 235 aa, Unknown
  Description of Unknown: Integrase A625 sequence
  G3DSA:1.10.10.60,SSF46689
MQQSFREQLFQDTLKWVDKNFHRTIRAKDIGDQLGMSMNGVTDLFRRQLDTTPGAYLRGVRMRHAKQLLMNGVKPTSVYKECGYSSHRAFTRVYQESFSTTPTEEYTFYAGVITEPISVPQMDVLYPESLRESIKKFVTENIQCNYTLRDLESRFKLPGSCLGEMFEHYYGMTYTDWRKSLRMKIASDLIRENPKIDVTSIHGQIGICSFQYFVTLFKQQFRTHPQTYANSFKSK

SEQ ID NO: 12058 - protein, 235 aa, Unknown
  Description of Unknown: Integrase A626 sequence
  SSF53041,cd00338,PF00239, SM00857,G3DSA:3.40.50.1390,PTHR30461
MWKIGAIRLSDSAAEKARQMFILKDYFKKHNITDVQYVEDIGTSGGVPILDRPNLGSVLKKAPKGTTVYVSDISRLGRLDYDMMKFRDDKNFKLVVCNNPEITEDKNRIMFGVNAIMSDQYRRDLSVKQKEKCQEMQASIVDKGYYITKSTNRKMTKLGVHGFMDKARAKASQSRKEKANFYIGQIRIHLEDAQNHSESLLGMANYLNARSVKTSRNSCWSASTVKRALDRLQTL

SEQ ID NO: 12059 - protein, 234 aa, Unknown
  Description of Unknown: Integrase A627 sequence
  G3DSA:1.10.10.60,SSF46689
MTDHELALQIQDYVKEIYMKPRPSNLVYTKFNMSGPVMGRFLERLNHPSIKVMLVEARMERAKELLAQDMVNVPGIHTHVGYSTRNSFERRFKDHVGMSPAVYRKKIQEQQTEQEHMTYSKRVNEVTQNELRKYLIKHFREPELTLNRVQDVFNLSKDEIQEIIGIVYNCTFEERLLTMRLEEVGNLLVKTTRTPRQLSTECGFVSYHYFVGQFTKRFTVGPKHYRQLKLIKAI

SEQ ID NO: 12060 - protein, 233 aa, Unknown
  Description of Unknown: Integrase A628 sequence
  SSF53041,cd03768,PF00239,PS51736,SM00857, G3DSA:3.40.50.1390,PS00398, PTHR30461
MSQLDTPTARQPVLYGYARVSKQKQNLTTQIRLLNKAGCKQIFYEKISGAKDKKVELGKLISVLQKGDVVVVAHLDRLGRNLVTTLRTIEQINNKGASIKALDFNLDSGTAMGDLMIKFMAFFAELERYFAKMRSEERLANLTKKQRSSLGRKAVLDKKTIKKYYQQYLDRKTTVAAITEKLGITRASFYNALKRYNIKTYVQSHLDGDINDPSFKYGKLHFKRVRGKVQCKY

SEQ ID NO: 12061 - protein, 233 aa, Unknown
  Description of Unknown: Integrase A629 sequence
  SSF53041,cd03768,PF00239,PS51736,SM00857, G3DSA:3.40.50.1390,PTHR30461
MSRNISYKRVSTTHQSCDRQLAGLGITFDIEFSDKLSGKNTNRPQLQECMSVITEGDVLWVHSIDRLARNVEDLRGIVFDLMDKGATVKFVKEGLEFTGSQDEAMKASMSKMLLTLLGAVAEFERSLITSRVREGVQQAKLKGKKIGGSNPQWKQSYTTNRAAGKHSTTKDFKPSPQKEKLIVDIKTAISYSSPKTFVELADKLNQNGVMTLSNKVWDGKSLAVFAKRNEIKL

SEQ ID NO: 12062 - protein, 233 aa, Unknown
  Description of Unknown: Integrase A630 sequence
  PF07508,SSF53041,cd00338,PTHR30461:SF3,PF00239, SM00857,G3DSA:3.40.50.1390,PTHR30461
MKVVLYRRLSKEDKTKNQHGLDSQLADINYYLNTLDSYEIIGDFSEFISGGADKKLELNKAIALCEKEGATLVVAKLDRLSRRVSQIALYMEGSVKFKVALMPSAENLQLHIYAALAEEERASIRDRTKRGCAAAKAKGILSGRASPNYGMNSGNGTKNIDKIIAERKQAALEKSMYVVPEIKKALKYLGKRPTQQKVATFLNDANIPTPSGRGSWKQSTVQRVLERHNINLF

SEQ ID NO: 12063 - protein, 233 aa, Unknown
  Description of Unknown: Integrase A631 sequence
  SSF53041,cd00338,PTHR30461:SF3,PF00239,SM00857,G3DSA:3.40.50. 1390,PTHR30461
MKVVLYRRLSKEDKTKNQHGLDSQLTDINYYLNTLDSYEIIGDFSEFISGGADKKLELNKAIALCEKEGATLVVAKLDRLSRRVSQIALYMEGSVKFKVALMPSAENLQLHIYAALAEEERASIRDRTKRGCAAAKAKGILSGRASPNYGMNSGNGTKNIDKIIAERKQAALEKSMYVVPEIKKALKYLGKRPTQQKVATFLNDANISTPSGRGSWKQSTVQRVLERHNINLF

SEQ ID NO: 12064 - protein, 233 aa, Unknown
  Description of Unknown: Integrase A632 sequence
  G3DSA:1.10.10.60,SSF46689
MSDKKSKELKKLKSAAKKYCLEPNASELVLKKTLFSLPKVIKMFRDAGEGSLYDYITHLKMLEAKKLLDDTDLNLTSISRAIGYADRKSLRENFIKQFGMYPLDYRNRPKTNDLAWDLFKSHPKLTVQRQTFLLDHVKKHYKDSDLSIQTLSDRFRLTHQDIDLIINHHYGSGLKQLLLDLRLNQAHAKLPNYYKSVRQLAEELGFLDFNYFVVKFERKYGMGPRRYQQHARL

SEQ ID NO: 12065 - protein, 233 aa, Unknown
  Description of Unknown: Integrase A633 sequence
  G3DSA:1.10.10.60,SSF46689
MSDKNSREFKKLKNAAKKYCLEPNASELVLKKTGISPTRVIKLFRDAGEGSLYDYITHLKMLEAKKLLDDTDLNLTSIARAIGYTNHKTLRENFIKQFGTYPLNYRNRPKTSDLAWGLFKSHPKLTVQRQTFLLDHVKKHYKDTGLSIQTLSDRFRLTHQEIELIINHHYGFGLKQFVLDLRLNQAHAKLPNYYKSVRQLAEELGFLDFSYFVVKFEKKYGMGPKRYQQHTRL

SEQ ID NO: 12066 - protein, 233 aa, Unknown
  Description of Unknown: Integrase A634 sequence
  G3DSA:1.10.10.60,SSF46689
MFDKKSRELKKLKDAAKKYCLETDATELVLKKTGFSRTKVLKMLRDANEGSLYDYITLLRMLEAKKLIDTTDLEITAISRAVGYTKPKSLRENFVKLFGITPVDYRHRPKTEDHAWKLFKKHPKLTVQRQTYLLDYVKKHYNDPEVSVHVLADRFRLTHQEIELIIKHHTGEDFKTHLLNFRLNQAHGRLPNHLKPIKELALKLGFRDFNYFVVKFENKYGMGPKRFRQLSRL

SEQ ID NO: 12067 - protein, 231 aa, Unknown
  Description of Unknown: Integrase A635 sequence
  SSF53041,PF00239, SM00857,G3DSA:3.40.50.1390,PTHR30461
MKVIIYKRLSKEDRTKTQHGFNSQQRDIDFYLSDVEHKVIGTFQEFVSGGEDSKPELKKAMELCRTEGATLVVAKLDRLSRRVSQVAAYMEGDVKFKVAALPQADNFQLHLYAALSEQERTMIRQRVKAGLDAAKAKGVKLGGASDKWQKSYNRSKSKHVSKTNHIKSQESWESKRSQIEGVLKIMGRNKISLTYKNISSNMNDMNIKTATGGKFTPSQALRALSYLNITR

SEQ ID NO: 12068 - protein, 230 aa, Unknown
  Description of Unknown: Integrase A636 sequence
  SSF53041,cd00338,PF00239,SM00857,G3DSA:3.40.50.1390,PTHR30461
MVALNDESKNGYIYCRQSKKLKKSNSLLNQHKICKKYCEKNKIKVKKTKKEHKSGRFFKNKASLMELRNKMVSGDTLVVYRISRLSRNYEKGWNFIKTLKENNIKVVSVDENINSFDNINEFQEKLKSSEDYSNELSDRINKINRCLRHKGWHFGYVPYGYERYFTLNNVRKMRPNNTEQYVIKLINRLRKNKKSYKEISKFLNKKRLLFRKKYWDSIMVGTVYRKHNKK

SEQ ID NO: 12069 - protein, 229 aa, Unknown
  Description of Unknown: Integrase A637 sequence
  SSF53041,cd00338,PTHR30461:SF3,PF00239,SM00857, G3DSA:3.40.50.1390,PTHR30461
MTAALIYCRISTDRQTTLLAQEDACRAYCGRRGLVVRKVVSEIVTAYSGRHLAEQRIEVPRGVRHVICYDVSRMGRLSDDAAFVREHLARGVQFHFVSENIVSRAADDAGFREVQQRLRLAQHESEQLSNRIRNGKMVKDSKIRSLLALIHGGANDNLIRNFVLRNFNRVVVDSLVGLPEFELCARLNRYRLYCSRRWTPASLRRFCERPAAGAGATELLSASLSELKF

SEQ ID NO: 12070 - protein, 229 aa, Unknown
  Description of Unknown: Integrase A638 sequence
  G3DSA:1.10.10.60,SSF46689
MNNIYHSNDTDIVLAADALVKLARGTINHTNIQPTTTIQPTTTIQPTTTIQPTTAPFILYRAIRLGFDNASTPNTSNANIFNNTKNITPEQNYPTLQSYPMMQNYPTLQSYPVMQNYPVMQSYPMLPTPLSASEQAKSFMEKMTSITKDPRKKNEAPNSRRTLEAPKKKLTKINKKKLLILLSEYDINKYPSRATKKILAERTGLTEKQVYNWLQNKRASDKKQSMMNS

SEQ ID NO: 12071 - protein, 229 aa, Unknown
  Description of Unknown: Integrase A639 sequence
  SSF53041,cd00338,PTHR30461:SF3,PF00239, SM00857,G3DSA:3.40.50.1390,PTHR30461
MTAALIYCRISTDRQTTLLAQEDACRAYCGRRGLVVRKVVSEIVTAYSGRHLAEQRIEVPRGVRHVICYDVSRMGRLSDDAAFVREHLARGVQFHFVSENIVSRAADDAGFREVQRRLRLAQHESEQLSNRIRNGKMVKDSKIRSLLALIRGGANDNLVRNYVLRNFNRVVVDSLVGLPEFELCARLNRYRLYCSRRWTPASLRRFCERPAAGAGATELLSASLSELKF

SEQ ID NO: 12072 - protein, 228 aa, Unknown
  Description of Unknown: Integrase A640 sequence
  SSF53041,PF00239,PS51736,SM00857,G3DSA:3.40.50.1390,PS00397
MSSKNVKETAKFVAPGRARKILGISDATLRRWAETKKIESFITPSGRRLYNVENLFGVVRPPTDDAIIPRGSKSFLYARVSSSKQRDDLQRQIDFLKEKHPDFEVVSDIASGINWQRKGLRKLLDLSSAGGVERIVVAERDRLCRFAFELVEYVFSINGTIVEVVGSEESSPEQELQEDLLSIVQVFCCRRNGKRRYKGKKKDENPEESCDRNSNHKDSSDKITETTD

SEQ ID NO: 12073 - protein, 228 aa, Unknown
  Description of Unknown: Integrase A641 sequence
  SSF53041,cd03768,PF00239,PS51736,SM00857, G3DSA:3.40.50.1390,PTHR30461
MRNIGYLRVSTDNGSQKTDRQLHDVGVDFHKIFEDKASGSSINNRPQFVEMLDYLQENDTVHIQSNDRCFRNVKEMLGFVEDMLERKINIRLHTENLHFVHDGNEMMLAQSKLMLTQLAAFSEFFLTQNRVAIKQGIKAAKNRGVLFGAANPKYRESFEKSKAAGLHKTPVRKVAQPELLARIRQMVGDSNNSLTQMEMTSKLNAEGWTSARGKVLSQGMISKLLKEI

SEQ ID NO: 12074 - protein, 228 aa, Unknown
  Description of Unknown: Integrase A642 sequence
  SSF53041,PF00239,PS51736,SM00857,G3DSA:3.40.50.1390, PS00397
MKKKNNKNADNEVNKKKEVGKKLMGGKEASRILGVHQRTLYQWEEKGKIDTIRTPGGKRLYNVEKYLREQGLTIEENNDVYDTDLDALDKKKGKLRISYARVSSRGQKDDLERQKRLIKEKYPDHILIEDMGSGMNFNKRGLRKIIKLAIEGRVEELVVAYKDRLTRVGYELIEDLIKEYSGGRITIIEKKDELEPEESLVYDVLQIMNIFVAKMNGLRKYRKKEEKK

SEQ ID NO: 12075 - protein, 227 aa, Unknown
  Description of Unknown: Integrase A643 sequence
  SSF53041,cd00338,PF00239,PS51736,SM00857, G3DSA:3.40.50.1390,PTHR30461
MKAYIYCRLSGRRGSVNSQTEECIKYCKSKGWEVAETFEQITSSRNMKNKNLLETIVDKMSNGDILVVYSVDRFSRNMLGGLQILEKMERKGVTIYSVFENLTYSTTSEKFNFRNLLNFAEFETDQISSRTKRGKKRKIDQTVDQTTNPIAVKTPKKTKANDKPKETKPNNKIVENASVNDNDNDFPYKTVDTISDETKEIKTQVSKKKKLETKFMQKQLNNYFKTK

SEQ ID NO: 12076 - protein, 226 aa, Unknown
  Description of Unknown: Integrase A644 sequence
  SSF53041,PF00239,PS51736,SM00857,G3DSA:3.40.50.1390,PS00397
MCLTIIHLHISIWTLSSSWDSKGLIPTTRTPTGISLYDVEFIAPTVKFTRGKAKNSGRRVIYARVSSTKQKADLERQIQLLSEKFPGHKVIRDIGSGINWSRPGLKTLLRYCLDGSIREVVVAHRDRLSRLGFELLKFLIEEAGGKLVVLSESQTEQGVDEFRPESELGEDLLSIVHIFSCRHYGRRKYGKGRRKSTETQETNQEGSKDEGQGGGSEMQEGKDTSE

SEQ ID NO: 12077 - protein, 226 aa, Unknown
  Description of Unknown: Integrase A645 sequence
  SSF53041,cd03768,PF00239,PS51736,SM00857, G3DSA:3.40.50.1390,PS00397,PTHR30461
MRHIGYLRVSTISQVTDRQLHDVGVDFHKTFEDKASGSSINNRPQFVEMLDYLQENDTVHIQSNDRCFRNVKEMLGFVEDMLERKINIRLHTENLHFVHDGNEMMLAQSKLMLTQLAAFSEFFLTQNRVAIKQGIKAAKAKGTLFGSANPKYKETHQRNKAAGLHKTPVRKVAQPELLARIRQMVSDSNNTLTQMEMTVKLNAEGWTSARGKALSQGMISKLLKEL

SEQ ID NO: 12078 - protein, 226 aa, Unknown
  Description of Unknown: Integrase A646 sequence
  SSF53041,cd03768,PF00239,PS51736,SM00857, G3DSA:3.40.50.1390,PS00397,PTHR30461
MRHIGYLRVSTQDQSVSRQLHDVGVDFHKTFEDKASGASINNRPQFVEMLDYLQENDTVHIQSNDRCFRNVKEMLGFVEDMLERKINIRLHTENLHFVHDGNPMMLAQSKLMLTQLAAFSEFFLSKSREDCRQGIKAAKAKGTLFGAANPKYRESFEKSKAAGLHKTPVRKVAQPELLARIRQMVNDSNGSLTQMEMTAKLNAEGWTSARGKVLSQGMISKLLKEL

SEQ ID NO: 12079 - protein, 226 aa, Unknown
  Description of Unknown: Integrase A647 sequence
  SSF53041,cd03768,PF00239,PS51736,SM00857,G3DSA:3.40.50.1390, PS00397,PTHR30461
MRHIGYLRVSTISQQVDRQLHDVGVDFHKIFEDKASGASINNRPQFVEMLDYLQENDTVHIQSNDRCFRNVKEMLGFVEDMLERKINIRLHTENLHFVHDGNEMMLAQSKLMLTQLAAFSEFFLTQNRVAIKQGIKAAKAKGTLFGSANPKYRKSFEKNKAAGLHKTPVRKVAQPELLARIRQMVNDSNGNLTQMEMTAKLNAEGWTSARGKVLSQGMISKLLKEI

SEQ ID NO: 12080 - protein, 225 aa, Unknown
  Description of Unknown: Integrase A648 sequence
  SSF53041,cd03768,PTHR30461:SF3,PF00239,PS51736, SM00857,G3DSA:3.40.50.1390,PS00397,PS00398,cd00569, PTHR30461,SSF46689,PF02796
MRDPLDKGTLDIVTGGMRIGYARVSTVDQNLELQHDALARAGCVQVYEEKASGKSKDGRPELANMMRALRKGDTLIVWRLDRLGRSLVDLVQLVDELAGRGVAFESLSEKIDTSTAQGRMFFGFIAAMAQYQRDVISENTLAGLKAARARGRNGGRPAALDDAAIKEIRVLMKSPDISMASIAKRYGVSKPTLYNSLKRAEKKGAEKPSRKRTSANSSRSRSNTR

SEQ ID NO: 12081 - protein, 224 aa, Unknown
  Description of Unknown: Integrase A649 sequence
  G3DSA:1.10.10.60,SSF46689
MDLQKACDRISQEFETDIIMGANLLVQMIQSQRITSNTPVQTVQPVQPVQPVQSVQSVQSVQSVQSVQPVQPVQPVQPVQPVRVPEINPVLFSYLIPLIPFIQMYHIAQKDVVPKNPQVQKQDVSQFTPDGKFKIPINKTKTIKKSTSEKKTSPKKKTTSQQIKRVRLSDEERNILESQYSKNNFPSPEIRDELAKKIGKTPRQVQIWFQNKRCKDRKNLEKNN

SEQ ID NO: 12082 - protein, 223 aa, Unknown
  Description of Unknown: Integrase A650 sequence
  SSF53041,cd00338,PF00239,SM00857,G3DSA:3.40.50.1390,PTHR30461
MKKFVVYSRLSKQKKGEAQYGMESQENDIRYFLDSVPDAEVIGQFSEYYSGKGDWKQRKELVKAVEMCKATGATLLVAKVDRLGRNNASVATLLEMIDVKIAIMPDADKMVIQLLSVLAEQEVRGIADRIKKGLAVAKSKGVLLGSANPKTAAARRKGKMEYNSVKADAFAETFRERLEILRDLNTPYKTIAEKFNSKKIATARGGKWDAKTVSRLCARLNIK

SEQ ID NO: 12083 - protein, 223 aa, Unknown
  Description of Unknown: Integrase A651 sequence
  cd00569,G3DSA:1.10.10.60
MLCRGCSKEIEPDYRYGNTHLKKCRNCAKLDYHARYKRVKEKAFIEIKGTTPAEVKRLSNESDYVLSSKGDIWKLTNNGYRKLKGKVNKTGYHVIYISPSDPAIPFAGKNGGEYYVHRVVATLFIANPNNLPVVNHLDGNPINNDFSNLEWCTQKRNAQHACDTGLSPIGDKLPQSKLTAEKVKVIKDRLHKGEPITSIAEDYGVHRETVGAIKRGISWKHVK

SEQ ID NO: 12084 - protein, 222 aa, Unknown
  Description of Unknown: Integrase A652 sequence
  PF07508,SSF53041,cd00338,PF00239, PS51736,SM00857,G3DSA:3.40.50.1390,PTHR30461
MNKRYVGYTRVSTDKQGKEGYGSADQLQTINEFVKNDELLQVFQEEESGSRNDRPQLTQALELCKKEKATLVIARLDRLSRNLAFTASLMESKIEFVCCDMPSVNKFTIQVLAAVAEQYLDTLRKNTKSALAQAKKRGVVLGNTKNLKQAARKGNVKKKLLADEKARSVNNIILDLKKYGVTTLSEIAKALNARGIPTVRNGEWYPSTVRNYVNRCSSNVHL

SEQ ID NO: 12085 - protein, 221 aa, Unknown
  Description of Unknown: Integrase A653 sequence
  PF07508,SSF53041,cd03768,PF00239,PS51736, SM00857,G3DSA:3.40.50.1390, PTHR30461
MKRYVGYTRVSTDKQGKEGYGSADQLQTINEFVKDGELINVYQEQESGSKNDRPELNKALADCKKHNAILVIPRLDRLSRNLAFTASLMESKLEFVCCDMPSVNKFTIQVLAAVAEQYLDTLRKNTKSALAQAKKRGVVLGNTKNLKQAARKGNAKKKLLADEKARSVNNIILDLKKYGVTTLSEIAKALNARGIPTVRNGEWYPSTVRNYVNRCSVNVHL

SEQ ID NO: 12086 - protein, 220 aa, Unknown
  Description of Unknown: Integrase A654 sequence
  SSF53041,cd00338,PF00239,SM00857,G3DSA:3.40.50.1390, PTHR30461
MKFVLYHRLSKKKQQGNQYGIESQEADIQRFLDSQENYTIVGSFAEFYSGKGDWKQRRELVKAVNLCKETGATLVVAKVDRLGRNTASVATLLEMINVRIATMPSAENMIINILAVLAEEEARAISDRVKKSLKVAKAKGTLLGAANPKYKRTDYTKTEEAKRSKEFALSLKDSLVAYRACKTPYMTIAKHLNESGKRTIRGSLFDAKAVQRLCAKLNIK

SEQ ID NO: 12087 - protein, 220 aa, Unknown
  Description of Unknown: Integrase A655 sequence
  SSF53041,cd00338,PF00239,SM00857,G3DSA:3.40.50.1390,PTHR30461
MKFVLYHRLSKKKQQGNQYGIESQEADIQRFLDSQENYTIIGSFAEFYSGKGDWKQRRELVKAVNLCKETGATLVVAKVDRLGRNTASVATLLEMINVRIATMPSAENMIINILAVLAEEEARAISDRVKKSLKVAKAKGTLLGAANPKYKRTDYTKTEEAKRSKEFALSLKDSLVAYRACKTPYMTIAKHLNESGKRTIRGSLFDAKAVQRLCAKLNIK

SEQ ID NO: 12088 - protein, 219 aa, Unknown
  Description of Unknown: Integrase A656 sequence
  SSF53041,PF00239,PS51736,SM00857,G3DSA:3.40.50.1390,PS00397
MNTYKPKDFAEMIGVSVKTLQRWDNEGKLKAYRNPSNRRYYTHNQYVEYMGKIVQDKDKRKTIIYARVSSNSQKDDLKNQVEFLKQYANAKGMIVDEIFEDVGSGLNYNRKKWNKLLEDCMLGAIKTIIVSHKDRFIRFGFDWFERFVKSNGVELIVVNNESLSPQEEMIQDLISIIHVFSCRIYGLRKYKKKIKEDDEIVKSLQSGDKTNSRTKYKNS

SEQ ID NO: 12089 - protein, 217 aa, Unknown
  Description of Unknown: Integrase A657 sequence
  SSF53041,cd03768,PF00239,PS51736,SM00857, G3DSA:3.40.50.1390,PS00397,PTHR30461,PF02796
MIYGYIRVSSDKQTVENQRFEISNFCKINELTIDDWIEETISGTKNYTKRQLGRLLRKVRKDDIIICSELSRLGRNLFMIMEILNICMTKGCKVWTIKDNYRLGEDIQSKVLAFAFGLSAEIERNLISQRTKEALARKKAEGAMLGHRRGFRCRLNPKCANKHDYIVKELDKGTEKTFIAKNLKVSKGTLYRYLVYTGIYFPANCQQEGWKNHGIYH

SEQ ID NO: 12090 - protein, 217 aa, Unknown
  Description of Unknown: Integrase A658 sequence
  SSF53041,PF00239,PS51736,SM00857,G3DSA:3.40.50.1390,PS00397
MNKRMLSIGQASKLLGVTIQTLRNWDKKDLLKPDELTKGGERRYKLESLRRINRSTVFNQDELKTIAYARVSSHDQQDDLIRQVQVLELYCARCGFNYEVIQDLGSGMNYYKKGLTKLLNLILDNQVKRLVLTHKDRLLRFGAELVFSICEAKEVEVVIINKGDENVRFEEELAKDVLEIITVFSARLYGSRSKKNKKLLDEMQEVITNNVSYLNHA

SEQ ID NO: 12091 - protein, 217 aa, Unknown
  Description of Unknown: Integrase A659 sequence
  SSF53041,PF00239,PS51736,SM00857,G3DSA:3.40.50.1390,PS00397
MNKRMLSIGQASKLLGVTIQTLRNWDKKDLLKPDELTKGGERRYKLESLRRINRSVVFNQDELKTIAYARVSSHDQQDDLIRQVQVLELYCAKCGFNYEVIQDLGSGMNYYKKGLTKLLNLILDNQVKRLVLTHKDRLLRFGAELVFSICEAKEVEVVIINKGDENVRFEEELAKDVLEIITVFSARLYGSRSKKNKKLLDEMQEVITNNVSYLNHA

SEQ ID NO: 12092 - protein, 215 aa, Unknown
  Description of Unknown: Integrase A660 sequence
  PF07508,SSF53041,PF00239,SM00857,G3DSA:3.40.50.1390, PTHR30461
MNKIVALVRVSTDKQDVNNQKFAIEKKYPGYDIAWFEEPGISGAKLLRNRPVFQDAVKTAKKLGVPLVAYSMSRLGRTYEVGQFLEDNKGKIKLDILDTPILDDAIAGFHVAINRMERINISNRTKAALARLKAEGVNLGNLTNLAEVRVRGHATIKANADKYAKDIKDIIEGIKLSGVKTFQGIADALNNRGVKTYKDRSWYPTTVKNVLERGC

SEQ ID NO: 12093 - protein, 215 aa, Unknown
  Description of Unknown: Integrase A661 sequence
  cd00569,G3DSA:1.10.10.60
MITYTCDSCTAPITGPVRLSANDGTEKHFCSPICLSVWWNGQGHGEPRKPIEPRRPQPPALATLPPPQPRTRRARPLTPEQDTEILRRYNDGEPVPALAAEFDVAQPTIYKALTRARSAAPQARDALAEVVGLTRQVVDRVVDAAEAAAPVEAPAPAPVAKPQTQQRKPTAPVTARCRDCPRTWNLTGRVLKMTIDLHEHQRGHVVDIEEGALDA

SEQ ID NO: 12094 - protein, 214 aa, Unknown
  Description of Unknown: Integrase A662 sequence
  SSF53041,PF00239,PS51736,SM00857,G3DSA:3.40.50.1390,PS00397
MDGYISGSKVKELLNVSDWTLRHWADTGKIKSIRTPGGQRRYDISTFRASKRDHEVEDNRKIICYARVSSRGQKDDLQRQIGFLERHCPEGIVITDIASGINWKRKGLASILELSVQGDIREVVVAARDRLCRFAFELLERMLALHDVRITVLDSEGCSPEQELSDDLLGIVQIFCCRRNGKRRYIRRPDPFFSTPQNAEDKDEPHENPETDAE

SEQ ID NO: 12095 - protein, 213 aa, Unknown
  Description of Unknown: Integrase A663 sequence
  G3DSA:1.10.10.60,SSF46689
MNIIKSFNNTIDYLETVLDDEIDEKKVAQLSGYSYSMFSRLFSILTETTLSEYLRSRRLTEAAVILRDTDEKIIDVAFKFGYESSDSFGTAFKNFHGFTPSEVRNGKPFKLVSRVQLSLSVRGGRSMNITIQKKKAFTVAGINENSINSSLCSGIWGKLFSKVSHEEISKFGTGESVGVCHDILNLDNHDVLESNTISYMAGYIVNDGIKQEA

SEQ ID NO: 12096 - protein, 212 aa, Unknown
  Description of Unknown: Integrase A664 sequence
  SSF53041,PF00239,PS51736,SM00857,G3DSA:3.40.50.1390,PS00397
MENHEVMISIGDTAKELGVSVKTIRRWANAGKLRFERSPSGHRRFFLADIKRITPRDFNKLEDRVTINYARVSSHDQKDDLTRQIQVLEAFSGTNGWQFETIQDLGSGLNYNKKGLQKLLKRIMKGDVGRLVVTHKDRLLRFGSELVFAMCEEYETEVVIINKSAEEITFEQELVTDMIELITVFSARLYGSRSRKNKKLLDNVAKAVQESS

SEQ ID NO: 12097 - protein, 209 aa, Unknown
  Description of Unknown: Integrase A665 sequence
  SSF53041,PF00239,PS51736,SM00857,G3DSA:3.40.50.1390
MYSIGEFSRIIGVTRTTLRNWDKTNKLKPILLESGHRRYTDEHLSKIKHIDSDDKLNIVYCRESTKSQKKSLDLQIENIKQFCLKQGISIDKCISEFGSGLNFKRRGFLEILNLAINGKIDRLIIYYKDRLCRFGFEMFEELSKKYNFKIIVVDNTETKSRDKEFADDIIAIIHFFSMRLYESRTYKKNLKDAEESIQKSKRRNINRYK

SEQ ID NO: 12098 - protein, 209 aa, Unknown
  Description of Unknown: Integrase A666 sequence
  SSF53041, cd03768,PF00239,PS51736,SM00857,G3DSA:3.40.50.1390, PS00397,PTHR30461
MSISTNFPGIITSLSKALPGVKEPPLNRRTLYGYARVSSRVQHLKVQKDCLMSMGVKEKNIFTDKESGYKEDRKGLKSLCKKMGSGSILFIHATDRLFRHVGHYVKLIYDFNNRGIRIFTYSGQELSFYNEATLITGIQITLAQHERTVISLRTNAPTLERKSGRRKRLYSDKVLRLILEKRNNGQSIRSISRDVDIPSSTLHDLLKNL

SEQ ID NO: 12099 - protein, 207 aa, Unknown
  Description of Unknown: Integrase A667 sequence
  SSF53041,PF00239,PS51736,SM00857,G3DSA:3.40.50.1390,PS00397
MINLNFLGGKQTAKLLGVHQRTLYLWESKNKIETIRSPGGKRFYNVQKYLFDKGLSLDENNCIKKIEEIKTKENTRLKICYARVSSRSQKDDLERQKKLLREMYPSYELIEDVGSGINLIKRGLLKIIDHIIKGQIEELVIVHRDRLVRYGYDLLDYMIKKYSKGKITIINNKNEEISSEKKMVEDVLQIMNVFVAKMNGQRKYKKK

SEQ ID NO: 12100 - protein, 207 aa, Unknown
  Description of Unknown: Integrase A668 sequence
  SSF53041,PF00239,PS51736,SM00857,G3DSA:3.40.50.1390, PS00397
MLCYSSYMSKLSISEAAKLKGVSVSTLRRWETEGKLIPERTASGHRRYDLAQLLGIKPDLSYTIGYCRVSSHDQKEDLERQKQVVELFCAQNGWQFEIIEDLGSGLNYSKKGLKRLIRLIVDSKLERLVLTHKDRLLRFGSELIFSLCEHFGTEIVIINRTEDSTFEEDLAQDVLEIITVFSARLYGTRSHKNKKIIEELKEVAVRL

SEQ ID NO: 12101 - protein, 207 aa, Unknown
  Description of Unknown: Integrase A669 sequence
  SSF53041,PF00239,PS51736,SM00857,G3DSA:3.40.50.1390,PS00397
MLCYSSYMSKLSISEAAKLKGVSVSTLRRWETEGKLIPERTASGHRRYDLAQLLGIKPDLSYTIGYCRVSSHDQKEDLERQKQVVELFCAQNGWQFEIIEDLGSGLNYSKKGLKRLIRLIVDSKLERLVLTHKDRLLRFNSELIFSLCEHFGTEIVIINRTEDSTFEEDLAQDVLEIITVFSARLYGSRSHKNKKIIEELKEVAVRL

SEQ ID NO: 12102 - protein, 207 aa, Unknown
  Description of Unknown: Integrase A670 sequence
  SSF53041,PF00239,PS51736,SM00857,G3DSA:3.40.50.1390,PS00397
MLCYSSYMSKLSISEAAKLKGVSVSTLRRWETEGKLIPERTASGHRRYDLAQLLGIKPDLSYTIGYCRVSSHDQKEDLERQKQVVELFCAQNGWQFEIIEDLGSGLNYSKKGLKRLIRLIVDSKLERLVLTHKDRLLRFGSELIFSLCEHFGTEIVIINRTEDSTFEEDLAQDVLERITVFSARLYGTRSHKNKKIIEELKEVADRL

SEQ ID NO: 12103 - protein, 206 aa, Unknown
  Description of Unknown: Integrase A671 sequence
  SSF53041,cd03768,PF00239,PS51736,SM00857, G3DSA:3.40.50.1390,PTHR30461
MLIMKVLGYCRCSTNEEKQDIDRQIRDIKQLAKAHGHELSNKNIFTEYESGAKIDRIELNRMLDSLGEGDIIISTEVSRISRSTKQLINILELVKEKKNKLILGWFVVDCTKGSLDAMTEGMLKMMGVFAEMERAMTSDRVKSGMANAKAKGKNIGRPKTSIDSIPNIFLKHYSKYKNKEINISEFSRLCNMSRTTIYKYIKLLED

SEQ ID NO: 12104 - protein, 205 aa, Unknown
  Description of Unknown: Integrase A672 sequence
  SSF53041,PF00239,PS51736,SM00857,G3DSA:3.40.50.1390,PS00397
MDEYLGGKEASKILGVHQRTLMNWDRKGLIETKRTPGNKRLYNIKKFIGKNNYKLKCKSEECDIKVEEISQKINISYVRVSTYGQKDDLERQKIYMENKYPKNKIISDIGSGINFNRKGLLKIIELAVAGKINKIYIAHKDRLARFGYELIDFIVKKYSKGEIIIINKEEEIEPEEEMVKDILQIMNVFTAKMNGLRKYKKSKYL

SEQ ID NO: 12105 - protein, 202 aa, Unknown
  Description of Unknown: Integrase A673 sequence
  SSF53041,PF00239,PS51736,SM00857,G3DSA:3.40.50.1390,PS00397
MSKLTISEAAKLKGVSVSTLRRWESEGKLIPERTVNGHRRYTISQLLGVKENLSYTVGYCRVSSHDQKKDLERQKEVVELFCAQNGWQVEIIDDLGSGLNYNKKGLKRLIRLIVDSKVERLVLTHKDRLLRFGSELIFSLCEQFGTEVVIINRTEDSTFEEDLAQDVLEIITVFSARLYGSRSHKNRKIVEELRDVATRIQD

SEQ ID NO: 12106 - protein, 202 aa, Unknown
  Description of Unknown: Integrase A674 sequence
  SSF53041,cd03768,PTHR30461:SF3,PF00239,PS51736, SM00857,G3DSA:3.40.50.1390,PS00397,PS00398,cd00569, PTHR30461,SSF46689,PF02796
MAILIGGGAVSEGQLLGYARVSTDHQSLDQQTDALTAAGVDVGRVYSDRFTGASTSEQRPGLAALLDYAREGDVIVVVGIDRLGRNAAEVMLTIRDLGQRGIVLRSLREGIDTSNATGRMIAGVLASLAELELELQRERRAAAIAARKARNIPVGRPRVLRPDQVALAKRMRDAGEPVPVIAETLGVSRATLYRTLAEDGSK

SEQ ID NO: 12107 - protein, 200 aa, Unknown
  Description of Unknown: Integrase A675 sequence
  SSF53041,PF00239,PS51736,SM00857,G3DSA:3.40.50.1390,PS00397
MNDKLIPRREVLETLKIHYQTLNNMVKRKEIEVVKIGTKYVYNLDKYLRVHGIQKLNKKKLCYCRVSSYKQKEDLDRQIKYMSDKFPTYELIKDIGSSLNFERQGLQKILDYAIKGEVEELVIAYKDRLARIGYELIELMITKYSNGKIIILEKSEEETPDEELVKDILSIMNVYVAKINGLRKYKTLIKKEIMDKQPKK

SEQ ID NO: 12108 - protein, 199 aa, Unknown
  Description of Unknown: Integrase A676 sequence
  SSF53041,PF00239,PS51736,SM00857,G3DSA:3.40.50.1390
MELMSIGKFAKRVGVNVVTLRRMEAKGEFLPAHVSSGGTRYYSTDQLKYFGKKRNAHKLAVGYCRVNTPSQKDDLENQVNNVKSYMIAKGYQFEIIKDIGSGINYKKKGLKELIDKINNQEVSRVVILYKDRLIRFGFELIEYLCQINNVELEIIDHSEKSKEEELTDDLIQIITVFANRLYGQRSKKTKRLIEEVKKQ

SEQ ID NO: 12109 - protein, 199 aa, Unknown
  Description of Unknown: Integrase A677 sequence
  SSF53041, cd03768,PF00239,PS51736,SM00857,G3DSA:3.40.50.1390, PS00397,PTHR30461
MLVGYARVSTKSQSLQPQIDALENEGVERIFTDVASGADPEREGLAEAFEFMRSGDTFVVFRLDRFGRSLKDLLKRIEQLEERGVEFRSIADGLRTDSASGKLVFHVVGAIAQFERNLIKQRTREGLDAARAEGRVGGRKKAIQYSDMPILSRLIRADDVTTEQIAERFDVTRKTIYAYVAPDGTWRDEEYIRRREREQ

SEQ ID NO: 12110 - protein, 199 aa, Unknown
  Description of Unknown: Integrase A678 sequence
  G3DSA:1.10.10.60,SSF46689
MIRVNDEAFKRATSCDLQYDSAELRYVGMSNPIVSRIATTVAISLVQHPPCALLVDSLATTLSIAVLNEITGRPRKEMSGALCPKRKQRVIEYIEANIGDPITLSELASVAALSPHHFSRSFRRTFGVSPVRYVWTRRIDMAKRLMRYSALPLAAVALTCGFSSQSHFSTAFRVATGVTPAAYMRTITDIARPRDSRAT

SEQ ID NO: 12111 - protein, 199 aa, Unknown
  Description of Unknown: Integrase A679 sequence
  SSF53041,PF00239,PS51736,SM00857,G3DSA:3.40.50.1390
MKNIGNSYKTRKTACEMLGISYPTLYKLAEKGEIDTIMIGKQQLYNVNTYFTKIKSINPNKKNICYCRVLNKKHKNDLNEQIKSMTSLYPDYEIISDIGSGMDYERAGLMKILDYAIKGEIENVVISNKDKLVKFGYELIENIIKLYSNGKIVVLNTPNETTQPDEISKEITAILNAYPATTGLKKHKQALIDELTNKK

SEQ ID NO: 12112 - protein, 199 aa, Unknown
  Description of Unknown: Integrase A680 sequence
  SSF53041,PF00239,PS51736,SM00857,G3DSA:3.40.50.1390, PS00397
MDKYISRKEVLSVLKIHYHTLYRMIDRNEIQTVKVGSKILFNLDKYLRDQGIKTQKRKICYCRVSSSKQKEDLLRQIKYMKTKYPSYEIISDIGSSLNFERKGLQEIIDIAIKGDIDVLVITYKDRLARIGYELIESIIQRYSNGKIEIINSSEEETPEEEMTKDIITIMNVYVAKINGLRKYKKKLTDTIKNGKNNIK

SEQ ID NO: 12113 - protein, 199 aa, Unknown
  Description of Unknown: Integrase A681 sequence
  SSF53041,PF00239,PS51736,SM00857,G3DSA:3.40.50.1390,PS00397
MKSKEVLQLLGVSRVTLYKYVKNGTIKVTELDNGTYDYDQKSVFKLMKKDNRKNVLYARVSTYKQKNDLENQVQQLIDYCTKEEIKYDNVYKEISSGIDLNRTEFSKILDDIIHYRIANIYITYKDRLTRLSFTTLETIFQKFGTQIIIINNLDIDKNNDNEVFDELISLIHIFSTSMYSNRRKRKLHIVNKDLELFDE

SEQ ID NO: 12114 - protein, 198 aa, Unknown
  Description of Unknown: Integrase A682 sequence
  SSF53041,cd03768,PTHR30461:SF3,PF00239,PS51736, SM00857,G3DSA:3.40.50.1390,PS00397,PS00398, PTHR30461,SSF46689
MVKSKGCIFMIFGYCRVSSKVQIDNNSLEQQEQEIKRHYSDAKIFREQHTGSTTHRPIFEEMVKQMRDGDKLVVTKLDRLARNATEGINLIQNLFDSGISVHVLNVGLLENTTLGKFFITTLLAVAEMERNLILERTFAGKEIAKQNPNFREGRPKKYTKMQMEHALELLKTNSYTQVERMTGISKSTLQRAKRKQED

SEQ ID NO: 12115 - protein, 198 aa, Unknown
  Description of Unknown: Integrase A683 sequence
  SSF53041,PF00239,PS51736,SM00857,G3DSA:3.40.50.1390, PS00397
MSKYITGKKASEMLKVHQRTLHNWDRKGIIDTIRGPGGRRLYNVKKYLEEYEDDIDIDTEEDEQEDNEKMKIAYVRVSTHGQKDDMQRQIKYMKKHYPNHKIIQDIGSGINFNRKGLRKIIKWAIEGNVKELVVAYKDRLTRFGFELIEDLIKEYSGGTIKIINKEKEIEPEIELAKDVLQIMNVFTAKMNGMRKYKS

SEQ ID NO: 12116 - protein, 197 aa, Unknown
  Description of Unknown: Integrase A684 sequence
  SSF53041,cd03768,PTHR30461:SF3,PF00239,PS51736, SM00857,G3DSA:3.40.50.1390,PS00397,PS00398, cd00569, PTHR30461,G3DSA:1.10.10.60,SSF46689,PF02796
MLIGYVRVSTNDQNTDLQRNALVCAGCEQIFEDKLSGTRTDRPGLKRALKRLQKGDTLVVWKLDRLGRSMKHLISLVGELRERGINFRSLTDSIDTSSPMGRFFFHVMGALAEMERELIIERTMAGLAAARNKGRIGGRPPKLTKAEWEQAGRLLAQGIPRKQVALIYDVALSTLYKKHPAKRTHIENDDRINQIDR

SEQ ID NO: 12117 - protein, 197 aa, Unknown
  Description of Unknown: Integrase A685 sequence
  cd00569,G3DSA:1.10.10.60
MITYTCDSCTAPITGPVRLSANDGGEKHFCSPICLSVWWNGQGHGEAHKPIEPRRPQPPAQPRTRRARPLTPEQDTEILRRYNDGEPVPALAAEFDVAQPTIYKALTRARSAAPQARDALAEVVGLTRQVVDRVVAAPTPVAKPAPQQRKLTAPVTARCRDCPRTWNLTGRVLKMTIDLHEHQRGHVVDVEEGALDA

SEQ ID NO: 12118 - protein, 197 aa, Unknown
  Description of Unknown: Integrase A686 sequence
  SSF53041,cd03768,PTHR30461:SF3,PF00239, PS51736,SM00857,G3DSA:3.40.50.1390,PS00397,PS00398, cd00569,PTHR30461,G3DSA:1.10.10.60,SSF46689,PF02796
MLIGYVRVSTNDQNTELQRNALECAGCELIFEDKISGTKSDRPGLKKLLRTLSEGDTLVVWKLDRLGRNMRHLVILVEELRERGVNFRSLTDAIDTSTPMGRFFFHVMGALAEMERELIVERTRAGLEAARAKGRIGGRRPKLSTSEWEQAGRLLAAGESRQRVALIFDIGLSTLYKKFPSSATKNKLCHPLTNRDK

SEQ ID NO: 12119 - protein, 197 aa, Unknown
  Description of Unknown: Integrase A687 sequence
  G3DSA:1.10.10.60,SSF46689
MGRFLEKHNHPSVKEMLVEARMGHAKHLLSLDMINPLTIHDEVGYGARASFERRFKDYTGMSPTDYRKSIICKVKDGDRETYPKRINEVTQNELRKYLIRHFREPELTLTRVQDDFNLSKEEVQEIMKIVYDSTFEERLVTMRLEEAAKLLFKPKLTPRQIATECGFVSYHYFVVQFTKRYDVGPKQYRQLKLINAI

SEQ ID NO: 12120 - protein, 196 aa, Unknown
  Description of Unknown: Integrase A688 sequence
  SSF53041,cd03768,PF00239,PS51736,SM00857, G3DSA:3.40.50.1390,PS00397,PS00398,PTHR30461
MLYGYARVSTQEQETHAQTDALAKAGVGFIFAEKRSGGSMSQRPQLEALLQQLSPGDTVVVYKLDRIARSLKDLLTIIERIEEKGAQFRSLTESLDTSTPAGRMIFHIVGAFAEFERELIRERTRVGMAAAAKRGVKLGRHYAMSREDEAEALRMWYSGQWTKTAIARQFNTHISSVKRAIKRHEVSLQTSLLDAA

SEQ ID NO: 12121 - protein, 196 aa, Unknown
  Description of Unknown: Integrase A689 sequence
  SSF53041,cd03768,PF00239,PS51736,SM00857, G3DSA:3.40.50.1390,PS00397, PS00398,PTHR30461
MLYGYARVSTQEQETHAQTDALFRAGVGFIFSEKRSARSTVGRPQLEKLLRTLKPGDQVIVYKLDRIARSLKDLLRIIERIEEKGAQFRSITESLDTTTPAGRMLFHMVGAFAEFERELIRERTIAGMEAAVRRGVKLGRHYAMSREDEAEALRLWHQGTMTKSAIARMYGVHMSSIKRAIKRHQESVQPSLLDAA

SEQ ID NO: 12122 - protein, 196 aa, Unknown
  Description of Unknown: Integrase A690 sequence
  SSF53041,cd03768,PF00239,PS51736,SM00857, G3DSA:3.40.50.1390,PS00397,PS00398,PTHR30461
MLYGYARVSTQEQETHAQTDALSKAGVGFIFSEKKSGGTTAGRPELEKMLRILKHGDQVVVYKLDRIARSLKDLLRIIERIEEKGAQFRSLTESLDTTTPAGRMLFHMVGAFAEFERELIRERTRAGMAAAVQRGVKLGRHYALSPEDEAEALRLWFAGQMTKTAIARQFGTHISSIRRAIKRHQERQQPSLLDAA

SEQ ID NO: 12123 - protein, 196 aa, Unknown
  Description of Unknown: Integrase A691 sequence
  SSF53041,PF00239,PS51736,SM00857,G3DSA:3.40.50.1390,PS00397
MKPAEFSNRIGVSEQTLRNWDKSGKLIAKRTKGNHRFYTEDDYNDYMGISNKNQKKSYIYARVSTRNQKDDLEDQIDFLRQYTNAKGIIVDDCLTDIGSGMNYKREKWNELLDMVMQDKVDNIYVSYKDRFVRFGFEWFEQLCKKHQTNLIVVNNEETSPNQEVVDDLIAIIHVFSCRVYGLRKYKKKVGDDFKCK

SEQ ID NO: 12124 - protein, 195 aa, Unknown
  Description of Unknown: Integrase A692 sequence
  SSF53041,cd03768,PTHR30461:SF3,PF00239, PS51736,SM00857,G3DSA:3.40.50.1390,PS00397, PS00398,cd00569,PTHR30461,G3DSA:1.10.10.60, SSF46689,PF02796
MLIGYVRVSTNDQNTDLQRNALVCAGCEQIFEDKLSGTKTDRPGLKRALKRLQKGDTLVVWKLDRLGRSMKHLISLVGELRERGINFRSLTDSIDTSSPMGRFFFHVMGALAEMERELIVERTLAGLAAARARGRTGGRRPKLTKEQHEQIARLIKNGHDRKQLAIIYGIGTSTIYRYHPAGESSGTIEKSQKTK

SEQ ID NO: 12125 - protein, 195 aa, Unknown
  Description of Unknown: Integrase A693 sequence
  SSF53041,cd03768,PF00239,PS51736,SM00857, G3DSA:3.40.50.1390,PTHR30461,G3DSA:1.10.10.60,SSF46689,PF02796
MIVMAKVGYRRVSSRDQHLDRQLSGVALDKMFDEKCSAKTVNRPVWQDCLNYLREGDELHIHSLDRVCRSGAGDAVKIVESLTAKGITVEFHKEGMRFNNVMTATQKGVLAIIASIAQMERELIAERREEGIIKAKEKGKKFGRPRAEVSVEEIMALRNQGLSMDAIARRLAVGRATLYRIINVTTEDHHGNACF

SEQ ID NO: 12126 - protein, 195 aa, Unknown
  Description of Unknown: Integrase A694 sequence
  SSF53041,PF00239,PS51736,SM00857,G3DSA:3.40.50.1390,PS00397
MSKYVSGKKASEILKVHQRTLHNWDRKGIIDTIRGPGGRRLYNVKKYLEEYEDDVDIISDDEENDDKLKIAYVRVSTNEQKDDLQRQIKYMKKHYPNHKIIEDIGSGINFNRKGLRKIIKWAIEGKIKEVVVAYKDRLTRFGFELIEDLIKEYSEGKIKVINKENKEEPEIELAKDVLQIMNVFTAKMNGLRKYK

SEQ ID NO: 12127 - protein, 194 aa, Unknown
  Description of Unknown: Integrase A695 sequence
  SSF53041,PF00239,PS51736,SM00857,G3DSA:3.40.50.1390,PS00397
MLRPKEVCQRLGISYATLREYVKKGYIKPVILQSGKWRFKEEDVERLMGIVRKRKVVLYARVSSNTQKDDLINQVKYLEENVKDYDQVITDIGSGLNMKRKGFIKLLKMILNNEVSKVVVAYPDRLVRFGFEILEEVCKAHNCEIVVINKEDKTPEQELIEDLISILVSFSGKLYGMRSHKYEKVKKCVEELKA

SEQ ID NO: 12128 - protein, 194 aa, Unknown
  Description of Unknown: Integrase A696 sequence
  SSF53041,PF00239,PS51736,SM00857,G3DSA:3.40.50.1390, PS00397
MLKPKEVCQKLGISYRTLQSYVKKGYIKPVILQSGKWRFKEEDVERLMGVVRKRKVVLYARVSSNTQKDDLINQVKYLEENVKDYDQVITDIGSGLNMKRKGFLKLLRMILNNEVSKVVIAYPDRLVRFGFEIIEEACKAHNCELVVLNKEDKTPEQELIEDLISILVSFSGKLYGMRSHKYEKVKKCVEELKA

SEQ ID NO: 12129 - protein, 193 aa, Unknown
  Description of Unknown: Integrase A697 sequence
  SSF53041,cd03768,PTHR30461:SF3,PF00239,PS51736, SM00857,G3DSA:3.40.50.1390,PS00397,PS00398, cd00569, PTHR30461,G3DSA:1.10.10.60,SSF46689,PF02796
MLIGYVRVSTNDQNTDLQRNALVCAGCEQIFEDKLSGTRTDRPGLKRALKRLQKGDTLVVWKLDRLGRSMKHLISLVGELRERGINFRSLTDSIDTSSPMGRFFFHVMGALAEMERELIIERTMAGLAAARNKGRIGGRPPKLTKAEWEQAGRLLAQGIPRKQVALIYDVALSTLYKKHPAKRAHIENDDRIN

SEQ ID NO: 12130 - protein, 193 aa, Unknown
  Description of Unknown: Integrase A698 sequence
  SSF53041,cd03768,PTHR30461:SF3,PF00239,PS51736, SM00857,G3DSA:3.40.50.1390,PS00397,PS00398,cd00569, PTHR30461,G3DSA:1.10.10.60,SSF46689,PF02796
MQYGYARVSTFDQNLELQLEALRSSGCDRIFEDKISGAKSKRPGLDKLIKVLRPGDTVVVWKLDRMGRSLIHLVELLNFFLSNNIEFISVTEGIKISTSIGRFAYTMLSAAAELERENIIERTRAGLAVARANGRIGGRRSKLTPEQWEQAGRLLAQGVPRKQVALIYDVALSTLYKKHPAKRTCIESNAQTN

SEQ ID NO: 12131 - protein, 193 aa, Unknown
  Description of Unknown: Integrase A699 sequence
  G3DSA:1.10.10.60,SSF46689
MSDKSKRTFNRWTSSEEELLKKLYKKNITLNDIADFFPNRTNKQVRAKYDYMFKTKKKHVKPSKRWSEEEEQILKDNYDIEWPELMKLLPRRSRTSIKKKLFQLDLHRPTRKITEEIEERIIELAKTHATSDIVKLTNLSNKSVYDVLNKYNVKAVNKNQWIATDVDIEDEIDLSVTFTLNKNGIRGGIIDEN

SEQ ID NO: 12132 - protein, 193 aa, Unknown
  Description of Unknown: Integrase A700 sequence
  G3DSA:1.10.10.60,SSF46689
MPHQILTSEKIVQAGVNIIEADKVLTFSTIAHNLGTHSQALYVYFDSQKQLSYAIVGWAVTQVIESLKTKVFGHSGKQAIIIFATELRSIALKHIQLSRFVLTVQRDDQNPEVQTAFENLRDLLHRLINSIFYDSDNRILASRCIRDLIVGDILNVGSGWFADPTISPDDSFQESLNLCLTIIIQNENKNKNK

SEQ ID NO: 12133 - protein, 191 aa, Unknown
  Description of Unknown: Integrase A701 sequence
  SSF53041,PF00239,PS51736,SM00857,G3DSA:3.40.50.1390, PS00397
MPKYVRRKEVLEVLKVHYQTLYRMEEKGLIEVKRTNGGHRLYNLEKYLRDNGLDNKEKKGVCYCRVSSKKQIKDLNRQVEYMEKKYPDYMIIKDIGSGINMERKGLLQLIRMAIDGEISEVVVTYKDRLVRFGFELIEWIIKTYSNGQIKIIHKREEETPEEEITRDILQIMNVYVAKINGKRSGKLKAKK

SEQ ID NO: 12134 - protein, 191 aa, Unknown
  Description of Unknown: Integrase A702 sequence
  SSF53041,PF00239,PS51736,SM00857,G3DSA:3.40.50.1390,PS00397
MPKYVRRKEVLEVLKVHYQTLYRMEEKGLIEVKRTNGGHRLYNLEKYLRDNGLDNKEKKGICYCRVSSKKQIKDLNRQVEYMEKNYPEYEIIKDIGSGINMERKGLLQLIQMAIDGEISEVVVTYKDRLARFGFELIEWIIKTYSNGQIKIIHKREEETPEEEITRDILQIMNVYVAKINGKKSGKLKAKK

SEQ ID NO: 12135 - protein, 191 aa, Unknown
  Description of Unknown: Integrase A703 sequence
  SSF53041,PF00239,PS51736,SM00857,G3DSA:3.40.50.1390,PS00397
MPKYVRRKEVLEVLKVHYQTLYRMEEKGLIEVKRTNGGHRLYNLEKYLRDNGLDNKEKKGICYCRVSSKKQIKDLNRQVEYMEKNYPDYKIIKDIGSGINMERKGLLQLVRMAIDGEISEVVVTYKDRLARFGFELIEWIIKTYSGGQIKIIHKREEETPEEEITRDILQIMNVYVAKINGKISGKLKAKK

SEQ ID NO: 12136 - protein, 191 aa, Unknown
  Description of Unknown: Integrase A704 sequence
  G3DSA:1.10.10.60,SSF46689
MRKRWNKEEDKELLSYILKFVEEGNSLREAVKLASEEINRTFESCYARWNNFLRIEYEDRLETAKSSAKENGNVFYEKWTSDDDEMLADIILNEISNGSSTRKAVNASAKKLNRSFTSCYNRWQTVVSKRFEQKFVFKDCENESNNDLENLKERFLLLENNFHNVLEQNEKIIAQNEELFKMLQKEKGTNS

SEQ ID NO: 12137 - protein, 191 aa, Unknown
  Description of Unknown: Integrase A705 sequence
  SSF53041,PF00239,PS51736,SM00857, G3DSA:3.40.50.1390,PS00397
MPKYVRRKEVLEVLKVHYQTLYRMEEKGLIEVKRTNGGHRLYNLEKYLRDNGLDNKEKKGICYCRVSSKKQIKDLNRQVEYMEKNYPEYEIIKDIGSGINMERKGLLQLIRMAIDGEISEVVVTYKDRLARFGFELIEWIIKTYSNGQIKIIHKREEETPEEEITRDILQIMNVYVAKINGKRSGKLKAKK

SEQ ID NO: 12138 - protein, 191 aa, Unknown
  Description of Unknown: Integrase A706 sequence
  SSF53041,PF00239,PS51736,SM00857,G3DSA:3.40.50.1390,PS00397
MPKYVRRKEVLEVLKVHYQTLYRMEEKGLIEVKRTNGGHRLYNLEKYLRDNGLHNKEKKGICYCRVSSKKQIKDLNRQVEYMEKNYPEYEIIKDIGSGINMERKGLLQLIRMAIDGEISEVIVTYKDRLARFGFELIEWIIKTYSNGQIKIIHKREEETPEEEITRDILQIMNVYVAKINGKISGKLKAKK

SEQ ID NO: 12139 - protein, 190 aa, Unknown
  Description of Unknown: Integrase A707 sequence
  SSF53041,PF00239,PS51736,SM00857,G3DSA:3.40.50.1390,PS00397
MSKYMGGKEASSVLGVHQRTLYQWDKKGWIKTIRTKGGKRLYDVGSYLADKDEESKEDHKLSICYVRVSSNSQKDDLERQIKFMKKKYPNHTIIKDISSGINMNRKGLNKIIDLAIEGRIKEVVVAYKDRLAIFGFSLIERLIETYSDGKIVVVRKKENQEPQEELIEDMMDVMNVFTARRNGSRKYSNK

SEQ ID NO: 12140 - protein, 190 aa, Unknown
  Description of Unknown: Integrase A708 sequence
  SSF53041,PF00239,PS51736,SM00857,G3DSA:3.40.50.1390, PS00397
MSKYMGGKEASSVLGVHQRTLYQWDKKGWIKTIRTKGGKRLYDVGSYLADKDEESKEDHKLSICYVRVSSNNQKDDLERQIKFMKKKYPNHTIIKDISSGINMNRKGLNKIIDLAIEGRVKEVVVAYKDRLARFGFSLIERLIEKYSDGKIVVVRKKENQEPQEELMEDMMDVMNVFIARRNGLKKYSNK

SEQ ID NO: 12141 - protein, 190 aa, Unknown
  Description of Unknown: Integrase A709 sequence
  SSF53041,PF00239,PS51736,SM00857,G3DSA:3.40.50.1390,PS00397
MSKYMGGKEASSVLGVHQRTLYQWDKKGWIKTIRTKGGKRLYDVGSYLADKDEESKEDHKLSICYVRVSSNSQKDDLERQIKFMKKKYPNHTIIKDISSGINMNRKGLNKIIDLAIEGRVKEVVVAYKDRLARFGFSLIERLIEKYSDGKIVVVRKKENQEPQEELMEDMMDVMNVFTARRNGSRKYSNK

SEQ ID NO: 12142 - protein, 189 aa, Unknown
  Description of Unknown: Integrase A710 sequence
  SSF53041,cd03768,PTHR30461:SF3,PF00239,PS51736, SM00857,G3DSA:3.40.50.1390,PS00397,PS00398, PTHR30461,SSF46689
MIFGYCRVSSKVQIDNNSLEQQEQEIKRHYSDAKIFREQHTGSTTHRPIFEEMVNQMRDGDKLVVTKLDRLARNATEGINLIQNLFDSGISVHVLNVGLLENTTLGKFFITTLLAVAEMERNLILERTFAGKEIAKQNPNFREGRPKKYTKMQMEHALELLKTNSYTQVEKMTGISKSTLQRAKRKQED

SEQ ID NO: 12143 - protein, 188 aa, Unknown
  Description of Unknown: Integrase A711 sequence
  SSF53041,PF00239,PS51736,SM00857,G3DSA:3.40.50.1390
MTKYVRRKEVLDVLKVHYQTLYRMEEKGLIDVKRTNGGHRLYNLDKYLRVNGLNKKEKINVCYCRISSKKQSSDLDNQIYYMKKKYPNHLIIKDIGSGINMERPGLKKLIKMAIDGELNEVVIAYKDRLARFGYELIEWIINTYSSGEIKIINKKEEETPEEEITKDILQIMNVYVAKINGRRKYKNK

SEQ ID NO: 12144 - protein, 186 aa, Unknown
  Description of Unknown: Integrase A712 sequence
  SSF53041, cd03768,PF00239,PS51736,SM00857,G3DSA:3.40.50.1390, PS00397,PS00398,cd00569,PTHR30461,SSF46689, PF02796
MQGHRIGYVRVSSFDQNPERQLEQTQVSKVFTDKASGKDTQRPQLEALLSFVREGDTVVVHSMDRLARNLDDLRRLVQKLTQRGVRIEFLKEGLVFTGEDSPMANLMLSVMGAFAEFERALIRERQREGIALAKQRGAYRGRKKALSDEQAATLRQRATAGEPKAQLAREFNISRETLYQYLRTDD

SEQ ID NO: 12145 - protein, 186 aa, Unknown
  Description of Unknown: Integrase A713 sequence
  SSF53041,cd03768,PF00239,PS51736,SM00857, G3DSA:3.40.50.1390,PS00397,PS00398,cd00569,PTHR30461, G3DSA:1.10.10.60,SSF46689,PF02796
MTGQRIGYIRVSTFDQNPERQLEGVKVDRAFSDKASGKDVKRPQLEALISFARTGDTVVVHSMDRLARNLDDLRRIVQTLTQRGVHIEFVKEHLSFTGEDSPMANLMLSVMGAFAEFERALIRERQREGIALAKQRGAYRGRKKSLSSERIAELRQRVEAGEQKTKLAREFGISRETLYQYLRTDQ

SEQ ID NO: 12146 - protein, 186 aa, Unknown
  Description of Unknown: Integrase A714 sequence
  SSF53041,cd03768,PTHR30461:SF3,PF00239, PS51736,SM00857,G3DSA:3.40.50.1390,PS00397, PS00398,PTHR30461,G3DSA:1.10.10.60,SSF46689, PF02796
MLIGYVRVSTNEQNTALQRNALESAGCELIFEDKASGKKAERPGLKKVLRMLSRGDTLVVWKLDRLGRSMRHLVVLVEELRDRGINFRSLTDSIDTSTPMGRFFFHVMGALAEMERELIVERTRAGLDAARAEGRIGGRRPKYQEETWQQMRRLLEKGIPRKQVAIIYDVAVSTLYKKFPASSFQS

SEQ ID NO: 12147 - protein, 186 aa, Unknown
  Description of Unknown: Integrase A715 sequence
  SSF53041,cd03768,PTHR30461:SF3,PF00239,PS51736, SM00857,G3DSA:3.40.50.1390,PS00397,PS00398,PTHR30461, G3DSA:1.10.10.60,SSF46689,PF02796
MLIGYVRVSTNEQNTALQRNALESAGCELIFEDKASGKQTERPGLKKVLRMLSRGDTLVVWKLDRLGRSMRHLVVLVEELRDRGINFRSLTDSIDTSTPMGRFFFHVMGALAEMERELIVERTRAGLDAARAEGRIGGRRPKYQEETWQQMRRLLENGIPRKQVAIIYDVAVSTLYKKFPASSFQS

SEQ ID NO: 12148 - protein, 186 aa, Unknown
  Description of Unknown: Integrase A716 sequence
  SSF53041,cd03768,PF00239,PS51736,SM00857, G3DSA:3.40.50.1390,PS00397,PTHR30461
MNIAYVRVSTVEQNEERQLEGLKKYNIEKWFTEKISAKDTNRPQLKAMLEFAREGDTIFVWDFSRLARSTKDLLELVETMEAKGVHFKSIKENLDTSTPTGKLMLTMIGAINEFERNNMLERQREGIAIAKAKGKYKGRKEVNIENFEEHYNRYMKREVSKSALAKELNISRPTLDKLIKEHEEKE

SEQ ID NO: 12149 - protein, 186 aa, Unknown
  Description of Unknown: Integrase A717 sequence
  SSF53041,PF00239,PS51736,SM00857,G3DSA:3.40.50.1390
MGISYRRAWQMYKDGKLPNARQLPTGTIVVIEENEKTIPAPNAVAIYARVSSHENKNNLESQAKRLEDYAIAKGYQIKHVVKEIGSGVNDTRPKLIKLLKQNDYSILLVEHKDRLTRFGFNYLRLLCELQGKQIEVVNSSEEEKEDIVQDFVSVIYSFSAKLYGLRRAKRKTEKIIKEITEEKEDE

SEQ ID NO: 12150 - protein, 186 aa, Unknown
  Description of Unknown: Integrase A718 sequence
  SSF53041, PF00239,PS51736,SM00857,G3DSA:3.40.50.1390,PS00397
MFATLRDAKKHYQCNHKTIWKWADEGIIRTVDTPGGQRRYELTERSKPEKTNYCYCRVSSAKQYDDLERQVESMRTEFPGYRIITDIGSGINWKRKGLKTILESAMHGTCGRVVVAHRDRIARFGFELVEWILRANGADLVVQHKDVDASPATELAEDIIAITTVFACKHYGKRRYAKKSDDIPKS

SEQ ID NO: 12151 - protein, 186 aa, Unknown
  Description of Unknown: Integrase A719 sequence
  SSF53041,cd03768,PTHR30461:SF3,PF00239, PS51736,SM00857,G3DSA:3.40.50.1390,PS00397, PS00398,PTHR30461,G3DSA:1.10.10.60,SSF46689, PF02796
MLIGYIRVSTNDQNTALQRNALESAGCELIFEDKASGKKAERPGLKKVLRILSRGDTLVVWKLDRLGRSMRHLVVLVEELRDRGINFRSLTDSIDTSTPMGRFFFHVMGALAEMERELIIERTRAGLDAARAEGRIGGRRPKYQEETWQQMRRLLEKGIPRKQVAIIYDVAVSTLYKKFPASSFQS

SEQ ID NO: 12152 - protein, 186 aa, Unknown
  Description of Unknown: Integrase A720 sequence
  SSF53041,cd03768,PTHR30461:SF3,PF00239,PS51736, SM00857,G3DSA:3.40.50.1390,PS00397,cd00569,PTHR30461, G3DSA:1.10.10.60,SSF46689,PF02796
MAVIGYIRVSTTDQNSDLQRNALISINCDQIFEDKMSGKTAVRPGLKRALKAVQPGDTLAVWKLDRLGRSVKNLIALISDLHERGAHFRSLTDSIDTSTAMGRFFFHVMSALAEMERELIVERTLAGLAAARAQGRVGGRPAALTQNDREQIGRLLDKGYYRQQLAIIYGVGVSTIYRYFPASKKS

SEQ ID NO: 12153 - protein, 186 aa, Unknown
  Description of Unknown: Integrase A721 sequence
  SSF53041,PF00239,PS51736,SM00857,G3DSA:3.40.50.1390,PS00397
MPKYLGGKQTSEILGVHQRTLYQWEKKGWIKTVRTNGGKRLYDIEPYLKQKEAEKEKLNICYVRVSSNGQKNDLERQIKYMKKKYPQHIIIKDIASGINLNRKGLNKIIDLAIEGKINELVVAYKDRLTRFGFKMIERIIEKYSNGKIKIINKHNIKEPKEELIEDVLQVMNVFVAKMNGMRKYKN

SEQ ID NO: 12154 - protein, 185 aa, Unknown
  Description of Unknown: Integrase A722 sequence
  SSF53041,cd03768,PTHR30461:SF3,PF00239,PS51736, SM00857,G3DSA:3.40.50.1390,PS00397,PS00398,PTHR30461, G3DSA:1.10.10.60,SSF46689,PF02796
MRLFGYARVSTSQQSLDLQVRALKDAGVKANRIFTDKASGSSTDREGLDLLRMKVEEGDVILVKKLDRLGRDTADMIQLIKEFDAQGVAVRFIDDGISTDGDMGQMVVTILSAVAQAERRRILERTNEGRQEAKLKGIKFGRRRTVDRNVVLTLHQKGTGATEIAHQLSIARSTVYKILEDERAS

SEQ ID NO: 12155 - protein, 185 aa, Unknown
  Description of Unknown: Integrase A723 sequence
  SSF53041,cd03768,PTHR30461:SF3,PF00239, PS51736,SM00857,G3DSA:3.40.50.1390,PS00397, PS00398,cd00569,PTHR30461,G3DSA:1.10.10.60, SSF46689,PF02796
MQIGYVRVSTNDQNTDLQRNALNCAGCELIFEDKISGTKSERPGLKKLLRTLSEGDTLVVWKLDRLGRSMRHLVVLVEELRERGINFRSLTDSIDTSTSMGRFFFHIMGALAEMERELIVERTRAGLAAARAQGRVGGRRPKLTPEQWEQAGRLLAAGETRHRVGLLFDVSISTLYKKFPVNQSR

SEQ ID NO: 12156 - protein, 185 aa, Unknown
  Description of Unknown: Integrase A724 sequence
  SSF53041,cd03768,PF00239,PS51736,SM00857, G3DSA:3.40.50.1390,PTHR30461
MVVGYMRVSTAEQNEDRQLVTMKKHNVEKKYQEKISAKDTKRSQLNAMLDFVREGDTIIVHDFSRLARSTKDLLEIVELLEKKHVKLISDKENLDTSTPTGKLMLTMLGAIYEFERTNMLERQREGIAIAKEQGKYKGRKEVKIENFGSYYDRYKTRELNKTQLAKELGVSRPTLDRLIKSHESN

SEQ ID NO: 12157 - protein, 185 aa, Unknown
  Description of Unknown: Integrase A725 sequence
  SSF53041,PF00239,PS51736,SM00857,G3DSA:3.40.50.1390
MRSKDVLKILNVTRVTLTTYVKTGKIKVTKLANGYYDYDDKSIYDFIGHNKKINIIYTRVSTNKQKYDLQRQIDYLNKYCSKNNIIVGKTYSEISSGIDLDRNEFSSMLDDIFKYKVDKIIITDKDRLTRLSFITLENIFKQFGTSIVVASSKKNNDNNELFDELISIMHLFSTKEYSRRKNKKI

SEQ ID NO: 12158 - protein, 185 aa, Unknown
  Description of Unknown: Integrase A726 sequence
  SSF53041,PF00239,PS51736,SM00857,G3DSA:3.40.50.1390
MRSKDVLKILNVTRVTLTTYVKTGKIKVTKLANGYYDYDDKSIYDFIGHNKKINIIYTRVSTNKQKYDLQRQIDYLNKYCLKNNIIVGKTYSEISSGIDLDRNEFSSMLDDIFKYKVDKIIITDKDRLTRLSFITLENIFKQFGTSIVVASSKKNNDNNELFDELISIMHLFSTKEYSRRKNKKI

SEQ ID NO: 12159 - protein, 185 aa, Unknown
  Description of Unknown: Integrase A727 sequence
  SSF53041,cd03768,PTHR30461:SF3,PF00239, PS51736,SM00857,G3DSA:3.40.50.1390,PS00397, PS00398,cd00569,PTHR30461,G3DSA:1.10.10.60, SSF46689,PF02796
MQIGYVRVSTNDQNTDLQRNALNCAGCELIFEDKISGTKAERPGLKKLLRTLSEGDTLVVWKLDRLGRSMRHLVVLVEELRERGINFRSLTDSIDTSTPMGRFFFHIMGALAEMERELIVERTRAGLAAAREQGRIGGRRPKLTPEQWEQAGRLLAAGETRHRVGLLFDVSISTLYKKFPVNQSR

SEQ ID NO: 12160 - protein, 183 aa, Unknown
  Description of Unknown: Integrase A728 sequence
  G3DSA:1.10.10.60,SSF46689
MRHAPEPSACVMVRSPERPKKPSKPWTVEEHQRFLIGLRKFGKGRWKEISTHYVPTRTPTQVASHAQKHHQHKSKDPTKRKRTQSLFDIGLEGFGESPCVTPPEVSEENDPDPVPTLPPKKLPTRPTPTRLFEISPLPALDPYFQQFICVSPALMYHYYMMTRTMCHQTLPARYPLYSNNSDR

SEQ ID NO: 12161 - protein, 183 aa, Unknown
  Description of Unknown: Integrase A729 sequence
  SSF53041,cd03768,PTHR30461:SF3,PF00239, PS51736,SM00857,G3DSA:3.40.50.1390,PS00397,PS00398, cd00569,PTHR30461,G3DSA:1.10.10.60,SSF46689,PF02796
MLIGYARVSTGDQNLDLQKNALIRAECELVFEDMASGKNARRPGLKRALRRLRPGDVLVVWKLDRLGRSVRDLITLVSELQARGVNFRSLTDSIDTSTPAGRFFFHVMSALAEMERELIVERTRAGLAAAREQGRVGGRRRVMTEEVVERCRRMLENGATRQQIADVIGVNVKTLYKYLPAAV

SEQ ID NO: 12162 - protein, 182 aa, Unknown
  Description of Unknown: Integrase A730 sequence
  SSF53041,cd03768,PTHR30461:SF3,PF00239, PS51736,SM00857,G3DSA:3.40.50.1390,PS00397, PS00398,cd00569,PTHR30461,G3DSA:1.10.10.60, SSF46689,PF02796
MQIGYVRVSTNDQNTDLQRQALERAGCEQVFEEKMSGTVANRPALKKLLRTLNAGDTLVVWKLDRIGRNVLHALLMFQQLQEKGINFRSITDGVDLKTASGRYNFRNILSAAQYESDLNSERTLAGLAVARAKGRVGGRRPKFTDEQWREMGERMATGESRQSVSKTYGVGLSTLYKKFPAS

SEQ ID NO: 12163 - protein, 182 aa, Unknown
  Description of Unknown: Integrase A731 sequence
  SSF53041,cd03768,PTHR30461:SF3,PF00239,PS51736, SM00857,G3DSA:3.40.50.1390,PS00397,PS00398,cd00569, PTHR30461,G3DSA:1.10.10.60,SSF46689,PF02796
MIYGYARVSTNHQDTELQLTALKSAGCEKIFEEHASGRKSNRPVLKRLIATMQPGDELVVWKLDRIGRNVLHALLMFQQLQEKGINFRSITDGVDLKTASGRYNFRNILSAAQYESDLNSERTLAGLAVARAKGRVGGRRPKFTDEQWREMGERMAIGESRQSVSKTYGVGLSTLYKKFPAS

SEQ ID NO: 12164 - protein, 182 aa, Unknown
  Description of Unknown: Integrase A732 sequence
  SSF53041,cd03768,PTHR30461:SF3,PF00239, PS51736,SM00857,G3DSA:3.40.50.1390,PS00397, PS00398,cd00569,PTHR30461,G3DSA:1.10.10.60, SSF46689,PF02796
MIYGYARVSTNHQDTELQLTALKSAGCEKIFEEHASGRKSNRPVLKRLIATMQPGDELVVWKLDRIGRNVLHALLMFQQLQEKGINFRSITDGVDLKTASGRYNFRNILSAAQYESDLNSERTLAGLAVARAKGRVGGRRPKFTDEQWREMGERMATGESRQSVSKTYGVGLSTLYKKFPAS

SEQ ID NO: 12165 - protein, 182 aa, Unknown
  Description of Unknown: Integrase A733 sequence
  SSF53041,cd03768,PF00239,PS51736,SM00857, G3DSA:3.40.50.1390,PS00397,cd00569,PTHR30461,G3DSA:1.10.10.60, SSF46689,PF02796
MIFGYARVSTNDQDHQLQLDALNKHGVDEVLTDTMTGSKRDRPGLNRLLDKAREGDTIVIWRFDRLARSTIDLLNLVEELTKKGIHLVSLHEGISTTGATGKLMLTMFGALAEFERNLLIERTMAGIESAKAQGRVGGRPKSLSTEQIAMAKDLVAAGYGKAEVALQMGVSRATLYRNLENA

SEQ ID NO: 12166 - protein, 182 aa, Unknown
  Description of Unknown: Integrase A734 sequence
  SSF53041,cd03768,PF00239,PS51736, SM00857,G3DSA:3.40.50.1390,PS00397,cd00569, PTHR30461,G3DSA:1.10.10.60,SSF46689,PF02796
MIFGYARVSTADQNHQLQLDALEKRGVDEVITDTMTGSKKDRPGLNRLLDKAREGDTIVIWRFDRLARSTIDLLNLVDDLTKRGIHLESLHEGLSTSGATGRLMLTMFGALAEFERALMMERVAAGVESAKAKGRTGGRPKSMTPEQIKMARDLVDAGHNKTEVATQMGVSRATLYRNLETV

SEQ ID NO: 12167 - protein, 182 aa, Unknown
  Description of Unknown: Integrase A735 sequence
  SSF53041,cd03768,PF00239,PS51736,SM00857, G3DSA:3.40.50.1390,PS00397,PS00398,cd00569,PTHR30461, G3DSA:1.10.10.60,SSF46689,PF02796
MIFGYARVSTAEQDNAMQMTALNNAGVDEVISDKMSGTKKDRPGLERLLDKAREGDVIVVWRLDRLGRSMSNLLELVALLSERNITLKSLHENIDFSTANGRLQLHLFMMLAEFERSLLQERVMAGLAQAKAEGRVGGRPKSMTDEQLAMAKALVEAGHSKGEIAKQMNISRSTLYRNLETV

SEQ ID NO: 12168 - protein, 182 aa, Unknown
  Description of Unknown: Integrase A736 sequence
  SSF53041,cd03768,PF00239,PS51736, SM00857,G3DSA:3.40.50.1390,PS00397,cd00569, PTHR30461,G3DSA:1.10.10.60,SSF46689,PF02796
MIFGYARVSTNDQDHQLQLDALNKHGVDEVLTDTMTGSKRDRPGLNRLLDKAREGDTIVIWRFDRLARSTIDLLNLVEELTKKGIHLVSLHEGISTTGATGKLMLTMFGALAEFERNLLIERTMAGIESAKAQGRVGGRPKSLTTEQIAMAKDLVAAGYGKAEVASQMGVSRATLYRNLEKA

SEQ ID NO: 12169 - protein, 182 aa, Unknown
  Description of Unknown: Integrase A737 sequence
  SSF53041,cd03768,PF00239,PS51736,SM00857, G3DSA:3.40.50.1390,PS00397,cd00569,PTHR30461,G3DSA:1.10.10.60, SSF46689,PF02796
MIFGYARVSTADQNHQLQLDALEKRGVDEVITDTMTGSKKDRPGLNRLLDKAREGDTIVIWRFDRLARSTIDLLTLVDDLTKRGIHLESLHEGLSTAGATGRLMLTMFGALAEFERSLMMERVAAGVEAAKAKGRTGGRPKSMTTDQIKMARDLVDAGHNKTEVATQMGVSRATLHRNLETA

SEQ ID NO: 12170 - protein, 182 aa, Unknown
  Description of Unknown: Integrase A738 sequence
  SSF53041,cd03768,PF00239,PS51736, SM00857,G3DSA:3.40.50.1390,PS00397,cd00569, PTHR30461,G3DSA:1.10.10.60,SSF46689,PF02796
MIFGYARVSTADQNHQLQLDALEKRGVDEVITDTMTGSKKDRPGLNRLLDKAREGDTIVIWRFDRLARSTIDLLTLVDDLTKRGIHLESLHEGLSTAGATGRLMLTMFGALAEFERSLMMERVAAGVEAAKAKGRTGGRPKSMTPEQIKMARDLVDAGHNKTEVATQMGVSRATLYRNLETV

SEQ ID NO: 12171 - protein, 180 aa, Unknown
  Description of Unknown: Integrase A739 sequence
  SSF53041,PF00239,PS51736,SM00857,G3DSA:3.40.50.1390, PS00397
MSYVNSKEAQAFFKVSDQTLRRWADNNQIKTKVTPGGHRRFFIPSDDKEKIIYCRVSSSKQKDDLKRQIKFMQKKYPNHKIMSDVGSGINFKRKNFLSLLQQIFQGNVSEVVVASNDRLVRFNYEFFDWLFKQFGCQLISVNKQTEKSPEQELSEDLISIITVFTAKYHGKRKYNFDKKD

SEQ ID NO: 12172 - protein, 180 aa, Unknown
  Description of Unknown: Integrase A740 sequence
  SSF53041,PF00239,PS51736,SM00857,G3DSA:3.40.50.1390,PS00397
MSYVSSKEAQAFFKVSDQTLRRWADNNQIKTKVTPGGHRRFFIPSDDKEKVIYCRVSSSKQKNDLKRQIKFMQKKYPNHKVVSDIGSGVNFKRKNFLSLLQQVFQGDVSEIVVASNDRLVRFNYEFFDWLFKQFGCQLISVNKRTEKSPEQELSEDLISIITVFTAKYHGKRKYNLHKED

SEQ ID NO: 12173 - protein, 179 aa, Unknown
  Description of Unknown: Integrase A741 sequence
  SSF53041,cd00338,PF00239,PS51736,SM00857, G3DSA:3.40.50.1390,PTHR30461
MAKVEIIKANKELSNRNKKGPIEILRVGAYCRVSTDTEDQISSYKSQVAYYDDLIDNNPNWIKVDIYADEAITGTQVTKRTDFQRLINDCMNHEIDIVITKSISRFARNTLDTLKYVRMLKEKNVAVYFEDEKINTLTMDGELLLVVLSSVAQQEVENISANVKKRIKDENESRGAYRI

SEQ ID NO: 12174 - protein, 177 aa, Unknown
  Description of Unknown: Integrase A742 sequence
  SSF53041,PF00239,PS51736,SM00857,G3DSA:3.40.50.1390, PS00397
MSYVSSKEAQAFFKVSDQTLRRWADNNQIKTKVTPGGHRRFFIPSDDKEKVIYCRVSSSKQKDDLKRQIKFMQKKYPNHKVVSDIGSGVNFKRKNFLSLLQQVFQGDVSEIVVASNDRLVRFNYEFFDWLFKQFGCQLISVDKQTEKSPEQELSEDLISIITVFTAKYHGKRKYNLH

SEQ ID NO: 12175 - protein, 177 aa, Unknown
  Description of Unknown: Integrase A743 sequence
  G3DSA:1.10.10.60,SSF46689
MEAVEKKRGPWSEEEDLILMKHMHEYTQQGYNQTDASAIISELHLPQRTAAAVASHFSGELRHEYARAMQLHDMLKDAPEPITLGDTSYDAIIHVLKQKAEEEEKFKLNHITLQEHYDLLQKRYDSLQVEYDDLERRHMELSADHNVFVRALQKAQEPVETVTLPIKNQVDNEEWVD

SEQ ID NO: 12176 - protein, 177 aa, Unknown
  Description of Unknown: Integrase A744 sequence
  G3DSA:1.10.10.60,SSF46689
MARPITDADRRQVRELHAAGKSRNDIARTLDRSPSTVSKIAAQCEPPLTFDRAEQVEAATRVRTADLAARRAALALDLQTDAEKLRAQLWEATQHGEFAGRDGEWRTADLDRPRFPDQRAIVAAVQTAVGTSLRLAPAEGGDDATQVRSMLGALGEALTQAANDDQALDDDRGADGG

SEQ ID NO: 12177 - protein, 177 aa, Unknown
  Description of Unknown: Integrase A745 sequence
  G3DSA:1.10.10.60,SSF46689
MARPITDADRRKVRELHAAGKSRNDIAREISRSPSTVSKIAAAFDPPLSFDRAEQVEAATRVRTADLAARRAALALDLQDDAERLRAQLWEGTTHGEFAGRDGEWHETYLERPRFPDQRAIVAAVQTAVGTSLRLAPAEGGDDAGQVRSMLGALGEALTQAANDDQALDDDGGAGGG

SEQ ID NO: 12178 - protein, 177 aa, Unknown
  Description of Unknown: Integrase A746 sequence
  G3DSA:1.10.10.60,SSF46689
MARPITDADRRQVRELHAAGKSRNDIAREISRSPSTVSKIAAAFDPPLSFDRAEQVEAATRVRTADLAARRAALALDLQDDAERLRAQLWEGTTHGEFAGRDGEWHETYLERPRFPDQRAIVAAVQTAVGTSLRLAPAEGGDDAGQVRSMLGALGEALTQAANDDQALDDDGGAGGG

SEQ ID NO: 12179 - protein, 177 aa, Unknown
  Description of Unknown: Integrase A747 sequence
  G3DSA:1.10.10.60,SSF46689
MARPITAADRRKVRELHAAGESRNAIARALKRSPSTVSKIAGNLDPPLSFDRAEQVEAATRVRTADLASRRAGLALDLQAAAERLLGQLWEPTTHGEFAGREGEWHETHLPQPRFGDQRAIVASVQTAVGTSLRLAPAEGGENAEQVRSMLGALGEALTQAANDDQAHDDDGGDAGG

SEQ ID NO: 12180 - protein, 172 aa, Unknown
  Description of Unknown: Integrase A748 sequence
  SSF53041,cd00338,PF00239,PS51736,SM00857, G3DSA:3.40.50.1390,PS00397,PTHR30461
MVTGLKDYSDCVGYCRVSTQKQFEEGHGLERYIAQLKSWGLNDNQIFWDIESGASDKRKGYNKVLDLIKSGAIKKLIIPCFDRFTRSTLQWEQASLELQKHNVTVMFLDGGSTDLTTPDDLFKMRILAAMSAAVRDKNKFNSSQGHKFRRLNEKAHVACFTHLVQVIYYRKV

SEQ ID NO: 12181 - protein, 172 aa, Unknown
  Description of Unknown: Integrase A749 sequence
  G3DSA:1.10.10.60,SSF46689
MAGTVVDPNENKILLQWLEANREHPYPSTRQKEELAIETGLELKQVNYWFTNVRRRLKIRKSVRRSSPVERSNTKSCVPVRHRSFTTKQVKILTNWARKNWNHPFPCPKEKEQMVAETKLTYDQVQLWFTNWRMRVWKKNREKGIAITEEKKSAGLTGVDSLRTRLSDFRQC

SEQ ID NO: 12182 - protein, 171 aa, Unknown
  Description of Unknown: Integrase A750 sequence
  G3DSA:1.10.10.60,SSF46689
MADDICGHETASGEPCQNPASDGDSCWLDAHGGSANKSGRPSKLSYDRQEKIATAVEGGKSLTSAARMAGVDRTTVYGWIDRGEADKEEGKDNEFTEFYDRLTRAKGHGEDFYFNLALEMAKEDGDHRFIASLMKQRYPDSWGETETGVEATEITVSSDVVEVTEADLQHD

SEQ ID NO: 12183 - protein, 170 aa, Unknown
  Description of Unknown: Integrase A751 sequence
  G3DSA:1.10.10.60,SSF46689
MAARPITDTDREQVKALHAEGMSRNDIARRMKRSPSTVSKLAAEQGLTFERGPEVIAATEARRIDLAARRQALAEQLHQDAEQLRAQLWEPCTIGEFAGREGDWQTADLPRPRFADQRQIMGATATAIQQSLRLQPADGGADAGDVRSMLGSLGEALTGAFADDPGEDGG

SEQ ID NO: 12184 - protein, 170 aa, Unknown
  Description of Unknown: Integrase A752 sequence
  G3DSA:1.10.10.60,SSF46689
MAARPITDTDREQVKALHAEGMSRNDIARRMKRSPSTVSKLAAEQGLTFERGPEVVAATEARRIDLAARRQALAEQLHQDAEQLRAQLWEPCTIGEFAGREGDWQTADLPRPRFADQRQIMGATATAIQQSLRLQPADGGADAGDVRSMLGSLGEALTGAFADDPGEDGG

SEQ ID NO: 12185 - protein, 170 aa, Unknown
  Description of Unknown: Integrase A753 sequence
  G3DSA:1.10.10.60, SSF46689
MAARPITDTDREQVKALHAEGMSRNDIARRMKRSPSTVSKLAAEQGLTFERGPEVVAATEARRIDLAARRQALAEQLHQDAEQLRAQLWEPCTIGEFAGREGDWQTADLPRPRFADQRQIMGATATAIQQSLRLQPADGGADAGDVRSMLGSLGEALTGAFADDPGKDGG

SEQ ID NO: 12186 - protein, 168 aa, Unknown
  Description of Unknown: Integrase A754 sequence
  G3DSA:1.10.10.60,SSF46689
MARKSLYEKLDIETRLPEIEQMARNGYRDIDICKALGISHQTFYNWLEKYPEFAEAVRKGKEVVDAEIENKLLENARGHYYWEETQELMEVRDPITGETKKELVTTKRVLKYVKPDTTAQIFWLKNRRPDVWRDKQHIEHSGEVGVKDLSYLSDEELDKELKELQGDE

SEQ ID NO: 12187 - protein, 167 aa, Unknown
  Description of Unknown: Integrase A755 sequence
  G3DSA:1.10.10.60,SSF46689
MATVVVDGKERSSNYDRHHNKILEAWFDENSEGPYPTLRQKKELANDTGLTLKQVNTWFTNTRKRLKTRRSGTVRRQYFSEDQINILRNWGLNNWKYPYPTPKEKERMADEAKLTYDQVQHWFINWRMRVWRRANRKERPASSETVQVTPVTTGLLRTRLSDFRPLA

SEQ ID NO: 12188 - protein, 166 aa, Unknown
  Description of Unknown: Integrase A756 sequence
  G3DSA:1.10.10.60,PF02796
MRKLTTTDIQEIYVSTQTQKELASQYNVSIPLISNIMNGKIYRRYTSTLKKPQRKKYNREPRFTQEQIINIYTSLEPINTIAKRYSVARETISRIKNDVHYTEFTKELSNPKIHKRIDRLDVIDIYLDDRSAKEIAQEYRTSISTVYNIKNKKCHRNITDELDKDY

SEQ ID NO: 12189 - protein, 165 aa, Unknown
  Description of Unknown: Integrase A757 sequence
  SSF53041,PF00239,PS51736,SM00857,G3DSA:3.40.50.1390,PS00397
MSKYITGKKASEMLKVHQRTLHNWDRKGIIDTIRGPGGRRLYNVKKYLEEYEDDIDIDTEEDEQEDNEKMKIAYVRVSTHGQKDDMQRQIKYMKKHYPNHKIIQDIGSGINFNRKGLRKIIKWAIEGNVKELVVAYKDRLTRFGFELIEDLIKEYSGGTIKTKLS

SEQ ID NO: 12190 - protein, 164 aa, Unknown
  Description of Unknown: Integrase A758 sequence
  SSF53041,cd03768,PTHR30461:SF3,PF00239, PS51736,SM00857,G3DSA:3.40.50.1390,PS00397, PS00398,PTHR30461
MLIGYVRVSTNDQNTDLQRNALECAGCELIFEDKISGTKSDRPGLKKLLRTLSEGDTLVVWKLDRLGRSMRHLVILVEELRERGVNFRSLTDAIDTSTPMGRFFFHMMGALAEMERELIVERTRAGLEAEPKVVLVADDRNSPRVSGSRSDGCWLRGNLVNVWH

SEQ ID NO: 12191 - protein, 163 aa, Unknown
  Description of Unknown: Integrase A759 sequence
  G3DSA:1.10.10.60,SSF46689
MTDICGVETTKGEPCQNPVESCPWHDSDNDVDAGRPTKLTKQREEGIASMIEEGHSQASAARAHGIDPHTLTNWINKGREQDQGIFSDFFSRIARARAYSEQQYVKELRHMADEVNDTNTLRWMLQQRFPESWGESDALGGESEEWNVSSEVVEVVSSTTELE

SEQ ID NO: 12192 - protein, 162 aa, Unknown
  Description of Unknown: Integrase A760 sequence
  cd00569,G3DSA:1.10.10.60
MPYINENIELHGNAKRIEYEIDNNSCWNCTSHSKDSFGYCFITRTGMQGATYIHRYVYTIHNGDIPQDMVIRHKCDNPSCINPSHLEVGTQQENLKDAESRGRAAIKSGSGNIKAKLSEEQVKEIKELLKKGVVQKEIASTYGVGNSTISRIKHNVSWSATK

SEQ ID NO: 12193 - protein, 162 aa, Unknown
  Description of Unknown: Integrase A761 sequence
  cd00569,G3DSA:1.10.10.60
MPYINENIELHGNAKRIEYEIDNNSCWNCTSHSKDSFGYCFITRTGMQGATYIHRYVYTIHNGDIPQDRVIRHKCDNPSCINPSHLEVGTQQENLKDAESRGRAAIKSGSGNIKAKLSEEQVKEIKELLKKGVVQKEIASTYGVGNSTISRIKHNVSWSATK

SEQ ID NO: 12194 - protein, 162 aa, Unknown
  Description of Unknown: Integrase A762 sequence
  G3DSA:1.10.10.60,SSF46689
MTDICGVETTKGEPCQNPVESCPWHNVDEKPDTGRDTKLSLERQEQIATAIEQGKSLTSAARMAGVDRTTVYGWIDRGEADAESGEENVFTEFYHRLTRAKGHGEDFYFELALELARENGDHQFIASLMKQRYPDSWGETETGVSSPDIEISVSEATYETWQ

SEQ ID NO: 12195 - protein, 162 aa, Unknown
  Description of Unknown: Integrase A763 sequence
  G3DSA:1.10.10.60, SSF46689
MTDICGVETTKGEPCQNPAESCPWHDVDEKPDTGRNTKLSLERQEKIASAIEQGKSITSAARMAGVDRTTVYGWLDRGEADIESGKENVFTEFYHRLTRAKGHGEDFYFELALDLARENGDHQFIASLMKQRYPDSWGETETGVSSPDIEISVSEATYETWQ

SEQ ID NO: 12196 - protein, 161 aa, Unknown
  Description of Unknown: Integrase A764 sequence
  G3DSA:1.10.10.60,PF02796
MPYIEEKVKLHGNAKRIEYEINDDGCWNCISHVETKFGHNQITRKGFPLMHVHNYVYRITKGDIPKNNVVRHKCDNPNCINPNHLEIGTQKDNMKDAEIRGRAKIRSGSGNIKAELTEKQVKEIRKLLNEGIMQKDIVNMYGISKSTVSKIKNNILWKNVI

SEQ ID NO: 12197 - protein, 161 aa, Unknown
  Description of Unknown: Integrase A765 sequence
  G3DSA:1.10.10.60,PF02796
MLVPKEKKLIPNELLPPKYQNKGYRMSPNGDVYGVFGKKLKPNDWSPNGFNHPLLFNRNLWYIRATMFVPNPENHKRVVLIGDDVHWLSEKKYREMVNHYLGREAVERVPLKDRGEVLDEMLEKGAKIADIARALGYSRAAIYKYLEKNNYEYKNQKLKRK

SEQ ID NO: 12198 - protein, 158 aa, Unknown
  Description of Unknown: Integrase A766 sequence
  G3DSA:1.10.10.60,SSF46689
MKQRSDCLNDKDVEIVNDSYKRLRELSEDESNAVYLLISGLTVTEVAKAIGVTRQTIYNWMNREHIRKEIDRRKQELTNQGNLLILKDLETYINNIKELASDKSDKRVMLAANQYLINRIYGTPTNTIIQAEDDSGGMGMDTTEIEAAIAKIRIRTKK

SEQ ID NO: 12199 - protein, 158 aa, Unknown
  Description of Unknown: Integrase A767 sequence
  G3DSA:1.10.10.60,SSF46689
MGRRTFFTEHQNQILAMWFDEKSKNSYLNSGQKEELAAEIGLTPKQVETWFSNTRKRLRRPSPRPRSDTRPNFTKEQVKTLSEWVSLNSKYPYPTQKEKNQFVLTTKLTYLQVQNWFINWRTRVWKPNHKKGDSIVITKKIDAPILLRTRLSDFRTSR

SEQ ID NO: 12200 - protein, 157 aa, Unknown
  Description of Unknown: Integrase A768 sequence
  G3DSA:1.10.10.60,SSF46689
MTCNRQPKVVHYRGKSGDTSKAEWARLRKRALALVDEDWKSREVAEELGVSQDTVSKWVERYRRLTHRRGGCFYGPCKEWGCTAGVQTKHGYCTHHTNLRVWCGYRPRVRRAPGPCANAPSCPRLAGTGQGGAKGLCRGCYQRARRALRRVAEEVGL

SEQ ID NO: 12201 - protein, 155 aa, Unknown
  Description of Unknown: Integrase A769 sequence
  G3DSA:1.10.10.60,SSF46689
MPFSISGRKGSEMMAKLDELKQKLTAKQIQAAYLLVENELMESNNEEKRTQDEMANELGINRTTLWEWRTKNQDFIAFKSEVADSFLAEKREQVYSKLMQLILGPQPSVKAMQLYMQRFGLLTDKKVIEGDLGNATRTNAEIEEQLQKLKKLTGE

SEQ ID NO: 12202 - protein, 154 aa, Unknown
  Description of Unknown: Integrase A770 sequence
  G3DSA:1.10.10.60,PF02796
MLNKFEKKEVRTVITGLLTHACGRCTTPNECDDCPIQETMQAMNKQLINDPDWSKKRHNLTTEAYRSLRAKGKQDREICEMFNMTRHQLYRFKKKEKIISDRLTHEDYLEIRRMRKEGRPYKEIAERFGISRGYASEIARGKKFGEVVEMEEAN

SEQ ID NO: 12203 - protein, 152 aa, Unknown
  Description of Unknown: Integrase A771 sequence
  G3DSA:1.10.10.60,SSF46689,PF02796
MQEWVRITSYPNYAVSNEGEVKNINTGCVLRPLTLTKGYLGVRLYHEGNGKTLKIHRLVALAFLSNPDNLPQVNHIDGDKSNNDVTNLEWCSNEYNMRHAADNDLLNKETQFKQKYDPSEFRKCKEEGMTISAIARKFGCKRDTVYRLLRLR

SEQ ID NO: 12204 - protein, 150 aa, Unknown
  Description of Unknown: Integrase A772 sequence
  G3DSA:1.10.10.60,SSF46689
MSNGELFDSGEVDKLEPDKVLAHMNDAVVLARWQGTLNEMASIAEHKLRQLLPDKPDEVPTIARAMVYAICETMGGAVVYIPRGDGLRRAIRDMEIFREWREKNARPDALARKFDLSSQAVYDIIARQRALHRQQEPDLFGYEDAPKRLH

SEQ ID NO: 12205 - protein, 149 aa, Unknown
  Description of Unknown: Integrase A773 sequence
  G3DSA:1.10.10.60,SSF46689
MSELEELRAEVERLRARADECDRCRGHARGDVIEDLALKGHTTPEIAKMLGVDKRTVNYWRKKRGVPGKRVYATGRTEYATPEQIVKLRELLADGASLAEAARTLGLNEGTVRNVHRGEGWTTEESIDHLTTLRRHGHALGTKGRASWT

SEQ ID NO: 12206 - protein, 148 aa, Unknown
  Description of Unknown: Integrase A774 sequence
  SSF53041,PF00239,PS51736,SM00857, G3DSA:3.40.50.1390,PS00397
MEVDYVTTKETCRITGFKAPTLRGWSNVGKVKTTRTLANQWLYDRQSLLSFIDGVNDGIEKEKIIYCRVSSKKQSEHLEHQIEFCKQYYPDHTVITGISSGINFNRKGIQTVLESAMHGDLEELVVAYKDRLCRFGYELIEWIVGRYG

SEQ ID NO: 12207 - protein, 147 aa, Unknown
  Description of Unknown: Integrase A775 sequence
  SSF53041,PF13408,cd00338,PF00239,G3DSA:3.40.50.1390
MLKCQYCGSTLKRQVSYKKKIVWCCSKYIKEGKNSCKGMRVPERDIEDWKLSSPVIVLERIEDGEKHYGYTGQKATANSHISNSEKIRVAAYCRVSTDQDEQLSSYENQVNYYREYILKHEDYELVDIYADEGISATNTKNVMLLTD

SEQ ID NO: 12208 - protein, 146 aa, Unknown
  Description of Unknown: Integrase A776 sequence
  G3DSA:1.10.10.60,SSF46689
MFISLNKEEEKILGTENKKEFTPLKKDKRFNTIKEQQIVTLYEEGAPFKEISKAVKVSTGMIYSVINSYKVEKRNKKSRVSERVAHVLNDVEKTKQLIKDYHFMNVEDIYKKYNIHKNGLYYILDLYNVERKTGSKEEVLNDEQEE

SEQ ID NO: 12209 - protein, 145 aa, Unknown
  Description of Unknown: Integrase A777 sequence
  G3DSA:1.10.10.60,SSF46689
MANPRRMKALEAKLTAQQRKAAYLVVENELLPTKERRTKEEIATEVGVTYKTIWSWTTRNRDFIEYKNAIADDFLETEREAVYSNLMQLIKAPQPSVKAIDLYLRRFGLLTEKQIVTTDTGEGARTDADLEQELGELDELLKDDD

SEQ ID NO: 12210 - protein, 144 aa, Unknown
  Description of Unknown: Integrase A778 sequence
  G3DSA:1.10.10.60,SSF46689
MELPRTVQEIADVIGRERALYLIGQLPKLWVPSQQYHKVILYVPKRIRPNDPLVKILGWSDASKMVQHFGGEMLHPANCEYIYRRFIHSSIKRMHSEGMDAKAIAELLDVSERTVKRHCTDKPHKDTSPANDNTPERLLTAMGQ

SEQ ID NO: 12211 - protein, 144 aa, Unknown
  Description of Unknown: Integrase A779 sequence
  G3DSA:1.10.10.60,SSF46689
MELPRTVQEIADVIGRERALYLIGQLPKLWVPSQQYHKVILYVPKRIRPNDHLVKILGWSDASKMVQHFGGEMLHPANCEYIYRHFIHRSIKRMHGEGMDAKAIAELLEVSERTVKRHCTDKPHKDTSPANDNHQHRLLMTTGQ

SEQ ID NO: 12212 - protein, 143 aa, Unknown
  Description of Unknown: Integrase A780 sequence
  SSF53041,PF00239,PS51736,G3DSA:3.40.50.1390,PTHR30461
MVILNIYYNYIIIVPEISRLGRNMNEVNEIIGICGRKKVMIINIQNKLKLDGSLQTSIMANLYTIFSQMERQLISERTKQGLLIAKQKGHLTGRARGIKKNKLDGKDNEIKKLIDEKKSIRQIAKELNVKHPQLLKYISDKNL

SEQ ID NO: 12213 - protein, 142 aa, Unknown
  Description of Unknown: Integrase A781 sequence
  G3DSA:1.10.10.60,SSF46689
MPNKFDDLSEQQKRAAELLLENDLAPKAEKRKLEDIAEEVGVARKTLWDWRRRNTLFIEYKQHLTTLSLQDAHGELARVLITNLQSSQPSTKMLDLLAKMTPNALAANRQEVVMETNETSNEEVMKRIEELRKMQESVKQDE

SEQ ID NO: 12214 - protein, 142 aa, Unknown
  Description of Unknown: Integrase A782 sequence
  G3DSA:1.10.10.60,SSF46689
MTTAVVNKQGNRPAKYKQSIMARLMELVAEGKTTRECVQELDVSWTTLRKWLKEKNYQDLYRVAQSDQVILNNEKLDIILEDAHKRAKTKDITMTEVKLIELMQKNYHHKNSKLNPTTWGSDKQTMSISDSKGQEFKVEWSK

SEQ ID NO: 12215 - protein, 141 aa, Unknown
  Description of Unknown: Integrase A783 sequence
  SSF53041,PTHR30461:SF3,PF00239, PS51736,PTHR30461,G3DSA:1.10.10.60,SSF46689,PF02796
MPAFEWVHVQLHQQKGMISLSPPTICNSAADMIQLIKEFDAQGVAVRFIDDGISTDGDMGQMVVTILSAVAQAERRRILERTNEGRQEAKLKGIKFGRRRTVDRNVVLTLHQKGTGATEIAHQLSIARSTVYKILEDERAS

SEQ ID NO: 12216 - protein, 141 aa, Unknown
  Description of Unknown: Integrase A784 sequence
  G3DSA:1.10.10.60,SSF46689
MVKIAKGKYKEWLTNEKLDIVAGWAQDGLTNNDIAYNIGINPDTLYTWIKKYPEFSEALKVNKEVADRRVENALYKSAIGFTYEEETVTNQGEVVTVKKYSKPNTTAQIFWLKNRKQEWSDRQEIEHTGTVVFANEDNIPD

SEQ ID NO: 12217 - protein, 140 aa, Unknown
  Description of Unknown: Integrase A785 sequence
  G3DSA:1.10.10.60,SSF46689
MQHDLFEHDPAIRQLIGHIDNIPAPELESRWPRSVVDLIDVLENELKRQNVSNPRELARKQAVALSCFLGGRQFYIPCGDTILTALRDDLLYCQFNGRNMEELRRQYRLSQPQIYQIIARQRKLHTRRHQPDLFSPESPK

SEQ ID NO: 12218 - protein, 140 aa, Unknown
  Description of Unknown: Integrase A786 sequence
  G3DSA:1.10.10.60,SSF46689
MQHDLFEHDPAIRQLIGHIDNIPAPELESRWPRSVVDLIDVLENELKRQNVSNPRELARKQAVALSCFLGGRQFYIPCGDTILTALRDDLLYCQFNGRNMEELRRQYRLSQPQIYQIIARQRKLHTRRHQPDLFSPETPK

SEQ ID NO: 12219 - protein, 140 aa, Unknown
  Description of Unknown: Integrase A787 sequence
  G3DSA:1.10.10.60,SSF46689
MPCGWEAVMSEENQDLFGYKNVSLEEVEKLADDEEHQRWPEAMRQIYCIFKDELVKNETDPKLAVVLLHRICKEFGGVQLYLPRGRQLESEIMNLSIWREFNGANVEELSRKYDKSMQHIYRVVAKMRKIEVKNRQPNLF

SEQ ID NO: 12220 - protein, 140 aa, Unknown
  Description of Unknown: Integrase A788 sequence
  G3DSA:1.10.10.60,SSF46689
MQHDLFEHDPAIRQLIGHIDNIPAPELESRWPRSVVDLIDVLENELKRQNVSNPRELARKQAVALSCFLGGRQFYIPCGDTILTALRDDLLYCQFNGRNMEELRRQYRLSQPQIYQIIARQRKLHTRRHQPDLFSPESQK

SEQ ID NO: 12221 - protein, 140 aa, Unknown
  Description of Unknown: Integrase A789 sequence
  G3DSA:1.10.10.2600,PS51737
MKHTPYGYIIVDGKAVVNEKEAKRLQKICDNYLSGMSFVASAKSVGLKMQHSGVKRLMLNKRYLGDDFYPAILTEGIVNKIEEERARREKALGRDRKKQGKTVRGVVYTKFLIPQIDVKYENPMRQAEYAYSLIGNEVST

SEQ ID NO: 12222 - protein, 138 aa, Unknown
  Description of Unknown: Integrase A790 sequence
  G3DSA:1.10.10.2600,PS51737
MAYIPYGYKIQDGVVTVDEKAAGQVKVFFEKYISGLSLTVAGEQAGIDKTHSVMGRILKNVNYLGNDTYPAIIDKEIFDKAEEVRDKRAKDLGRVVELAAFTSPPPKERFKMRKADNKMPVDPFERAEYLYSLIESEE

SEQ ID NO: 12223 - protein, 138 aa, Unknown
  Description of Unknown: Integrase A791 sequence
  SSF53041,PF00239,SM00857,G3DSA:3.40.50.1390
MEKCTYTRKYKNEDEKGGTPYGYARSSNEDGIKRQIEWLKDKGVKEVYIDKNAKVELNKLLNILKEGDTLITRGIDRITRDIKGLEEIIEFAKNKRVKFVLGDKIIDGINGVDPSIERMSAVLNTFKECEDKIVGIEE

SEQ ID NO: 12224 - protein, 138 aa, Unknown
  Description of Unknown: Integrase A792 sequence
  G3DSA:1.10.10.2600, PS51737
MTHTPYGYRIENGIAVVDEVDAERIKALYQEYIDCKSMRAATKKAGIDKTHSVIGRILKNKVYLGTVYYPQIIDEDIFAKAQEIREHNVRSQNRIGIYRPHPKAEIGAFKIRKTEEKYKDPYKQAEYAYSQILEVANE

SEQ ID NO: 12225 - protein, 136 aa, Unknown
  Description of Unknown: Integrase A793 sequence
  G3DSA:1.10.10.60,SSF46689
MNVSIRAIQAIMENAIEDGKNVRVGNIERALGYYRCSWGEEFSKVTGLTPASYMRYFRMRCICQDLATSKHSLLDIAEYYGRSLSYFCRDFKKLIGMTPGEYRKLNHNGRAVVLHSVFWAYPFLTDFTSFRPLLLK

SEQ ID NO: 12226 - protein, 136 aa, Unknown
  Description of Unknown: Integrase A794 sequence
  G3DSA:1.10.10.60,SSF46689,PF02796
MADILTTKESDMITMLIEGVGITDIAKKLNVTRQTIYNWSNKDNVKAELDRRRRDLSHQGNNLIMKDLTTYVDNIKELANDKSDKRVSLAANQYLLNRIYGSPVGNVVDGKIDNNPVQDINELENELNNFRLKKVK

SEQ ID NO: 12227 - protein, 136 aa, Unknown
  Description of Unknown: Integrase A795 sequence
  G3DSA:1.10.10.60,SSF46689
MNVSIRAIQAIMENAIEEGKNVRVGNIERALGYYRCSWGEEFSKVTGLSPASYMRYFRMRCICQDLATSKHSLLDIAEYYGRSLSYFCRDFKKLTGMTPGEYRNLNHNGRVIVLHSVFSAYPFLTDFTSFRPLLLK

SEQ ID NO: 12228 - protein, 136 aa, Unknown
  Description of Unknown: Integrase A796 sequence
  G3DSA:1.10.10.60,SSF46689
MNVSIRAIQAIMENAIEDGKNVRVGNIERALGYYRCSWGEEFSKVTGLSPASYMRYFRMRCICQDLATSKHSLLDISEYYGRSLSYFCRDFKKLIGMTPGEYRNLNHNGRVIVLHSVFSAYPFLTDFTSFRPLLLK

SEQ ID NO: 12229 - protein, 133 aa, Unknown
  Description of Unknown: Integrase A797 sequence
  G3DSA:1.10.10.60,SSF46689,PF02796
MTMARPTKYDPKFCDEAREMMADGYSTKAFAGYIGVSLSTVYKWMEENPEFSEAIKSAQAAGAFWWEKTLKHVASTGEGNASAAIFGVKNRSQEEWKDKVENDHTSSDGSMSPRGKTLEDFYADEDVPPQSSP

SEQ ID NO: 12230 - protein, 133 aa, Unknown
  Description of Unknown: Integrase A798 sequence
  G3DSA:1.10.10.60,SSF46689
MTHIASEKLEQIQDLLDNQLSHTEIAKRLRVSRNTIRYYFPDTSLSREETLARANAARLDGRRIVRPGETEKFDKCLVCGTDRQQQRRWQKQGIGFKCSFGRSHKYAEYVLPDNPDCRRCQGQKSVHHTCQSN

SEQ ID NO: 12231 - protein, 133 aa, Unknown
  Description of Unknown: Integrase A799 sequence
  G3DSA:1.10.10.60,SSF46689
MTHIASEKLEQIQDLLDNQLSHTEIAKRLRVSRNTIRYYFPDTSLSREETLARANAARLDGRRIVRPGETEKFDKCLVCGTDRQQQRRWQKQGIGFKCSFGRSHKYAEYVLPDNPDCRRCQGQKSVHHTCQNN

SEQ ID NO: 12232 - protein, 132 aa, Unknown
  Description of Unknown: Integrase A800 sequence
  G3DSA:1.10.10.60,PF02796
MAGGRPTLYRPEYCETVIELGKQGDSLAQMAAHFDVSRQTIENWASDHPEFLAALSRAKVHCQAWWEKAGREGMFLGGGGFNAAVWKKSMEARFREDYTERQEVHQTGTMEHKHSIGEMTDEDLAKVIAGEK

SEQ ID NO: 12233 - protein, 132 aa, Unknown
  Description of Unknown: Integrase A801 sequence
  G3DSA:1.10.10.60,SSF46689
MPCGWEAVMSEENQDLFGYKNVSLEEVEKLADDEEHQRWPEAMRQIYCIFKDELVKNETDPKLAVVLLHRICKEFGGVQLYLPRGRQLESEIMNLSIWREFNGANVEELSRKYDKSMQHIYRVVAKNAQDRS

SEQ ID NO: 12234 - protein, 132 aa, Unknown
  Description of Unknown: Integrase A802 sequence
  G3DSA:1.10.10.60,SSF46689
MSEENQDLFGYKNVSLEEVEKLADDEEHQRWPEAMRQIYCIFKDELVKNETDPKLAVILLHRICKEFGGVQLYLPRGRQLESEIMNLSIWREFNGANVEELSRKYDKSMQHIYRVVAKMRKIEVENRQPNLF

SEQ ID NO: 12235 - protein, 132 aa, Unknown
  Description of Unknown: Integrase A803 sequence
  G3DSA:1.10.10.60,PF02796
MFRKNQDYFIDEIGNVTRKDGTIVKPQESPNGLGHPIVLRQNAWRLSALVHKLDNPNNYKHIVEIDGKLHWIKEETYHKMVEALVGRPNVKAPIPKHKRDFIFEQHGSMTITAIAKHLDISRMSVYRILKGA

SEQ ID NO: 12236 - protein, 131 aa, Unknown
  Description of Unknown: Integrase A804 sequence
  G3DSA:1.10.10.60,SSF46689
MADTLHTVPTKPLTKEDRIELGRKAVAINKGEGKPVTQIAREMGISDKTLGYYITVYKKSLRTKKEEMADSLLYPVMRSEKTSLVKVPNEELDKLRSENTDLKEKNAELQRSVKALQNVILILGHQHSEDD

SEQ ID NO: 12237 - protein, 129 aa, Unknown
  Description of Unknown: Integrase A805 sequence
  G3DSA:1.10.10.60, SSF46689
MTEDLFGDLQDDTILAHLDNPAEDASRFPALLAELNDLLRGELSRLGVDPAHSLEIVVAICKHLGGGQVYIPRGQVLDSLIRDLRIWNDFNGRNVSELTTRYGVTFNTVYKAIRRMRRLKYRQYQPSLL

SEQ ID NO: 12238 - protein, 129 aa, Unknown
  Description of Unknown: Integrase A806 sequence
  G3DSA:1.10.10.60,SSF46689
MTEDLFGDLQDDTILAHLDNPAEDTSRFPALLAELNDLLRGELSRLGVDPAHSLEIVVAICKHLGGGQVYIPRGQALDSLIRDLRIWNDFNGRNVSELTTRYGVTFNTVYKAIRRMRRLKYRQYQPSLL

SEQ ID NO: 12239 - protein, 129 aa, Unknown
  Description of Unknown: Integrase A807 sequence
  SSF53041,cd03768,PTHR30461:SF3,PF00239,PS51736, G3DSA:3.40.50.1390,cd00569,PTHR30461,G3DSA:1.10.10.60, SSF46689,PF02796
MRHLVMLTEELREKGINFRSLTDSIDTSTPMGRFFFHVMGALAEMERELIVERTRAGLAAAREKGRIGGRRRIMTPEVVSRAERMLANGATLHQIALVLEVSVKTLYRYIPAEKQQHLRDSVLPETSKP

SEQ ID NO: 12240 - protein, 128 aa, Unknown
  Description of Unknown: Integrase A808 sequence
  SSF46689,PF02796
MSRKRMLSENDVKEILQLRDEGISRRQVSKMYNVAEGTLYLIEKGKLYKDVLKKLGKEHEPIKDRSQIKLNNRKLKEKDIIEIFELLNNNVSKKDIIEQFNISYSLLTNILNGTAYNDIVQKHNLIAK

SEQ ID NO: 12241 - protein, 126 aa, Unknown
  Description of Unknown: Integrase A809 sequence
  G3DSA:1.10.10.60,SSF46689,PF02796
MSSKPKPGFMRPRANRDEMAARIQRVREMLAAGAKVKDIASELDVSRAAVYRIIQDHADLQINRATDPVSLCGTLGRLRATLEAQDRGFLNWIANNRVEGTTVAEFLVSCAVDAYHDETSETAAAA

SEQ ID NO: 12242 - protein, 126 aa, Unknown
  Description of Unknown: Integrase A810 sequence
  G3DSA:1.10.10.60,SSF46689
MKRKELRKVNKKGISKRQQRAIEMLLDIEKDYTKKEIAAKLGISETALYKWFKKEEFVEELNKQSEEFFKRSKNIVNKALLKKIMKGDVSAMRLYYEKENEFVQKHQFSGNFELVIDGNEINDSED

SEQ ID NO: 12243 - protein, 126 aa, Unknown
  Description of Unknown: Integrase A811 sequence
  G3DSA:1.10.10.60, SSF46689
MKRKELRKVNKKGISKRQQRAIEMLLDIEKDYTKKEIAAKLGISETALYKWFKKEEFVEELNKQSEEFFKRSKNIVNKALLKKIMKGDVSAMRLYYEKENEFVQKHQFSGNFELVIDGNEINDSEN

SEQ ID NO: 12244 - protein, 126 aa, Unknown
  Description of Unknown: Integrase A812 sequence
  G3DSA:1.10.10.60,SSF46689,PF02796
MSSKPKPGFMRPRANREEMAARIQRVREMLAAGAKVKDIATDLDVSRAAVYRIIQDHADLQINRATDPVSLCGTLGRLRATLETQDRGFLNWIANNRVEGTTVAEFLIACAVDVYHDETSETAAAA

SEQ ID NO: 12245 - protein, 125 aa, Unknown
  Description of Unknown: Integrase A813 sequence
  G3DSA:1.10.10.60,SSF46689
VAKSNAGRPSKYDDSFLGITEKYLAQGKSVTQLAKHLNVAKSTIYKWAEENKEFSDALNIGREFSQAHWEDKLEDMMFNKEVNSPLVKLYFANRFGWSDKVESKNENANVEKVKSFSEMYGNVKS

SEQ ID NO: 12246 - protein, 124 aa, Unknown
  Description of Unknown: Integrase A814 sequence
  G3DSA:1.10.10.60,SSF46689
MSTNADIFDEKAPEILADLAKHIETQLLAKVKNNEFNSELAKQIGIEVASHIAQSWGGEVIYIPRNLVLLLSERDRKIFNEFNGSNHRELARKYNVSMQWIYQIVKKVTKEEIARRQFDMFGNT

SEQ ID NO: 12247 - protein, 124 aa, Unknown
  Description of Unknown: Integrase A815 sequence
  G3DSA:1.10.10.60,SSF46689
SKSNAGRPSKYDDSFLGVTEKYLAQGKSVTQLAKHLNVAKSTIYKWAEENKEFSDALNIGREFSQAHWEDKLEDMMFNKDVNSPLVKLYFANRFGWSDKVESKNENANVEKVKSFSEMYGNVKS

SEQ ID NO: 12248 - protein, 123 aa, Unknown
  Description of Unknown: Integrase A816 sequence
  G3DSA:1.10.10.60,SSF46689
MKDETFKSKGPELLVDLSLQVAQALIELADIGVDQANQLGREIADRMAGHWGGQNIYFPMGVSYRLSQRDRQIFDEFRGDNHAELARKFGVSLQWIYKIIKAVRREEIAARQRDLFASPTSTD

SEQ ID NO: 12249 - protein, 123 aa, Unknown
  Description of Unknown: Integrase A817 sequence
  G3DSA:1.10.10.60,SSF46689
MKDETFKSKGPELLVDLSLQVAQALIELADIGADQANQLGREIADRMAGHWGGQNIYFPMGVSYRLSQRDRQIFDEFRGDNHAELARKFGVSLQWIYKIIKAVRREEIAARQRDLFASPTSTD

SEQ ID NO: 12250 - protein, 123 aa, Unknown
  Description of Unknown: Integrase A818 sequence
  G3DSA:1.10.10.60,SSF46689
MAKLGRPTKYSDDVGEIVLDLMDKGKSICQVARHLNVCRKTIYNWMDENEDFLHTVTRAKDYSEAYWETEFQKMMYSRDSQPQLVRLYMGSRFGWREQDQTVNDDQATPKSIKVEVIDARQSN

SEQ ID NO: 12251 - protein, 123 aa, Unknown
  Description of Unknown: Integrase A819 sequence
  G3DSA:1.10.10.60,SSF46689
LTKQKIGRPTKYKDEYCDKAIKFLAGGKSVTQLSAHIDVCKDTIYEWAKVHQDFSDALTRGKELSQAHWESELVNMMYNKEVNSPLVKLYFANRFGWSDKTESKNENANVESVKSFSDMYGNS

SEQ ID NO: 12252 - protein, 123 aa, Unknown
  Description of Unknown: Integrase A820 sequence
  G3DSA:1.10.10.60,SSF46689
MSDTIAQATLDIDTLKRGIEVVLDNNSALALENENLRRLADSRYHTIGDLTAQLATAKRAFGDAFVKGIKQSGPTRINRPKLSERDARDIRQAHAGGMKQADLARNYGVNPATISRIVNRVYY

SEQ ID NO: 12253 - protein, 122 aa, Unknown
  Description of Unknown: Integrase A821 sequence
  G3DSA:1.10.10.60,SSF46689
MKKHIEMRLADGATLDDIKADVMQTAINTALVACYGSQTKASELLGINRWTMRKWLSNASKRTYKPFDRVCLDVGNGTAKEMLTESYREAVSQVMSTNNNVTMTAEILKCQRGTIRKYMVKP

SEQ ID NO: 12254 - protein, 122 aa, Unknown
  Description of Unknown: Integrase A822 sequence
  G3DSA:1.10.10.60,SSF46689
MMTDAGTMDPSDTYRDEDWLRSQHNENERSVQEIADDVGVNPSTIYNWLKKHGIATVKQGGPVYEADTKMLRDEPWLRKQYVDKERSIADIAGEVGVSQPTVSQWLDSHGIESPALEEHERD

SEQ ID NO: 12255 - protein, 122 aa, Unknown
  Description of Unknown: Integrase A823 sequence
  G3DSA:1.10.10.60,SSF46689
MTAGRPTKYKEELCKRSVAFLSKGKSVTQLSAHLDVSKSTIYKWAEDHKEYSDALTRGRELSQAHWEGELVDMMYNKEVNSPLVKLYFANRFGWSDKVESKNENANVEKVKSFSEMYGNSST

SEQ ID NO: 12256 - protein, 122 aa, Unknown
  Description of Unknown: Integrase A824 sequence
  G3DSA:1.10.10.60,SSF46689
AKSNAGRPSKYDESFLGITEKYLSQGKSVTQLAKHLNVAKSTIYKWAEENKEFSDALNIGREFSQAHWEDKLEDMMFNKEVNSPLVKLYFANRFGWSDKVESKNENANVEKVKSFSEMYAGK

SEQ ID NO: 12257 - protein, 122 aa, Unknown
  Description of Unknown: Integrase A825 sequence
  G3DSA:1.10.10.60, SSF46689
SKSNAGRPSKYDDSFLGVTEKYLAQGKSVTQLAKHLNVAKSTIYKWAEENKEFSDALNIGREFSQAHWEDKLEDMMFNKDVNSPLVKLYFANRFGWSDKVESKNENANVEKVKSFSEMYAGK

SEQ ID NO: 12258 - protein, 122 aa, Unknown
  Description of Unknown: Integrase A826 sequence
  G3DSA:1.10.10.60,SSF46689
MKKNIEMRLTDGATLNDIKADVMQTAINTALVACHGNQTKASELLGINRWTMRKWLNDASNRTYKLFDRVYLYVGNGTAKEMLTEAYIEAVSQVMQTNNNVTMVAEILKCQRGTVRKYMAKP

SEQ ID NO: 12259 - protein, 122 aa, Unknown
  Description of Unknown: Integrase A827 sequence
  G3DSA:1.10.10.60,SSF46689
MKKHIEMRLADGATLNDIKADVMHTAINAALVACHGNQTAASELLQINRWTMRKWLNDASKSAYKPFDVVCLDVGNSTAKEMLTEAYMEATSQVMQTNNNVTLVAEILKCQRSTVRKYMVKP

SEQ ID NO: 12260 - protein, 122 aa, Unknown
  Description of Unknown: Integrase A828 sequence
  G3DSA:1.10.10.60,SSF46689
MKQSSILAETRHELLDDIAAHTATVLSEHGIDAGLAEQAGHAVADHLANQWRGATLYIPSDYRHQVTKRDLQILSEFNGRNHHALARKYGLTPSSIYKLLKRIQDRKFERDQGKLDLGDGLA

SEQ ID NO: 12261 - protein, 122 aa, Unknown
  Description of Unknown: Integrase A829 sequence
  G3DSA:1.10.10.60,SSF46689
MKQSSILAETRHELLDDIAAHTATVLSEHGIDAGLAEQAGHAVADHLANQWRGATLYIPSDYRHQVTKRDLQILSEFNGRNHHALARKYGLTPSSIYKLLKRIQDRKFEHDQGKLDLGDGLA

SEQ ID NO: 12262 - protein, 122 aa, Unknown
  Description of Unknown: Integrase A830 sequence
  G3DSA:1.10.10.60,SSF46689
MKKHIEMRLADGATLNDIKADVMHSAINTALVACHGNQTAASELLQINRWTMRKWLNDASKRTYKPFEQAALCVGASTAKEMLTGAYMEAVSQVMQTNNNVTLAAEILKCQRGTVRKYMVKP

SEQ ID NO: 12263 - protein, 122 aa, Unknown
  Description of Unknown: Integrase A831 sequence
  G3DSA:1.10.10.60,SSF46689
MASVDDENSDDDTGRQAFNKRQVDIMRNWSNINFRDPYPTRKEKERMAAETKLTYRQVENWFSNWRMRVWLPNSKRQKSSTMDEEVKEPPSSHTEVAISPVVSTPVTPGLLRCRLSDFREAI

SEQ ID NO: 12264 - protein, 121 aa, Unknown
  Description of Unknown: Integrase A832 sequence
  G3DSA:1.10.10.60,SSF46689
MSNGNRLTPEQVKMILSMTREGCSARHIAEVVGCSSRTVVRVRADGDARVMGPELFTPLTQEQKDFARYLLDDGAPYNEVARTLGVSRTTIERNFPGYGWTKRQAAEFTALSKKFRRLEAS

SEQ ID NO: 12265 - protein, 121 aa, Unknown
  Description of Unknown: Integrase A833 sequence
  G3DSA:1.10.10.60,SSF46689
MSNGNRLTPEQVQTILLMTREGWSAKDIGEVVGCSARTVVRVRAAGDARLASPDQFVPLSQEQKDFAQYLLDDGAPYNEVARTLGVSRTTVEKYFPGYGWSKKQAAEFTALVKKFRWLEAS

SEQ ID NO: 12266 - protein, 121 aa, Unknown
  Description of Unknown: Integrase A834 sequence
  G3DSA:1.10.10.60,SSF46689
MPAPHPKRAEVLALARAGMRPVEIARQLEIASPTVNSMITCARAMGQDVPHFQRARPGTGVRGHLRVPLTDVARADLAEAAASRGVSLPVLASRVLEAAAEDGLVAAVLDDADETGGRADG

SEQ ID NO: 12267 - protein, 121 aa, Unknown
  Description of Unknown: Integrase A835 sequence
  G3DSA:1.10.10.60,SSF46689
MSNGNRLTPEQVKTVLAMTRDGFSAKHIGEVIGCSARTVVRVRARGEARVMDPELFTPLTQEQKDFARYLLDDGAPYQEVARTLGVSSTTIEKHFPGRAWTKRQAAEFTALLKKFRRLEAS

SEQ ID NO: 12268 - protein, 121 aa, Unknown
  Description of Unknown: Integrase A836 sequence
  G3DSA:1.10.10.60,SSF46689
MSNGNRLTPEQVQTILLMTREGWSAKHIGEVVGCSARTVVRVRAAGDARLASPDQFVPLSQEQKDFAQYLLDDGAPYNEVARTLGVSRTTVEKYFPGYGWSKKQAAEFRALVKKFRWLEAS

SEQ ID NO: 12269 - protein, 121 aa, Unknown
  Description of Unknown: Integrase A837 sequence
  G3DSA:1.10.10.60,SSF46689
MSNGNRLTPEQVKTVLAMTRDGFSAKHIGEVIGCSARTVVRVRARGEARVMDPELFTPLTQEQKDFARYLLDDGAPYEEVARTLGVSSTTIERHFPGRGWTKRQAAEFTALLKKFRRLEAS

SEQ ID NO: 12270 - protein, 121 aa, Unknown
  Description of Unknown: Integrase A838 sequence
  G3DSA:1.10.10.60,SSF46689
MSNGNRLTPEQVQTILLMTREGWSAKHIGEVVGCSARTVVRVRAAGDARLASPNQFVPLSQEQKDFAQYLLDDGAPYNEVARTLGVSRTTVEKYFPGYGWSKKQAAEFRALVKKFRWLEAS

SEQ ID NO: 12271 - protein, 121 aa, Unknown
  Description of Unknown: Integrase A839 sequence
  G3DSA:1.10.10.60,SSF46689
MSKRWTAEEDKLLAVLMLKYIQGGESVRKSALIASKEMKNRTYEACYTRWTKTLKKKNDSPLKKEDYDKAFITLIIDLFKENQLLSYRLTGLERKYQKIEKKIEIEQKPVRRIGFLIEENE

SEQ ID NO: 12272 - protein, 121 aa, Unknown
  Description of Unknown: Integrase A840 sequence
  SSF46689, PF02796
MSNGNRLTPEQVQTILLMTRERCSAKHIGEVVGCSARTVVRVRAAGDARLASPDQFVPLSQEQKDFAQYLLDDGAPYNEVARTLGVSRTTVKKYFPGYGWSKKQAAEFRALVKKFRWLEAS

SEQ ID NO: 12273 - protein, 121 aa, Unknown
  Description of Unknown: Integrase A841 sequence
  G3DSA:1.10.10.60,SSF46689
MSNGNRLTKEQVKMILSMTRDGFSARHIAEVVGCSPRTVTRVRAAADARVMNPDRFTPLTADQLEFAEYLVEDGASYQEVARTLGVSRTTIERHFPGRAWTKRQAAEFTALLKKFRRLEAS

SEQ ID NO: 12274 - protein, 121 aa, Unknown
  Description of Unknown: Integrase A842 sequence
  G3DSA:1.10.10.60,SSF46689
MSNGNRLTPEQVKTVLAMTRDGFSAKHIGDVIGCSARTVVRVRARGDARVMDPELFTPLTQEQKDFARYLLDDGAPYQEVARTLGVSSTTIEKHFPGRAWTKRQAAEFTALLKKFRRLEAS

SEQ ID NO: 12275 - protein, 121 aa, Unknown
  Description of Unknown: Integrase A843 sequence
  G3DSA:1.10.10.60,SSF46689
MSNGNRLTNEQVKRILSMTRDGFSARHIAEVVGCSPRTVTRVRAAADARVMNPDRFTPLTADQLEFAEYLLEDGAPYQEVASTLGVSRTTIEKHFPGRAWKPKQIAEYQSLMVRFRRLEAS

SEQ ID NO: 12276 - protein, 121 aa, Unknown
  Description of Unknown: Integrase A844 sequence
  G3DSA:1.10.10.60,SSF46689
MSNGNRLTPEQVKTVLAMTRDGFSARHIAEVVGCSPRTVTRVRAAADARVMNPDRFTPLTADQLEFAEYLLEDGAPYQEVASTLGVSRTTIEKHFPGRAWKPKQIAEYQSLMVRFRRLEAS

SEQ ID NO: 12277 - protein, 121 aa, Unknown
  Description of Unknown: Integrase A845 sequence
  G3DSA:1.10.10.60,SSF46689
MSNGNRLTNEQVKMILAMTRDGFSARHIAEVVGCSPRTVTRVRAAADARVMNPRRFTPLTADQLEFAEYLLEDGAPYQEVARTLGVSRTTIEKHFPGRAWTKRQAAEFTALLKKFRRLEAS

SEQ ID NO: 12278 - protein, 121 aa, Unknown
  Description of Unknown: Integrase A846 sequence
  G3DSA:1.10.10.60,SSF46689
MSNGNRLTPEQVQTILLMTREGWSAKHIGEVVGCSARTVVRVRAAGDARLASPDQFVPLSQEQKDFAQYLLDDGAPYREVARTLGVSRTTVEKYFPGYGWSKKQAAEFRALVKKFRWLEAS

SEQ ID NO: 12279 - protein, 121 aa, Unknown
  Description of Unknown: Integrase A847 sequence
  G3DSA:1.10.10.60,SSF46689
MSNGNRLTNEQVKRILSMTRDGFSARHIAEVAGCSPRTVTRVRAAADARVMNPDRFTPLTADQLEFAEYLLEDGASYQEVARTLGVSRTTIEKHFPGRAWTKRQAAEFTALLKKFRRLEAS

SEQ ID NO: 12280 - protein, 121 aa, Unknown
  Description of Unknown: Integrase A848 sequence
  G3DSA:1.10.10.60,SSF46689
MSNGNRLTPEQVQTILLMTREGWSAKHIGEVVGCSARTVVRVRAAGDARLASPDQFVPLSQEQKDFAQYLLDDGAPYNEVARTLGVSWTTVKRYFPGYGWSKKQAAEFTALVKKFRWLGAS

SEQ ID NO: 12281 - protein, 121 aa, Unknown
  Description of Unknown: Integrase A849 sequence
  G3DSA:1.10.10.60,SSF46689
MSNGNRLTPEQVKMILSMTREGCSARHIAEVVGCSSRTVVRVRADGDARVMGPELFTPLTQEQKDFARYLLDDGAPYNEVARTLGVSWTTIERNFPGYGWTKRQAAEFTALSKKFRRLEAS

SEQ ID NO: 12282 - protein, 121 aa, Unknown
  Description of Unknown: Integrase A850 sequence
  G3DSA:1.10.10.60,SSF46689
MSNGNRLTPEQVQTILLMTREGWSAKHIGEVVGCSARTVVRVRAAGDARLASPDQFVPLSQEQKDFAQYLLDDGAPYNEVARTLGVSRTTVERYFPGYGWSKKQAAEFTALVKKFRWLEAS

SEQ ID NO: 12283 - protein, 121 aa, Unknown
  Description of Unknown: Integrase A851 sequence
  G3DSA:1.10.10.60,SSF46689
MSATSTQQRATIADRRALVTDLTRAGLSAPQIAERLGITTRTVQRHRVAAGIAQPPARHLTPEQIEKARQLLVDGASYKEAARTIGCDKATVAKRFPGYAWTLSECGRWGRFLDRTRERSA

SEQ ID NO: 12284 - protein, 120 aa, Unknown
  Description of Unknown: Integrase A852 sequence
  G3DSA:1.10.10.60,SSF46689
MTTNVPIHREEVARRREAIAELTRAGLSAPEIAIRLNVTARTVVRHRALAGVSKPTHPRLTEEQLATARRLIDEGAPYKEIARTIGCHECTVAQRFPGRGWTRKQIDEWRRERRLWADAS

SEQ ID NO: 12285 - protein, 120 aa, Unknown
  Description of Unknown: Integrase A853 sequence
  G3DSA:1.10.10.60,SSF46689
MTTNVPTDREEVARRREAIAELTRAGLSAPEIALRLNVTARTVVRHRALAGVSKPTYPRLTEEQLATARRLIDEGAPYKEIARTIGCHESTVAQHFPGRGWTRKQIDEWRREVRLWVDAS

SEQ ID NO: 12286 - protein, 120 aa, Unknown
  Description of Unknown: Integrase A854 sequence
  G3DSA:1.10.10.60,SSF46689
MTTNVPIHREEVARRREAIAELTRAGLSAPEIAIRLNVTARTVVRHRALAGVSKPTHPRLTEEQLATARRLIDEGAPYKEVARTIGCHECTVAQRFPGRGWTRKQIDEWRREVRLWADAS

SEQ ID NO: 12287 - protein, 120 aa, Unknown
  Description of Unknown: Integrase A855 sequence
  G3DSA:1.10.10.60, SSF46689
MTTNVPTDREEVARRREAIAELTRAGLSAPEIAIRLNVTARTVVRHRALAGVSKPTHPRLTEEQLATARRLIDEGAPYKEIARTIGCHESTVAQHFPGRGWTRKQIDEWRREVRLWVDAS

SEQ ID NO: 12288 - protein, 120 aa, Unknown
  Description of Unknown: Integrase A856 sequence
  G3DSA:1.10.10.60,SSF46689
MTRWLQIKDDYLELHAEGITARQAAERLGVSPRTIQRTRDRLGLSQPTTGGGKRPTPEQLEYARQLLEDGCSMTDAARSAGTTFNALKRRWPDKVWDPTTVGQYARQLDQLKRLELGRTK

SEQ ID NO: 12289 - protein, 120 aa, Unknown
  Description of Unknown: Integrase A857 sequence
  G3DSA:1.10.10.60,SSF46689
MTTNVPTDREEVARRRETIAELTRAGLSAAEIALRLNITPRTVVRQRALAGVSKPTYPRLTEEQLATARQLIDEGAPYKEVARTIGCCQSTIAQRFPGRGWTRKQIDEWRREVRLWVDAS

SEQ ID NO: 12290 - protein, 120 aa, Unknown
  Description of Unknown: Integrase A858 sequence
  G3DSA:1.10.10.60,SSF46689
MTTNVPTDREEVARRRETIAELTRAGLSAAEIAVRLNITPRTVVRQRAAAGVSKPTYPRLTEEQIETARRLIDEGAPYKEVARTIGCCQSTVAQRFPGRGWTRKQIDEWRRERRLWAAAS

SEQ ID NO: 12291 - protein, 120 aa, Unknown
  Description of Unknown: Integrase A859 sequence
  G3DSA:1.10.10.60,SSF46689
MTTNVPIHREEVARRREAIAELTRAGLSAPEIAIRLNITARTVVRHRALAGVSKPTHPRLTEEQLATARRLIDEGAPYKEIARTIGCHESTVAQHFPGRGWTRKQIDEWRREVRLWVDAS

SEQ ID NO: 12292 - protein, 120 aa, Unknown
  Description of Unknown: Integrase A860 sequence
  G3DSA:1.10.10.60,SSF46689
MKEIRSQQIRRRNNMLSELAELIVEAFVRNGLSREKAVSESEELVFQLHRRWAGITFVFPVKDELARKRLELHILQRYDGSNADKLVREFGVTEDWIYSVVRKHRRQRRTDQLGLFDPAE

SEQ ID NO: 12293 - protein, 119 aa, Unknown
  Description of Unknown: Integrase A861 sequence
  G3DSA:1.10.10.60,SSF46689
MKEIRSQQIRRRNNMLSELAELIVEAFVRNGIPREKAVPESEEVAFQLHRRWAGLTFVFPVKDDLARKRLELHILQRYDGSNADKLVQEFGISEGLIYEIVRKHRRQRKDQMTLFDPAE

SEQ ID NO: 12294 - protein, 117 aa, Unknown
  Description of Unknown: Integrase A862 sequence
  G3DSA:1.10.10.60,SSF46689
MTTWKKLTPEQIERIVSLTWDGWSIEQIATDIGCTSRTVTRVRGKHNITRGRALDPIPVEKLAVAARLLEEGASYTEAANTVGCSRSVLAAKFPGRGWDRKQCAEWRSIIRMERAIA

SEQ ID NO: 12295 - protein, 117 aa, Unknown
  Description of Unknown: Integrase A863 sequence
  G3DSA:1.10.10.60,SSF46689
MKLNKKHQKAIELLFEGSLKRREIAEELNISEQTLYNWLKDEKFTNAYDEYVKMIMGKSSGKALHTMLKLMSARSEMVRFNAAKDILDRSGYTPVNKQQVEISETPLFVDDIGDDDG

SEQ ID NO: 12296 - protein, 117 aa, Unknown
  Description of Unknown: Integrase A864 sequence
  G3DSA:1.10.10.60,SSF46689
MRRGAKLPEWVVERIVALSWNGWTTGDIAKEVGCSDRTVSRVRVRHGISRGEAHDPIPEHVLAQAARLLDDGASYTDAAATVGCSRTALRRKFPGRGWDRRQCAEWRVIARMERAIA

SEQ ID NO: 12297 - protein, 117 aa, Unknown
  Description of Unknown: Integrase A865 sequence
  G3DSA:1.10.10.60,SSF46689
MRRGAKLPEWVVERIVALSWNGWTTGDIAKEVGCSDRTVSRVRVRHGISRGEAHNPIPEHVLAQAARLLDDGASYTDAAATVGCSRTALRRKFPGRGWDRRQCAEWRVIARMERAIA

SEQ ID NO: 12298 - protein, 117 aa, Unknown
  Description of Unknown: Integrase A866 sequence
  G3DSA:1.10.10.60,SSF46689
MRRGAKLPEWVVERIVALSWNGWTIGDIAKEVGCSDRTVSRVRVRHGISRGEAHDPIPEHVLAQAARLLDDGASYTDAAATVGCSRTALRRKFPGRGWDRRQCAEWRVIARMERAIA

SEQ ID NO: 12299 - protein, 117 aa, Unknown
  Description of Unknown: Integrase A867 sequence
  G3DSA:1.10.10.60,SSF46689
MRRGAKLPEWVVERIVALSWNGWTTGDIAKEVGCSDRTVSRVRVRHGISRGESHDPIPEHVLAQAARLLDDGASYTDAAATVGCSRTALRRKFPGRGWDRKQCAEWRSIIRMERAIA

SEQ ID NO: 12300 - protein, 117 aa, Unknown
  Description of Unknown: Integrase A868 sequence
  G3DSA:1.10.10.60,SSF46689
MTTWKKLTPEQIERIVSLTWDGWSIEQIAADIGCTSRTVTRVRGKHNITRGRALDPIPVEKLAVAARLLEEGASYTEAANTVGCSRSVLAAKFPGRGWDRKQCAEWRSIIRMERAIA

SEQ ID NO: 12301 - protein, 116 aa, Unknown
  Description of Unknown: Integrase A869 sequence
  G3DSA:1.10.10.60,SSF46689
MTPNIIIIVDNKMENTNALEINAAITLVTLRRNSVNFDTRKKTPQNNGNKIFRSRQPNKYQDVLTFIYQQHKYPDPHMYQNLSIILGLSIRQIQIWFQNRRARDSKKNRLSNKLGK

SEQ ID NO: 12302 - protein, 116 aa, Unknown
  Description of Unknown: Integrase A870 sequence
  G3DSA:1.10.10.60, SSF46689
MTPNIIIIVDNKMENTNALEINAAITLVTLRRNSVNFDTRKKTPQNNGNKIFHNRRPNKYQDVLTFIYQQHKYPDPHMYQNLSIILGLSIRQIQIWFQNRRARDSKKNRLSNKLGK

SEQ ID NO: 12303 - protein, 116 aa, Unknown
  Description of Unknown: Integrase A871 sequence
  G3DSA:1.10.10.60,SSF46689
MTPNIIIIVDNKMENTNALEINAAITLVTLRRNSVNFETHKKPRQNSENKIFRGRQPNKYQDVLTFIYQQYKYPDPHMYQNLSVILGLSIRQIQIWFQNRRARDSKKIRLNNKLEK

SEQ ID NO: 12304 - protein, 115 aa, Unknown
  Description of Unknown: Integrase A872 sequence
  cd00569,G3DSA:1.10.10.60,SSF46689
MTGRVLTPIEVEKVAWWTQLGWTAAQIADKLGCTTRTVSRARAKSGVAKPKPPALSAEVLAEAARMLADGASQNEVARTLGVGQSTISAHFRGQGWTREQSIEWVSFLRRYRGVA

SEQ ID NO: 12305 - protein, 115 aa, Unknown
  Description of Unknown: Integrase A873 sequence
  G3DSA:1.10.10.60,SSF46689
MTGRVLTPVEVEKVAWLTRMGWTATQIAEQLGCHHRTVQRARAKTGVAKPKPPALSTEILEEAARMLADGASQNEVARTLGVGQATISAHFRGQGWTREQSIEWISFIRRYRGVA

SEQ ID NO: 12306 - protein, 115 aa, Unknown
  Description of Unknown: Integrase A874 sequence
  G3DSA:1.10.10.60,SSF46689
MTGRVLTPVEVEKVAWLTRMGWTATQIAEQLGCHQRTVQRARAKTGVAKPKPPALSTEILEEAARMLADGASQNEVARTLGVGQATISAHFRGQGWTREQSIEWISFIRRYRGVA

SEQ ID NO: 12307 - protein, 115 aa, Unknown
  Description of Unknown: Integrase A875 sequence
  G3DSA:1.10.10.60,SSF46689
MTGRVLTPVEVEKVAWLTRMGWTAKQIAEQLGCHHRTVQRARAKTGVAKPKPPALSTEILEEAARMLADGASQNEVARTLGVGQATISAHFRGQGWTREQSIEWISFIRRYRGVA

SEQ ID NO: 12308 - protein, 115 aa, Unknown
  Description of Unknown: Integrase A876 sequence
  cd00569,G3DSA:1.10.10.60,SSF46689
MTGRVLTPVEVEKVAWLTRMGWTAPQIAEQLGCHHRTVQRARAKTGVAKPKPPALSAEVLAEAARMLADGASQNEVARTLGVGQATISAHFRGQGWTREQSIEWISFIRRYRGVA

SEQ ID NO: 12309 - protein, 115 aa, Unknown
  Description of Unknown: Integrase A877 sequence
  G3DSA:1.10.10.60,SSF46689
MTGRVLTPVEVEKVAWLTRMGWTAPQIAEQLGCHHRTVQRARAKTGVAKPKPPALSTEILEEAARMLADGASQNEVARTLGVGQATISAHFRGQGWTREQSIEWISFIRRYRGVA

SEQ ID NO: 12310 - protein, 114 aa, Unknown
  Description of Unknown: Integrase A878 sequence
  G3DSA:1.10.10.60,SSF46689
MKFTDTPTTTLDELLNSTRGNISQAAKVIGINRGTLRNYIAKKDKVLLVQIDGKLVVFVADRRQGSHKKATQKSELVFMWSDEHKEDRWHIRSGDYYYGPYDTKGEAEFMLERN

SEQ ID NO: 12311 - protein, 113 aa, Unknown
  Description of Unknown: Integrase A879 sequence
  G3DSA:1.10.10.60,SSF46689
MSKSIFSKEMDAFAIDILIRISMTLVESPIETEITEPVVKKLKGKREKIKNAGPLNEWFLSHLDYPYPNRAMRDELASRSGLTEKQVANWFGNARKRRPEYRKDAFVEDDDLW

SEQ ID NO: 12312 - protein, 112 aa, Unknown
  Description of Unknown: Integrase A880 sequence
  SSF53041,cd03768,PTHR30461:SF3,PF00239, PS51736,G3DSA:3.40.50.1390,PTHR30461,G3DSA:1.10.10.60,SSF46689, PF02796
MLVEELRDRGINFRSLTDSIDTSTPMGRFFFHVMGALAEMERELIVERTRAGLDAARAEGRIGGRRPKYQEETWQQMRRLLEKGIPRKQVAIIYDVAVSTLYKKFPASSFQS

SEQ ID NO: 12313 - protein, 112 aa, Unknown
  Description of Unknown: Integrase A881 sequence
  G3DSA:1.10.10.60,SSF46689
MTIPSNTCHTASYFTTGLEIMTKERILDVAYSMALSDGFSCLKRDDIAAKAGVAQGTINHHFKYISHLKDDVMKIAVEKGDLKIIAEGIVSGNTVALSASHALKMEALQSLA

SEQ ID NO: 12314 - protein, 110 aa, Unknown
  Description of Unknown: Integrase A882 sequence
  G3DSA:1.10.10.60,SSF46689
MDTFESELTLDMISEGMYRDIAEEIGVLNFLKVAKLVGGTTFYIPKAESLMRPVRDLHIKKEFNGYNHLELAQRYDVTERWVRQICGDGSIEGQVTIFDIGCENDMENTS

SEQ ID NO: 12315 - protein, 109 aa, Unknown
  Description of Unknown: Integrase A883 sequence
  G3DSA:1.10.10.60,SSF46689
MSDVMWQPGVTIADLEKGAIKSALRFYGNKTDAAKSLGISVRTIDNKLKEYENQKIASEQAAKIAREKKLAEFRGLSVGTDNEKEVILPRGDAEQKTPNPQSDADEYKK

SEQ ID NO: 12316 - protein, 109 aa, Unknown
  Description of Unknown: Integrase A884 sequence
  G3DSA:1.10.10.60,SSF46689
MEDLVKELTIDMVPDGDNRIIAETIGVENYYKLCSVVGGSTIYLQKPESVLRPVRDAHIKAEFNGYNHPELARKYGVTERWVRQLCGEGKLEGQMSLLDYGDEPENTTF

SEQ ID NO: 12317 - protein, 108 aa, Unknown
  Description of Unknown: Integrase A885 sequence
  G3DSA:1.10.10.60,SSF46689
MAKKNYSEEFRRDAVELYRDTGGATVAGIAADLGVSHGSLTTWLRNAGIPIRRPAATAPGPGTGETPEQEAARLRAEVAHLRAEKTKLETERDILRSAAKYFAGETNW

SEQ ID NO: 12318 - protein, 108 aa, Unknown
  Description of Unknown: Integrase A886 sequence
  G3DSA:1.10.10.60,SSF46689
MENLDILELNAAITLVSLRRNSVNIGIRKKNPQNKDKLNNFNYKCYPKKYQDILTFIYQQQKYPDPYMYKNLSITLGLTIHQIQTWFQNRRSRDNKKNILDNQPEINM

SEQ ID NO: 12319 - protein, 106 aa, Unknown
  Description of Unknown: Integrase A887 sequence
  G3DSA:1.10.10.60,SSF46689
MGKRWTDKEDETLLLILSTSPKASYKEVARSMNRTPCSIRARYLKLRKRWGDLPPRGGVYTPEERVRVATLAKKHTLKEIAEIMNRSVHAIRCYCFRNKITLKVRR

SEQ ID NO: 12320 - protein, 104 aa, Unknown
  Description of Unknown: Integrase A888 sequence
  G3DSA:1.10.10.60,SSF46689
MEKVIIIYHEHLNSFEESAVKILSGWKSERKNGIRFKMDGKKKCRLFTTCQLLILEEFYKANKYISMDKSIQLARTFGVTRKQINTWFQNKRAHDKRFESMNKN

SEQ ID NO: 12321 - protein, 104 aa, Unknown
  Description of Unknown: Integrase A889 sequence
  G3DSA:1.10.10.60,SSF46689
MENPTTLEINAAIILVKLRRNSVNFDTRKKTPQNNENKIFRSRRPNKYQDVLTFIYQQQKYPDPHMYQNLSIILGLSIRQIQIWFQNRRARDSKKIRLNNKLEK

SEQ ID NO: 12322 - protein, 101 aa, Unknown
  Description of Unknown: Integrase A890 sequence
  G3DSA:1.10.10.60, SSF46689
MDKKIIIIDRENFDSFEETAINILSKWKYERKNSIKPKMNYKFRKTRLFSPSQLIILNEFYKNNKYISIDKSIQLSRIFGVTRKQINTWFQNKRSYGKQQK

SEQ ID NO: 12323 - protein, 100 aa, Unknown
  Description of Unknown: Integrase A891 sequence
  G3DSA:1.10.10.60,SSF46689
MKKRNFSAEFKRESAQLVVDQKYTVADAAKAMDVGLSTMTRWVKQLRDERQGKTPKASPITPEQIEIRELRKKLQRIEMENEILKKATALLMSDSLNSSR

SEQ ID NO: 12324 - protein, 100 aa, Unknown
  Description of Unknown: Integrase A892 sequence
  G3DSA:1.10.10.60,SSF46689
MEKWMHKLKVEDLPEVYQNLAQVIGVDGVIKMTQEFGGTYMYIPKVDGLLRVARDQKIAEAHKNGDSIRKLAREFGISDSRVRTILNEYALDQNQLALFD

SEQ ID NO: 12325 - protein, 100 aa, Unknown
  Description of Unknown: Integrase A893 sequence
  G3DSA:1.10.10.60,SSF46689
MNKIIIIYCNHFDSFEESVVQILSNLQCQRKNGVKMTKVKKFRRSRLFTTTQLQILEETYKGNKYISLNEKIGLSKNFGVTVKQISIWFANRRAYDARKN

SEQ ID NO: 12326 - protein, 99 aa, Unknown
  Description of Unknown: Integrase A894 sequence
  G3DSA:1.10.10.60,SSF46689
MSKKHKTYTTEFKAEAIKLIEANQGNVSETARQLSISMQTLSNWNTKAKAGTLAGTKQYSPDLNALLEENKKLKQQLKIAEMEREFLKKAAAYFAKESQ

SEQ ID NO: 12327 - protein, 98 aa, Unknown
  Description of Unknown: Integrase A895 sequence
  G3DSA:1.10.10.60,SSF46689
MSGKRYPEEFKIEAVKQVVDRGHSVSSVATRLGITTHSLYAWIKAYGPDSSTNKVQSDAQAEIRRLQKELKRVTDERDILNLQRRTSQSCPTEVRLYP

SEQ ID NO: 12328 - protein, 98 aa, Unknown
  Description of Unknown: Integrase A896 sequence
  G3DSA:1.10.10.60,SSF46689
MELQDWRKEPRKKYSNEFKLRMVELASQPGACVAQIARENGVNDNVIFKWLRLWQNEGRVSRRLPVTTSSDTGVELLPVEITPDEQKEPVAAIAPSLY

SEQ ID NO: 12329 - protein, 97 aa, Unknown
  Description of Unknown: Integrase A897 sequence
  G3DSA:1.10.10.60,SSF46689
MNATELLDQLREKVEALEEENTHLSNQLEIGRRSFGKAFMNGAVRGPNRPNRRKLTPREVHDIRTAYRNGMSQAELARTYEVNPSTISRTIGRVYHS

SEQ ID NO: 12330 - protein, 97 aa, Unknown
  Description of Unknown: Integrase A898 sequence
  G3DSA:1.10.10.60,SSF46689
MTDRTRMKWTPELHAIFIDTCARLGGIYKAKPVEIMRLMNIPEISRDHVKSYLQKLRKEEDACNIALYGCSVKNTDATKKYNEICGLLNQAIKQMPE

SEQ ID NO: 12331 - protein, 96 aa, Unknown
  Description of Unknown: Integrase A899 sequence
  G3DSA:1.10.10.60,SSF46689
MSRKIRRHFTDDFKQQIVDLYNAGRKRSSLIKEYELTPSTFDKWVRQAKTTGSFKSVDNLTDEQRKLIELRKRNKELEMQLDILKQAAVIMAQKGK

SEQ ID NO: 12332 - protein, 96 aa, Unknown
  Description of Unknown: Integrase A900 sequence
  G3DSA:1.10.10.60,SSF46689
MSRKIRRHFTDDFKQQIVDLHNAGRKRSELIKEYDLTPSTFDKWVRQAKLTGSFKSVDNMTDEQRELIQLRKRNKELEMQLDILKQAAVIMVRKGK

SEQ ID NO: 12333 - protein, 95 aa, Unknown
  Description of Unknown: Integrase A901 sequence
  G3DSA:1.10.10.60,SSF46689
MLQRGSQPGRPLNPREGVSMTSKRWNAPYFMDSVGRRRKLSDSAMKAICREYRDGETVRELAESYGVSTSLIRSVVYWTPRAKDEPKIELSEDQG

SEQ ID NO: 12334 - protein, 95 aa, Unknown
  Description of Unknown: Integrase A902 sequence
  G3DSA:1.10.10.60,SSF46689
MPNQETLNRKKARKAEVARLLLAGMTQTAIAQIYGLSVSCISLYAKEMQIPCKADWYVSRNKILDLHRQGLRQSEIARKLALSRQRVSEIIKKFA

SEQ ID NO: 12335 - protein, 94 aa, Unknown
  Description of Unknown: Integrase A903 sequence
  G3DSA:1.10.10.60,SSF46689
MNDTQTSVLNAAMKLSRIHGFQHIKRDDIAETANVSTGIVSYYYSIPEMRDAVMQEAVRVNDAVIICQGLAAKHPIAQGAPEALRREAVELLLK

SEQ ID NO: 12336 - protein, 93 aa, Unknown
  Description of Unknown: Integrase A904 sequence
  G3DSA:1.10.10.60,SSF46689
MPRQRRTFTDDFKRQMVQLHENGKSRAAIINEYELSASALDRWIKQANQSGSFSEKDNRSLEENELIALRKENQRLKMEVDILKQAALIMGRK

SEQ ID NO: 12337 - protein, 93 aa, Unknown
  Description of Unknown: Integrase A905 sequence
  G3DSA:1.10.10.60, SSF46689
MSRAINTHEPRTAKMEVSLVSELLIKFYGNKSHVAEHLKLQRTTLNKYLNEYGDIMMMKFGDQWVPLTQLSRRHNEPKVDIQEVIDAINKVRL

SEQ ID NO: 12338 - protein, 92 aa, Unknown
  Description of Unknown: Integrase A906 sequence
  G3DSA:1.10.10.60,SSF46689
MGNKNTGKKYNEDFKKMIVDLYNSGSSAKDLSSEYGVSEVTIYAWVKKFSPIQTEDGSTVTADEIANMKKQMLRLQEENEILKKAMAIFAKK

SEQ ID NO: 12339 - protein, 91 aa, Unknown
  Description of Unknown: Integrase A907 sequence
  G3DSA:1.10.10.60,SSF46689
MAETPTLLRVLDEIEDILAENEDLRHEVEKLRAESLHAKGAGRPNRKKLSAEEAKYIREMARNGISQAEIAWSFDVNRSTISRIVRGIYHR

SEQ ID NO: 12340 - protein, 91 aa, Unknown
  Description of Unknown: Integrase A908 sequence
  G3DSA:1.10.10.60,SSF46689
MAETPTLLRVLDEIEDILAENEDLRHEVEKLRAQSLHAKGAGRPNRKKLSAEEAKYIREMARSGISQAEIAWSFDVNRSTISRIVRGIYHR

SEQ ID NO: 12341 - protein, 91 aa, Unknown
  Description of Unknown: Integrase A909 sequence
  G3DSA:1.10.10.60,SSF46689
MAETPTLLRVLDEIEDILAENEDLRHEVEKLRAESLHAKGAGRPNRKKLSAEEAKYIREMARSGISQAEIAWSFDVNRSTISRIVRGVYHR

SEQ ID NO: 12342 - protein, 91 aa, Unknown
  Description of Unknown: Integrase A910 sequence
  G3DSA:1.10.10.60,SSF46689
MADTSTLLKVLDEIEGLIEENEDLQHQVEKLRAESLHTKGAARPNRKKLTRDEVKYIREMARNGIPQAEIAWSFDVNRSTISRIVRGIYHR

SEQ ID NO: 12343 - protein, 91 aa, Unknown
  Description of Unknown: Integrase A911 sequence
  G3DSA:1.10.10.60,SSF46689
MAETPNLLRVLDEIEDILAENEDLRHQVERLRAESLHAKGAGRPNRKKLTPEEAKYIREMARSGIPQAEIAWSFDVNRSTISRIVRGIYHR

SEQ ID NO: 12344 - protein, 91 aa, Unknown
  Description of Unknown: Integrase A912 sequence
  G3DSA:1.10.10.60,SSF46689
MAETPTLLRVLDEIEDILAENEDLRLEVEKLRAESLHAKGAGRPNRKKLSAEEAKYIREMARSGISQAEIAWSFDVNRSTISRIVRGIYHR

SEQ ID NO: 12345 - protein, 91 aa, Unknown
  Description of Unknown: Integrase A913 sequence
  G3DSA:1.10.10.60,SSF46689
MSTFKRYDEEFKQSLVNLYQTGKTQSELCKDYGVSASALAKWIKQYSQVRLEDNSVLTAKQIQELQKRNAQLEEENLILKKASAIFMQNLK

SEQ ID NO: 12346 - protein, 90 aa, Unknown
  Description of Unknown: Integrase A914 sequence
  G3DSA:1.10.10.60,SSF46689
MREGRLSVVYLKEEEKQKRTIDAVKYMMKHNLTMNLAGRRYGLPRSTLHRFIHKHLEGWDKELYDEVIKFIKRRRKQIALEASYSYHGRP

SEQ ID NO: 12347 - protein, 87 aa, Unknown
  Description of Unknown: Integrase A915 sequence
  G3DSA:1.10.10.60,SSF46689
MRSLYSTCDVKIPIQKWKNTNKKKACGKKISGHSLDVLLRWYTAGFTPNAEQRFSLSQDLDLTPIQIKNWFYNKKRNEKKLKNNTLE

SEQ ID NO: 12348 - protein, 87 aa, Unknown
  Description of Unknown: Integrase A916 sequence
  G3DSA:1.10.10.60,SSF46689
MRSLYSTCDVKIPIQKWKNTNKKKACGKKISGHSLEVLLRWYTAGFTPNAEQRFSLSQDLDLTPIQIKNWFYNKKRNEKKLKYNTLE

SEQ ID NO: 12349 - protein, 87 aa, Unknown
  Description of Unknown: Integrase A917 sequence
  G3DSA:1.10.10.60,SSF46689
MADVREVADLLNRLNVIVRELVSENSQLKAAAAGKGNRPKLTDSEVSSVRELYRAGLSQRQIAEAYDVNPATISRIVRGIYHTKGGS

SEQ ID NO: 12350 - protein, 87 aa, Unknown
  Description of Unknown: Integrase A918 sequence
  G3DSA:1.10.10.60,SSF46689
MADVREVADLLNRLNTIVRELVSENSQLKAEAEGKASRPKLSPGEVSSIRELYRAGLSQKAIADTYDVNPATVSRIVRGIYHAKGGS

SEQ ID NO: 12351 - protein, 87 aa, Unknown
  Description of Unknown: Integrase A919 sequence
  G3DSA:1.10.10.60,SSF46689
MADVREVADLLNRLNVIVRELVSENSQLKAAAAGKGNRPKLTDSEVSSVRELYRAGLSQRQIAEAYDVNPATVSRIVRGIYHTKGGS

SEQ ID NO: 12352 - protein, 87 aa, Unknown
  Description of Unknown: Integrase A920 sequence
  G3DSA:1.10.10.60, SSF46689
MADVREVADLLNRLSTIVRELVSENSRLKAAVEGKSNRPKLTDNEVASIRELYRAGLSQKAIAEVYDVNPATISRLVRGIYHNKGGS

SEQ ID NO: 12353 - protein, 87 aa, Unknown
  Description of Unknown: Integrase A921 sequence
  G3DSA:1.10.10.60,SSF46689
MADVREVADLLNRLNGIVRELVSENSQLKAAVGGNSNRPKLTDNEVASIRELYRAGLSQKAIAEVYDVNPATISRLVRGIYHNKGGS

SEQ ID NO: 12354 - protein, 87 aa, Unknown
  Description of Unknown: Integrase A922 sequence
  G3DSA:1.10.10.60,SSF46689
MADVREVADLLNRLSTIVRELVSENSRLKAAVEGNSNRPKLTDNEVASIRELYRAGLSQKAIAEVYDVNPATISRLVRGIYHNKGGS

SEQ ID NO: 12355 - protein, 87 aa, Unknown
  Description of Unknown: Integrase A923 sequence
  G3DSA:1.10.10.60,SSF46689
MADVREVADLLNRLSTIVRELVSENSQLKAAVEGKSNRPKLTDNEVASIRELYRAGLSQKAIAEVYDVNPATISRLVRGIYHNKGGS

SEQ ID NO: 12356 - protein, 87 aa, Unknown
  Description of Unknown: Integrase A924 sequence
  G3DSA:1.10.10.60,SSF46689
MAEVREVADLLNRLNVIVRELVSENSQLKAAAAGKGNRPKLTDNEVSSVRELYRAGLSQRQIAEAYDVNPATISRIVRGIYHTKGGS

SEQ ID NO: 12357 - protein, 86 aa, Unknown
  Description of Unknown: Integrase A925 sequence
  PS51736,PS00397
MEVDYVTTKEACRITGFKAPTLRGWSNVGKVKTTRTLANQRLYDRQSLLSFIGGVNDGIEKEKIIYCRVSSKKQSEHFEHQIEFCK

SEQ ID NO: 12358 - protein, 84 aa, Unknown
  Description of Unknown: Integrase A926 sequence
  G3DSA:1.10.10.60,SSF46689
MREVADLLNRLNTIVRELVSENSQLKAEAEGKASRPKLSPGEVSSIRELYRAGLSQKAIADTYDVNPATVSRIVRGIYHAKGGS

SEQ ID NO: 12359 - protein, 84 aa, Unknown
  Description of Unknown: Integrase A927 sequence
  SSF53041,PTHR30461:SF3,PF00239,PS51736,G3DSA:3.40.50.1390, cd00569,PTHR30461,G3DSA:1.10.10.60,SSF46689, PF02796
MGRFFFHIMGALAEMERELIVERTRAGLAAAREQGRIGGRRPKLTPEQWAQAGRLIGAGVPRQQVAIIYDVGLSTLYRKFPARC

SEQ ID NO: 12360 - protein, 84 aa, Unknown
  Description of Unknown: Integrase A928 sequence
  G3DSA:1.10.10.60,SSF46689
MKSREFKSIVFGCEPQYEIEGLKTSQITVSTLQDLLVHTRGNQTKAAELLGAHRQTIKTMLQQNRPNVILIENVGDEYFYKLMK

SEQ ID NO: 12361 - protein, 84 aa, Unknown
  Description of Unknown: Integrase A929 sequence
  G3DSA:1.10.10.60,SSF46689
MKNLNNPLSTFIKLEKTQSELCKDYGVSASALAKWIKQYSQVRLEDNSVLTAKQIQELQKRNAQLEEENLILKKASAIFMQNLK

SEQ ID NO: 12362 - protein, 83 aa, Unknown
  Description of Unknown: Integrase A930 sequence
  G3DSA:1.10.10.60,SSF46689
MTSRYDKEFKQNIINLYKQGESAAQMAREYGIGYSTVHKWIQGQAKTQSGKSPDEIKAMEKRLASLSEENEILKKALGFLAQK

SEQ ID NO: 12363 - protein, 83 aa, Unknown
  Description of Unknown: Integrase A931 sequence
  G3DSA:1.10.10.60,SSF46689
MADVREVADLLNRLNVIVRELVSENSQLKAAAAGKGNRPKLSDNEVSSVRELYRAGLSQRQIAEAYDVNPATISRIVRGIYHT

SEQ ID NO: 12364 - protein, 83 aa, Unknown
  Description of Unknown: Integrase A932 sequence
  G3DSA:1.10.10.60, SSF46689
MADVREVADLLNRLNTIVRELVSENSQLKAAAAGKGNRPKLTDSEVSSVRELYRAGLSQRQIAEAYDVNPATISRIVRGIYHT

SEQ ID NO: 12365 - protein, 83 aa, Unknown
  Description of Unknown: Integrase A933 sequence
  G3DSA:1.10.10.60,SSF46689
MADVREVSDLLNRLNVIVRELVSENSQLKAAAVGKGNRPKLTANEVSSVRELYRAGLSQRQIAEAYDVNPATISRIVRGIYHT

SEQ ID NO: 12366 - protein, 83 aa, Unknown
  Description of Unknown: Integrase A934 sequence
  G3DSA:1.10.10.60,SSF46689
MSTFKRYDEEFKQSLVNLYQTGKTQSELCKDYGVSASALAKWIKQYSQVRLEDNSVLTAKQIQELQKRNAQLEEENLESVTLN

SEQ ID NO: 12367 - protein, 80 aa, Unknown
  Description of Unknown: Integrase A935 sequence
  G3DSA:1.10.10.60,SSF46689
MRSLYSTCDVKIPIQKWYNINKKKACGKKISGHSLDVLLRWYTAGFTPNAEQRFSLSQDLDLTPIQIKNWFYNKKRNEKN

SEQ ID NO: 12368 - protein, 77 aa, Unknown
  Description of Unknown: Integrase A936 sequence
  G3DSA:1.10.10.60,SSF46689
MKLKRKVRRGEMTKTSIDQEIDEAIAKGGSFYKIRRRFEKAILERALIKTRGNQTEAAKMLGISRSGLGGILKRVGR

SEQ ID NO: 12369 - protein, 76 aa, Unknown
  Description of Unknown: Integrase A937 sequence
  PS51736,cd00569,G3DSA:1.10.10.60,SSF46689,PF02796
MFGALGEFERNLMIERVNAGIESAKAKGRVGGRPKSMTPEQIKMARDLVDAGHNKTDIAEQMGVSRATLYRNLETA

SEQ ID NO: 12370 - protein, 74 aa, Unknown
  Description of Unknown: Integrase A938 sequence
  cd00569,G3DSA:1.10.10.60,SSF46689,PF02796
MAIIRAVCSVHFRAGLAAARAQGRVGGRRPKLTPEQWEQAGRLLAAGETRHRVGLLFDVSISTLYKKFPVNQSR

SEQ ID NO: 12371 - protein, 74 aa, Unknown
  Description of Unknown: Integrase A939 sequence
  SSF53041,cd03768,PF00239,PS51736,SM00857, G3DSA:3.40.50.1390,PS00397,PTHR30461
MLIGYVRVSTNEQNTALQRNALESAGCELIFEDKASGKKAERPGLKKVLRMLSRGDTLVVWALDHFAGSSVTWL

SEQ ID NO: 12372 - protein, 74 aa, Unknown
  Description of Unknown: Integrase A940 sequence
  G3DSA:1.10.10.60,SSF46689
MKFTDTPTTTLDEVLISTRGNISQAAKAIGINRGTLRNYIAKKDKVLLVQVDGKLVPFVADRRQGSHKKESNND

SEQ ID NO: 12373 - protein, 74 aa, Unknown
  Description of Unknown: Integrase A941 sequence
  G3DSA:1.10.10.60,SSF46689
MKFTDTPTTTLDELLISTRGNISHAATKIGITRTTLRNYIAKKDKVLLVQVDGKLVPFVADRRQGSHKKESNNG

SEQ ID NO: 12374 - protein, 74 aa, Unknown
  Description of Unknown: Integrase A942 sequence
  G3DSA:1.10.10.60,SSF46689
MKFTDTPTTTLDELLIKHRGNISHAALELGINRTTLRNYIAKKDKVLLVQIDGKLVPFVADRRQGAHKKESNNG

SEQ ID NO: 12375 - protein, 74 aa, Unknown
  Description of Unknown: Integrase A943 sequence
  G3DSA:1.10.10.60,SSF46689
MKFTDTPTTTLDEVLISKRGNISQAAKAIGINRGTLRNYIAKKDKVLLVQVDGKLVPFVADRRQGAHKKESNNG

SEQ ID NO: 12376 - protein, 74 aa, Unknown
  Description of Unknown: Integrase A944 sequence
  G3DSA:1.10.10.60,SSF46689
MKFTDTPTTTLDELLEFTHGNKSHAATKIGITRTTLRNYIAKKDKVLLVQVDGKLVPFVADRRQGAHKKELNNG

SEQ ID NO: 12377 - protein, 74 aa, Unknown
  Description of Unknown: Integrase A945 sequence
  G3DSA:1.10.10.60,SSF46689
MKFTDTPTTTLDEVLISTRGNKSHAATKIGITRTTLRNYIAKKDKVLLVQVDGKLVPFVADRRQGAHKKESNNG

SEQ ID NO: 12378 - protein, 73 aa, Unknown
  Description of Unknown: Integrase A946 sequence
  G3DSA:1.10.10.60,SSF46689,PF02796
MFLLYCRGTGEIGGRRPKLSPEQWAQAGRLIGAGIPRQQVAIIYDVGLSIHGLYWILLSANRKGVKKRDYRAN

SEQ ID NO: 12379 - protein, 72 aa, Unknown
  Description of Unknown: Integrase A947 sequence
  G3DSA:1.10.10.60,SSF46689
MQTQNNVRTTNIEVATIKDAMAFNYGNQRGMAKHLGINRGTLAKKLASNRDYYVRVHRDGWNNITHLEWLNK

SEQ ID NO: 12380 - protein, 72 aa, Unknown
  Description of Unknown: Integrase A948 sequence
  G3DSA:1.10.10.60,SSF46689
MKFTDTPTTTIDEVLISTRGNVTHAAKKIGVTRDTLRRYIQKKDKVLLVEVDGKLMAFVADRRQGHHKKEGK

SEQ ID NO: 12381 - protein, 71 aa, Unknown
  Description of Unknown: Integrase A949 sequence
  G3DSA:1.10.10.60,SSF46689
MKFTDTKTTTIDEVLINTRGNITHAAKKIGVTRDTLRRYIQKKDKVLLVEIDGKLVVFVADRRQGHHKKAN

SEQ ID NO: 12382 - protein, 71 aa, Unknown
  Description of Unknown: Integrase A950 sequence
  G3DSA:1.10.10.60,SSF46689
MKFTDTPTTTLDELLIKHRGNISHAALELGINRTTLRNYNKKKDKVLLVQVDGKLVPFVADRRQGAHKKAS

SEQ ID NO: 12383 - protein, 71 aa, Unknown
  Description of Unknown: Integrase A951 sequence
  G3DSA:1.10.10.60, SSF46689
MKFTDTPTTTLDEVLISTRGNISQAAKAIGINRGTLRNYIAKKDKVLLVQVDGKLVVFVADRRQGAHKKAN

SEQ ID NO: 12384 - protein, 71 aa, Unknown
  Description of Unknown: Integrase A952 sequence
  G3DSA:1.10.10.60,SSF46689
MKFTDTPTTTIEELLIKHRGNISHAALELGINRTTLRNYNKKKDKVLLVQVDGKLVPFVADRRQGAHKKAS

SEQ ID NO: 12385 - protein, 71 aa, Unknown
  Description of Unknown: Integrase A953 sequence
  G3DSA:1.10.10.60,SSF46689
MKFTDTPTTTIDEVLISTRGNISHAAKKIGITRTTLRNYIAKKDKVLLVQIDGKLVPFVADRRQGSHKKGN

SEQ ID NO: 12386 - protein, 71 aa, Unknown
  Description of Unknown: Integrase A954 sequence
  G3DSA:1.10.10.60,SSF46689
MKFTDTPTTTIDEVLISTRGNISHAAKKIGVTRDTLRRYIQKKDRVFLVEVDGKLMAFVADRRQGHHKKGN

SEQ ID NO: 12387 - protein, 71 aa, Unknown
  Description of Unknown: Integrase A955 sequence
  G3DSA:1.10.10.60,SSF46689
MKFTDTPTTTLDELLEFTRGNKSHAATKIGITRTTLRNYIAKKDKVLLVQIDGKLVPFVADRRQGAHKKAS

SEQ ID NO: 12388 - protein, 70 aa, Unknown
  Description of Unknown: Integrase A956 sequence
  G3DSA:1.10.10.60,SSF46689
MRELVSENSQLKAEAEGKASRPKLSPGEVSSIRELYRAGLSQKAIADTYDVNPATVSRIVRGIYHAKGGS

SEQ ID NO: 12389 - protein, 70 aa, Unknown
  Description of Unknown: Integrase A957 sequence
  G3DSA:1.10.10.60,SSF46689
MKFTDTPTTTLDELLNSTRGNISQAAKAIGINRGTLRNYIAKKDKVLLVQVDGKLVVFVADRRQGHFKKA

SEQ ID NO: 12390 - protein, 70 aa, Unknown
  Description of Unknown: Integrase A958 sequence
  G3DSA:1.10.10.60,SSF46689
MKFTDTPTTTLDEVLISTRGNISQAAKAIGINRGTLRNYIAKKDKVLLVQVDGKLVVFVADRRQGSHKKA

SEQ ID NO: 12391 - protein, 68 aa, Unknown
  Description of Unknown: Integrase A959 sequence
  G3DSA:1.10.10.60,SSF46689
MLKTKSIQVCTVADVLVKTRGNQLQAAKILGIHRGSLFNWIKAGIEKEKLVRVEIHGDFEEKLTVINH

SEQ ID NO: 12392 - protein, 68 aa, Unknown
  Description of Unknown: Integrase A960 sequence
  G3DSA:1.10.10.60,SSF46689
MLKTKPTQVCTVADVLVKTRGNQLQAAKMLGIHRGSLFNWIKAGIEKEKLVRVEIHGDFEEKLTVINH

SEQ ID NO: 12393 - protein, 68 aa, Unknown
  Description of Unknown: Integrase A961 sequence
  G3DSA:1.10.10.60,SSF46689
MTTTAPAATTLTADQTTTARTLLEDGASYREVARTLGVPRHRVMRALPGYGWTYRDAGTFTASMRWAR

SEQ ID NO: 12394 - protein, 67 aa, Unknown
  Description of Unknown: Integrase A962 sequence
  G3DSA:1.10.10.60,SSF46689
MTHTIKTIPDMLIETYGNQTEVARRLSCHRNTVRRYLYDKEARYHAIVNGVLMIHQGGRGIYDRNQH

SEQ ID NO: 12395 - protein, 67 aa, Unknown
  Description of Unknown: Integrase A963 sequence
  G3DSA:1.10.10.60,SSF46689
MTHTVKTIPDMLIETYGNQTEVARRLSCHRNTVRRYLYDKEARHHAIVNGVLMIHQGGRGVYDRNQH

SEQ ID NO: 12396 - protein, 67 aa, Unknown
  Description of Unknown: Integrase A964 sequence
  G3DSA:1.10.10.60,SSF46689
MTHTVKTIPDMLIETYGNQTEVARRLSCHRNTVRRYLYDKEARYHAIVNGVLMIHQGGRGIYDRNQH

SEQ ID NO: 12397 - protein, 67 aa, Unknown
  Description of Unknown: Integrase A965 sequence
  G3DSA:1.10.10.60,SSF46689
MTHTIKTIPDMLIETYGNQTEVARRLSCHRNTVRRYLYDKEARHHAIVNGVLMIHQGGRGIYDRNQH

SEQ ID NO: 12398 - protein, 67 aa, Unknown
  Description of Unknown: Integrase A966 sequence
  G3DSA:1.10.10.60, SSF46689
MKATVHTIYELLPSTRGNITELARVLGCDRATIYKYMHDINGEFHSVVNGKLFVKPGLKGRHTRDKR

SEQ ID NO: 12399 - protein, 67 aa, Unknown
  Description of Unknown: Integrase A967 sequence
  SSF53041,PF00239,PS51736
MTREYATWPPIRAGQPRLEFSSAVWWSWPALREALAEFERSMIRERQREGIALAKARGVCTDLICPV

SEQ ID NO: 12400 - protein, 67 aa, Unknown
  Description of Unknown: Integrase A968 sequence
  G3DSA:1.10.10.60,SSF46689
MTHTVKTIPDMLIETYGNQTEVARRLSCHRNTVRRYLYDKEARYHAIVNGVLMIHQGGRGVYDRNQH

SEQ ID NO: 12401 - protein, 67 aa, Unknown
  Description of Unknown: Integrase A969 sequence
  G3DSA:1.10.10.60,SSF46689
MTHTIKTIPDVLIETYGNQTEVARRLSCHRNTVRRYLYDKEARHHAIVNGVLMIHQGGRGIYDRNQH

SEQ ID NO: 12402 - protein, 66 aa, Unknown
  Description of Unknown: Integrase A970 sequence
  G3DSA:1.10.10.60,SSF46689
MTKTSIDQEIDEAIAKGGSFYKIRSRFEKAILERVLIKTRGNQTEAAKMLGISRSGLGGILKRVSR

SEQ ID NO: 12403 - protein, 66 aa, Unknown
  Description of Unknown: Integrase A971 sequence
  G3DSA:1.10.10.60,SSF46689
MTKTPIDQEIDEAIANGESFYKIRKRFEKAILERALIKTRGSQTEAAKMLGISRTGLGGILKRVCR

SEQ ID NO: 12404 - protein, 65 aa, Unknown
  Description of Unknown: Integrase A972 sequence
  G3DSA:1.10.10.60,SSF46689
MNRSIEQEIDEAIANGESFYKIRKRFEKAILERALIKTRGSQTEAAKMLGISRTGLSGILKRVSR

SEQ ID NO: 12405 - protein, 65 aa, Unknown
  Description of Unknown: Integrase A973 sequence
  G3DSA:1.10.10.60,SSF46689
MKTTVDQEIDEAIANGESFYKIRSRVEKAILERALIKTRGNQTEAAKMLGISRTGLGGILKRVSR

SEQ ID NO: 12406 - protein, 62 aa, Unknown
  Description of Unknown: Integrase A974 sequence
  G3DSA:1.10.10.60,SSF46689
MTHTIHELLPTTRGNITELARILDCDRGTLRKYIKDKKGEFHVIVNGKLFVKPGFKGRIKHD

SEQ ID NO: 12407 - protein, 61 aa, Unknown
  Description of Unknown: Integrase A975 sequence
  G3DSA:1.10.10.60,SSF46689
MLTISDLLVMTRGNQSEVARMLKISRCTLTRYMKLKVEHMVLERNGQYNLFTNISEQYGNG

SEQ ID NO: 12408 - protein, 60 aa, Unknown
  Description of Unknown: Integrase A976 sequence
  G3DSA:1.10.10.60,SSF46689
MRDFNLKEETRKFQKSLIEQALIFNSSDVTKTSKSLGISRASLYRKMKELKVFTEEKENN

SEQ ID NO: 12409 - protein, 58 aa, Unknown
  Description of Unknown: Integrase A977 sequence
  G3DSA:1.10.10.60,SSF46689
MKKWTKEEEQELVRLTENAWDWNFPGYDWVRTHLEIDYPNGRTVNAIRQKYYSILNCR

SEQ ID NO: 12410 - protein, 56 aa, Unknown
  Description of Unknown: Integrase A978 sequence
  G3DSA:1.10.10.60,SSF46689
MHAKGAGRPNRKKLSAEEAKYIREMARNGISQAEIAWSFDVNRSTISRIVRGIYHR

SEQ ID NO: 12411 - protein, 51 aa, Unknown
  Description of Unknown: Integrase A979 sequence
  G3DSA:1.10.10.60,SSF46689
MNGYPKRIRNQILALHEQGMAINEISRRLRGLIDRDTVKRWVAEHKNSKGS

SEQ ID NO: 12412 - protein, 40 aa, Unknown
  Description of Unknown: Integrase A980 sequence
  G3DSA:1.10.10.60, SSF46689,PF02796
MTTEVVERCRRMLGTGATRQQVADVTGVDVKTIYKYLPAT

SEQ ID NO: 12413 - protein, 37 aa, Unknown
  Description of Unknown: Integrase A981 sequence
  G3DSA:1.10.10.60,PF02796
MYSKMKELRAVGMTYKQIAQSLNVSVATVFKHCKAGD

SEQ ID NO: 12414 - protein, 907 aa, Unknown
  Description of Unknown: Integrase A982 sequence
  IPR006119,cd00338,PF07508,PS51736,G3DSA:3.40.50.1390, SM00857,G3DSA:1.10.1660.10,IPR025827, IPR036162, PTHR30461,PF13408,SSF53041,PS51737,PF00239,IPR011109
MNGLSKITASHRSRTAAIYLRQSTYVQVRDNTESTLRQYDLVERAVELGWAREDVLVIDADLGRSAKFGSERLGFRDLVAQVCLGEVGAVFGLEVSRLARSSADFARLLELARLTDALLVDADGVYDLADINDRLLLGLKGSMSEAELHILAGRLHGAKRAAAGRGELRFPLPVGYVYDDEGCCVIDPDQEVQAAIADVFAVFQEQGSAFKVVGAYVGRRFPLRAYGGIWAGQLRWGKLTHSRVLGLLRNPCYAGTYVYGRYLTRRTVRPDGSVHTGIVLRPRAQWPIVLHGHHEGYISWDDYLANEAKLKANCTHDGARPPREGLALCQGIMLCGSCGRPMTTRYYEYQQAAYGCSSSRADHEATATCRSIRADAVDEPVARLLLSALSPGQIELALAAANEVTVRHSRSHRAAELAVERARFDAQRAERAFNAVEPENRLVARTLESRWEARLVALAEAEAALAQVREARPALPDRDGLRALAAGLPRLWWADTTKDRDRKRLLRTLISDVTLLPETDRARARIGVRWHTGATDVLDIRRPHTSAQVRKTPAAARELIAQLSPTRSNAEITAELARAGLMTGTGQCYTVAAVKWVRYTYQIPAPSPFQDGEVSVDQAAQILGISANAVYYWLTHGRLSGRKEPGGRWCIPWNEQVEAACRSQIDASGHLIPHDLVPREIRPGEITVQQAADRLGVVCHVLYYWIRLGRLTARKGPDTRWCIPWDQETETACRNWLARPEQFVPHGTGSRPLSEGHDELSIQQAAARLGALPAAIAYQIRAGRLTARHLRNGRVAIAWDDDIEADLRWQLAQPKHPGPTGPGSHPLPAEISENGEISVQDAAARLGIRAGTVYHWIYQGDLTAHRAAGGRVSIPWPPGVEAACHQRALNCRKFTPQSQMSTAGGAV

SEQ ID NO: 12415 - protein, 821 aa, Unknown
  Description of Unknown: Integrase A983 sequence
  IPR006119,PTHR30461:SF3,PF00239,cd00338,PF07508, PS51736,G3DSA:3.40.50.1390,SM00857,IPR011109,Coil, PTHR30461,mobidb-lite,PS51737,SSF53041,IPR036162
MDPRRPRSPRGAARPSPRPIEMVPRFHFRVPVRIRPPGQDRATARLRRRPRPCPDRPDRARFDTFSRTTMDEPTPDGDAVRPRPAAATDTDRLIDELVVAAHRRTPQEQCGQVGAIYARYSTKAQGSVGDQVRSVLEAAARLKIHVPREFVFYDEAVSGSRNRRPGLDRLRATLARRGAVQAVLVFATNRLGRTAYHAMQIVHEEMVGRDIRCVFTSNNIDTADGHTWQLLLQAYSMVDQMVVASAAAHIHAAHEAMFDQGLVHGAVTYGYRGREVGEGRGVRKGRPLREYEIDPEAAPWILRAFEWYAREGLSIGEVVRRLNAEPRAPRNPRLLAGWDHAAVRRMLGNPRYRGHWMYGETKAVCHPGKASTAHVRRDAPLKSARLEHLRIVPEDLWLRARARLAEGDRRAAGRKPRDGDHRSRPRALAGLFHCGAHGRRMQAGGGHGKMLICKDCMGTPRERRSLCSILNRRLALKLTCEALALRIRRDDGLATAIVAASRSAAASLQSPDPAHLVGLRTRIEALTRRIGFVMDNPGAEPRDVLEAKAKLQQLRRERSALESDLGRIEADAARAVEVPDEGAVREMLSRLGATLDEAAGEGDAPEDRAVREVVDALTGGRVDLFQEGGREPKRGWLRGSFRFDLERLARLAGFPAIPAPPDGPDPRELVRIDYREPAPCEAHATAVKALYDEGVLVKEIAARLGISRNLAAKALAWWHRSRDLEPPDGRSRRSSLPVDARSLTPPLYVRLADEALRLSEQGLLYEEVAARLGCDRNTAAKAIKRASELRGTPAQDGRSRRKTLDRYRRGRDADAAPPGTA

SEQ ID NO: 12416 - protein, 801 aa, Unknown
  Description of Unknown: Integrase A984 sequence
  PTHR30461:SF3,G3DSA:3.40.50.1390,SM00857,SSF53041,IPR006118, IPR011109,PF07508,IPR038109,PS00397,G3DSA:1.10.10.2600, IPR036162,cd00338,PS51736,PF13408,mobidb-lite,Coil,IPR006119, IPR025827,PTHR30461,PS51737,PF00239
MRVALYARVSTSHQVEHQTIEQQFERLTAHVRAHADAGWHVDPAHVFRDDGYSGAALSRPGLDRLRDAIKAREVDRVLVTAPDRLARNYVHQMVLLEEWSRSGCIAAFLDRPMSDDPHDHLLLQIRGAVAEYERTLIAERMRRGRLAKLRAGVLLPWTYAPYGYRLSPDRPRDPTGVVTEPAEAAVVAELFALYREPGASLMQLALHLDRRGIPTPSRTPRWSTPTIRGILRNPTYTGQIYAQRTQYRAPTQRRSATHPIGRPHGSAVPQPSDTWLLVGQVPAVVSREHFDLVQAKLATNRSFARRNNTAHSYLLRALVSCGCCGLACTGRTVNGRNRYYLCNGKGHTTFSHRATRCPARYTPAGQLDDVVWADLCALMSEPEPLAVAVERAHGGAWLPQDLLARRETLRRGREHLHQQLERLTDAYLRAVIPLDEYERRRRDLEQRVQALSAQEDQVRDETARRQHLAGVTASLEAFRVRVQGGLAQADFEQRRQLVMLLVDRVVVTGAEVEIRYVLPTSPDSEHVRFCQLRKDYFDDPTAWEQHEADLVGRLAHDFDGDDRGGRRSVAGIASIEGLGDEREASARQAQYQNGSVPVLHVGRLRIEDKRTPVRVDQRLALAAFDLLTGVVAARPAALHRFDGLAIEHCCRRRGFPSDTLAINHDEVVVDLCEQPCVAPAAEVAEGGRARWQILGDHPPCDAAAQNVEDRVQDLPRRPDRRPPARLRPRHQRLDHRPLGVGQVGFIAKAHAAMLPPGGRGPHGVSKSGFSTLLEASPSRPLNPASDPYRTGSQSHHTIYGK

SEQ ID NO: 12417 - protein, 748 aa, Unknown
  Description of Unknown: Integrase A985 sequence
  IPR006119,cd00338,PF07508,PS51736,G3DSA:3.40.50.1390, SM00857,IPR025827,PS51737,IPR036162,PF13408, PTHR30461,SSF53041,Coil,PF00239,IPR011109
MTAHSKVEGRHLRLLALVYIRQSTPQQVQNNQESTRRQYELAQRARQMGWPDTAVRVIDEDLGTSGARSQNRTGFQRLVASIGMGEVGIVLVTEVSRLSRLSSDWHRVIELCAVFRTLIADEDGVYDAQNPNDRLLLGVKGTLFAAELHILRARMHGALLNKAQRGELAVALPVGYRRRADGVVEQDPDEAVRLAVDTVFERFSALGNARGVLRHFIDNGLRLPRIVQAGPEKGQAVWVRPAYSMIHRMLSNPAYAGAFVYGRVRRDVAAGDPPTAVERRLPIEEWAIVVQGVYPAFISYDRFLANRQKLKANRYNFAVKERGAARAGAALLQGLVQCGRCGHQMGVSYGRQQPRYQCRQAQTHYAEPMCQSFVAGDIDAIVVEAFLQAMRPAELDATLAALRNLEQERQTVDRQWQLRLERTRYEARLAQRQYDAVDPDNRLVARELERRWEAALAEAEMLQQEYERLLAAELRPLDAVEAEDVRWLASDLPALWKADTTRPIDRKRLLRLAVAAVTVTVRPGRSGADIQVLWSGGAKTMHRASSPGHGRHLRTDAGVLGTIRDLAGRMPDHQVAAALTAQGLLSRHGKTWTRSRVASMRRQHAIPTACPAQTRGLTMRADGFVPARVAAQQLGITLAALRVWAHRGVLICDQSSDAAKIWVRLDPGDRERLGGEADTAGMERVRDLAQTSGSSISAVWERVRRKEFSAYRTRRGHNQWDWRLAPLIPALGATPGSQSSSAARTTAQ

SEQ ID NO: 12418 - protein, 741 aa, Unknown
  Description of Unknown: Integrase A986 sequence
  IPR006119,cd00338,PF07508,PS51736, G3DSA:3.40.50.1390,SM00857,IPR038109,IPR011109, IPR025827,PS51737,PF13408,PTHR30461, G3DSA:1.10.10.2600,SSF53041,Coil,PF00239,IPR036162
MIEHSKIATGHLARQAVVSLRQSSASQVENNRESTDRKYALSGRARELGWPAERIVVIDEDLGLSGSGSVMRSGFARLTSEVALARVGIVLGLEVSRLARNNADWHRLIELAGLTDTLIGDADGIYHPALFNDRLLLGLKGAMSEAELHVLRARLDGGIRNKAARGELRRGLPVGFIWGEDDGEILIHPDEAVSHVIRTIFARFAELGSARRVWLWLRANDIKFPLRLGEHQDLRWSEASYHGVHAVLANPVYAGAYVYGKNRHETVLDETGARRKRVRKLPRDEWQVLIKDHHQGYIDWPSFEVNQQRMATNTQPRPHSDASRHSAGAVREGGALLQGIAHCGHCGRRLRTHYRGRNAAPGYHCAGKIIVDGRGVYCLNIGGVQIDEAVAAAFLEALEPARLTATIEAAERLESDREATLKQSRLDVERAQFAVNRAKRRYRAVDPDNRLVARSLEREWEEALRALEVAKTELARREEARPRLLSSQERANLLTLGVDLVSVWHAPSTTARDHKELLRTLIEEVTLHVDRDNACARLTLRWKGGAIGQLEVALPRSRPATVRTDEDTLTLVRRLAPHYPDAVIAGVLNRQGRQTARGHRFDANRVGNLRRHWNIPACKARPQTADGDILTIRQAASVLGVAPSTLHRHLNDGLIRGEQITPGAPWRIRLTDELKARFLTTPDDGFEPIRDALDTLGLSRQALLQRVRHGELESVYVIRGQRKGLWIKTIDQNPTLFEHML

SEQ ID NO: 12419 - protein, 738 aa, Unknown
  Description of Unknown: Integrase A987 sequence
  IPR006119,PTHR30461:SF3,cd00338,PF07508,PS51736, G3DSA:3.40.50.1390,SM00857,IPR038109,IPR011109,PF13340, IPR025161,PTHR30461,G3DSA:1.10.10.2600,SSF53041,PS51737, PF00239,IPR036162
MKRLNGLFDEAARDRRALAAELGARPPRMPGAGELKGRSPVLLSLPDVWLDRHGGAAEIVHTPTAGRAAIYTRFSTSAQTQTSTERQVELCRTYCVRLGLEHDPDRDVYSDEARSGRNIWGRQSLQQMLDAVLAGQYRYVVIEDGDRLSRDLSDLSWLAKTLQEAGVELHSTTRGKLDSRHVVMDGLLSSETLAQMVVRADYSRRRRAQEGLCMGGVAFGYDRVPGQAGKCVVNPAQAEHVRWIYETYLAGTLSPTQIARDLQRRGVDGPSGTCSWNDGTVRRILSNPRYCGLLIYGRRQTWRNPADRTWCQRVTDPQTWIVAEVEDWVIVDRETWNRVQVRMKERSLLAPGGLAGTRAPARKVENLLTKRIKCPFCEEGFYAVDHSSKGESRIRCNRYAQERGCTNSRSYLMHMVEAAVVRCVGDALADEAGLAAFADAQARALQKRERAAVDERPRLERRIAAAEGELHATFKVPEGIGEAEWGRTVAGLQAKLARELGALRHELSNLGSAPPQSVSIDPDRLGDLRQAFSELAATAPFRPVDEAGQRLKAAFRDFVTGVILHPGEEPGEFRIEVTTQMGELVPGVQRSMNLSAHHRLPPTGFRGDPDRVMRAREMAERREFALTDAEWELVEPLVPPETGRGRWARDCIPARTLVDIALYRIEARVPWRQIPDTFGEPVMVLAAMRRLAFCGAWDRVLACLKASSPERFEGKDPHDVAVLGLLTRRSLEARRSPI

SEQ ID NO: 12420 - protein, 737 aa, Unknown
  Description of Unknown: Integrase A988 sequence
  IPR006119,SSF46955,PF00239,cd00338,PF07508, PS51736,G3DSA:3.40.50.1390,SM00857,IPR025827,IPR009061, Coil,IPR036162,PTHR30461,PF13408,PS51737, SSF53041,IPR011109
MSDTANKIGTSHLQRAAFVYIRQSSASQVEHNRESTQRQYALAQRATALGWSQQQVNVVDDDLGLSGASTARRGGFARMTAEVALGHVGIILGLEVSRLARNNADWYRLLDLCTMTDTLIGDADGVYNPAHFNDRLLLGLKGTMSEAELHILRARLDGGIRNKAARGELRRGLPTGLVWGEADGEVRLHPDEAVVSALHAVFARFNEFGSARRVWLWLRSENLSFPLQLNRNEQIRWVAPTYNAIYNVLTNPVYAGAYCYGKTRTERYVDKHGTLKTRLRRLPQSQWAVLIREHHEGYIDWATYEANQMRLAANTKPRPHETGGAVREGAALLQGLATCGHCGRSLKTHYRGTNQTPGYHCSNKGIENGRGVYCLNIGGLQIDTAVALAFLHAVEPAGLEAAVQAAERLEADHDAALAQWRLTVERTHYEALRAERRYRAVDPENRLVARGLETQWETQLRELEQAQAELSRREQLRPRTLNPEQRKSLLVLGKDLKQLWDAPNLTVRDRKQLLRTLLEEVSITVQREHYQAHLKLRWRGGKLTECDIALPRSRPATIRTDEDTIALVRRLAEHHPDAIIAGILNAQGRVTARGLRFNQSLVGNLRRHWHIPCFELPAVLPDGELLSIRQAARALGTAPSTLHRWVNDGFIAAEQTTPGAPWRIRITDSLRRRFVEHSPEGYVVMQEATKLLGVSRQTVSQRVKRGELDAVLVCHGRRKGLRIKAVNDQPDLFEHSS

SEQ ID NO: 12421 - protein, 733 aa, Unknown
  Description of Unknown: Integrase A989 sequence
  IPR006119,cd00338,PF07508,PS51736,G3DSA:3.40.50.1390, SM00857,PS51737,IPR036162,PTHR30461,SSF53041, Coil,PF00239,IPR011109
MTNVDRLPELLLKRKAVIYVRQSTQTQVQTNLESRRRQYDLVEEAKRRGFRDIEVIDEDMGRSASGAVARPGFERLVALLCAGEVGAVLCMDASRLARNGRDWHHLLELCGLVEARVIDLDGVYDPCRANDRLLLGMKGSISEFELNVLRTRMLDAKRAKAYRGDLRISVPFGYIWHREVGLGLDPNLRLQEVIRLIFARFRELGSARQVLLSLRAEQVHFPRPSDGRTLTHFDWIPVRYRNVISVLKNPFYAGAYVYGKSGKQMAIVDGRARKSYKHPKPFDEWDVLLREHHEGYIDWAEFERNQKQLATNAYGKAGDVKSSRGGRALLAGLLACARCGRRLFVAYTGRIPQPVYRCARFDMPPQCMSFGGSRIDAAIGKELLRVVEPMAIEAARQAEQMHVDTLNGQRRIVELELQQAQYEATLAERRYAACDPDNRLIAAQLEKNWEAALHRVLACQTRLETVSTPAADVPTPDFAKLAEDLTAAWNAPNVTMRMRQQLVRALIVDIVADVDETAREVILTIHWQGGQHSQLRVRKPGSGEHGCSTSDEALAVIRSMATRWSDQDIAASLNRMGMRTGQGKTWTAHRVSSIRRVRDIHAYRPAEKDGEWLTMSEAAKQLGITSHAIRRLINDRILPAEQVMGSSARQSSSSWPASRSLRACDGGSCKIQTDSPLPLCTMPARSDQSSSGPQIAWPTPVCAHRIDLPSADSFINEAVIVQLENFNFNVCLN

SEQ ID NO: 12422 - protein, 720 aa, Unknown
  Description of Unknown: Integrase A990 sequence
  IPR006119,cd00338,PF07508,PS51736, G3DSA:3.40.50.1390,SM00857,IPR025827,SSF53041, IPR036162,PF13408,PTHR30461,mobidb-lite, PS51737,PF00239,IPR011109
MNPKREAHNRRSEKIDDLHLDRLAVVYVRQSTLQQVLEHQESTRLQYGLVDRAEALGWQRERVLVIDEDLGKSGTTAVGRSGFQRLVAEVSLNHVGLILGIEMSRLARCSKDWHQLLEVCALFRTLIGDLDGIYDPSQYNDRLLLGLKGTMSEAELHVLKTRLLEGKLNKARRGELPFDPPIGYLRRPSGEVIFDPDEQAQQVVHLIFRKFEEIGTLNGVLRYLVRADIQIPVRIREGINRGDLEWRKPNRMTLQNLLKNPAYTGAYAYGRRQQDPRKQQPGRPKTGRVVNAPEDWHALVFDQFPAYISWEQYQQNLARLAANQSRAETIGAARHGAALLSGLLVCQYCGCRMTVHYSGQGKTHEYLCNRRLKDYADRGCQHIAGRSLDVAITQQVLQALEPAALELSLQAAQSIEQERTELDKLWQQKLERANIEAERSGRHYRQVEPENRLVARQLGKEWEAKLATVEQVQEDYQRFLAQEPLTLSEVERSAIRQLAQDIPTLWNANTTTNAHRKEIMRQLINRIVVEAQGQSEQVKLVIEWLGGFQSEQIVVRPVASFEQLSYYPQLCQQVQAFVVQGLDAAAIAAQLNQSGFRPPRLQGGFSHQSTLELLRRLGLHQRRPKGYNKEPLADGEWWIPGLARQIGIPDGTLYQWVKRGWIEGRKQEKPPYRWIIRADEAEIERLNKCRQMSFSDRMRQQWQGETSVLAQSNESDDERT

SEQ ID NO: 12423 - protein, 716 aa, Unknown
  Description of Unknown: Integrase A991 sequence
  IPR006119,cd00338,PS51736,G3DSA:3.40.50.1390,SM00857, IPR011109,IPR025827,PS51737,PF13408,PTHR30461, SSF53041,Coil,PF00239,IPR036162
MPWERANSKVCDRHLQRLAVVYVRQSTRQQVLSHQESTRLQYALKDRAVALGWEADRVLVIDDDLAMSATSAVARTGFQRLVTEIGLDHVGLVLGIEMSRLARSGKDWYQLIELCALSGALLADLDGVYDPADYNDRLVLGLKGTISEAELHLIKQRMWNGRLNKARRGELAFPLSSGYVRLPSGEVGFDPDEQVQTVIYLLFAQFERIGTLHGMLRYLVRHDIQLGIRLREGPDKGTLEWRRPNRMTLQTLLHNPAYADIYAYGRRRVDPRRKDPARPGTGRVVQARDEWLVMIPNVLPAYITITQFEANEARLAANRARAEATCAVRSGPALAAGLVFCGRCGRRMTVRYHTQHGHNLPEYMCVREVTNYGADKTCQLLNAACVDAFVEQQVLIALTPAAVEVSLDAADQVVAERAELEKLWSQKLERAEYEADRARRCYHLAEPENRLVVRQLEKEWETALAAQQKLREDHERFTRTSPRVLTAAERQTITALASDIDGLWHARTTTITDRKETVRAIVDKVVITVIGTTERVQAMLVWAGGATTSGELVRPVQGLEQLSYYPQLAARVRELAGQGARSTAITRHLEAEGFRPAKRGKRITEPTVRALMRRLGCMPDRVQPRRLAPPGEEPGPDEWWLDQLADELDMPMGTLHSWIRCGWLTIRKETRHPYRVIAHADQAELAVLHERRTRPPGWYSRRLWADSTDELTHPHS

SEQ ID NO: 12424 - protein, 705 aa, Unknown
  Description of Unknown: Integrase A992 sequence
  IPR006119,SSF46955,cd00338,PF07508,PS51736,G3DSA:3.40.50.1390, SM00857,IPR025827,IPR009061,IPR036162,PF13408,PTHR30461,SSF53041 ,PS51737,PF00239,IPR011109
MNVHLKVQPHHLERGAYLYIRQSSMRQVVENVESARRQYALRGRAVALGWRDEQIIVIDNDQGESGASAAWREGFQRLVSDVGMGHAGIVMGLEVSRLARNNADWQRLLEICALADTLILDEDGVYDPASFNDRLLLGLKGTMSEAELHVIKARLRGGILNKVRRGEFRCLLPTGLVYDHFGNVTLDPDMQVRETIIHFFEMFSRLGSASQTVKVFRNEGLLFPSRLHNGDTLFRPLTASTAMRVLNNPRYAGAYTYGRRQFRRTIDGKKTLRARDIDDWPACIPDAHPGYISWERHQENLKILKANGRGFEAARASIPREGPALLQGRAVCGQCGSHLRVRYAARRGRQEAWYICNRARIYRGEPMCQSIAGPPVDEAIGMLIAEQMTPAAVELALEVRKEIQARHEEADRLRCRAIERAQTEAELAQRRFMLVDPSNRLVADTLEGEWNEKLRTLASAREERERGREHDQFILDKAVHERLVAMTADFNQLWKDPDTPSRERKRLLAHIIEDVTLLKLPAEGTTKLHVRFKGGKIQTLTTMNPKSSPQQIKTKPSIIELVDRLLDDYIYPEIAEILNEQGHRPGGTARRGCQDARFTPLKVAYLIHEYKLRSRYDRLRQRGMLTRQEAAAHLNISEQTVARWAKFGLITRHAYNGHYSLYEIADGDLPQKQCSRWNPLEDRAAAYRQMQTEPRTSTGEERGVV

SEQ ID NO: 12425 - protein, 705 aa, Unknown
  Description of Unknown: Integrase A993 sequence
  IPR006119,SSF46955,PF00239,cd00338,PF07508, G3DSA:1.10.1660.10,G3DSA:3.40.50.1390,SM00857,PS51736,IPR025827, IPR009061,PS51737,IPR036162,PF13408,PTHR30461, Coil,SSF53041,IPR011109
MSDATRSPKLRPWHLDRAAFVYVRQSTPQQVLDHRESTDRQYALADRAVALGWPRDRVTTIDDDLGKSGQSIEGRPGFQRLLAEVALDNVGLILGLEMSRLARSNRDWHQLLELCARFRVLLADADAVYDPADHNDRLLLGLHGMLNEAELHVIKERMCQGRLNKARRGEPMGSPPLGYVRLASGEWAIDPDEQVQATVRLIFDRFDREGTLHGLLRYLVHHGVRIPIRPRHGPNRGGLEWRRPNRPTLSNVLHHPAYAGAYRFGHREVDPRRKRPGRPDTGKLVRRPEECLVLIRDRLPAYITWERFCDNQERLEANRARRDRPGAPRQGASLLAGLLRCGRCGRRMLVRYSGATGRYSYTCARGAADHAEPICQSLSGPALDGLVAGRVLAAVEPAALEASLAAVAEVERERSELARHWRLRLERAGCEADRAARQYQACEPENRLVGRELERRWEEALRAQRRLEDEHERWRGSAPGRLSPDDERTIRSLAGDLPAVWQATTTTPAERQRIARLLIDHVSVTVDKASERVDVTLHWSGGMTESHAMSRPVKRYDLLADYPRLVERLRGWRAERLSPAAMAERLNVEGFRPPKRAERFTRGMVQRLLWHLGLARTPFGSPAGLGRDEYRPSSLARRLGVSRDTVRRWVRVGWLTAHRDAQGHHVIWADGSELRRLRELRRLPRTWANKGRLAELTRPRPRPGR

SEQ ID NO: 12426 - protein, 705 aa, Unknown
  Description of Unknown: Integrase A994 sequence
  IPR006119,cd00338,PF07508,PS51736,G3DSA:3.40.50.1390, SM00857,IPR025827,SSF53041,IPR036162,PTHR30461, PF13408,mobidb-lite,PS51737,PF00239,IPR011109
MNVHLKVQPHHLERGAYLYIRQSSMRQVVENVESARRQYALRGRAVALGWRDEQIIVIDNDQGESGASAAWREGFQRLVSDVGMGHAGIVMGLEVSRLARNNADWQRLLEICALADTLILDEDGVYDPASFNDRLLLGLKGTMSEAELHVIKARLRGGILNKVRRGEFRCLLPTGLVYDHFGHVTLDPDMQVRETIIHFFEMFSRLESASQTVKVFRNEGLLFPSRLHNGDTLFRPLTASTAMRVLNNPRYAGAYTYGRRQFRRTIDGKKTLRARDIDDWPACMPDAHPGYISWERHQENLKILKANGRGFEAARASIPREGPALLQGRAVCGQCGNHLRVRYAARRGRQEAWYICNRDHIYRGEPMCQSIAGPPVDEAIGMLIAEQMTPAAVELALDVRKEIQARHEEADRLRCRAIERAQTEADLAQRRFMLVDPNNRLVADTLEGEWNEKLRILANAREERERGREHDQFILDKAVHERLVAMTADFNELWKDPDTPSRERKRLLAHIIEDVTLLKLPAEGTTKLHVRFKGGKIQTLTTMNPQSSAQQIKTKPNIVELIDKLLDDYIYPEIAEILNEQGHRPGGTARRGCHDARFTPLKVAYLIHEYKLQSRYDRLRQRGMLTRQEAAVHLNISEQTVARWAKYGLIARHAYNGHYSLYEIPDGDLPQKQCSRWNQLQDRTAARQQTQTEPRTSTGEERGVV

SEQ ID NO: 12427 - protein, 705 aa, Unknown
  Description of Unknown: Integrase A995 sequence
  IPR006119,SSF46955,PF00239,cd00338,PF07508,PS51736,G3DSA:3.40. 50.1390,SM00857,IPR025827,IPR009061,IPR036162,PTHR30461,PF13408 ,PS51737,SSF53041,IPR011109
MNVHLKVQPHHLERGAYLYIRQSSMRQVVENVESARRQYALRGRAVALGWRDEQIIVIDNDQGESGASAAWREGFQRLVSDVGMGHAGIVMGLEVSRLARNNADWQRLLEICALADTLILDEDGVYDPASFNDRLLLGLKGTMSEAELHVIKARLRGGILNKVRRGEFRCLLPTGLVYDHFGNVTLDPDMQVRETIIHFFEMFSRLGSASQTVKVFRNEGLLFPSRLHNGGTLFRPLTASTAMRVLNNPRYAGAYTYGRRQFRRTIDGKKTLRARDIDDWPACIPDAHPGYISWERHQENLKILKANGRGFEAARASIPREGPALLQGRAVCGQCGSHLRVRYAARRGRQEAWYICNRARIYRGEPMCQSIAGPPVDEAIGMLIAEQMTPAAVELVLEVRKEIQARHEEADRLRCRAIERAQTEAELAQRRFMLVDPSNRLVADTLEGEWNEKLRTLASAREERERGREHDQFILDKAVHERLVAMTADFNQLWKDPDTPSRERKRLLAHIIEDVTLLKLPAEGTTKLHVRFKGGKIQTLTTMNPKSSPQQIKTKPSIIELVDRLLDDYIYPEIAEILNEQGHRPGGTARRGCQDARFTPLKVAYLIHEYKLRSRYDRLRQRGMLTRQEAAAHLNISEQTVARWAKFGLITRHAYNGHYSLYEIADGDLPQKQCSRWNPLEDRAAAYRQMQTEPRTSTGEERGVV

SEQ ID NO: 12428 - protein, 705 aa, Unknown
  Description of Unknown: Integrase A996 sequence
  IPR006119,SSF46955,cd00338,PF07508,PS51736, G3DSA:3.40.50.1390,SM00857,IPR025827,IPR009061,IPR036162, PF13408,PTHR30461,SSF53041,PS51737,PF00239, IPR011109
MNVHLKVQPHHLERGAYLYIRQSSMRQVVENVESARRQYALRGRAVALGWRDEQIIVIDNDQGESGASAAWREGFQRLVSDVGMGHAGIVMGLEVSRLARNNADWQRLLEICALADTLILDEDGVYDPASFNDRLLLGLKGTMSEAELHVIKARLRGGILNKVRRGEFRCLLPTGLVYDHFGNVTLDPDMQVRETIIHFFEMFSRLGSASQTVKVFRNEGLLFPSRLHNGDTLFRPLTASTAMRVLNNPRYAGAYTYGRRQFRRTIDGKKTLRARDIDDWPACIPNAHPGYISWERHQENLKILKANGRGFEAARASIPREGPALLQGRAVCGQCGSHLRVRYAARRGRQEAWYICNRARIYRGEPMCQSIAGPPVDEAIGMLIAEQMTPAAVELALEVRKEIQARHEEADRLRCRAIERAQTEAELAQRRFMLVDPSNRLVADTLEGEWNEKLRTLASAREERERGRENDQFILDKAVHERLVAMTADFNQLWKDPDTPSRERKRLLAHIIEDVTLLKLPAEGTTKLHVRFKGGKIQTLTTMSPKSSPQQVKTKPSIIELVDRLLDDYIYPEIAEILNEEGHRPGGTTRRGCQDARFTPLKVAYLIHEYKLRSRYDRLRQRGMLTRQEAAAHLNISEQTVARWAKFGLITRHAYNGHYSLYEIADGDLPQKQCSRWNPLEDRAAAYRQMQTEPRTSTGEERGVV

SEQ ID NO: 12429 - protein, 705 aa, Unknown
  Description of Unknown: Integrase A997 sequence
  IPR006119,cd00338,PF07508,PS51736,G3DSA:3.40.50.1390, SM00857,IPR025827,SSF53041,IPR036162,PTHR30461, PF13408,mobidb-lite,PS51737,PF00239,IPR011109
MNVHLKVQPHHLERGAYLYIRQSSMRQVVENVESAGRQYALRGRAVALGWRDEQIIVIDNDQGESGASAAWREGFQRLVSDVGMGHAGIVMGLEVSRLARNNADWQRLLEICALADTLILDEDGVYDPASFNDRLLLGLKGTMSEAELHVIKARLRGGILNKVRRGEFRCLLPTGLVYDHFGHVTLDPDMQVRETIIHFFEMFSRLESASQTVKVFRNEGLLFPSRLHNGDTLFRPLTASTAMRVLNNPRYAGAYTYGRRQFRRTIDGKKTLRARDIDDWPACMPDAHPGYISWERHQENLKILKANGRGFEAARASIPREGPALLQGRAVCGQCGNHLRVRYAARRGRQEAWYICNRDHIYRGEPMCQSIAGPPVDEAIGMLIAEQMTPAAVELALDVRKEIQARHEEADRLRCRAIERAQTEADLAQRRFMLVDPNNRLVADTLEGEWNEKLRILANAREERERGREHDQFILDKAVHERLVAMTADFNELWKDPDTPSRERKRLLAHIIEDVTLLKLPAEGTTKLHVRFKGGKIQTLTTMNPQSSAQQIKTKPNIVELIDKLLDDYIYPEIAEILNEQGHRPGGTARRGCHDARFTPLKVAYLIHEYKLQSRYDRLRQRGMLTRQEAAVHLNISEQTVARWAKYGLIARHAYNGHYSLYEIPDGDLPQKQCSRWNQLQDRTAARQQTQTEPRTSTGEERGVV

SEQ ID NO: 12430 - protein, 701 aa, Unknown
  Description of Unknown: Integrase A998 sequence
  IPR006119,PF00239,cd00338,PF07508, PS51736,G3DSA:3.40.50.1390,SM00857,IPR025827, Coil,IPR036162,PTHR30461,PF13408, PS51737,SSF53041,IPR011109
MLRATNSPDERVTAEHRGKLAYIYVRQSSVNQVRHHQESTELQYRLIDRAVALGWPHERVHVIDEDLGKSGSGCVEREGFKKLIAEIGLGNAGLVISLDASRLARNNRDWHQLLDLCSLFGVIIADGERLYDPCAYHDRLLLGLSGIMSEAELHQIKQRLHQGERQKAARGELRLGLPAGLAHDRSGQIILNPDEEVQARLCLVFSKFRELGSARAVMRYLRKENLPLPMRPLRGPAPHEVVWREASNPRVLSILHNPGYAGAYVYGRRRQTGGRVRQDVYRSRTAKVPIADWEVCLEAAHPGYIGWEEFMENQRRLENNINRYEAGHSGVPRKGAALLQGIAVCGRCGRRMSLRYSGPAGNYPVYTCRADRGHDGGPLCQEVRALPVDARVESILLEALTPDRIAIAVDALGQMEEEVRQLERQWALRRERARYEAERAHRQYDAVEPENRLVARSLERGWEEKLRAAETIEQDYERWRSNEPLVLSEADRDGLLAIGENLPGIWHAPSTTAAERKSILRLIICEVVLDQKRLQGQVWIKILWQTGATSEHSLQRRVHTYGDYLNIDRLRTRVTELNAAGKMDKEIASELNAEGFLAAQNCAFKGDNVWLLRRRWGIATVKINGTSPNPFRWPDGTYSVQGAAAALGITPQTIFKYMARGLIQGRQLVKGQPWQIELTEDQIDILRARAQRNRRSRKQAS

SEQ ID NO: 12431 - protein, 701 aa, Unknown
  Description of Unknown: Integrase A999 sequence
  IPR006119,PF00239,cd00338,PF07508,PS51736, G3DSA:3.40.50.1390,SM00857,IPR025827,Coil,IPR036162, PF13408,PTHR30461,PS51737,SSF53041,IPR011109
MLSVTNPSDERLTSARRAKLAYIYVRQSTVTQIKHHQESTELQYRLVDRAEDLGWPRERIQVIDEDLGKSGAGTTDRQGFQKLISEISLGHAGLVMSLDASRLARNNRDWHQLLELCSLFGVLLADGERLFDPCAYHDRLLLGLSGIMSEAELHQIRLRLHQGERQKAARGELRLPVPAGLVHDRSGAVTLNPDEEVQARVALVFAKFRELHSAHAVRRYLRANGLPLPVRPLRGPSPHDVVWREATSARVRSILQNPALAGAYVYGRRRQAPGQARAGSCRPSTIKVPVAEWEVCLQESHPGYISWEEFMANQRRLADNVNRYDADHVGVPRKGAALLQGIAMCGRCGRRMSLRYTGPQGDYPVYCCRADRDQTGAPLCQEVRALAVDARVEAILLEALKPDQIAIALAALGQLDREARQLERQWGLRRERARYEAERAQRQYDAVEPENRLVARSLERAWEEKLRAVEAVDQEHDRWRREQPLVLSADDRATLQALGQNLPQVWHAVTTTAADRKRILRFVIREVILDQKRITGHVWLKILWQTGATSEHAVQRRVHTYKDYADLDRLRQQITELNAAGKMDKEIAQILNQEGFTTARGCRFRGENVWLLRDRWGIATVKINGVAANPMRWSDGSYSVQGVASLLGVTPQVIFDYLARGFLVGRQLVKGQPWQIDPTDDQIRYLQNRLQRIRRSKKVAS

SEQ ID NO: 12432 - protein, 700 aa, Unknown
  Description of Unknown: Integrase A1000 sequence
  IPR006119,cd00338,PF07508,PS51736, G3DSA:3.40.50.1390,SM00857,IPR011109,IPR025827, PS51737,PF13408,PTHR30461,SSF53041, Coil,PF00239,IPR036162
MLISSNIADERLTTAHRAKLAYVYVRQSSVNQVRQHQESTELQYRLVDRAIGLGWPPERVQVIDEDLGKSGAGGVDRHGFQKLIAEIGLGNAGLVVSLDASRLARNNRDWHQLLELCSVFGVVIADGERLYDPRAYHDRLLLGLSGIMSEAELHQLRMRLHQGERQKAARGELRLPLPAGLAYDRTGTIILNPDEEVQARFHLVFAKFRELQSARRVMRYLDRNGLSLPVRPLLGPSPHEVVWRAPDSARVLNILQNPAYAGAYVYGRRQKDPSRCRPGSLTGTVKVAIADWAVCLHAAHPGYISWEEFMANQGRLADNVCRYEAGHSGVPRKGAALLQGIAVCGRCGRRMSMRYTGPHADYPVYCCRSDRDQQGSALCQEVRALAVDALVERIVLDALVPDQIEIALAAAGQLEQENRQLERQWALRVERARYEAERARRQYDAVEPENRLVARSLERAWEDKLRVVEAVEQQHARWRAQEPLLIGPTERAGLQALGENLPRIWNAATTSAADRKRILRFVIREVVLDQKRTRGQVWFKIVWQTGATSEHHVQRRVQAYRNYIDIDRLRQRIVELNAEHKMDGEIAAILNQEGFVAARGCAFKGENVWLLRTRWSIPTVKINGVDKNPMRWPDGSFSIQGAAAELCVTPQTVFDYLARGMLTGRQLTKGQPWQIELSDEQMSQLRNRVRRTKRSKKEAS

SEQ ID NO: 12433 - protein, 699 aa, Unknown
  Description of Unknown: Integrase A1001 sequence
  IPR006119,SSF46955,PF00239,cd00338,PF07508, PS51736,G3DSA:3.40.50.1390,SM00857,IPR011109,IPR025827, IPR009061,PF13408,PTHR30461,PS51737,SSF53041, IPR036162
MNVHLKVQSHHRERSAYLYIRQSSMRQVIDNTESAMRQYALRGRAIALGWREEQIIVIDNDQGESGASAVWREGFQRLVSDVGMGHAGIVMGLEVSRLARNNADWQRLLEICALADTLILDEDGVYDPASFNDRLLLGLKGTMSEAELHVIKARLRGGILNKARRGEFRCPLPTGLVYDHSGNVALDPDMQIRETIAHFFETFSRVGSASQTVKAFRQEGILFPSRLHDSQTVFRPLTPSTAMRVLHNPRYAGAYAYGRRRYRRTIDGKKLVREQGTDDWTACIPDAHPGYISWEQHQENLRILKSNICHKWNAGVASPPREGPALLQGRAVCGQCGRHFHMRYAARRGRQEAWYVCDRARSNRGEHVCQAIAAPPVDEAIGMLIADQMTPAAVELAIEVRKEIEARHEEADRLRCRAIERAQTEADLAQRRFMLVDPNNRLVADTLEGEWNEKLRILANAREERERAQEHDQFILNKAVQERLVTMTADFKKLWTNSETPNRERKRLLAHIIEDVTLLKLPKRGTTKAHIRFKGGKTQTLVTISPKSPSQQVKTSPDVIQLIDKLLDDHIFSEIADILNNQGYRPGSVTRRDQRNARFTTKRVTYLVREYKLRSRYDRLRDRGMLTKKEAAAHLNIHEHTLARWAEHGLVTSHAYNGHYYLYELPKSDLPQKQCSRWNQLVDRLAAHKENARHAKTFN

SEQ ID NO: 12434 - protein, 699 aa, Unknown
  Description of Unknown: Integrase A1002 sequence
  IPR006119,SSF46955,PF00239,cd00338,PF07508, PS51736,G3DSA:3.40.50.1390,SM00857,IPR011109,IPR025827, IPR009061,PF13408,PTHR30461,PS51737,SSF53041, IPR036162
MNVHLKVQSHHRERSAYLYIRQSSMRQVIDNTESAMRQYALRGRAIALGWREEQIIVIDNDQGESGASAVWREGFQRLVSDVGMGHAGIVMGLEVSRLARNNADWQRLLEICALADTLILDEDGVYDPASFNDRLLLGLKGTMSEAELHVIKARLRGGILNKARRGEFRCPLPTGLVYDHSGNVALDPDMQIRETIAHFFETFSRVGSASQTVKAFRQEGILFPSRLHDSQTVFRPLTPSTAMRVLHNPRYAGAYAYGRRRYRRTIDGKKLVREQGTDDWTACIPDAHPGYISWEQHQENLRILKSNICHKWNAGVASPPREGPALLQGRAVCGQCGRHFHMRYAARRGRQEAWYVCDRARSNRGEHVCQAIAAPPVDEAIGMLIADQMTPAAVELAIEVRKEIEARHEEADRLRCRAIERAQTEADLAQRRFMLVDPNNRLVADTLEGEWNEKLRILANAREERERAQEHDQFILNKAVHERLVTMTADFKKLWTNSETPNRERKRLLAHIIEDVTLLKLPKRGTTKAHIRFKGGKTQTLVTISPKSPSQQVKTSPDVIQLIDKLLDDHIFSEIADILNNQGYRPGSVTRRDQRNARFTTKRVTYLVREYKLRSRYDRLRDRGMLTKKEAAAHLNIHEHTLARWAEHGLVTSHAYNGHYYLYELPKSDLPQKQCSRWNQLVDRLAAHKENARHAKTFN

SEQ ID NO: 12435 - protein, 697 aa, Unknown
  Description of Unknown: Integrase A1003 sequence
  IPR006119,PF00239,cd00338,PF07508,PS51736, G3DSA:3.40.50.1390,SM00857,IPR025827,IPR036162,PTHR30461, PF13408,PS51737,SSF53041,IPR011109
MLRDYAVDERISTTQQAKLAYVYVRQSSVGQIRHHQESTALQYRLVDRALGLGWPRERVEIIDDDLGKSGAEAQHRYGFQRLIAEVGLGHAGLVLSYDASRLARNNSDWHQLLQLCSMFSVLIADSERIYDPGLYHDRLLLGLSGIMSEAELHQIRMRLHTGERQKAARGELRIPLPAGLIYAPAGGIMLNPDAQVQERIRLVFDSFMRLGSAKAAVRYLRQADLALPVRPLKGPAPHEIAWRDATDARVRNILKNPVYAGAYVYGRRCAAPEKRSEGGKNPTRAVPREQWEVCIQNAHPAYISWETHMAISDKLTDNVGNFKAGHRGMSRKGKALLQGIAMCGSCGRRMALNYSGPDSNHPVYRCRSERATCVGQYCQEVRAPRVEAEVERQFLAALTPDQLAIALAALDAIDADVHGLERQWTLKRERAEYECERARCQYDAVEPENRLVARSLESIWESKLREVEKVEQDYRRWKTEQTVALNADDRARIAAFGIDLPDLWERIENSERKAMLRLVIDKVILDQRRAKGMVWIRIIWQTGAATEHWVMRRTQSYAEAAHADVLEQRIRELNAAGMMDAEVATALNIEGLRNSLDGLFDHNTVHLLRQRWNIPTVKINGVEHNPPRWPDGSYSIQGAATALGVTEQTVFKWLKRGKLQGRQLKKGQPWQVDLTLQQIKALTAPNYSMTPSRKAAS

SEQ ID NO: 12436 - protein, 696 aa, Unknown
  Description of Unknown: Integrase A1004 sequence
  IPR006119,cd00338,PF07508,PS51736, G3DSA:3.40.50.1390,SM00857,IPR025827,IPR036162, PF13408,PTHR30461,SSF53041,PS51737, PF00239,IPR011109
MKSELIKPIHLARRAVVYIRQSTTHQVVTNQESLRLQYALRQRAIELGWPEAGIDVIDADLGISGASAAQRSGFKELVGRVGLKEVGLILSIDVTRLARNCSDWYPLLDICGLHGCLIADRDGVYDPGSANGRLLLGLKGTISELELHTIRSRLTAGLLAKAERGELALTLPIGLVRDPSGVVVKDPNLEVQERLELLFETFLKVRTIAKVMREFNDRGLELPRRDRHGDLHWARATTSAVAAILKNPAYAGAFVYGRTRLRRPSDGRLPTKVPKPIEQWRIIVKDRYPPYIAWQSYEKIRGIVSDNRAEYMRNKTRGAPREGELLLQGIAWCGRCGHKMYARYKGGAEYVCNHLHSHQGLPACQYIRARRVDAAVAQAFLTALAPAEIDALSCARRAQQQAYKAMQSGAEQQLERRRYEAALAERQFNRVDPDNRLVAAELECRWEVALKEVRVAEEALARLKSPQAIAQITVGNKVLNDKVVRLSGRLPEIWTDPGTTDAKRKALLRCLIDKVILDRGEHDVVRMRIVWRGGAVTDIEVKMRVNSVADLTQGAEMRERVLELARAKMHDDEIAAKLTSEGHRSPNCPDKVLPITVQRIRLHAGLKGLTEQRTRWRHSTDLLSAQQLAGVLNIPVNWLYVQIRQGRLLIDRHPSGAHLFSNTSRVIEAVRKLRNHELDQLDLRITEPHEEGHQHA

SEQ ID NO: 12437 - protein, 696 aa, Unknown
  Description of Unknown: Integrase A1005 sequence
  IPR006119,PF00239,cd00338,PF07508,PS51736, G3DSA:3.40.50.1390,SM00857,IPR011109,IPR025827,PS51737, PTHR30461,PF13408,Coil,SSF53041,IPR036162
MSTKITVDHLGRGAAIYVRQSTPGQLINHTESRRRQYDLADAARAAGFVDVMIIDEDLGRSGSGLECRPGFQKLVAAVCAGTVGAVYCIEASRLARNGRDWHHLIDLCALAGALVVDPDGVYDPRLLNDRLLLGLKGTMSEYELSLLRQRGIEARDGKARRGELRFTLPPGYCWNEAGRIEIDPDARVAGAIRMLFSKFRELGSARQVFLWARAAELSLPVVRRNLIACKILWQPPAYHTVIQVLQNPIYAGAYVFGRRGNRTRVVEGRARKTSGHKRERTDWNTLLRDNHEGYITWAEFEEHQRMLEENAHMQKRAARKAGRGGRALLTGLVRCGHCGRKMRVFYGMQSGHAHRYQCRGDDAHVGVGLCIGIGGIRVDRAVVAQMLEAVSTRAVEAALLAADQAAAAGAEERAALERELEAARYDASLAARRYDLVEPEKRHVVRELEARWNTALERVAQIERRIAEAEARSSARPRVNRAALLGLAHDLSAAWNAPTADTRTRQRLTRLLVEEVVIDLDDTAHEAVLRIHWVGGRHTELRVPRARTGRRANKAHPGAVEVVRKLSGHWPDHEISVTLNRMKCRSDNGETWTTVKVRLLRERLGLSDFDPTVPRPETLTADKAAKRLGISIPSVHRLIQRGILPATQLVSSAPWHIPVAALDTDAVRTGVNEIKARRPKNLIDYQRDETMPLPGL

SEQ ID NO: 12438 - protein, 696 aa, Unknown
  Description of Unknown: Integrase A1006 sequence
  IPR006119,PF00239,cd00338,PF07508, PS51736,G3DSA:3.40.50.1390,SM00857,IPR025827, Coil,IPR036162,PTHR30461,PF13408, PS51737,SSF53041,IPR011109
MSPKITADHLGRGAAIYVRQSTPGQLINHTESRRRQYDLADAARAAGFVDVMIIDEDLGRSGSGLESRPGFQKLVAAVCAGTVGAVYCIEASRLARNGRDWHHLIDLCALAGALVVDPDGVYDPRLLNDRLLLGLKGTMSEYELSLLRQRGIEARDGKARRGELRFTLPPGYCWNEAGRIEIDPDERVAGAIRMLFSKFRELGSARQVFLWARAAELSLPVVRRNLIACKILWQPPAYHTVIQVLQNPIYAGAYVFGRRGNRTRVVEGRARKTSGHKRERTEWNTLLRDNHEGYITWAEFEEHQRMLEENAHMQKRAARKAGRGGRALLTGLVRCGHCGRKMRVFYGMQSGHAHRYQCRGDDAHVGVGLCIGIGGIRVDRAVVAQMLEAVSARAVEAALLAADQAAAAGAEERAALERELEAARYDASLAARRYDLVEPEKRHVVRELEARWNTALERVAQIERRIAEAEARSSARPRVNRAALLGLAHDLSAAWNAPTADARTRQRLTRLLVEEVVIDLDDAAYEAVLRIHWIGGRHTELRVPRARTGRRADKAHPGAVEVVRKLSGHWPDHEISVTLNRMKCRSDNGETWTTVKVRLLRERLGLSDFDPTVPRPETLTADKAAKRLGISIPSVHRLIQRGILPATQLVPSAPWHIPMAALDTDAVQTGVNEIKARRPKNLIDYQRDETMLLPGL

SEQ ID NO: 12439 - protein, 696 aa, Unknown
  Description of Unknown: Integrase A1007 sequence
  IPR006119,cd00338,PF07508,PS51736,G3DSA:3.40.50.1390, SM00857,IPR011109,IPR025827,PS51737,PF13408, PTHR30461,SSF53041,Coil,PF00239,IPR036162
MSTKITVDHLGRGAAIYVRQSTPGQLINHTESRRRQYDLADAARAAGFVDVMIIDEDLGRSGSGLECRPGFQKLVAAVCAGTVGAVSCIEASRLARNGRDWHHLIDLCALAGALVVDPDGVYDPRLLNDRLLLGLKGTMSEYELSLLRQRGIEARDGKARRGELRFTLPPGYCWNEAGRIEIDPDARVAGAIRMLFSKFRELGSARQVFLWARAAELSLPVVRRNLIACKILWQPPAYHTVIQVLQNPIYAGAYVFGRRGNRTRVVEGRARKTSGHKRERTDWNTLLRDNHEGYITWAEFEEHQRMLEENAHMQKRAARKAGRGGRALLTGLVRCGHCGRKMRVFYGMQSGHAHRYQCRGDDAHVGVGLCIGIGGIRVDRAVVAQMLEAVSTRAVEAALLAADQAAAAGAEERAALERELEAARYDASLAARRYDLVEPEKRHVVRELEARWNTALERVAQIERRIAEAEARSSARPRVNRAALLGLAHDLSAAWNAPTADARTRQRLTRLLVEEVVIDLDDTAHEAVLRIHWVGGRHTELRVPRARTGRRANKAHPGAVEVVRKLSGHWPDHEISVTLNRMKCRSDNGETWTTVKVRLLRERLGLSDFDPTVPRPETLTADKAAKRLGISIPSVHRLIQRGILPATQLVSSAPWHIPVAALDTDAVRTGVNEIKARRPKNLIDYQRDETMPLPGL

SEQ ID NO: 12440 - protein, 696 aa, Unknown
  Description of Unknown: Integrase A1008 sequence
  IPR006119,PF00239,cd00338,PF07508, PS51736,G3DSA:3.40.50.1390,SM00857,IPR011109, IPR025827,PS51737,PTHR30461,PF13408, Coil,SSF53041,IPR036162
MSTKITVDHLGRGAAIYVRQSTPGQLINHTESRRRQYDLADAARAAGFVDVMIIGEDLGRSGSGLECRPGFQKLVAAVCAGTVGAVSCIEASRLARNGRDWHHLIDLCALAGALVVDPDGVYDPRLLNDRLLLGLKGTMSEYELSLLRQRGIEARDGKARRGELRFTLPPGYCWNEAGRIEIDPDARVAGAIRMLFSKFRELGSARQVFLWARAAELSLPVVRRNLIACKILWQPPAYHTVIQVLQNPIYAGAYVFGRRGNRTRVVEGRARKTSGHKRERTDWNTLLRDNHEGYITWAEFEEHQRMLEENAHMQKRAARKAGRGGRALLTGLVRCGHCGRKMRVFYGMQSGHAHRYQCRGDDAHVGVGLCIGIGGIRVDRAVVAQMLEAVSTRAVEAALLAADQAAAAGAEERAALERELEAARYDASLAARRYDLVEPEKRHVVRELEARWNTALERVAQIERRIAEAEARSSARPRVNRAALLGLAHDLSAAWNAPTADTRTRQRLTRLLVEEVVIDLDDTAHEAVLRIHWVGGRHTELRVPRARTGRRANKAHPGAVEVVRKLSGHWPDHEISVTLNRMKCRSDNGETWTTVKVRLLRERLGLSDFDPTVPRPETLTADKAAKRLGISIPSVHRLIQRGILPATQLVSSAPWHIPVAALDTDAVRTGVNEIKARRPKNLIDYQRDETMPLPGL

SEQ ID NO: 12441 - protein, 696 aa, Unknown
  Description of Unknown: Integrase A1009 sequence
  IPR006119,cd00338,PF07508,PS51736,G3DSA:3.40.50.1390, SM00857,IPR011109,IPR025827,PTHR30461,PF13408, SSF53041,PS51737,PF00239,IPR036162
MNTKITPDHLGRAAVVYVRQSTMTQVTGNLESQRRQYDLAGAAATTGFASVTVIDDDLGRSGSGSMERPGFERLVAQVCSGDVGAVYCIEASRLARNGRDWHHLIDLCALAGTLVIDPDGAYDPRLVNDRLLLGLKGTMSEYELSLMRQRGIAARDSKAGRGELRFMLPPGLCWSEVGKIEIDPDEHVAETIRLVFAKFRELGSGRQVFLWLRSADIKMPVVLRNVDVCKLVWKAPAYHSVMQILHNPLYAGAYAFGRRAQRTRIIDGRARKATGVRKPRDEWSVLLRDNHQGYISWREYEENHKLLAENAHMKKNYDRKSARGGRALLTGLMRCGRCGRMMRVFYGSAKGNAHRYQCRGDDAHVGVGLCIGIGGVRVDRAVAVQILEAVSDRAVEAAIFASDQVERSRRDVIAALDRDLEGSRYEALLASRRYELVDPAKRHVARELEARWNDALERVGVLERKIKDLSALSAARPAIDRGRLLQLAQDLPTVWNAPSTETRTKQRLIHILVQEIICDLDDATNEAVLLIHWTGGRHTEVRVARVKTGRYPAELAPSAVEALRKLGGHWPDRELAVSLNRMLCKTGDGESWTAVRVRDMRERLGIPEYDATKVEIPMISLMKAAEKLGICVGSAKSLVQRGILPATQILPGSPWMVPVDALTSEAVRIGVQGVVDRRPKFYEDYQYDKVVRLPGI

SEQ ID NO: 12442 - protein, 696 aa, Unknown
  Description of Unknown: Integrase A1010 sequence
  IPR006119,cd00338,PF07508,PS51736, G3DSA:3.40.50.1390,SM00857,IPR025827,IPR036162, PF13408,PTHR30461,SSF53041,PS51737, PF00239,IPR011109
MNTKITPDHLRRAAVVYVRQSTMTQVTGNLESQRRQYDLAGAAATTGFASVTVIDDDLGRSGSGSMERPGFERLVAQVCSGDVGAVYCIEASRLARNGRDWHHLIDLCALAGTLVIDPDGAYDPRLVNDRLLLGLKGTMSEYELSLMRQRGIAARDSKAGRGELRFMLPPGLCWSEVGKIEIDPDEHVAETIRLVFAKFRELGSGRQVFLWLRSADIKMPVVLRNVDVCKLVWKAPAYHSVMQILHNPLYAGAYAFGRRAQRTRIVDGRARKATGVRKPRDEWSVLLRDNHQGYISWREYEENHKLLAENAHMKKNCDRKSARGGRALLTGLMRCGRCGRMMRVFYGSAKGNAHRYQCRGDDAHVGVGLCIGIGGVRVDRAVAMQILEAVSDRAVEAAIFASDQVERSRRDVIAAIERDLEGARYEALLASRRYELVDPAKRHVARELEARWNDALERVGVLERKIKDLSALSAARPVIDRGRLLQLAQDLPTVWNAPSTETRTKQRLIHILVQEIICDLDDATNEAVLLIHWTGGRHTEVRVARVKTGRYPAELAPSAVEALRKLGGHWPDRELAVSLNRMLCKTGDGESWTTVRVRDMRERLGIPEYDATKVDVPMISLMKAAEKLGICVGSAKSLVQRGILPATQILPGSPWMVPVEALSSEAVRIGVQGVIDRRPKFYEDYQYDKVVRLPGI

SEQ ID NO: 12443 - protein, 696 aa, Unknown
  Description of Unknown: Integrase A1011 sequence
  IPR006119,PF00239,cd00338,PF07508,PS51736, G3DSA:3.40.50.1390,SM00857,PS51737,IPR025827,IPR036162, PF13408,PTHR30461,Coil,SSF53041,IPR011109
MMSELIQPIHLKRKAVVYIRQSTPHQVVSNQESLRLQYALRQRARDLGWHEADIDVIDADLGLSGASAAHRSGFQELVGRVVLSEVGIILSIDVTRLARNCSDWYPLLDICGLRGCLIADRDGVYDPGSANGRLLLGLKGTISELELHTIRSRLTAGLIAKAQRGELALTLPVGLVRDPSGVVLKDPDTAVQGRLGLVFELFVKLRSIAKVMRTLNARGLDLPRRDRHGELHWARATVSAVAAILKNPAYAGAFVYGRTRMRDPTPDGRAPGKAKVARPLEEWRIVVKDRYPAYIDWPTYEKIRSIVSDNRAEYMRTKTRGIPRDGELLLQGIAWCGRCGHKMYARYKGGGEYVCNHLRTHSGLPTCQHIRAKAVDAAVADAFLSALAPAELDALSRARRAQSQVDSALRANAEREVERKRYAAALTQRQYNRVDPDNRLVAAELERRWESALMEVRAAEAALAEQSEQQPTAHMAMGKAFTGKVVALAGRLPKIWADSATTDTHRKALLRCLVDKVVLDRTPESALVRIVWRGGAVTDLDVKLRVTAIAKLARGAEMRARLLELAKAGVPDEEIAHILTSEGLRSANSADKVLPVTVQRIRLAEGIRTPPSCRRWSHDPGYLSTKALATKLEIPVNWLYVQIRKKRLLIDPQPTGAYLFPDTSLVLDGVRNLRNHIVNELDLRICQHDDRGYQHG

SEQ ID NO: 12444 - protein, 696 aa, Unknown
  Description of Unknown: Integrase A1012 sequence
  IPR006119,cd00338,PF07508,PS51736, G3DSA:3.40.50.1390,SM00857,IPR011109,IPR025827, PS51737,PTHR30461,PF13408,SSF53041, Coil,PF00239,IPR036162
MNTKITSDHLGRAAIVYVRQSTMAQVTGNLESQRRQYDLAGAAATTGFASVTVIDDDLGRSGSGSVERPGFERLVALVCSGNVGAVYCIEASRLARNGRDWHHLIDLCALTGTLVIDPDGAFDPRLVNDRLLLGLKGTMSEYELSLIRQRGIAARDSKAGRGEFRFMLPPGFCWSEAGKIEIDPDEHVAEAIRLVFDKFRELGSGRQVFLWLRSADIKMPVVLRNVEVRKLVWKAPAYHSVMQILHNPLYAGAYVFGRRAQRTLIIDGRARKANGLRKPRDEWSVLLRDNHQGYITWREYEENQKLLTENAHMKRNCDRKSARGGRALLTGLIRCGRCGRMMRVFYGGAKGNAHRYQCRGDDARVGLGLCIGIGGVRVDRAVATQILEAVSDRAVEAAIFASDQVERSARDVIAAIERDLEGARYEASLAGRRYELVDPAKRHVARELEARWNDALERVSMLERKIEELSALSTARPAIDRGRLLQLAHDLPTAWNAPSTDTRTKQRLIHILVQEIICDLDDTTNQAVLLIHWTGGRHTEVRVARVKTGRYPSDMAPPAVEALRKLGGHWPDRELAVSLNRMLCKTGDGEGWTAVRVRDMRERLGIPEYDPTKAGSPVISLMKAAERLGICIGSAKSLVKKGILPATQILPGSQWMVPIEALTSEAVLIGVQGVVGRRPKIYEDYQYDKVVRLPGL

SEQ ID NO: 12445 - protein, 696 aa, Unknown
  Description of Unknown: Integrase A1013 sequence
  IPR006119,PF00239,cd00338,PF07508,PS51736, G3DSA:3.40.50.1390,SM00857,IPR011109,IPR025827,Coil, PF13408,PTHR30461,PS51737,SSF53041,IPR036162
MHAKITVEHLARSALVYVRQSTMSQVLGNLESQKRQYQMAEAARDMGFAEVRVIDEDLGRSGSGQIARPGFQRLVAEVCAGTVGAVYCIEASRLARNGRDWHHLIDLCALTGALVVDPEGVYDPRLMNDRLLLGLKGTMSEYELSLLRQRGLAARDAKASRGELRFTLPPGFCWSEDDRIEMDPDERVQQAIRLIFAKFRELGSGRQVFLWLRAADIHLPVALRNGALRKIAWRKPAYHSVMQVLHNPIYAGAYAFGRTGNRTGVVDGQARKTSGHHRAIADWSVLIKDNHEGYLDWRAYEENRRMLEENAHMQKRAARKSGRGGQALLSGMARCARCGRMMRVFYKTGTDLSHRYQCRGDDGHVGAGLCIGAGGGGIDALVASQLLEAVSGQAVQAALLAGQQAAKAQETVRLAVEKELDEARYAAELAERRYEHVDPAKRHVARTLEARWNVALERVAAVEHKLAALGAELRAKPGVDPAVLMRLATDLPSVWNAVGTDARARQRLVRLLIEEVVIDIDAEENEFILLIHWIGGRHTEVRLARRKTGRFPPGRPLTAREVLRKLAGHWPDRELAVTLNRMRCRTEDGETWTTVRVAELRDKLAIPPYDPDAEVPKTLSVDAAAKRLGVCVASVHKLIRSQILPATQIMYSAPWKIPVDALETEAVRIGLQEIAVRRPRQALEKVADRSMPLPGF

SEQ ID NO: 12446 - protein, 696 aa, Unknown
  Description of Unknown: Integrase A1014 sequence
  IPR006119,PF00239,cd00338,PF07508, PS51736,G3DSA:3.40.50.1390,SM00857,IPR011109, IPR025827,PF13408,PTHR30461,SSF53041, IPR036162
MNTKITSDHLGRAAVVYVRQSTMAQVTGNLESQRRQYDLAAAAATTGFASVTVIDDDLGRSGSGSMERPGFERLVAQVCSGNVGAVYCIEASRLARNGRDWHHLIDLCALAGTLVIDPDGAYDPRLVNDRLLLGLKGTMSEYELSLMRQRGLVARDSKAKRGEFRFMLPPGFCWSEAGKIEIDPDEHVAETIRLVFAKFRELGSGRQVFLWLRSADIKMPVVLRNVDVCKLVWKAPAYHSVMQILHNPLYAGAYAFGRRAQRTLIVDGRARKANGLRKPRDEWSVLLRDNHRGYITWREYEENHKLLAENAHMKKNCERKSARGGRALLTGLMRCGRCGRMMRVFYGSAKGNAHRYQCRGDDAHVGVGLCIGIGGVRVDRAVAIQILEAVSDRAVEAAIFASDQVERSQRDIIAAIERDLEGARYEALLASRRYELVDPAKRHVARELEARWNDALERVGVLERKIKELSALSAARPVIDRGRLLQLAHDLPTVWNAPSTDTRTKQRLIHILVQEIICDLDDATNEAVLLIHWTGGRHTEVRVARVKTGRYPAELAPSAVEALRKLGGHWPDRELAVSLNRMLCKTGDGESWTTVRVREMRERLGIPEYDAAKVDVPMISLTKAAETLGICVGSAKSLAKKGILPATQILPGSQWMVPVAALTSETVRIGVQRVVDRRPKFYEDYQYDKVVRLPGL

SEQ ID NO: 12447 - protein, 695 aa, Unknown
  Description of Unknown: Integrase A1015 sequence
  IPR006119,PF00239,cd00338,PF07508,PS51736, G3DSA:3.40.50.1390,SM00857,IPR025827,PS51737,IPR036162, PF13408,PTHR30461,Coil,SSF53041,IPR011109
MKSELVTPSHLARKAVVYIRQSTPHQVVSNQESLRLQYALRQRARELGWREAAIDVIDADLGLSGASIAQRNGFKELVGRVGLSEVGLILSIDVTRLARNCTDWYPLLDICGLRGCLIADRDGVYDPGTPNGRLLLGLKGSISELELHTIRSRLTAGLLAKAERGELAVMLPIGLMRDPSGVVVKDPDMAVQGRLGLVFQLFLQLRSVAKVMRALNERDLELPRRDRYGDLCWTRATLAAVAAILKNPAYAGAFVYGRTRFRPPKREGALPQKAPRPMEEWRIVVKDRYPAYIDWPIYEKIRSVIRDNRAEYMRIKTRGAPRNGELLLHGIAWCARCGHKMYVRYKGGGEYVCNHLRTQEGQPTCQHIRAAHIDAAVGDAFLTALAPAELDALSRSRRVQQQTNNALRSSAERELERKRYTAALAERQFNRADPDNRLVASELERRWEAALNDVRAAEEALARQTPPKAITQVAISKELNDKVISLTGRLPQIWGDETISDAHRKALLRCLIEKVVLDRGERDLALARIVWRGGAVTELEVKMSVNSVTRLTRGTEMRERLLTLARDGVPDDKIATILTREGHRSPRCADKVLPITVGRLRRAAAIKVTAQRSRWEHDDSYLSPPELARRLEIPVNWLYVQIRTKRLLIDRQPSGAYLFPNTPSVLHAIGDLRNHVIAQLDLRICQPNKEGHQHG

SEQ ID NO: 12448 - protein, 695 aa, Unknown
  Description of Unknown: Integrase A1016 sequence
  IPR006119,SSF46955,PF00239,cd00338,PF07508,PS51736,G3DSA:3.40. 50.1390,SM00857,IPR025827,IPR009061,IPR036162,PF13408,PTHR30461 ,PS51737,SSF53041,IPR011109
MSMNSESHQKITSAHLSRMAYLYVRQSTLRQVLENTESTQRQYALRERAAALGWPLERIVVIDRDLGQSGASAADREGFQQLVSEVSLGHVGIVLGLEVSRLARNSTDWHRLLELCAFADTLILDEDGLYNPGLFNDRLLLGLKGTMSEAELHVLKARLRGGILSRARRGELKQMLPVGFVHDVQDRVILDPDVQVQSAVRLFFETFKRTGSCLAVVKDFHARGLLFPRRLRSGAHKGELVWAELLHCRARQIIHNPRYAGAFVFGRTKQRHLPNGKICSRLVPSEEWILLRDMHPGYISWEEYQSNRQQVQGNALSWSDDRRRSPAREGNALLQGLVICGTCGERMTVRYHLHRGQSVPTYWCGRRPMHRGESGLCQTVHGGTLDTAIGDVVIEAMTPFAIEVALTVQQELASRHEEADRLRRQHVERARYEADLAQRRFLKVDPDNRLVADALEADWNARLRALADAQQVYEKASVSDSNVVTDAERVELLALATDFPRLWRNPRTQMKEKKRMLRLLIEDITLTKADALHVDIRFAGGATRSLDLALPKSCVELRTTDAEVIKEIDQLIDTYTDGEIADVLNERGVRTVVTTPWTAARVGRLRNTYHLSDRRTRLLALGLLTPEDVAARYGVAVSTVHLWRRRGLLRAHPVNDRGDYLYEIPPEDLPAKYAHKREYRVEPSTTHSRNAGGAV

SEQ ID NO: 12449 - protein, 695 aa, Unknown
  Description of Unknown: Integrase A1017 sequence
  IPR006119,cd00338,PF07508,PS51736,G3DSA:3.40.50.1390, SM00857,IPR025827,PS51737,IPR036162,PF13408, PTHR30461,SSF53041,Coil,PF00239,IPR011109
MKSELVKPTHLARRAVVYVRQSTPHQVISNQESLRLQYALRERARELGWHEADIDVIDADLGISGASTTGRNGFKELVGRVGLSEIGLILSIDVTRLARNCSDWYPLLDICGLRGCLIADRDGVYDPGSANGRLLLGLKGTISELELHTIRSRLTAGLLAKAERGELALMLPVGLVRDASGVVVKDPDLGVQERLELVFRTFLKFRTVAKVMRVLNDRDLPLPRRDRFGELRWARATVSAVARILKNPAYAGAFVYGRTRFRAAGRDGGSEAKTPKDIKDWRIIVKDRYPHYIDWSTYEKIRDIVRDNRAEYMRAKTRGAPRDGELLLHGIAWCGRCGYKMYVRYKGGGEYACNHLHSHSGLPDCQRVRAAQIDAAVADAFLAALAPGELDALARARQAQQQVNKALRAGAERELERKRYAAALAERQFNRVDPDNRLVASELERRWEAALSELRAAEDAVAQRASTEPAKRTGFSKDLNNKVVALFDSLPQIWANDATTDAHRKALLRCLVEKVVLDRGERDVALARIVWRGGAVTDLHVKMKVNSVAKLTRGEELRARLLELALTGVPDDQIAEILTREGHHSPNCEDKVLPITVQRLRLAAGIKAKAQRNRWTHEPTLLSAVQLAARLDIPVNWIYVQIRRKRLLIDQQSTGAYLFQNSPAVVNAVRDLRNRTINHLDLRIIQPHQEGHQHA

SEQ ID NO: 12450 - protein, 695 aa, Unknown
  Description of Unknown: Integrase A1018 sequence
  IPR006119,cd00338,PF07508,PS51736, G3DSA:3.40.50.1390,SM00857,IPR025827,PS51737, IPR036162,PF13408,PTHR30461,SSF53041, Coil,PF00239,IPR011109
MKSELVKPTHLARRAVVYVRQSTPHQVISNQESLRLQYALRERARELGWHEADIDVIDADLGISGASTTGRNGFKELVGRVGLSEIGLILSIDVTRLARNCSDWYPLLDICGLRGCLIADRDGVYDPGSANGRLLLGLKGTISELELHTIRSRLTAGLLAKAERGELALMLPVGLVRDASGVVVKDPDLGVQERLELVFRTFLKFRTVAKVMRVLNDRDLPLPRRDRFGELRWARATVSAVARILKNPAYAGAFVYGRTRFRAAGRDGGSEAKTPKDIKDWRIIVKDRYPHYIDWSTYEKIRDIVRDNRAEYMRAKTRGAPRDGELLLHGIAWCGRCGYKMYVRYKGGGEYACNHLHSHSGLPDCQRVRAAQIDAAVADAFLAALAPGELDALARARQAQQQVNKALRAGAERELERKRYAAALAERQFNRVDPDNRLVASELERRWEAALSELRAAEDAVAQRASTEPAKRSGFSKDLNNKVVALFDSLPQIWANDATTDAHRKALLRCLVEKVVLDRGERDVALARIVWRGGAVTDLHVKMKVNSVAKLTRGEELRARLLELALTGVPDDQIAEILTREGHHSPNCEDKVLPITVQRLRLAAGIKAKAQRNRWTHEPTLLSAVQLAARLDIPVNWIYVQIRRKRLLIDQQSTGAYLFQNSPAIVNAVRDLRNRTINHLDLRIIQPHQEGHQNA

SEQ ID NO: 12451 - protein, 695 aa, Unknown
  Description of Unknown: Integrase A1019 sequence
  IPR006119,cd00338,PF07508,PS51736,G3DSA:3.40.50.1390, SM00857,IPR025827,PS51737,IPR036162,PF13408, PTHR30461,SSF53041,Coil,PF00239,IPR011109
MKSELVKPTHLARRAVVYVRQSTPHQVISNQESLRLQYALRERARELGWHEADIDVIDADLGISGASTTGRNGFKELVGRVGLSEIGLILSIDVTRLARNCSDWYPLLDICGLRGCLIADRDGVYDPGSANGRLLLGLKGTISELELHTIRSRLTAGLLAKAERGELALMLPVGLVRDASGVVVKDPDLGVQERLELVFRTFLKFRTVAKVMRVLNDRDLPLPRRDRFGELRWARATVSAVARILKNPAYAGAFVYGRTRFRAAGRDGGSEAKTPKDIKDWRIIVKDRYPHYIDWSTYEKIRDIVRDNRAEYMRAKTRGAPRDGELLLHGIAWCGRCGYKMYVRYKGGGEYACNHLHSHSGLPDCQRVRAAQIDAAVADAFLAALAPGELDALARARQAQQQVNKALRAGAERELERKRYAAALAERQFNRVDPDNRLVASELERRWEAALSELRAAEDAVAQRASTEPAKRSGFSKDLNNKVVALFDSLPQIWANDATTDAHRKALLRCLVEKVVLDRGERDVALARIVWRGGAVTDLHVKMKVNSVAKLTRGEELRARLLELALTGVPDDQIAEILTREGHHSPNCEDKVLPITVQRLRLAAGIKAKAQRNRWTHEPTLLSAVQLAARLDIPVNWIYVQIRRKRLLIDQQSTGAYLFQNSPAIVNAVRDLRNRTINHLDLRIIQPHQEGHQHA

SEQ ID NO: 12452 - protein, 695 aa, Unknown
  Description of Unknown: Integrase A1020 sequence
  IPR006119,PF00239,cd00338,PF07508, PS51736,G3DSA:3.40.50.1390,SM00857,IPR011109, IPR025827,PF13408,PTHR30461,PS51737, SSF53041,IPR036162
MMSELIKPTHLARKAVVYIRQSTPHQVVSNQESLRLQYALRQRARDLGWHEADIDVIDADLGLSGASATQRGGFKELVGRVGLSEVGLILSIDVTRLARNCSDWYPLLDICGLRGCLIADRDGVYDPGSPNGRLLLGLKGTISELELHTIRSRLTAGLLAKAARGELALNLPVGLVRDPSGVVTKDPNIEVQERLERVFDTFLKFRTVAKVMRVFNQRNLDLPRRDRHGDLRWTRATISAIAKILGNPAYAGAFVYGRTRTCHGTCESGLPSKAPRPIDQWRIVVKDRYPAYIDWPTYEKIRTIVADNRAEYMRTKTRGAPRDGELLLHGIAWCARCGHKMYVRYKGGGEYVCNHLRTHEGLPTCQHVRAPKVDAAVAEAFLTALAPAELDALSRAGRAQHQLDTALRTSAEHQLERKRYAAALAERQFNRVDPDNRLVAGELERRWEAALIEVRTAEEALARQSALHSLPQRVIGKDLGDKVIALAGRLPQIWADPTTTDAQRKALLRCLVDKVALDRGQRDVVLVRIVWRGGAISDLMVKMKVNSVAKLSQGQEMRGRVLDLARAGALDDDIAATLTAEGHRSPNCEDRVLPITVQRLRLAAGMKVAAQRTRWTHDVGNLSATELADVLGIPVNWLYVQIRKERLLIDRQPNGAYLFQNTPDVIQAVRELWNHSVNQLDLRICQPHQEGHQHA

SEQ ID NO: 12453 - protein, 694 aa, Unknown
  Description of Unknown: Integrase A1021 sequence
  IPR006119,PF00239,cd00338,PF07508,PS51736, G3DSA:3.40.50.1390,SM00857,IPR011109,IPR025827,PF13408, PTHR30461,PS51737,SSF53041,IPR036162
MSTNSAQKVTSEHLRRDAFLYVRQSSLRQVFENTESTKRQYALRDRAVSLGWPIERIHVVDNDLGMSGSSAKERDGFQHLVAEVANGHAGIVLGLEVSRLARNNADWHRLIELASLTQTLILDEDGIYDPGQFNDRLLLGLKGAMSEAELHILKGRLQGGIKNKARRGELEVPLPIGLVYHPNGSVALDPDQQVRGALQLLFDTFRQAASATATVRRFRQEGWLFPRRIRRGIGKGDLLWGPLEHCRVIQILHNPRYAGAFVYGRTRGAYRPGRKSTSLKVARENWQVLIQNSHPGFIDWDEFERNQATLKQNLTGFGLDRRGSMPREGVGLLQGRVVCGACGARMRVRYQEVDNKLQPYYMCTENPVRRAGKPCQSVRGSAIDDAIGSLLLESVAPAVLEVALAVEDEISGRVKQAAAQRQKQLVRARYDAELARRRYMSVDPTNRLVADSLEADWNERLRVLDALQQENERLQHADHKLLSSDARTQIRALAEDFPRVWNDQRVVPVERKRMIALLIEDVTLVKAERIAIHVRFRGGRTTSLEIDKPKPIALIRKTLPEVVAKVDELLETCSDRQVAEQLNALGYTNWKGESFTHKKVSIVRTAYRLKSRFERLRARGMVTANELAKQLGVCPTTIYLWGQRGVVHQHRYGNLHRCLYEPLGDVVLVKGQGGRYSSTEPTFIPVPSTTQGAV

SEQ ID NO: 12454 - protein, 694 aa, Unknown
  Description of Unknown: Integrase A1022 sequence
  IPR006119,cd00338,PF07508,PS51736, G3DSA:3.40.50.1390,SM00857,IPR025827,IPR036162, PTHR30461,PF13408,SSF53041,PS51737, PF00239,IPR011109
MFTETHQKVTADHLSRDAFLYVRQSSLRQVFENTESTKRQYALRERASALGWPIERIHVIDSDLGRSGASAEGRDGFQQLVSEVAIGHAGIVLGLEVSRLARNNADWHRLIELAALSHTLILDEDGIYDPAHFNDRLLLGLKGTMSEAELHVLRARLQGGIRNKARRGELELALPIGLVYGADGSVVLDPDRQIQDTLRLLFVSFAECGSASAVVRRFQREGWAFPRRIRGGIGKGELLWATLDHSRAVQILHNPRYAGAFVYGRTRGGRNAQLKSVQHKVAREQWHVLIRDAHVGYIDWEEYERNQATLKQNVGGFGEASRGRVPREGTGLLQGRVVCGLCGARMRVRYQEVEGRLEPYYQCTDAVVRRAGKLCQSVRGRPIDEAISALLLESVAPAAIEVALAVQEEIAGRLEQAETLRASQLERARYEAELARRRYLKVDPDNRLVADALEADWNARLRQLDALQREHERQRAADQGLLGEEARGRILALAKEFRHVWNDPRTEPIERKRMMALLIEDVTLVKADRVSIHVRFRGGKTRSLLIDKPKPIAQIRKTSPQVVQTVDELLETCTDRQVAARLNELGYRNWQGQSFTFKKVIVLRNAYHLKSRFERLRERGMRTGDELAKQLDVCPTTIHQWGRQGLLRRHLYGNNHRCLYEPVGEVLVTKGAGGRYGSRSPTLIAVSSTTQGAI

SEQ ID NO: 12455 - protein, 694 aa, Unknown
  Description of Unknown: Integrase A1023 sequence
  IPR006119,cd00338,PF07508,PS51736,G3DSA:3.40.50.1390, SM00857,IPR011109,IPR025827,PTHR30461,PF13408, SSF53041,PS51737,PF00239,IPR036162
MSTDNAMKISADHLRRDAFLYVRQSSLRQVFENTESTKRQYALRDRAVALGWPIERVHVIDNDLGLSGAQSQDRDGFQRLVSEVAMGHAGIVLGLEVSRLARNNADWHRLLELAAMSRTLIMDEDGVYDAASFNDRMLLGLKGTMSEAELHILKSRLQGGILNKARRGELELPLPIGFVYTPDTRVVLDPDRQIQDTVRMLFDTFREAGSACAVVRRLRSEKILFPRRIRRGLGKGDVLWSEIDHSRLLQILHNPRYAGAFAYGRTRTVYNAKLKSVQQKMPRSDWQVLIPQAHEGYISWDEFERNQSSLEQNAVGFSPGLRGRMPRQGSGLLQGRVLCGRCGARMRVHYEQFEDKLRPYYVCNEAVVRHAGKTCQWARGPAIDEAVSALLLEAMAPTAIEVALAVQQEISQRVEQAASLRDKQLQRARYEAELARRRYLKVDSDNRLVADALEADWNGKLRDLDALQREHERQNETDQSLLDGAAQERIRALAADFPSVWSNERTSVVERKRMLGLLIEDVTLLVDEQINMHIRWRGGRTQSLTVARPRPMAVIRKTPEAVVALINELLETDNDQQIASRLNALGHRNWRGEPFTLKKVMIVRRAYGLKTRFERLRESGMLTGEEVARQLGVSATTIHQLGRDGVLKRHRYATNHRYLYEPPGNVRLEKGIGGRYGSRQPRLIDAQPTQQGAS

SEQ ID NO: 12456 - protein, 694 aa, Unknown
  Description of Unknown: Integrase A1024 sequence
  IPR006119,PF00239,cd00338,PF07508, PS51736,G3DSA:3.40.50.1390,SM00857,IPR011109, IPR025827,PF13408,PTHR30461,PS51737, SSF53041,IPR036162
MSTNSALKVTAEHLRRDAFLYVRQSSLRQVFENTESTKRQYALRDRAVSLGWPIERIHVVDNDLGMSGSSTQGRDGFQHLVAEVANGHAGIVLGLEVSRLARNNADWHRLIELASLTQTLICDEDGIYDPGQFNDRLLLGLKGAMSEAELHVLKGRLQGGIKNKARRGELEVPLPIGLVYHPNGSVVLDPDQQVRGALQLLFDTFRQAASATATVKRFRQEGWLFPRRIRRGIGKGDLIWGPLEHCRVIQILHNPRYAGAFVYGRTRGAYRQGRKSFGLKVDRENWQVLIQNAHPGFIDWDEFERNQATLKQNLTGFGRDRRGSMPREGVGLLQGRVVCGLCGARMRVRYQVVGNKLEPYYMCTENPVRRASKPCQSVRGSAIDDTIGSLLLESVAPAALEVALAVEDEISGRVKQAADQRQNQLARARYDAELARRRYMSVDPTNRLVADTLEADWNERLRVLDGLQQENERLQKADHKLLSSDARTKIQSLAEDFPRVWNDQRVVPLERKRMVALLIEDVTLVKSERVAIHVRFRGGRTTSLEIDKPKPIALIRKTLPEVVAKIDELLETGSDRQVAEQLNALGYTNWKGETFTHKKVYLVRTAYRLKSRFERLRERGMVTANELAAQLGVCPTSIHLWARRGLLRQHRYGNLHRCLYEPVGDVVLVKGQGGRYSSTQPTFIAVPPTAQGAV

SEQ ID NO: 12457 - protein, 694 aa, Unknown
  Description of Unknown: Integrase A1025 sequence
  IPR006119,PF00239,cd00338,PF07508,PS51736, G3DSA:3.40.50.1390,SM00857,IPR011109,IPR025827,PF13408, PTHR30461,PS51737,SSF53041,IPR036162
MSTDNAMKISADHLRRDAFLYVRQSSLRQVFENTESTKRQYALRDRAVALGWPIERVHVIDNDLGLSGAQSQDRDGFQRLVTEVAMGHAGIVLGLEVSRLARNNADWHRLLELAAMSRTLIMDEDGVYDAASFNDRILLGLKGTMSEAELHILKSRLQGGILNKARRGELELPLPIGLVYTPDMRVVLDPDRQIQDTVRMLFDTFREVGSACAVVRRLRSEKILFPRRIRRGIGKGDVLWSAIDHSRVIQILHNPRYAGAFAYGRTRTIYNAKLKSVQQKMPRSDWQVLIPQAHEGYISWDEFERNQTSLEQNAVGFSPGLRGRMPRQGNGLLQGRVLCGRCGARMRVHYEQFEGNLRPYYICNEAVVRHAGKVCQWARGPAIDEAVSALLLEAMAPTAIEVALAVQEEISQRVEQAASLRDKQLQRARYEAELARRRYLKVDPDNRLVADALEADWNGKLRDLDTLQREHERQNDTDQSLLDGAMQERIRALAADFPRIWNNERTSPVERKRMLGLLIEDVTLLVDEQINMHIRWRGGRTQSLAVARPRPMAVIRKTPEAVVALINELLETDNDQQIASRLNALGHRNWRGEAFTLKKVMLVRRAYGLKTRFERLRESGMLTGEEVARRFGVSATTVHQLGRDGVLKRHRYATNHRYLYEPPGNVRLAKGVGGRYGSRQPRLMDAQQIQQGAS

SEQ ID NO: 12458 - protein, 694 aa, Unknown
  Description of Unknown: Integrase A1026 sequence
  IPR006119,PF00239,cd00338,PF07508, PS51736,G3DSA:3.40.50.1390,SM00857,PS51737, IPR025827,IPR036162,PTHR30461,PF13408, Coil,SSF53041,IPR011109
MSTDIAIKVDADHLRRDAFLYVRQSSLRQVFENTESTKRQYALRDRAVALGWPIERVHVIDSDLGLSGAQSQDRDGFQHLVSEVAMGHAGIVLGLEVSRLARNNADWHRLLELAALSRTLIMDEDGVYDPAYFNDRMLLGLKGTMSEAELHILKSRLQGGILNKARRGELEMPLPIGLVYTPDARVVLDPDRQIQDTVRLLFDTFRQTGSACAVVRRLRGEKILFPRRIRRGIGKGDVLWNEIDHSRVLQILHNPRYAGAFAYGRTRTAYNAKLKPVQLRVARSDWQVLIPDAHDGYISWAEYERNQAALEQNATGFSPGLRGRMPRQGSGLLQGRLLCGRCGARMRVHYEPFEGRLRPYYVCNEAVVRHAGKHCQWVRGAPVDEAVSALLLEVMAPAAIDVALAVQQEITQRVEQAAALRGTQLQRARYEAELARRRYLKVDPDNRLVADALEADWNARLRDLDALQREHERQNEADHSLLDEPAQQRIRALTADFPRIWNDERTGAVERKRMLGLLIEDVTLLVDDEVNINIRWRGGRTQSLSVARPRPMSVIRKTPAQVVALINELLEATNDRQIAARLNELGHRNWRGEPFTPKKVMLVRRTYGLKSRYERLREGGMLTGEEVAQQLGVCESTVHQLGRKGTLKRHRYASNHRYLYEPPGNVRLEKGAGSRYGGRQPRLIVAQPLQQGAS

SEQ ID NO: 12459 - protein, 694 aa, Unknown
  Description of Unknown: Integrase A1027 sequence
  IPR006119,cd00338,PF07508,PS51736,G3DSA:3.40.50.1390, SM00857,IPR025827,IPR036162,PTHR30461,PF13408, SSF53041,PS51737,PF00239,IPR011109
MSTDNAMKISADHLRRDAFLYVRQSSLRQVFENTESTKRQYALRDRAVALGWPIERVHVIDNDLGLSGAQSQDRDGFQRLVTEVAMGHAGIVLGLEVSRLARNNADWHRLLELAAMSRTLIMDEDGVYDAASFNDRMLLGLKGTMSEAELHILKSRLQGGILNKARRGELELPLPIGLVYTPDMRVVLDPDRQIQDTVRMLFDTFREVGSACAVVRRLRSEKILFPRRIRRGIGKGDVLWSEIDHSRVIQILHNPRYAGAFAYGRTRTIYNAKLKSVQQKMPRSDWQVLIPQAHEGYISWDEFERNQTSLEQNAVGFSPGLRGRMPRQGNGLLQGRVLCGRCGARMRVHYEQFEGNLRPYYICNEAVVRHAGKACQWARGPAIDEAVSALLLEAMAPTAIEVALAVQEEISQRVEQAASLRDKQLQRARYEAELARRRYLKVDPDNRLVADALEADWNGKLRDLDTLQREHERQNETDQSLLDGAMQERIRALAADFPRIWNNERTSPVERKRMLGLLIEDVTLLVDEQINMHIRWRGGRTQSLAVARPRPMAVIRKTPEAVVALINELLETDNDQQIASRLNALGHRNWRGEAFTLKKVMLVRRAYGLKTRFERLRESGMLTGEEVARRFGVSATTVHQLGRDGVLKRHRYATNHRYLYEPPGNVRLAKGVGGRYGSRQPRLIDAQQIQQGAS

SEQ ID NO: 12460 - protein, 694 aa, Unknown
  Description of Unknown: Integrase A1028 sequence
  IPR006119,PF00239,cd00338,PF07508, PS51736,G3DSA:3.40.50.1390,SM00857,IPR025827, IPR036162,PF13408,PTHR30461,PS51737, SSF53041,IPR011109
MSTDNAMKISADHLRRDAFLYVRQSSLRQVFENTESTKRQYALRDRAVALGWPIERVHVIDNDLGLSGAQSQERDGFQRLVTEVAMGHAGIVLGLEVSRLARNNADWHRLLELAAMSRTLIMDEDGVYDAASFNDRMLLGLKGTMSEAELHILKSRLQGGILNKARRGELELPLPIGLVYTPDMRVVLDPDRQIQDTVRMLFDTFREVGSACAVVRRLRNEKILFPRRIRRGIGKGDVLWSEIDHSRVIQILHNPRYAGAFAYGRTRTIYNAKLKSVQQKMPRSDWQVLIPQAHEGYISWDEFERNQTSLEQNAVGFSPGLRGRMPRQGNGLLQGRVLCGRCGARMRVHYEQFEGNLRPYYICNEAVVRHAGKACQWARGPAIDEAVSALLLEAMAPTAIEVALAVQEEISQRVEQAASLRDKQLQRARYEAELARRRYLKVDPDNRLVADALEADWNGKLRDLDTLQREHERQNETDQSLLDGAMQERIRALAADFPRIWNNKRTSPVERKRMLGLLIEDVTLLVDEQINMHIRWRGGRTQSLAVARPRPMAVIRKTPEAVVALINELLETDNDQQIASRLNALGHRNWRGEAFTLKKVMLVRRAYGLKTRFERLRESGMLTGEEVARRFGVSATTVHQLGRDGVLKRHRYATNHRYLYEPPGNVRLAKGVGGRYGSRQPRLMDAQQIQQGAS

SEQ ID NO: 12461 - protein, 694 aa, Unknown
  Description of Unknown: Integrase A1029 sequence
  IPR006119,cd00338,PF07508,PS51736,G3DSA:3.40.50.1390, SM00857,IPR025827,IPR036162,PTHR30461,PF13408, SSF53041,PS51737,PF00239,IPR011109
MSTDNAMKISADHLRRDAFLYVRQSSLRQVFENTESTKRQYALRDRAVALGWPIERVHVIDNDLGLSGAQSQDRDGFQRLVTEVAMGHAGIVLGLEVSRLARNNADWHRLLELAAMSRTLIMDEDGVYDAASFNDRMLLGLKGTMSEAELHILKSRLQGGILNKARRGELELPLPIGLVYTPDMRVVLDPDRQIQDTVRMLFDTFREVGSACAVVRRLRSEKILFPRRIRRGIGKGDVLWSEIDHSRVIQILHNPRYAGAFAYGRTRTIYNAKLKSVQQKMPRSDWQVLIPQAHEGYISWDEFERNQTSLEQNAVGFSPGLRGRMPRQGNGLLQGRVLCGRCGARMRVHYEQFEGNLRPYYICNEAVVRHAGKACQWARGPAIDEAVSALLLEAMAPTAIEVALAVQEEISQRVEQAASLRDKQLQRARYEAELARRRYLKVDPDNRLVADALEADWNGKLRDLDTLQREHERQNETDQSLLDGAMQERIRALAADFPGIWNNERTSPVERKRMLGLLIEDVTLLVDEQINMHIRWRGGRTQSLAVARPRPMAVIRKTPEAVVALINELLETDNDQQIASRLNALGHRNWRGEAFTLKKVMLVRRAYGLKTRFERLRESGMLTGEEVARRFGVSATTVHQLGRDGVLKRHRYATNHRYLYEPPGNVRLAKGVGGRYGSRKPRLIDAQPIQQGAS

SEQ ID NO: 12462 - protein, 694 aa, Unknown
  Description of Unknown: Integrase A1030 sequence
  IPR006119,PF00239,cd00338,PF07508, PS51736,G3DSA:3.40.50.1390,SM00857,IPR025827, IPR036162,PTHR30461,PF13408,PS51737, SSF53041,IPR011109
MSTDNAMKISADHLRRDAFLYVRQSSLRQVFENTESTKRQYALRDRAVALGWPIERVHVIDNDLGLSGAQSQDRDGFQRLVSEVAMGHAGIVLGLEVSRLARNNADWHRLLELAAMSRTLIMDEDGIYDAASFNDRMLLGLKGTMSEAELHILKSRLQGGILNKARRGELELPLPIGFVYTPDTRVVLDPDRQIQDTVRMLFDTFREAGSACAVVRRLRSEKILFPRRIRRGIGKGDVLWSEIDHSRLLQILHNPRYAGAFAYGRTRTVYNAKLKSVQQKMPRSDWQVLIPQAHEGYISWDEFERNQTSLEQNAVGFSPGLRGRMPRQGNGLLQGRVLCGRCGARMRVHYEQFEGNLRPYYICNEAVVRHAGKACQWARGPAIDEAVSALLLEAMAPTAIEVALAVQEEISQRVEQAASLRDKQLQRARYEAELARRRYLKVDPDNRLVADALEADWNGKLRDLDALQREHERQNETDQSLLDGAMQERIRALAADFPGIWNNERTSVVERKRMLGLLIEDVTLLVDEQINMHIRWRGGRTQSLAVTRPRPMAVIRKTPETVVALINELLETDNDQQIASRLNTLGHRNWRGEPFTLKKVMLVRRAYGLKTRFERLRESGMLTGEEVAHRLGVSATTVHQLGRDGVLKRHRYATNHRYLYEPPGNVRLAKGVGGRYGSRKPRLIDAQPIQQGAS

SEQ ID NO: 12463 - protein, 693 aa, Unknown
  Description of Unknown: Integrase A1031 sequence
  IPR006119,PF00239,cd00338,PF07508,PS51736, G3DSA:3.40.50.1390,SM00857,IPR025827,IPR036162,PTHR30461, PF13408,PS51737,SSF53041,IPR011109
MSTERYQKVTHDHLRRDAFLYVRQSSLRQVFENTESTKRQYALRERAVSLGWPIERIHVIDTDLGLSGASAEHRDGFQQLVSEVAIGHAGIVLGLEVSRLARNNADWHRLIELAALTHTLILDEDGVYDPAYFNDRLLLGLKGTMSEAELHVLNARLQGGMRNKARRGELELPLPVGLVYHPNGSVVLDPDQQIHASLRLLFDTYRQTHSASMVVRRFRREGWSFPRRIRRGIGKGEVHWGALNTSRVLQILHNPRYAGAFVYGRTRIGRKADLTSTQLKVAQSDWQVLIRDAHIGYIDWDEFERNQVTLRQSANGFGSLVRGTVPREGDGLLQGRVICGICGNRMRVRYQKVSDRMEPYYVCHDVAAHDAGKPCQSIRGRAIDDAISALLLETVGPATIEVALAVEDEIAGRIEQADSMRLKQLERARYEAELARRRYMNVDPANRMVADALEADWNDRLRRLDVLQQEHDRQRRSDQDLLGDEARARIRALADDFAAVWNDRRVESIERKRMLGLLIEDVTLVKSEKVSIHVRFRGGRTTSLAVDNPRPMALVRKTLPAVVTVIDELLETCTDQQVATRLNELGYTNWQQQAFTARKVALVRTTYGLPSRFERLRSRGLLTGAELAAQFKVSQTTIHQWGRQGLLRRQVYGHDHRCLYEPPGNVLLVRGAGGRKATQATFIAAPTTGQGAM

SEQ ID NO: 12464 - protein, 692 aa, Unknown
  Description of Unknown: Integrase A1032 sequence
  IPR006119,cd00338,PF07508,PS51736, G3DSA:3.40.50.1390,SM00857,IPR025827,SSF53041, IPR036162,PF13408,PTHR30461,mobidb-lite, PS51737,PF00239,IPR011109
MMGEQHAKIQARHLKRNAYLYVRQSTLRQVLENSESTKRQYDLRERALALGWRLDQVVVIDSDLGQSGASAVDREGFQRLVSEVGLGRAGIVMGLEVSRLARNSTDWHRLLEICALADTLILDEDGVYDPAHFNDRLLLGLKGTMSEAELHVLQARLRGGILNKARRGELEIRLPIGFDYDPAGRVRLDPDVRVQESLRQFFRTFRRTGSATATVKAFRAEGLSFPHRIYRGPQTGELLWTDLEHSRALWLLHHPRYTGAFCFGRTRVRKQPDGSHRHQRLPSEEWIALIRDAHAGYITWDEYEENLRILRDNAQAPATGRDRGTPREGPALLQGLALCAKCGDRMTVRYHVNGTRRVPDYVCQREGVEHAQPICQQIVGGELDAAIGRLLVEVVTPITLGVALAVQKELESRSEDSDRLRRQAVERARYESDLARRRYMRCDPDNRLVADSLEVEWNQALRNQTAAQEHYDKQRESETGLDDQQRAAILALAKDFPRLWNDPHTADRERKRMARLLIADVTLLKEADIRAQVRFSGGATHTLHLPLPKPAWMLRQTPGTVVAEIDRLLEDHTDSEIADWLNDQGLISGDGKPFHRPMVRRIRIDYALPSRHDRLRARGLLTLHEMAQRLNICPDSLKRWRRAGLLKAHKYDDRGGYLFEPPGPDTPVKHQHQGKTTGKSTTREGSFPAHTA

SEQ ID NO: 12465 - protein, 692 aa, Unknown
  Description of Unknown: Integrase A1033 sequence
  IPR006119,PF00239,cd00338,PF07508,PS51736, G3DSA:3.40.50.1390,IPR038109,SM00857,IPR011109,Coil, PTHR30461,G3DSA:1.10.10.2600,PS51737,SSF53041,IPR036162
MTNADRLPAPLLQRKAVVYVRQSTQAQVQMNLESQRRQYELVGEAKRRGFRDIEVIDDDLGRSASGTVARPGFERLVALLCAGEVGAVLCLDASRLARNGRDWHHLLELCGLVEARVIDLDGVYDPCRPNDRLLLGMKGSISEFELNVLRTRMLDAARSKAQRGELRISVPIGYLWHRDVGLGLDPNQRLQEVIRMIFTRFRELGSARQAFLSLQAEQIHFPRPTDGRTLTHFDWTLIRYRNVISVLRNPFYAGAYAYGKSGKQTTIVDGRAHKTYKHRKPFEEWEVLLKEHHEGYIDWAEFERNQKLLAANAYGKAGDVKSGRGGRALLAGLLGCARCGRRLSVAYTGRTPRPVYRCYRFDLPPKCMSFGGSRIDAAIARELMRVVEPVAIEAALQAEQMLMDTLSEQRRIIELELQQAQYEATLAERRYAACDPDNRLIAAQLEKNWEAALRRVQACQARLETTRTSAAPIAAPDFTKLAEDLDAAWNAPGVTMRMRQQLVRVLIVDIVADVNESTREVILTIHWQGGQHSQVRIRKPKTGEHGCSTSDEALAVMRSMATRWSDQDIAASLNRMGIRTGQGKTWTAHRVSSVRRVRNIYAYKSAEKDGDWLTMSEAAKALGVTHYMIRRLINDKVLPAEQVMPDAPWQIRASDLRSEAVTAALTRKHRPCRNDVEGQLPMFTEVSEGGAQ

SEQ ID NO: 12466 - protein, 692 aa, Unknown
  Description of Unknown: Integrase A1034 sequence
  IPR006119,SSF46955,cd00338,PF07508,PS51736,G3DSA:3.40.50.1390, SM00857,IPR011109,IPR025827,IPR009061,PS51737,PF13408,PTHR30461 ,SSF53041,Coil,cd16862,PF00239,IPR036162
MNSKVRTTHLERHAVVYLRQSTPTQVEFHRESTERQYALADRALTLGWDKSQIEVLDSDLGKSGQTTTGREDFHRLMAAVGLGEVGAVLALEASRFSRSQADWHKLLDICALTDTLVIDHDGIYDPNDFNDRVILGFKGTWSHTELHGMRLRLQGAKLNKAKKGELRCSPPTGYVYDPEGKLVLDPDEGVVAAIQLAFQQFRELRTAFKVMRYFCVNQIPFPRRRWRPGDIGTLHWGPANLSRITALLHNPTYTGTYVYGRRRSFNVIEGGQIKKVKIQQLPQEEWKVIIHNAHEAYISWSEYLSNCERLRQNSPVSLSDGCPSTPREGFALLQGLVICGKCGRRMSPRYHGTGGCRAAYECSQARKQDGSMGVCWTVAGAAIDTAVAEQVLEAFTSEQLDISLAVLSELENQAFEIDKTWQLRLERARYEADRAFRQYDATEPENRLVARTLERRWNEKLQQLAELEEAYQKARLVQRLELTAAQRQQILQLANDIPTLWHASTTTNLERKEILGLLVKQVAITPIDAPERSTRVQILWHTGATSCFVATRPTNAEKFRTPKQVIQLIEELAVGRTDSEIAHELNRRGLVGGKGRAFTKKGVAWIRWKFGIEKPLSNPQVAHLGVSPEGYYSTSALAEKLGVGIHTIYYWRDKGIIQAFQETDRSPWWYKVTPEILDTLREKIRRVPVKSE

SEQ ID NO: 12467 - protein, 692 aa, Unknown
  Description of Unknown: Integrase A1035 sequence
  IPR006119,SSF46955,PF00239,cd00338,PF07508, PS51736,G3DSA:3.40.50.1390,SM00857,PS51737,IPR025827, IPR009061,IPR036162,PF13408,PTHR30461,Coil, SSF53041,IPR011109
MNNKISSTHLERRAVVYLRQSTPTQVEFNRESTERQYALADRALTLGWDKSQISVLDSDLGKSGQTTTGREDFHRLMAAVGLGEVGAVLALEASRFSRSQADWHKLLDICALTDTLVIDHDGIYDPNDFNDRVILGFKGTWSHTELHGMRLRLQGAKLNKAKKGELRCSPPTGYVYDPEGKLVLDPDEGVVAAIQLAFQKFRELRTAFKVMRYFCVNQIPFPRRRWRPGDIGTLHWGPANLSRITALLHNPTYTGTYVYGRRRSFNVIEGGQIKKVKIQQLPQEEWKVIIHNAHEAYISWSEYLSNCERLRQNSPISLSDGCPGTPREGFALLQGLVICGKCGRRMSPRYHGTGGCRAAYECSQARKLDGSMGVCWSVAGAAIDTAVSAHVLSAFTDEQLDISLAVLSELENIADEADKTWQLRLERARYEAERAGRQYDATEPENRLVARTLEKRWNEKLQQLAELEEAYQKARLVQRLELTAVQRQQILQLANDIPTLWHASTTTNLERKEILGLLVKQVAITPIDAPERSTRVQILWHTGVTSELIATRPTNAEKFRTPNQVIQLIEELAVGRTDSEIAHELNRRGLVGGTGRAFTKKGVAWIRWKFGIEKPLSNPQVAHDGVSPEGYYSTSALAEKLGVGIHTVYYWRDKGIIQAFQETPRSPWWYIVTPEVLETLREKIRRVPVKSE

SEQ ID NO: 12468 - protein, 691 aa, Unknown
  Description of Unknown: Integrase A1036 sequence
  IPR006119,PF00239,cd00338,PF07508,PS51736, G3DSA:3.40.50.1390,SM00857,IPR011109,PS51737,IPR041657, PTHR30461,Coil,SSF53041,PF12728,IPR036162
MSKITPVHLARAAFVYIRQSTAYQVVNNLESQRRQYGLVERARQLGWEDVQLVDDDLGRSGGGTVRPGFEKLLSAICEERVGAVVSLEASRLARNGRDWHTLLEFCGLVGTLIVDEEAIYDPRSPNDRLLLGMKGTMSEMELSIFRQRSVEAMRQKARRGELHLTVAVGYVKTDDSRIEKDPDRRVQDGILLVFSKFAELQSIRQVLLWFRQENVLVPAIVQGRGKRPVEWKAPVYHTLHHMLTNPVYAGSYAYGRRGTRVTIKDGRKRIMRDTLRRNWKDWEVLIHDHHEGYIAWTEFERNQHVIADNANGKSYMGRGSIRRGEALLPGLFRCARCGRRLHIQYTGKGGNTQRYACRGAFGTRAADNCIGFGGMRVDRAVAQEVLDRLQPLGIEAALAAMEAQSVHHCDKRKHIENAIQQAQYEAARARRQYDAVDPDNRLVASELERRWNEKLVQLRDLEVQLETLEQTQHTPALSAADRARLMTLGKDLTKAWNSPGASIETRKKIIRLLVKEIIVDVVGDTLALIIHWQGGDHTQLTVKKNKIGQTRWTVEADVLDLIRVLARQLSDTAIAAILNRAGKLTAHGASWTRSHVCSLRNINGIPVYREGERAERAEVTLDEAADILKVSRTTAYRMVSSGTLPARQLCGGAPWIIQLADLQRDAVCREADARRSRRPISRDPQQNLFAL

SEQ ID NO: 12469 - protein, 691 aa, Unknown
  Description of Unknown: Integrase A1037 sequence
  IPR006119,cd00338,PF07508,PS51736,G3DSA:3.40.50.1390,SM00857 ,IPR025827,IPR041657,Coil,SSF53041,IPR036162,PTHR30461,PF13408 ,mobidb-lite,PS51737,PF00239,PF12728,IPR011109
MSKITADHLSLSAFVYVRQSTAYQVANNLESQRRQYGLVERARQLGWETVEIVDDDLGRSGGGIARPGFEKLLAAICEGRVGAVVSLEASRLARNGRDWHTLLEFCGLVGTLIVDEEAIYDPRSPNDRLLLGMKGTMSEMELSVFRQRSVEAMRQKARRGELHLTVAVGYVKTDDARVEKDPDRRVQESILLVFRKFAELQTVRQVLLWFRQENVLVPSVNQGRGKPPIEWKAPVYHTLHHILTNPVYAGSYAYGRRGTRVMIKDGRKRVIRDTLRRNSKDWEVLIHDHHEGYISWAEFERNQHLIAENANGKSYIGRGSIRRGEALLPGLFRCGRCGRRLHIQYSGKGGNTQRYVCRGTFGDMAAANCIGFGGMRVDRAVAQEVLERLQPLGIEAALQAMEAHTQRHSDKRQQLENSIKQAQYEAARARRQYDAVDPDNRLVAGELERRWNEKLIQLRDLEIELETLSTDRDMPALSADDRARLMKLGRDLGQAWDSPSVSIETRKKIIRLLITEIVVDIVDDTLAIIIHWQGGDHTRMTVKKNKIGQTRWAVKADVVDLVRALARQLPDLSIAAILNRSGKRTGHGASWTRSHVCSLRNIHGIPVYREGERAERGERTLDETADILKVSRATAYRMVSSGVLPARQLCAGAPWIIQLSDLQDDTVRREADARRSRRPISQDPVQNPLLF

SEQ ID NO: 12470 - protein, 691 aa, Unknown
  Description of Unknown: Integrase A1038 sequence
  IPR006119,PF00239,cd00338,PF07508,PS51736, G3DSA:3.40.50.1390,SM00857,IPR025827,IPR041657,Coil, IPR036162,PF13408,PTHR30461,PS51737,SSF53041, PF12728,IPR011109
MSKITIDHLALSAFIYVRQSTAYQVANNLESQRRQYSLVERARQLGWETVEIVDDDLGRSGSGTARPGFEKLLAAICEGRVGAVVSLEASRLARNGRDWHTLLEFCGLVGTLIVDEEAIYDPRSPNDRLLLGMKGTMSEMELSVFRQRSVEAMRQKARRGDLHLTVAVGYVKTDDVRVEKDPDRRVQESILLVFRKFAELQTVRQVLLWFRQENVLVPSVLQGRGKRPIEWKAPVYHTLHHILTNPVYAGSYVYGRRATRVMIKDGRKRVTRDTLRRNPKDWDVLIHGHHEGYISWAEFERNQHLIAENTNGKSYMGRGSIRRGEALLPGLFRCGRCGRRLHIQYSGKGGNTQRYVCRGTFGDMAAGNCIGFGGMRVDRAVAQEVLERLQPLGIEAALQAMEAHTQRHSDQHQQLENSIKQAQYEAARARRQYDAVDPDNRLVAGELERRWNEKLIQLRDLELQLQTLTGDRDTPVLSADDRTRLMTLGRDLGKAWDSPNASIETRKKIIRLLIKEIIVDIVDDTLALIIHWQGGDHTRMTVKKNKIGQTRWAVKADLVDLVRALARQLPDLSIAAILNRSGKRTGHGASWTRSHVCNLRNIHGIPVYREGERAERGERTLDETADILKVSRATAYRMVSSGVLPARQLCTGAPWIIQLSDIQDDAVRREADARRSRRPISQDPVQNPLLF

SEQ ID NO: 12471 - protein, 691 aa, Unknown
  Description of Unknown: Integrase A1039 sequence
  IPR006119,PF00239,cd00338,PF07508,PS51736,G3DSA:3.40.50.1390 ,G3DSA:1.10.1660.10,SM00857,IPR011109,IPR025827, PS51737,PTHR30461,PF13408,Coil,SSF53041, IPR036162
MNAFSPLPPALLKRKAVVYVRQSSQSQVMQNLESQRRQYDLVDAARQHGFRRVEVIDDDLGLSASGAVARPGFERLVAWLCAGDVGAVLCFDASRLARNGRDWHHLLELCGLVDARVIDQDGVYNPCSPNDRLLLGMKGTISEFELGIIRARMLDAARAKARRGELRISVPIGYIWYRDAGLGFDPDLRVQEAVRLIFSRFRELRSGRQVLLSLTEDKLCFPRPTDGRNTTTFDWTPIRYRNVISVLKNPFYAGVYAYGKSEKRTEIIDGRARKTYGHGKPKEEWEVFLKDHHDGYIEWDEYERNQALLAANAYGQKGGAKSGRGGRALLSGLLSCGRCGRRLCVAYTGKTPRPVYRCERPNLMLGLNRCLGFGGPRIDKAVAAELLRVVQPMAIEAAMQAEHMQSEARAERRRAAELDLQKAQYEAALAERRYAACDPDNRLIAATLEKNWEVALKRLEACKTRLDAEQLPDTPAKLPDLDGLAEDLQAAWNAPGVSTRARQRLARALIKDIIADVDEEARDVVLTIHWQGGQHSQLRVRKPKTGEHGCNTSEDALEVMRSMAGRWSDSDIAATLNRMGIRTGFGHTWTAHRVSSIRRVNDIHAYFSAEKSGKWLTMTEAATKLGVTNHVIRNLIKAKILPAEQVVPRAPYQIKAVDIEREDIIEAINNRRRKRPYRDPRQIALPINSIT

SEQ ID NO: 12472 - protein, 690 aa, Unknown
  Description of Unknown: Integrase A1040 sequence
  IPR006119,cd00338,PF07508,PS51736,G3DSA:3.40.50.1390, SM00857,PS51737,IPR025827,IPR036162,PF13408, PTHR30461,SSF53041,Coil,PF00239,IPR011109
MNTKITPQHQSKPAYIYIRQSTLAQVRHHQESTERQYALKDKALALGWTETAIRTLDRDLGQSGAQMTGREDFKTLVADVSMGQVGAVFALEVSRLARSNLDWHRLLELCALTHTLVIDADGCYDPGDFNDGLLLGLKGTMAQAELHFLHGRLQGGKLNKAQKGELRFPLPVGLCYDDQGRIVLDPDDEVRGAVQLAFRLFQETGSAYAVVKRFAEEGLRFPKRAYGGAWAGRLIWGRLSHERVLGLIRNPSYAGIYVFGRYQYRQRITPRGEVHKRVQPVPKAEWRVHLPDHHDGYITPEEFERNQDRLALNRTNGEGTVLSGAAREGLALLQGLLICGCCGRALTVRYQGNGGLYPLYLCSARRREGLATTDCMSMRSELLDNAIGEAVFTALQPAELELAVTALSELEQRDHAIMRQWHMRIERAEYEVALAERRYQECDPANRLVAGTLERRWNDAMLRLEAIRTEAAQFQSQKALVATSEQKAQVLALARNLPRLWRAPTTSAKDRKRMLRLLIRDITVERRSATRQAVLHIRWQGSACTDITVDLPKPAADAMRYPAAFVERVRELSQHLPDRQIVAHLNQEGIRSSTGKSFTLEMVKWIRYRYRIEVTCFKRPDELTVQQLAHRLHVSPHVVYYWIERQVVQARKLDGRGPWWVTLDAAKERQLKDWVRTSGHLQRQHSNTQL

SEQ ID NO: 12473 - protein, 690 aa, Unknown
  Description of Unknown: Integrase A1041 sequence
  IPR006119,PF00239,cd00338,PF07508, PS51736,G3DSA:3.40.50.1390,SM00857,IPR011109, IPR025827,PF13408,PTHR30461,mobidb-lite, Coil,SSF53041,IPR036162
MMHEKIGPHHLERKALLYVRQSSAHQVLHNRESSALQYAMRDRLTVLGWSSIETIDDDLGRSAAGGVTRAGFDRMVAEVCLGKVGAVAAREVSRFARNSRDWQQLIEMCRVVDTVLIDQETVYAPRQSNDRLLLGLKGSLNEYELDLLRQRSLSARYEKARRGELLVAAPVGFMKAGDRLEKDPDRRVQEAITLVFDKVAELGSARQALLWFLEHSLDLPARRANGDVVWRRPTYATIHRMIENPVYGGAYAYGKTRVTPRHDAIVPRSSSRRKRRGDWLALKPGAHEGYVSWERAEAIRTMVSDNIPASRHHGAPKHGDALLAGLLRCRRCGRKLTVRYTGTNHNIPRYSCWRGLLDNGEPRCIAFGGLRVDDAIEEALLRVVEPGAIAAAAAAEAQAAGRRDQVREALVRDLEAARYQADRAFRQYDAADPANRLVAAELETRWNRALAQAAEVEARIAEHDAAAPNSSSLAVLDAARLGTNLRAVWAAPTTDSRLKKRIVRTVIHEVVADIDDTASEIVLLVHWIGGAHTELRLPTRRRGQRNSTASEIIAAVRHLALIASDDLIAGILNRNRLLTGHGNRWTRERVTALRSHHKIQVFRPAPDGIEPQLNLTDAARLLGVAPKTLRLAAEAGVIEGDHPLPDGPWIFRRSELAKPAAAQITHRARQNPKHPAGSHPDQKNLSLSTT

SEQ ID NO: 12474 - protein, 690 aa, Unknown
  Description of Unknown: Integrase A1042 sequence
  IPR006119,PF00239,cd00338,PF07508,PS51736,G3DSA:3.40.50.1390 ,SM00857,G3DSA:1.10.1660.10,IPR038109,IPR011109, IPR025827,PS51737,PTHR30461,PF13408,G3DSA:1.10.10.2600, Coil,SSF53041,IPR036162
MTGTDLIPAQLLKRKAVVYVRQSTQSQVMTNLESQRRQYDLVDSARQHGFTDIEVIDDDLGRSASGTVARPGFDRLVASLCAGKVGAVLCLDASRLARNGRDWHHLLELCGLVEARVIDHDGVYNPCQPNDRLLLGMKGSISEFELGVLRTRMLDAARSKARRGELRLSVPFGYIWHREAGLGLDPDLRLQEVIRLIFARFRELGSARQVLLSMKADGIHFPRPSDEGRMTSFTWLPIRYRNVIAVLKNPFYAGVYVYGKSEKRTTIVDGRARRSYGHGKPVGTWEVFIKEHHEGYVSWEEYERNQKQLALNNYGRAGGVKSGRGGKALLSGIMTCGRCGRRLSVAYTGNPQSRPVYRCDKPNLMMGLPRCMTFGGLRVDAAVARELLRAVEPLAIEAAFEAERMNRERQEEQRQILDLELQQARYEASLAERRYAACDPDNRLIAAQLEKNWEIALRRVRDLKARQPAEGPSTIEADPNAFANLAENLSAAWNAPDVTMRARQQMLRTMIADIVVDVDDAVRDVVLTIHWRGGQHSELRVRKPKAGEHGCATAEDALEVMRSMAGRWSDEHIAATLNRMGLPTGQGKTWTAHRVYSVRRVRGIDAYRSAVKDGEWLTMTEAAKALGTSSHTIRLLIKTGVLPAVQVVPRAPHQIRSADLMSEAVKSAMARKGRPCRVVDADMLPMFTDT

SEQ ID NO: 12475 - protein, 690 aa, Unknown
  Description of Unknown: Integrase A1043 sequence
  IPR006119,PF00239,cd00338,PF07508,PS51736, G3DSA:3.40.50.1390,SM00857,IPR025827,Coil,IPR036162, PF13408,PTHR30461,PS51737,SSF53041,IPR011109
MNTKITPQHQSKPAYIYIRQSTLAQVRHHQESTERQYALRDQALALGWPQTSIRILDRDLGQSGAQMTGREDFKTLVADVSMGHVGAVFALEVSRLARSNLDWHRLLELCALTGTLVVDADGCYDPGDFNDGLLLGLKGTMAQAELHFLRGRLQGGKLNKAQKGELRFPLPVGLCYDDEGHIVLDPDDEVRGAVQLAFRLFHETGSAYAVVKRFAEGGLRFPKRAYGGAWAGRLIWGRLRHERVIGLIKNPSYAGIYVFGRYQYRQRITPQGEVHKRVQPVPKADWRVHLPEHHEGYITPEEFERNQARLAGNRTNGEGTVLSGPAREGLALLQGLLLCGCCGRALTVRYQGNGGIYPLYLCNAQRRQGLATRDCMNVRSDLLDNAIGAEVLKALRPTELELALTALNELEQRDQAIMRQWHMRIERAEYEVALAERRYQECDPANRLVAGTLERRWNDAMLRLEAIKAEAAQVQSQKARVATPEQKTQVLALARNLPRLWRAQTTPAKDRKRMLRLLIRDITVEKLTATRQAILHIRWQGGACTDITVNLPKPVAEAMRYPAALVEKVRQLSQHLSDPQIVARLNQEGLRSASGRPFTLSMVKWIRYRYQIASVSLKRGDELTVQQLARRLAVSAHVVYYWIKRKVVQARQLDGRGPWWITLDPAKERQLRDWVRTSGHLQPQHSNIQL

SEQ ID NO: 12476 - protein, 690 aa, Unknown
  Description of Unknown: Integrase A1044 sequence
  IPR006119,cd00338,PF07508,PS51736, G3DSA:3.40.50.1390,SM00857,IPR011109,IPR025827, SSF53041,PTHR30461,PF13408,mobidb-lite, PF00239,IPR036162
MICEKIGPQHLDRKAILYVRQSSAHQVLHNRESSALQYAMRDRLTALGWSQIETVDDDLGRSAAGGVTRAGFDRMVAEVCLGKVGAVAAREVSRFARNSRDWQQLIEMCRVVDTVLIDQETVYAPRQGNDRLLLGLKGSLNEYELDLLRQRSLSARYEKARRGELIVAAPVGFVKAGDRIEKDPDRRIQEAITLVFDKVGELGSARQALLWFIEHGLDLPAKRNNGDVVWRRPSYATIHRMIENPIYGGAYAYGKSRAATGYDGTTMRSRSRRKARDEWLALIPGSHEGYVSWERSEDIRKMVSDNVPTSRHHGAAKHGDALLAGLIRCRRCGRKLTVRYTGAGHDIPRYSCWRGLLDNGEPRCIAFGGLRVDDAIEQLLLQVLEPGAIAASVEAEAQAAGRRDQVRDVLMRDLEAARYAADRAFRQYDAADPQNRLVASELEARWNRALTRVGDVEARIVAHDASATHPPLPPLKDIDDLAGELEAVWNAPHSDTRVKKRIVRTLIQEVIADIDDDVSEIVLLIHWVGGIHTDLRLPKRRKGQRNSTSADIIAAVRELVLIANDDLIAGILNRNGLVTGHGNRWTRERVTALRSHHRIPVFRTVTDGPAPWLNLSQAARHVGVAPKTLRIAAEACEIEGIHPLPEGPWIFSRTELDGSAAHHLAKRARQNPKYPTGSHPSQRSLFSSTT

SEQ ID NO: 12477 - protein, 690 aa, Unknown
  Description of Unknown: Integrase A1045 sequence
  IPR006119,PF00239,TIGR01764,PF07508,cd00338, PS51736,G3DSA:3.40.50.1390,IPR010093,SM00857,IPR011109, G3DSA:1.10.1660.10,IPR025827,PS51737,PF13408,PTHR30461, Coil,SSF53041,IPR036162
MTKSDLIPTVLLRRKAVVYVRQSTQSQVMTNLESQRRQYDLVDLARQHGFADIEVIDDDLGRSASGTVARPGFDRLVAWLCAGKVGAVLCLDASRLARNGRDWHHLLELCGLVEARVIDHDGVYNPCQPNDRLVLGMKGSISEFELGVLRTRMLEAAKSKARRGELRLSVPFGYIWHREAGLGLDPDLRLQEVIRLIFARFRELGSARQVLLSMTADQIHFPRPSDEGRMTSFTWLPIRYRNVIGVLKNPFYAGVYVYGKSEKRTSIVDGRARRSYGHGKPVGTWEVFIKDHHEGYVSWEEYERNQKQLALNNYGRADGVKSGRGGKALLSGVMTCGRCGRRLSVAYTGNPQSRPVYRCDKPNLMMGLPRCMTFGGPRVDAAVARELLRAVEPLAIEAAFEAERMHRERQDDQRQILDLELKQARYEAGLAERRYAACDPDNRLIAAQLERNWEIALRRVQDLEARQPAGTPSTIEVDQGAFANMAENLSAAWNTPDVTMRARQQLLRTLIADIIVDVDDTVRDVVLTIHWRGGQHSELRVRKPRTGEHGCATAEDALAVMRSMAGRWSDEHIAASLNRMGLPTGQGKTWTAHRVSSVRRVRGIHAYRSAEKDGEWLTMTEAAMALGVTNHAIRRLIKTGVLPAVQVVPGAPYQIRADDLASEPIKTAMARKGRPCRAADAGTLPMFTDT

SEQ ID NO: 12478 - protein, 690 aa, Unknown
  Description of Unknown: Integrase A1046 sequence
  IPR006119,PF00239,TIGR01764,cd00338,PF07508, G3DSA:1.10.1660.10,PS51736,IPR010093,SM00857,G3DSA:3.40.50.1390, IPR011109,IPR025827,PS51737,PF13408,PTHR30461, Coil,SSF53041,IPR036162
MTKSDLIPTVLLRRKAVVYVRQSTQSQVMTNLESQRRQYDLVDLARQHGFADIEVIDDDLGRSASGTVARPGFDRLVAWLCAGKVGAVLCLDASRLARNGRDWHHLLELCGLVEARVIDHDGVYNPCQPNDRLVLGMKGSISEFELGVLRTRMLEAAKSKARRGELRLSVPFGYIWHREAGLGLDPDLRLQEVIRLIFARFRELGSARQVLLSMTADQIHFPRPSDEGRMTSFTWLPIRYRNVIGVLKNPFYAGVYVYGKSEKRTSIVDGRARRSYGHGKPVGTWEVFIKDHHEGYVSWEEYERNQKQLALNNYGRADGVKSGRGGKALLSGVMTCGRCGRRLSVAYTGNPQSRPVYRCDKPNLMMGLPRCMTFGGPRVDAAVARELLRAVEPLAIEAAFEAERMHRERQDDQRQILDLELKQARYEAGLAERRYAACDPDNRLIAAQLERNWEIALRRVQDLEARQPAGTPSTIEVDQGAFANMAENLSAAWNTPDVTMRARQQLLRTLIADIIVDVDDTVRDVVLTIHWRGGQHSELRVRKPRTGEHGCATAEDALAVMRSMAGRWSDEHIAASLNRMGLPTGQGKTWTAHRVSSVRRVRGIHAYRSAEKDGEWLTMTEAAMALGVTNHAIRRLIKTGVLPAVQVVPGAPYQIRADDLASEPIKAAMARKGRPCRAADAGTLPMFTDT

SEQ ID NO: 12479 - protein, 690 aa, Unknown
  Description of Unknown: Integrase A1047 sequence
  IPR006119,PF00239,cd00338,PF07508,PS51736, G3DSA:3.40.50.1390,SM00857,IPR011109,IPR025827,PTHR30461, PF13408,mobidb-lite,SSF53041,IPR036162
MISEKIGPQHLERKAILYVRQSSVHQVLHNRESSTLQYAMRGRLTAMGWSHIETIDDDLGRSAAGGVTRAGFDRMVAEVCLGKVGAVAAREVSRFARNSRDWQQLIEMCRVVDTVLIDQETVYAPRQGNDRLLLGLKGSLNEYELDLLRQRSLSARYEKARRGELVVAAPVGFVKAGDRIEKDPDRRVQEAIALVFDKVAELGSARQALLWFIEHGLDLPAKRNNGDVVWRRPSYATIHRMIENPIYGGAYAYGKSRAATGYDGTAMRSRSRRKARDEWLALIPGSHEGYVSWERSEDIRKMVSDNVPTSQHHGAPKHGDALLAGLIRCRRCGRKLTVRYTGAKHDIPRYSCWRGLLDNGEPRCIAFGGLRVDDAIERALLQVLEPGAIAASVEAEAQAADRRDQVRDVLMRDLEAARYAADRAFRQYDAADPQNRLVAAELETRWNRALTRAGEVEARIVAHDASTAHPALPSLKDIDGLASDLEAVWNAPQSDARLKKRIVRTLIQEVVADIDHDASEIVLLIHWVGGVHTDLRLPRRRKGQRNSTSADIIAAVRELVLIANDDLIAGILNRNGLVTGHGNRWTRERVTALRSHHRIPVFRTVADGPAPWLNLSQAARHIGVASKTLRIAAEAGEIKGIHPLPEGPWIFCRTELDGSAAHHLAKRARQNPKYPTGSHPDQQTLFSSTT

SEQ ID NO: 12480 - protein, 690 aa, Unknown
  Description of Unknown: Integrase A1048 sequence
  G3DSA:3.40.50.1390,SM00857,SSF53041,PF12728,IPR011109,TIGR01764 ,PF07508,IPR038109,IPR010093,IPR041657,G3DSA:1.10.10.2600 ,IPR036162,cd00338,PS51736,G3DSA:1.10.1660.10,PF13408,Coil, IPR006119,IPR025827,PTHR30461,PS51737,PF00239
MTSTDLIPTALLKRKAVVYVRQSTQSQVMTNLESQRRQYDLVDIARQRGFADIEVIDDDLGRSASGTVARPGFDRLVAWLCAGKIGAVLCLDASRLARNGRDWHHLLELCGLVEARVIDHDGVYNPCLPNDRLLLGMKGSISEFELGVLKARMLEAARSKARRGELRLSVPFGYIWHREAGLGLDPDIRLQEVIRLIFARFRELGSARQVLLSITADQIHFPRPSDEGRMTSFVWLPIRYRNVIAVLKNPFYAGVYVYGKSEKRTSIVDGRARRSYGHGKPVGTWEVMIKGHHEGYISWDEYERNQKQLALNNYGRAGGVKSGRGGKALLSGIMTCARCGRRLSVAYTGNPQSRPVYRCDKPNLMMGLPRCMTFGGPRVDAAVARELLRAVEPLAIEAAFEAERMHRERQDDQRQILDLELQQARYEANLAERRYAACDPDNRLIAAQLEKCWETTLRRLRDLETRQPTGRPPAIEVDPSAFANMAENLSAAWNGPDVTMRARQQLLRTLIADIIVDVDDAVRDVVLMIHWRGGQHSELRVRKPRAGEHGCATTEDALAVMRSMAGRWSDEHIAASLNRMGLPTGQGKTWTAHRVSSVRRVRGIHAYRSAEKDGEWLTMTEAAKALGVTNHAIRRLIKTGVLPAAQVVPGAPYQIRADDLASGSIKTAVARKGRPCRVADVDTLPMFTDT

SEQ ID NO: 12481 - protein, 690 aa, Unknown
  Description of Unknown: Integrase A1049 sequence
  IPR006119,cd00338,PF07508,PS51736,G3DSA:3.40.50.1390, SM00857,IPR011109,IPR025827,PS51737,PF13408, PTHR30461,SSF53041,Coil,PF00239,IPR036162
MSNTDLIPTALLARKAIVYVRQSSQSQVMTNLESQRRQYDLVDVARQHGFSDIETIDDDLGRSASGTVARPGFDRLVALLCAGQVGAVLCFDASRLARNGRDWHHLLELCGLVEARVIDHDGVYNPCRPNDRLLLGMKGSISEFELGVLRARMLDAARSKARRGELRLSVPFGYIWHREAGLGLDPDLRLQDVIRSIFTRFHELGSARQVLLSMTKDQVHFPRPSDEGRMTSFVWMPVRYRNVIGILKNPFYAGVYVYGKSEKRTAIVDGRARRTYGHGKPAGTWEVMIRDHHEGYITWDEYERNQQQLALNNYGRSGGTKSGRGGKALLSGLLTCGRCGRRLSVAYTGNPQSRPVYRCDKPNLMMGLPRCMTFGGPRVDAAVARELLRAVEPLAIEATFEAERMHRERQEDQRHIHDLELRQARYEASLAERRYAACDPDNRLIAAQLEKNWETALRRVRDLEVRKPADSPSTIEVDPDTFTNLADNLQAAWDSPDVTMRARQQLLRTLIADIVVDVDDAVREVVLTIHWKGGQHSELKVRKPQSGEHGCATTEDALAVMRSMAGRWSDEHIAASLNRMGMPTGQGKTWTAHRVASVRRVRAIHAYKSADKDGEWMTMTEAAAALGVTNHRIRHLIKTKVLSAEQVVPGAPYQIRASDLASATVQAAIARKARPCRIADAETLPMFTDT

SEQ ID NO: 12482 - protein, 690 aa, Unknown
  Description of Unknown: Integrase A1050 sequence
  IPR006119,cd00338,PF07508,PS51736, G3DSA:1.10.1660.10,SM00857,G3DSA:3.40.50.1390,IPR011109, IPR025827,PTHR30461,PF13408,SSF53041, PS51737,PF00239,IPR036162
MTNSELLPATVLRRKAVVYVRQSTQTQVQTNLESQRRQYDLVQEARRRGFAQIEVIDDDLGRSASGMVARPGFDRLVAWLCAGEVGAVLCFDASRLARNGRDWHHLLELCGLVEARVIDLDGVYDPCRPNDRLLLGMKGSISEFELGVLRSRMFEAARAKAHRGELRISVPVGYIWHREVGLGFDPDARLQEAVHLIFERFRKLGSARQVLLSLAADGVHFPRPSDGKKMVSFDWTPIRYRNVISVLKNPFYAGVYVYGKSEKRTTLVEGRLRKSYGHGKPADTWDVVIKDHHEAYIGWAEFERNQKLLAINAYGRVDGVKSGRGGRALLSGMLCCGRCGRRLTVNYVGGGIRQAVYRCDRPNNYLGQPRCFTFGGRRPDEAITRELLRAVEPLAIEAAMHAQRRHMEVQAEQRRIVELDLQQARYEASLAERRYAACDPDHRLIASQLEKGWEAALERVRRCEQRVAAFDQEQEAAPPPNLDGLAEDLQAAWNAPGVTMRSRQQLLRTLVKDIIADVDDATREVVLTVHWRGGQHSQIRVIKPRTGEHGCRTPEDALAVIRSMAGKWSDEHIAASLNRMGLPTGQGKTWTAHRVSSTRRVHDIRAYRSAHKDSDWLTMSEAAATLGVNNHRIRRLIKDGLLPAEQVVPRAPYQIRASDLLDPKVTDAVGRTDRPCHADGGKQISMFSST

SEQ ID NO: 12483 - protein, 690 aa, Unknown
  Description of Unknown: Integrase A1051 sequence
  IPR006119,PF00239,cd00338,PF07508,PS51736, G3DSA:3.40.50.1390,SM00857,IPR025827,IPR036162,PF13408, PTHR30461,mobidb-lite,Coil,SSF53041,IPR011109
MMHEKIRPHHLERKAVLYVRQSSAHQVLHNRESRTLQYAMRDRLTTLGWSCIEIVDDDLGRSAAGGVARAGFDRMVAEVCLGKVGAVAAREVSRFARNSRDWQQLIEMCRVVDTVLIDQEAIYAPRQGNDRLLLGLKGSLNEYELDLLRQRSLAARFEKAKRGELVVTAPVGFIKVGDRVEKDPDRRVQEAIALVFDKVSELGSARQALLWFLEHGLDLPVRRPNGDIAWRRPCYATIHRMVGNPIYGGAYAYGKTGAAPTFGRMMAQPGRCRKTRNEWLALIPGTHEGYLSWERAEAIRTMVSNNAPMGQHHGAPKHGDALLAGLIRCRRCGRKLTLRYTGTAHNVPRYSCWRGLLDNGEPRCIAFGGLRVDDAIEEALLGVVGPGAVAAAIDAEKQAANKRDQVREFLQRDLEAAGYAADRAFRQYDAADPANRLVAAELEARWNKALTHVGEIEPRIVEHDAQTPASSPLPAADVSALAHNLRAVWSTPTTDARLKKRIVRSVIQEVVADLDDSASEIVLLVHWAGGVHTELRLPRRRHGQRNATPDDVNDAVRQLALIANDDLIAGILNRNGLTTGNGNRWTRERVTALRSYRKIPVFRPQADNIELWLNLGNAARLLGISPKTLRQAAEAGQIEGAHPLPDGPWIFSRSELTTPAARQIVDRARSNPRHPAGSHPDQQNLFSSIA

SEQ ID NO: 12484 - protein, 689 aa, Unknown
  Description of Unknown: Integrase A1052 sequence
  IPR006119,PF00239,cd00338,PF07508, PS51736,G3DSA:1.10.1660.10,SM00857,G3DSA:3.40.50.1390, IPR025827,IPR041657,IPR036162,PTHR30461, PF13408,mobidb-lite,SSF53041,PF12728,IPR011109
MSKITPEHLARQAVVYIRQSTPDQVVHNLESKRRQYNLPERARQLGWSDVAVIDDDLGRSGGGVARPGFEKLLAAICEVRVGVVVSIEASRLARNGRDWHTLLEFCGLVGTLIADEDGVYDPRQPNDRLLLGMKGTMSEMELSVLRQRSLEALKQKARRGELFMTVAVGYVRVGHNRIEKDPDRRVGEAIALVFAKFTEMQSVRQVHLWFRHERVPLPAVTYGAEGRLVEWKLPVYNTILHILTNPIYAGAYAFGRTGSRISIEAGRKKVVRGFKKERKDWEVLIPNHHEGYLSWADHERNLGLIADNANGKNPMSRGALRRGEALLAGLLRCGHCGRKLHVAYSGKNGNTGRYHCRGGANNHGGDPCISFGGMRIDRDVAAEVIERLQPLGIEAALAAQAARSRANEDKRGQVELALEQARYEVGRARRQYDAVDPDNRLVAAELEKRWNDRLAVVRNLETELEGLTASPAVDLTPADRERLMTLGADLERAWSSAGVAPETRKRIVRTLIDEIVVRVEDNALDLVIRWHGGDHSALKVKKNRSGQHRWSATGETVDLVRVLARQMPDKAIASVLNRSGKTTGRGNGWTKSRVCSLRSHNDIAAYREGERRDRGEVTLDEAAAALSVSPSTVRRLIKDGQLAASQLCKGAPWIIKAADLERPDVKRAATARRLRRPPSGNPLQKELEL

SEQ ID NO: 12485 - protein, 689 aa, Unknown
  Description of Unknown: Integrase A1053 sequence
  IPR006119,PF00239,cd00338,PF07508,G3DSA:1.10.1660.10, G3DSA:3.40.50.1390,IPR038109,SM00857,PS51736,IPR036162, PTHR30461,G3DSA:1.10.10.2600,PS51737,SSF53041,IPR011109
MTTSDLLPAAVLRRKAVVYVRQSTQSQVQTNLESQRRQYDLVAQARRLGFAQVEVIDDDLGRSASGMVDRPGFERLVAWLCAGEVGAVLCFDASRLARNGRDWHHLLELCGLVEARVIDPDGVYDPCRPNDRLLLGMKGSISEFELGVIRARMFEAARAKAHRGELRISVPIGYVWHRQIGLGLDPDMRLQETIRLIFARFRTLGSARQVMLSLAADDVHFPRPSDGKKMVSFDWTPIRYRNVISILKNPFYAGVYAYGKSEKRTTLVQGRLRKTYKHGKPLDRWDVMIKDHHEAYIDWAEFERNQKQLAVNAYGKVDGTKSGRGGRALLAGMLCCGRCGRRLTVAYTGRGVPQPVYRCDRPNLQLAQPRCFTFGARRPDEAIARELLRAVEPLAVEAALQAERRYMQVQADQRRIVELELQQARYEAGLAERRYAACDPDHRLIAAQLEKSWEAALQRVLACEQRLNVARQVQSSARPDLTGLEEDLAAAWDAPGVTMRARQQLLRTLVKDIVADVDDQAREVVLTIHWRGGQHSQVRVVKPRTGEHGCRTPDEALAVMRSMAGKWSDEHIAATLNRMGLPTGQAKTWTAHRVSSVRRVNDIHAYRSAEKDGQWLTMSEAAAKLGVNNHRIRRLIKEGLLPAEQVVPRAPYQIRASDLLEQRVIDAIARTLSPCRAVSEKQMSMFSST

SEQ ID NO: 12486 - protein, 689 aa, Unknown
  Description of Unknown: Integrase A1054 sequence
  IPR006119,PF00239,cd00338,PF07508, PS51736,G3DSA:3.40.50.1390,SM00857,IPR011109, PS51737,PTHR30461,Coil,SSF53041, IPR036162
MTITDLIPTALLARKAVVYVRQSTQSQVITNLESQRRQYDLVDIARHHGFSHVEVIDDDLGRSASGTVARPGFDRLVALLCAGKVGAVFCFDASRLARNGRDWHHLLELCGLVEARVIDHDGVYNPCRPNDRLLLGMKGSISEFELGVLRARMLDAARSKARRGELRLSVPFGYIWHREAGLGLDPDLRLQEVIRSIFARFHDLGSARQVLLSMTKDHIHFPRPSDEGRMTNFVWMPVRYRNVIGILKNPFYAGVYVYGKSEKRTAIVDGWARRSYGHGKPVGTWEVMIRDHHEGYISWGEYERNQQQLALNNYGRSGGTKSGRGGKALLSGLLTCGRSGRRLSVAYTGNPQNPVYRCYKQNLMMGLPRCMTFGGSKVDAAVARELLRAVEPLAIEATFKAERMHRERQEDQRHIHDLELQQARYEASLAERRYAACDPDNRLIAAQLEKNWETALRRVRDLEVRRPTESPSTIEVDPGTFANLADNLQAAWESPDVTMRVRQQLLRTLIADIVVDVDDEVRDVVLTIHWKGGQHSELKVRKPQTVEHGCATTEDALAVMRSMAGRWSDEHIAASLNRMGMPTGQGKTWTAHRVASVRRVRAIHAYKSADKEGEWLTMTEAAAVLGVTNHRIRHLIKTNVLSAEQVVPGAPYQIRASNLTSATVQAAIARKGRPCRIADTETLPMFTDT

SEQ ID NO: 12487 - protein, 689 aa, Unknown
  Description of Unknown: Integrase A1055 sequence
  IPR006119,cd00338,PF07508,PS51736,G3DSA:3.40.50.1390, SM00857,IPR011109,PS51737,PTHR30461,SSF53041, Coil,PF00239,IPR036162
MTITDLIPTALLARKAVVYVRQSTQSQVITNLESQRRQYDLVDIARQHGFSHVEVIDDDLGRSASGTVARPGFDRLVALLCAGKVGAVFCFDASRLARNGRDWHHLLELCGLVEARVIDHDGVYNPCRPNDRLLLGMKGSISEFELGVLRARMLDAARSKARRGELRLSVPFGYIWHREAGLGLDPDLRLQEVIRSIFARFHDLGSARQVLLSMTKDHIHFPRPSDEGRMTNFVWMPVRYRNVIGILKNPFYAGVYVYGKSEKRTAIVDGWARRSYGHGKPVGTWEVMIRDHHEGYISWGEYERNQQQLALNNYGRSGGTKSGRGGKALLSGLLTCGRSGRRLSVAYTGNPQNPVYRCYKQNLMMGLPRCMTFGGSKVDAAVARELLRAVEPLAIEATFKAERMHRERQEDQRHIHDLELQQARYEASLAERRYAACDPDNRLIAAQLEKNWETALRRVRDLEVRRPTESPSTIEVDPGTFANLADNLQAAWESPDVTMRVRQQLLRTLIADIVVDVDDEVRDVVLTIHWKGGQHSELKVRKPQTVEHGCATTEDALAVMRSMAGRWSDEHIAASLNRMGMPTGQGKTWTAHRVASVRRVRAIHAYKSADKEGEWLTMTEAAAVLGVTNHRIRHLIKTNVLSAEQVVPGAPYQIRASNLTSATVQAAIARKGRPCRIADTETLPMFTDT

SEQ ID NO: 12488 - protein, 689 aa, Unknown
  Description of Unknown: Integrase A1056 sequence
  IPR006119,cd00338,PF07508,PS51736, G3DSA:3.40.50.1390,SM00857,IPR011109,IPR025827, Coil,PF13408,PTHR30461,SSF53041, PS51737,PF00239,IPR036162
MTSTDLIPTVLLERKAVVYVRQSTQSQVMTNLESQRRQYDLVDVARQRGFLDVEVIDDDLGRSASGTVARPGFDRLVALLCAGKVGAVLCFDASRLARNGRDWHHLLELCGLVEARVIDHDGVYNPCRPNDRLLLGMKGSISEFELGVLRARMLDAARSKARRGELRLSVPFGYIWHREAGLGLDPDLRLQDVIRSVFARFHELGSARQVLLSMTKDQIHFPRPSDERRMTNFVWTPVRYRNVIGILKNPFYAGVYVYGKSEKRTAIVDGRARRSYGHGKPVGTWEVMIRDHHEGYISWDEYERNQQQLALNNYGRSGGTKSGRGGKALLSGLLTCGRCGRRLSVAYTGNPHSPVYRCDKQNLMMGLPRCMTFGGPKVDAAVARELLRAVEPLAIEATFEAERMHRERQEDQRHIHDLELQQARYEASLAERRYAACDPDNRLIAAQLEKNWETALRRVRDLEERKPADRPSTIAVDPGTFANLADNLLAAWESPDVTMRVRQQLLRTLIADIVVDVDDAVRDVVLTIHWKGGQHSELKVRKPQTGEHGCATTEDALAVMRSMAGRWSDEHIAASLNRMGMPTGQGKTWTAHRVASVRRVRAIHAYKSADKDGEWLTMTEAAAALGVTNHRIRHLIKMKVLSAEQVVRGAPYQIRVSDLASATVQAAIARKGRPCRIADTETLPMFTDT

SEQ ID NO: 12489 - protein, 689 aa, Unknown
  Description of Unknown: Integrase A1057 sequence
  IPR006119,cd00338,PF07508,PS51736,G3DSA:3.40.50.1390, SM00857,IPR025827,PS51737,IPR036162,PTHR30461, PF13408,SSF53041,Coil,PF00239,IPR011109
MSSTDLIPTALLARKAIVYVRQSSQSQVMTNLESQRRQYDLVDVARQHGFSNIETIDDDLGRSASGTVARPGFDRLVALLCAGQVGAVLCFDASRLARNGRDWHHLLELCGLVEARVIDHDGVYNPCRPNDRLLLGMKGSIGEFELGVLRARMLDAARSKARRGELRLSVPFGYIWHREAGLGLDPDLRLQDVIRSIFARFRELGSARQVLLSMTRDNIHFPRPSDEGRMTSFVWTPVRYRNVIGILKNPFYAGVYVYGKSEKRTAIVDGRARRSYGHGKPAGTWEVMIPDHHEGYISWDEYERNQQQLALNNYGRSGGTKSGRGGKALLSGLLTCGRCGRRLSVAYTRNPQNHVYRCYKQNLMMGLPRCMTFGGPKVDAAVARELLRAVEPLAIEATFEAERMHRERQEEQHHIHDLELRQARYEASLAERRYAACDPDNRLITAQLEKNWETALRHVRDLEVCKPADSPSTIEVDTGTFANLADNLQAAWESPDVTMRVRQQLLRTLIADIVVDVDDEVRDVVLTIHWKGGQHSELRVRKPQSGEHGCATTEDALAVMRSMAGRWSDEHTAASLNRMGMPTGQGKTWTAHRVASVRRVRAIHAYKSADKEGEWLTMTEAAAILGVTNHRIRHLIKTNVLSAEQVVPGAPYQIRASDLASATVQAAIARKGRPCRVADPDTLPMFTDT

SEQ ID NO: 12490 - protein, 689 aa, Unknown
  Description of Unknown: Integrase A1058 sequence
  IPR006119,PF00239,cd00338,PF07508, PS51736,G3DSA:3.40.50.1390,SM00857,IPR011109, IPR025827,PS51737,PF13408,PTHR30461, Coil,SSF53041,IPR036162
MISTDLIPTVLLERKAVVYVRQSTQSQVMTNLESQRRQYDLVDVARQRGFLDVEVIDDDLGRSASGTVARPGFDRLVALLCAGKVGAVLCFDASRLARNGRDWHHLLELCGLVEARVIDHDGVYNPCRPNDRLLLGMKGSISEFELGVLRARMLDAARSKARRGELRLSVPFGYIWHREAGLGLDPDLRLQDVIRSIFARFHELGSARQVLLSMTKDQIHFPRPSDERRMTNFVWTPVRYRNVIGILKNPFYAGVYVYGKSEKRTAIVDGRARRSYGHGKPVGTWEVMIRDHHEGYISWDEYERNQQQLALNNYGRSGGTKSGRGGKALLSGLLTCGRCGRRLSVAYTGNPHNPVYRCDKQNLMMGLPRCMTFGGPKVDAAVARELLRAVEPLAIEATFEAERMHRERQEDQRHIHDLELQQARYEASLAERRYAACDPDNRLIAAQLEKNWETALRRVRDLEERKPADSPSTIAVDPGTFANLADNLLAAWESPDVTMRVRQQLLRTLIADIVVDVDDAVRDVVLTIHWKGGQHSELKVRKPQTGEHGCATTEDALAVMRSMAGRWSDEHIAASLNRMGMPTGQGKTWTAHRVASVRRVRAIHAYKSADKDGEWLTMTEAAAALGVTNHRIRHLIKMKVLSAEQVVRGAPYQIRVSDLASATVQAAIALKGRPCRIADTETLPMFTDT

SEQ ID NO: 12491 - protein, 689 aa, Unknown
  Description of Unknown: Integrase A1059 sequence
  IPR006119,PF00239,cd00338,PF07508,PS51736, G3DSA:3.40.50.1390,SM00857,IPR011109,IPR025827,Coil, PF13408,PTHR30461,PS51737,SSF53041,IPR036162
MTSTDLIPTALLARKAVVYVRQSTQSQVITNLESQRRQYDLVDIARQRGFSDVEVIDDDLGRSASGTVARPGFDRLVALLCAGKVGAVFCFDASRLARNGRDWHHLLELCGLVEARVIDHDGVYNPCRPNDRLLLGMKGSISEFELGVLRARMLDAARSKARRGELRLSVPFGYIWHREAGLGLDPDLRLQEVIRSIFTRFHELGSARQVLLSMTKDQIHFPRPRDEGRMTNFVWIPVRYRNVIGILKNPFYAGVYVYGKSEKRTAIVDGRARRSYGHGKPVGTWEVMIRDHHEGYISWDEYERNQQQLALNNYGRSGGTKSGRGGKALLSGLLTCGRCGRRLSVAYTGNPQSPVYRCYKQNLMMGLPRCMTFGGSKVDAAVARELLRAVEPLAIEATFEAERMHRERQEDQRHIHDLERQQARYEASLAERRYAACDPDNRLIAAQLEKNWETALRRVRDLEVRRPAESPSTIEVDPGTFANLADNLQAAWESPDVTMRVRQQLLRTLIADIVVDVDDEVRDVVLTIHWKGGQHSELKVRKPQTGEHGCATTEDALAVMRSMAGRWSDEHIAASLNRMGMPTGQGKTWTAHRVASVRRVRAIHAYKSAGKDGEWLTMTEAAAVLGVTNHRIRHLINTNVLSAEQVVPGAPYQIRASDLTSATVQAAIARKGRPCRIPDTETLPMFTDT

SEQ ID NO: 12492 - protein, 689 aa, Unknown
  Description of Unknown: Integrase A1060 sequence
  IPR006119,PF00239,cd00338,PF07508, PS51736,G3DSA:3.40.50.1390,SM00857,IPR011109, IPR025827,PF13408,PTHR30461,PS51737, SSF53041,IPR036162
MKITAEHLARGAYVYVRQSTADQLVNNPESRRRQYGLAERARSLGWKDAIVIDEDLGRSGSGISRPGFEKLLAAICEGRVGAVLAIEASRLARNGRDWHTLIEFCGLVGTLIIDEDGIYEPRHPNDRLLLGMKGTMSELELSILRARSIEALKQKARRGELFLTVAIGYVKSGRNRIEKDPDLRIREAIDRVFRRFDELQSIRQVHLWLRSEGIMLPAVNYTRAADRAIVWKLPVYNTVHHILTNPIYAGAYAFGRTCSKVTIEAGRKRILRGIRRDRADWEVLLIDHHEGYLSWHDFERNQRLITDNATSKGLVPRGALRRGELLLGGLLRCGHCGRKLHVSYSGSNGNTGRYHCRGAQVNHGTDPCIGFGSLRVDQAVSAEVLQRLQPLGIEAAIKAIETSTVQAGEKRRHVELALEQARYDAAHARRQYDAVDPDNRLVAGELERRWNAALVAVRERQDELDALDRHKPEALGEEERRSLLRMGADLELAWHHANATATTRKRIIRAVIREIVVAIEDDHIKMLVHWQGGDHTALSVRKNKAGHHRWGAPPDIEELIRALARQLPDRAIASLLNRLGKTTGRQNGWTQSRVCTFRNQHDIAVYKKDERSERGEYTLQETAAKLGLRPMTVLRMIRAGDLKAEQYCKGTPWIIRHEDIEQLDIQHHSGRSEHSPLSQSQDQQIQLFQ

SEQ ID NO: 12493 - protein, 689 aa, Unknown
  Description of Unknown: Integrase A1061 sequence
  IPR006119,PF00239,cd00338,PF07508,PS51736, G3DSA:3.40.50.1390,SM00857,IPR011109,IPR025827,PS51737, PF13408,PTHR30461,Coil,SSF53041,IPR036162
MSNTDLIPTALLARKAIVYVRQSSQSQVMTNLESQRRQYDLVDVARQHGFSDIETIDDDLGRSASGTVARPGFDRLVALLCAGQVGAVLCFDASRLARNGRDWHHLLELCGLVEARVIDHDGVYNPCRPNDRLLLGMKGSISEFELGVLRARMLDAARSKARRGELRLSVPFGYIWHREAGLGLDPDLRLQDVIRSIFARFRELGSARQVLLSMTRDNIHFPRPSDEGRMTSFVWTPVRYRNVIGILKNPFYAGVYVYGKSEKRTAIVDGRARRSYGHGKPAGTWEVMIRDHHEGYISWEEYERNQQQLALNNYGRSGGTKSGRGGKSLLSGLLTCGRCGRRLSVAYTGNPQNPVYRCYKQNLMMGLPRCMTFGGSKVDAAVARELLRAVEPLAIEATFEAERMHRERQEEQRHIHDLELRQARYEASLAERRYAACDPDNRLIAAQLEKNWETALRRVRDLEVRKPADSPSTIEVDTGTFANLADNLQAAWESPDVTMRVRQQLLRTLIADIVVDVEDEVRDVVLTIHWKGGQHSELRVRKPQSGEHGCATTEDALAVMRSMAGRWPDEHIAASLNRMGMPTGQGKTWTAHRVASVRRVRAIHAYKSADKEGEWLTMTEAAATLGVTNHRIRHLIKTNVLSAEQVVPGAPYQIRASDLTSATVQAAIARKGRPCRTTDTETLPMFTDT

SEQ ID NO: 12494 - protein, 689 aa, Unknown
  Description of Unknown: Integrase A1062 sequence
  IPR006119,PF00239,cd00338,PF07508, G3DSA:1.10.1660.10,G3DSA:3.40.50.1390,PS51736,SM00857, IPR011109,IPR025827,Coil,PF13408, PTHR30461,PS51737,SSF53041,IPR036162
MTGNDLLPVTVLKRKAVVYVRQSTPGQVQNNLESQRRQYELVDVARRWGFHDVEVIDDDLGRTASGTVDRPGFERLVSGLCTGKVGAVLCLDASRLSRNGRDWHHLLELCGLVEARVIDLDGVYDPCRPNDRLLLGMKGSISEFELGILRTRMLDAARAKARRGELRLSVPIGYIWHREYGLGLDPDIRVQEAIRLIFSRFRELGSARQVLISLTADNFHFPRPSDGRKTVSFDWVPVRYRSVISILKNPFYAGVYVYGKSEKRTEIVDGRARKSYGHSKPFGTWEVLLQDHHEGYIDWSEFERNQSHIAVNAFGQKGGIKSGRGGRALLAGLLTCGRCGRRLGVVYSGRPPGHPYYRCERINQMLAKPRCMTFGASRIDPAIGKEILRAVTPMAIEAAMEADRAHRDNLEERHRMVELDLQQARYEASLAERRYAACDPDNRLIAAQLENSWEAALRRVEACEAGLAQARQIDLAAPVPDFAGIATDLETAWRSPNVDMRCRQQLLRTLVTDIIADVDEEQREVILTIHWKGGQHSQLRIRKPKAGEHGQSTPEAALAIIRSMATRWSDADIAATLNRMGMQTGQGKTWTARRVGSLRTVHKIHGYRSAEKNGEWLTLTEAAKKLGVTAHRVRRLIKEGVLPTEQVVPDAPHQIRATDLEKDEVTQFPRHRGPCRIKMENQKSLFPDI

SEQ ID NO: 12495 - protein, 688 aa, Unknown
  Description of Unknown: Integrase A1063 sequence
  IPR006119,cd00338,PF07508,PS51736,G3DSA:3.40.50.1390, SM00857,PS51737,IPR036162,PTHR30461,SSF53041, Coil,PF00239,IPR011109
MTITDLIPTALLARKAVVYVRQSTQSQVITNLESQRRQYDLVDIARHHGFSHVEVIDDDLGRSASGTVARPGFDRLVALLCAGKVGAVFCFDASRLARNGRDWHHLLELCGLVEARVIDHDGVYNPCRPNDRLLGMKGSISEFELGVLRARMLDAARSKARRGELRLSVPFGYIWHREAGLGLDPDLRLQEVIRSIFARFHDLGSARQVLLSMTKDHIHFPRPSDEGRMTNFVWMPVRYRNVIGILKNPFYAGVYVYGKSEKRTAIVDGWARRSYGHGKPVGTWEVMIRDHHEGYISWGEYERNQQQLALNNYGRSGGTKSGRGGKALLSGLLTCGRSGRRLSVAYTGNPQNPVYRCYKQNLMMGLPRCMTFGGSKVDAAVARELLRAVEPLAIEATFKAERMHRERQEDQRHIHDLELQQARYEASLAERRYAACDPDNRLIAAQLEKNWETALRRVRDLEVRRPTESPSTIEVDPGTFANLADNLQAAWESPDVTMRVRQQLLRTLIADIVVDVDDEVRDVVLTIHWKGGQHSELKVRKPQTVEHGCATTEDALAVMRSMAGRWSDEHIAASLNRMGMPTGQGKTWTAHRVASVRRVRAIHAYKSADKEGEWLTMTEAAAVLGVTNHRIRHLIKTNVLSAEQVVPGAPYQIRASNLTSATVQAAIARKGRPCRIADTETLPMFTDT

SEQ ID NO: 12496 - protein, 688 aa, Unknown
  Description of Unknown: Integrase A1064 sequence
  IPR006119,cd00338,PF07508,G3DSA:1.10.1660.10, PS51736,G3DSA:3.40.50.1390,SM00857,IPR025827, PS51737,IPR036162,PF13408,PTHR30461, SSF53041,Coil,PF00239,IPR011109
MTGNNLIPATVLNRKAVVYVRQSTSGQVQNNLESQRRQYELVDVARRWGFRDVEVIDDDLGRTASGAADRPGFERLVSGLCTGMVGAVLCLDASRLSRNGRDWHHLLELCGLVEARVIDLDGVYDPCRPNDRLLLGMKGSISEFELGILRTRMLDAARAKARRGELRLSVPIGYIWHRDYGLGLDPDLRVQEAIRLIFSRFRELGSARQVLISLTTDNFHFPRPSDGRKRVSFDWVPLRYRSVISILKNPFYAGAYAYGKSEKRTEIVDGRARKSYGHGKPFGTWEVLLRDHHEGYIDWSEFERNQSLIAVNTFAKKGGIKSGRGGQALLAGLLTCGRCGRRLSVSYRGRPSHPYYQCKSINQMLAKPRCMTFGASRIDPAIGKEILSAVTPMAIEAAMEADRAHRDNLEERHRMMELDLQQARYEASLAERRYAACDPDNRLIAAQLEKSWESALRRVETCEAALTQARQIDAGIPIPDFAGIATDLEAAWSAPNVDTRCRQQLLRTLVTDIVADVDEEQREVILTIHWKGGQHSQLRIRKPNPGEHGQKTPDAALAVMRSMATRWSDADIAATLNRMGMQTGQGKTWTARRVGALRTVHKIHGYRSAEKNGEWLTLTEAAKKLGVTAHRVRRLIKEGVLPTEQVVPDAPHQIRAADLEKDEVIQFPRYRGPCRIKMENQKSLFPDV

SEQ ID NO: 12497 - protein, 688 aa, Unknown
  Description of Unknown: Integrase A1065 sequence
  IPR006119,cd00338,PF07508,G3DSA:1.10.1660.10,G3DSA:3.40.50.1390, SM00857,PS51736,IPR011109,IPR025827,PS51737, PF13408,PTHR30461,SSF53041,Coil,PF00239,IPR036162
MTGNNLIPATVLNRKAVVYVRQSTPGQVQNNLESQRRQYELVDVARRWGFRDVEVIDDDLGRTASGAADRPGFERLVSGLCTGMVGAVLYLDASRLSRNGRDWHHLLELCGLVEARVIDLDGVYDPCRPNDRLLLGMKGSISEFELGILRTRMLDAARAKARRGELRLSVPIGYIWHRDYGLGLDPDLRVQEAIRLIFSRFRELGSARQVLISLTADNFHFPRPSDGRKRVSFDWVPLRYRSVISILKNPFYAGAYAYGKSEKRTEIVDGRARKSYGHGKPFGTWEVLLRDHHEGYIDWSEFERNQSLIAVNTFAKKGGIKSGRGGQALLAGLLTCGRCGRRLSVSYRGRPSHPYYQCKSINQMLAKPRCMTFGASRIDPAIGKEILSAVTPMAIESAMEADRVHRDNLEERHRMMELDLQQARYEASLAERRYAACDPDNRLIAAQLEKSWESALRRVETCEAALTQARQIDTGIPTPDFAGIATDLEAAWSAPNVDTRCRQQLLRTLVTDIVADVDEEQREVILTIHWKGGQHSQLRIRKPNPGEHGQKTPEAALAVMRSMATRWSDADIAATLNRMGMQTGQGKTWTARRVSALRTVHKIHGYRSAEKNGEWLTLTEAAKKLGVTAHRVRRLIKEGVLPTEQVVPDAPHQIRAADLEKDEVTQFPRYRGPCRIKMENQKSLFPDV

SEQ ID NO: 12498 - protein, 688 aa, Unknown
  Description of Unknown: Integrase A1066 sequence
  IPR006119,cd00338,PF07508,PS51736,G3DSA:3.40.50.1390, SM00857,IPR011109,PS51737,IPR025827,PF13408, PTHR30461,SSF53041,Coil,PF00239,IPR036162
MRSELITDRHLARHAVIYIRQSSPHQVLSNQESLRLQYDLRRRALGLGWREEDVEIIDADLGLSGAAAVHREGFKDLIARVTLGQVGIVLSSEVTRLTRNCSDWYPLLDLCGYRDCLIADRDGVYDPGTANGRLLLGLKGTLSEVELHTIRARLTAGLLNKAARGELALILPVGLVRETGGVVVKNPDREVQARLDLIFTTFLRLRSASKVLHAFNERGLSIPRRGRFGDTVWRPPTVAAILQVLKNPAYAGAFVYGRTRSVRTAPLGKGSQKRLPREQWRIVVKDQYPAYISWATFEKIEAMLRDNYAEYDRNKTRGVPREGAALLHGMVYCGACGHKMVVQYKGGARYMCNYLRQQHGVPVCQVIPAAPVDAEAVAAFFKALTPAELDAYTQAVSLRREADAAGLKAQAQQVERLRYRAALAERQFDQVDPDNRLVAAELERRWEETLRDLRQAEAALADAAPEEGRVIPFGVGPDLQAAFTEVGRRLPDLWQQPALTTVRKKALLRCLIDKVVIHRAVRDTIALRLVWRGGATSEIALPITVGSLAELSRSGEMEAAIVERARAGESDAAIAAALTAAGHRSPLRQAVLPSTVQAIRLRHGILRERRQSHPRRIPGCLTVSQLAAQLGVTPHWIYDRIYNGTIAIELDAKTGLYLFPDGPTTLRAFQKLKAGKVDRLSPVPRLAC

SEQ ID NO: 12499 - protein, 688 aa, Unknown
  Description of Unknown: Integrase A1067 sequence
  IPR006119,PF00239,cd00338,PF07508, G3DSA:1.10.1660.10,PS51736,SM00857,G3DSA:3.40.50.1390, IPR011109,IPR025827,PS51737,PF13408, PTHR30461,Coil,SSF53041,IPR036162
MTGNNLIPATVLNRKAVVYVRQSTPGQVQNNLESQRRQYELVDVARRWGFRDVEVIDDDLGRTASAAVDRPGFERLVSGLCTGMVGAVLCLDASRLSRNGRDWHHLLELCGLVEARVIDLDGVYDPCRPNDRLLLGMKGSISEFELGILRTRMLDAARAKARRGELRLSVPIGYIWHRDYGLGLDPDLRVQEAIRLIFSRFRELGSARQVLISLTADNFHFPRPSDGRKRVSFDWVPLRYRSVISILKNPFYAGAYAYGKSEKRTEIVDGRARKSYGHGKPFGTWEVLLQDHHEGYIDWGEFERNQSLIAVNTFAKKGGIKSGRGGQALLAGLLTCGRCGRRLSVSYRGRPSHPYYQCKSINQMLAKPRCMTFGASRIDPAIGKEILSAVTPMAIEAAMEADRVHRDNLEERHRMMELDLQQARYEASLAERRYAACDPDNRLIAAQLEKSWESALRRVEACEAALTQARQIDAGIPIPDFAGIATDLEAAWSAPNVDTRCRQQLLRTLVTDIVADVDEEQREVILTIHWKGGQHSQLRIRKPNPGEHGQKTPEAALAVMRSMATRWSDADIAATLNRMGMQTGQGKTWTARRVGALRTVHKIHGYRSAEKNGEWLTLTEAAKKLGVTAHRVRRLIKEGVLPTEQVVPDAPHQIRAADLEKDEVTQFPRYRGPCRIKMENQKSLFPDV

SEQ ID NO: 12500 - protein, 688 aa, Unknown
  Description of Unknown: Integrase A1068 sequence
  IPR006119,PF00239,cd00338,PF07508,PS51736, G3DSA:3.40.50.1390,SM00857,IPR038109,IPR011109,PTHR30461, G3DSA:1.10.10.2600,PS51737,SSF53041,IPR036162
MTDVDILPPSILKRKAVVYVRQSSQAQVQHNLESQRRQYELVDEARRRGFRDVEVIDDDLGRSASGTVARPGFDKLVAGLCAGNVGAVLCLDASRLARNGRDWHHLLELCGLVEARVIDLEGVYNPCRPNDRLLLGMKGSISEFELGILRSRMLDAARSKARRGELRIPVPIGYIWHREIGLGFDPDLRVQEAVRQIFERFRQLGSGRQVYRALSAEHVHFPRPSDGKRSVSFDWTPIRYRNVISVLKNPFYAGAYAYGKTEKRTEIIDGRAHKTYKHPRALSDCEILLKGHHEGYIDWSEYERNQKQLSLNDFGRRGGPKSGRGGRSLLIGLMACGRCGRRLKVGYRGRYPYPIYQCFGADVYNSARCMSFAGQRTDRAIASQLIRAVEPMAVEAALKAERMYMEGQAEQQRMIELELQQARYDASLAERRYAACDPDNRLIAATLEKNWEATLRRVQECEARLSAAEATNADKTVPDFAGLADDLQAAWANPQVTMRTRQQLLRSLVNEITANIDDVAHEIVLTIHWKGGQHSEVRLHKPSSGEHECRTSDDAIAVITSMATRWSDEDIAATLNRMRMPTAQGKTWTAKRVSSIRRVRDIHAYRSAEKDGTWLTLREAAQHCGVTSHRIRRLIEAKILPAEQVVPGAPYQILAADLNSDAVVRAMGRNGGPCHLETQNQIPMFPNT

SEQ ID NO: 12501 - protein, 687 aa, Unknown
  Description of Unknown: Integrase A1069 sequence
  IPR006119,PF00239,cd00338,PF07508, PS51736,G3DSA:3.40.50.1390,SM00857,IPR011109, IPR025827,PTHR30461,PF13408,mobidb-lite, Coil,SSF53041,IPR036162
MMHEKIGPHHLERKAILYVRQSSVSQVLHNRESSALQYAMRDRLTALGWSRIETVDDDLGRSAAGGVTRAGFDRMVAEVCLGKVGAVAAREVSRFARNSRDWQQLIEMCRVVDTVLIDQEAVYAPRQGNDRLLLGLKGSLNEYELDLLRQRSLSARYEKARRGELVVTVPVGFLKVGDRIEKDPDRRIQEAIALVFNKVAELGSARQALLWFLEHGLDLPVRRANGDAIWRRPNYATIHRMIANPIYGGAYAYGKSRSVPGYGGRSGIRRKARDEWLALIPDAHEGYVSWERAEAIRKMVSDNVPASRHHGAPKHGDALLAGLFRCKRCGRKLTVRYTGANHNIPRYSCWRGLLDNGEPRCIAFGGLRVDDAIEEALLGVVEPGAIAAAVEAERNRASQRDQVQDALLRDLEAARYAADRAFRQYDAADPENRLVTSELEARWNKALTRVSEMESKIASHQAATPQSTPMSTLEMAALAGSLRTVWAAPATDARLKKRIVRTVIHEVIADLDDMTSEIVLVIHWVGGIHTELRLPKRHRGQRNATPDDIIEAVRQLVLIANDDVIAGVLNRNGLMTGNGNRWTRERVTALRSYRKIPVFRPQSDGIEPWLNLGDAARLLGVAPKTLRLAAEAGEIEGVHPLPDGPWIFSRSKLATSRAQQIVHRARQNPRYPTGSPPDQENLFPSTT

SEQ ID NO: 12502 - protein, 687 aa, Unknown
  Description of Unknown: Integrase A1070 sequence
  IPR006119,cd00338,PF07508,PS51736,G3DSA:3.40.50.1390, SM00857,IPR011109,IPR025827,SSF53041,PTHR30461, PF13408,mobidb-lite,PF00239,IPR036162
MMHEKIGPHHLERKAILYVRQSSAHQVLHNRESSALQYAMRDRLAALGWSYIETVDDDLGRSAAGGVTRAGFDRMVAEVCLGKVGAVAAREVSRFARNSRDWQQLIEMCRVVDTVLVDQEAVYAPRQGNDRLLLGLKGSLNEYELDLLRQRSLSARYEKARRGELVVTVPAGFVKAGDRIEKDPDRRIQEAIALVFNKVTELGSARQALLWFLEQGLDLPVRCANGDVIWRRPNYATIHRMIANPIYGGAYAYGKSRSVPGYDGRSGIRRKARDEWLALIPDAHEGYISWERAEEIRKMVSDNVPASRHHGAPKHGDALLAGLFRCKRCGRKLTVRYTGANHNIPRYSCWRGLLDNGEPRCIAFGGLRVDDAIEEALLGVVEPGAIAAAFEAERNMASQRDQVQDALLRDLEAVRYVADRAFRQYDAADPENRLVTSELEARWNKALARVGEIEAKIAKHRTVTPQPFPMSASQVTALAGNLRTVWTAPTTDARLKKRIVRTLINEVVADLDDGTSEIVLVIHWVGGVHTELRLPKRRRGQRNATPDDIVDAVRQLVLIANDDVIAGVLNRNGLTTGNGNRWTRERVTALRSYRKIPVFRPQIDGVEPWLNLGGAAKLLGITPKTLRLAAEAGDIEGVHPLPDGPWIFSRSKLATPQARQILDRARKNPRHPAGSPPDQENLFPSMT

SEQ ID NO: 12503 - protein, 687 aa, Unknown
  Description of Unknown: Integrase A1071 sequence
  IPR006119,mobidb-lite,cd00338,PF07508, PS51736,G3DSA:3.40.50.1390,SM00857,IPR011109, IPR025827,PF13408,PTHR30461,SSF53041, Coil,PF00239,IPR036162
MMHEKIAPHHLERKAILYVRQSSAHQVLHNRESSALQYAMRDRLAALGWSHIETVDDDLGRSAAGGVTRAGFDRMVAEVCLGKVGAVAAREVSRFARNSRDWQQLIEMCRVVDTVLVDQEAVYAPRQGNDRLLLGLKGSLNEYELDLLRQRSLSARYEKARRGELVVTVPAGFVKAGDRIEKDPNRRIQEAIALVFDKVTELGSARQALLWFLEQGLDLPVRCANGDVIWRRPNYATIHRMIANPIYGGAYAYGKSRSVPGYDGRSGIRRKARDEWLALIPDAHEGYISWERAEEIRKMVSDNVPASRHHGAPKHGDALLAGLFRCKRCGRKLTVRYTGANHNIPRYSCWRGLLDNGEPRCIAFGGLRVDDAIEEALLGVVEPGAIAAAVEAERNMANQRDQVQDALMRDLEAARYVADRAFRQYDAADPENRLVTSELEARWNKALTGVGEIEAKIAKHRTVTPHPFPMSASQVTALAGNLRAVWTAPTTDARLKKRIVRTLINEVVADLDDGTSEIVLVIHWVGGVHTELRLPKRHRSQRNATPDDIVDAVKQLVLIANDDVIAGVLNRNGLTTGNGNRWTRERVTALRSYRKIPVFRPQIDGVEPWLNLGGAAKLLGISPKTLRLAAEAGDIKGAHPLPDGPWIFSRSKLATPQARQILDRVRKNPRHPAGSPPDQENLFLSMT

SEQ ID NO: 12504 - protein, 687 aa, Unknown
  Description of Unknown: Integrase A1072 sequence
  IPR006119,cd00338,PF07508,PS51736,G3DSA:3.40.50.1390, SM00857,IPR011109,IPR025827,SSF53041,PF13408, PTHR30461,mobidb-lite,Coil,PF00239,IPR036162
MMHEKIGPHHLARKAILYVRQSSAHQVLHNRESSALQYAMRDRLAALGWSQIETVDDDLGRSAAGGVTRAGFDRMVAEVCLGKVGAVAAREVSRFARNSRDWQQLIEMCRVVDTVLVDQEAVYAPRQGNDRLLLGLKGSLNEYELDLLRQRSLSARYEKARRGELVVTVPAGFVKAGDRIEKDPDRRIQEAIALVFNKVTELGSARQALLWFLEQGLDLPVRCANGDVIWRRPNYATIHRMIANPIYGGAYAYGKSRSVPGYDGRSGIRRKARDEWLALIPDAHEGYISWERAEEIRKMVSDNVPASRHHGAPKHGDALLAGLFRCKRCGRKLTVRYTGANHNIPRYSCWRGLLDNGEPRCIAFGGLRVDDAIEEALLGVVEPGAIAAAVEAERNMASQRDQVQDALLRDLEAARYVADRAFRQYDAADPENRLVTSELEARWNRTLARVGEIETRIAKHRTVTPQPFPMSASQVTALAGNLRTVWTAPTTDARLKKRIVRTLINEVVADLDDGTSEIVLVIHWVGGVHSELRLPKRRRGQRNATPDDIVDAVRQLVLIANDDVIAGVLNRNGLTTGNGNRWTRERVTALRSYRKIPVFRPQIDGVEPWLNLGGAAKLLGITPKTLRLAAEAGDIEGAHPLPDGPWIFSRSKLATSQARQILDRARQNPRHPAGSPPDQENLFPSMA

SEQ ID NO: 12505 - protein, 687 aa, Unknown
  Description of Unknown: Integrase A1073 sequence
  IPR006119,PF00239,cd00338,PF07508, PS51736,G3DSA:3.40.50.1390,SM00857,IPR011109, IPR025827,PTHR30461,PF13408,mobidb-lite, SSF53041,IPR036162
MMHEKISAHHLERKAILYVRQSSAHQVLHNRESSALQYAMRDRLKALGWAQIETVDEDLGRSAAGGVTRAGFDRMVAEVCLGKVGAVAAREVSRFARNSRDWQQLIEMCRVVDTVLIDQEAVYAPRQGNDRLLLGLKGSLNEYELDLLRQRSLSARYEKARRGELVVTVPIGFLKAGDRIEKDPDRRIQEAIALVFNKVAELGSARQALLWFLEQGLDLPVRRANGEVTWRRPNYATIHRMIDNPIYGGAYAYGKSRSMPGYDGRSGIRRKARAEWLALIPDAHEGYVSWERAEEIRKMVSNNVPASRHHGAPKHGDALLAGLFRCKRCGRKLTVRYTGNNHNIPRYSCWRGLLDNGEPRCIAFGGLRVDDAIEEMLLGVVEPGAIAASAEAERNIANRRDQVHDALQRDLEAASFAADRAFRQYDTADPENRLVASELEARWNKALIRVGEIENKIASHKAAIPQVSSYSMLDIAALAGDLRAVWSAPTTDTRLKKRIVRTVIHEVIADLDDVASEIVLVIHWAGGVHTELRLPKRRRGQRNATPDDLIEAVRQLVLIANDDLIAGILNRNGLATGNGNRWTRERVTALRSYRKIPVYRPQSDGIEPWLNLGKAAKLLGVTPKTLRIAAETGEIEGVHPLPAGPWIFSRSKLELPQAKQLVDRVRQNPRHPAGSPQNQGNLFTSTT

SEQ ID NO: 12506 - protein, 687 aa, Unknown
  Description of Unknown: Integrase A1074 sequence
  IPR006119,mobidb-lite,cd00338,PF07508,PS51736, G3DSA:3.40.50.1390,SM00857,IPR011109,IPR025827,PTHR30461, PF13408,SSF53041,Coil,PF00239,IPR036162
MMHEKIAPHHLERKAILYVRQSSAHQVLHNRESSALQYAMRDRLAALGWSHIETVDDDLGRSAAGGVTRAGFDRMVAEVCLGKVGAVAAREVSRFARNSRDWQQLIEMCRVVDTVLVDQEAVYAPRQGNDRLLLGLKGSLNEYELDLLRQRSLSARYEKARRGELVVTVPAGFVKAGDRIEKDPNRRIQEAIALVFDKVTELGSARQALLWFLEQGLDLPVRCANGDVIWRRPNYATIHRMIANPIYGGAYAYGKSRSVPGYDGRSGIRRKARDEWLALIPDAHEGYISWERAEEIRKMVSDNVPASRHHGAPKHGGALLAGLFRCKRCGRKLTVRYTGANHNIPRYSCWRGLLDNGEPRCIAFGGLRVDDAIEEALLGVVEPGAIAAAVEAERNMANQRDQVQDALMRDLEAARYVADRAFRQYDAADPENRLVTSELEARWNKALTGVGEIEAKIAKHRTVTPHPFPMSASQVTALAGNLRAVWTAPTTDARLKKRIVRTLINEVVADLDDGTSEIVLVIHWVGGVHTELRLPKRHRGQRNATPDDIVDAVKQLVLIANDDVIAGVLNRNGLTTGNGNRWTRERVTALRSYRKIPVFRPQIDGVEPWLNLGGAAKLLGISPKTLRLAAEAGDIKGAHPLPDGPWIFSRSKLATPQARQILDRVRKNPRHPAGSPPDQENLFLSMT

SEQ ID NO: 12507 - protein, 687 aa, Unknown
  Description of Unknown: Integrase A1075 sequence
  IPR006119,PF00239,cd00338,PF07508, PS51736,G3DSA:3.40.50.1390,SM00857,IPR025827, IPR036162,PF13408,PTHR30461,mobidb-lite, Coil,SSF53041,IPR011109
MMHEKIGPHHLERKAILYVRQSSAHQVLHNRESSTLQYAMRDRLTALGWSRIETVDDDLGRSAAGGVTRAGFDRMVAEVCLGKVGAVAAREVSRFARNSRDWQQLIEMCRVVDTVLIDQEAVYAPRQGNDRLLLGLKGSLNEYELDLLRQRSLSARYEKARRGELVVTVPVGFLKVGDRIEKDPDRRIQDAIALVFNKVAELGSARQALLWFLEHGLDLPVRRADGDVIWRRPNYATIHRMIANPIYGGAYAYGKSRSVPGYGGRSGIRRKARDEWLALIPDAHEGYISWERAEEIRKMVSDNVPASRHHGAPKHGDALLAGLFRCKRCGRKLTVRYTGANHNIPRYSCWRGLLDNGEPRCIAFGGLRVDDAIEEAVLGVVEPGAIAAAIEAERRMASQRDQVQDALLRDLEAARYAADRAFRQYDAADPENRLVTSELEARWNTALARAGEIEAKIAKHRTVAPQPIPMSASQVAALAGNLRAVWTAPTTDARLKKRIVRTLINEVVADLDDGTSEIVLVIHWVGGVHTELRLPKRRRGQRNATPDDIVDAVRQLVLIANDDVIAGVLNRNGLTTGNGNRWTRERVTALRSYRKIPVFRPRVDGVEPWLNLGGAAKLLGITPKTLRLAAEAGQIEGAHPLPDGPWIFSRSKLATPQAHQILDRARQNPRHPTGSHPDQENLFPSTT

SEQ ID NO: 12508 - protein, 687 aa, Unknown
  Description of Unknown: Integrase A1076 sequence
  IPR006119,cd00338,PF07508,PS51736,G3DSA:3.40.50.1390, SM00857,IPR011109,IPR025827,SSF53041,PF13408, PTHR30461,mobidb-lite,Coil,PF00239,IPR036162
MMHEKIGPHHLARKAILYVRQSSAHQVLHNRESSALQYAMRDRLAALGWSQIETVDDDLGRSAAGGVTRAGFDRMVAEVCLGKVGAVAAREVSRFARNSRDWQQLIEMCRVVDTVLVDQEAVYAPRQGNDRLLLGLKGSLNEYELDLLRQRSLSARYEKARRGELVVTVPAGFVKAGDRIEKDPDRRIQEAIALVFNKVTELGSARQALLWFLEQGLDLPVRCANGDVIWRRPNYATIHRMIANPIYGGAYAYGKSRSVPGYDGRSGIRRKARDEWLALIPDAHEGYISWERAEEIRKMVSDNVPASRHHGAPKHGDALLAGLFRCKRCGRKLTVRYTGANHNIPRYSCWRGLLDNGEPRCIAFGGLRVDDAIEEALLGVVEPGAIAAAVEAERNMASQRDQVQDALLRDLEAARYVADRAFRQYDAADPENRLVTSELEARWNRTLARVGEIETRIAKHRTVTPQPFPMSASQVTALAGNLRTVWTAPTTDARLKKRIVRTLINEVVADLDDGTSEIVLVIHWVGGVHSELRLPKRRRGQRNATPDDIVDAVRQLVLIANDDVIAGVLNRNGLTTGNGNRWTRERVTALRSYRKIPVFRPQIDGVEPWLNLGGAAKLLGITPKTLRLAAEAGDIEGDHPLPDGPWIFSRSKLATSQAGQILDRARKNPRHPAGSPPDQENLFPSTT

SEQ ID NO: 12509 - protein, 687 aa, Unknown
  Description of Unknown: Integrase A1077 sequence
  IPR006119,cd00338,PF07508,PS51736, G3DSA:3.40.50.1390,SM00857,IPR025827,SSF53041, IPR036162,PF13408,PTHR30461,mobidb-lite, Coil,PF00239,IPR011109
MMHEKIGPHHLERKAILYVRQSSAHQVLHNRESSALQYAMRDRLAALGWSHIETVDDDLGRSAAGGVTRAGFDRMVAEVCLGKVGAVAAREVSRFARNSRDWQQLIEMCRVVDTVLVDQEAVYAPRQGNDRLLLGLKGSLNEYELDLLRQRSLSARYEKARRGELVVAVPVGFVKAGDRIEKDPDRRIQEAIALVFNKVAELGSARQALLWFLEQGLDLPVRYANGDVIWRRPNYATIHRMIANPIYGGAYAYGKSRAVPGYDGRSGIRRKTRDEWLALIPDAHEGYVSWERAEEIRKMVSNNVPSSRHHGAPKHGDALLTGLFRCKRCGRKLTVRYTGNNHNIPRYSCWRGLLDNGEPRCIAFGGLRVDDAIEEALLGVVEPGAVTAAIEAERNMASQRDQVQDALLRDLEAARYVADRAFRQYDAADPENRLVTSELEAPWNKALARVGEIEAKIAKHRTVTPQPFAMSASQVTALAGNLRTVWTAPTTDARLKKRIVRTLINEVVADLDDGTSEIVLVIHWVGGVHTELRLPKRRRGQRNATPDDIVDAVRQLVLIANDDVIAGVLNRNGLTTGNGNRWTRERVTALRSYRKIPVFRPQIDGVEPWLNLGGAAKLLGITPKTLRLAAEAGEIEGTHPLPDGPWIFSRSKLATSQARQILDRARQNPRHPTGSHPDQESLFPSTT

SEQ ID NO: 12510 - protein, 687 aa, Unknown
  Description of Unknown: Integrase A1078 sequence
  IPR006119,cd00338,PF07508,PS51736,G3DSA:3.40.50.1390, SM00857,IPR011109,IPR025827,SSF53041,PTHR30461, PF13408,mobidb-lite,PS51737,PF00239,IPR036162
MMHEKIRPHHLERKAILYVRQSSAHQVLHNRESSALQYAMRDRLTSLGWSSVEIIDDDLGRSAAGTVTRAGFERMVAEVCLGKIGAVAAREVSRFARNSRDWQQLIEMCRVVDTVLIDQETVYAPRQGNDRLLLGLKGSLNEYELDLLRQRSLSARYEKARRGELIVAAPVGFVKVADRLEKDPDRRVQEAITLVFEKVVELGSARQALMWFLEHELDLPAKRNNGDTIWRRPTYATIHRMIENPVYGGAYAYGKTSATPGFGQSATIRRNAREEWLALIPGVHEGYVSWERAEAIRKMVSDNAVTSRHHGAPKHGDALIAGLFRCRRCGRKLTVRYTGAKHNIPRYSCWRGHLDNGEPRCIAFGGLRVDDAIEGAILRVVEPGAIAAAAEAEAQASSRRDQVRDALGRDLEAARYAANRAFRQFDAADPENRLVAAELEIRWNRALELVGEIESKISAHDRTAPKPSLLMQTGIASLAQDLRTVWAAPTTDARLKKRIVRTVIQEVVADIDDATSEIVLMVHWIGGIHTEMRLPKRRRGQRNSTSGDIVAAIRQLVLIANDDLIAGVLNRNGLLTGHGNRWTKERVTAHRSHHKIPVFRPAPDGNEPWLNLNKAARFIGVAPKTLRLAAEAGEIKGQHPLSDGPWIFNRSDLEKQEAQNLLHRVRKNPRHPAGSHPDQNTLFPTTA

SEQ ID NO: 12511 - protein, 686 aa, Unknown
  Description of Unknown: Integrase A1079 sequence
  IPR006119,cd00338,PF07508,PS51736, G3DSA:3.40.50.1390,SM00857,IPR025827,IPR036162, PF13408,PTHR30461,SSF53041,PS51737, PF00239,IPR011109
MSKITPDHLARHAYVYVRQSSPDQLLHNHESRRRQYGLADRARQLGWAEVVVIDDDLGRSGGGIARPGFERLLGAICEGRVGIVLAIEASRLARNGRDWHTLLEFCGLVGCLLADEDGVYDAKLPNDRLLLGMKGTMSEMELSILRQRSLEALRQKARRGELFLTVAVGYIKTHHDRIAMDPDLRVREALGLVFRKFAEFQSIRQVHLWLRQERIRLPAVERTAEGPRIVWKLPVYNTLHHLLTNPIYGGAYAFGRTGSRVSVQDGRKRVVRGFRRTQAEWEVLIPDHHEGYISWAEFGRNQALIADNANSKGMMARGSVRRGDALLAGLLRCGHCGRRLHVAYSGTDGYCVRYDCRGAHLNHGTERCISFGGLRVDAAVAEEALRFLAPLGIEAALRAIDAREADGSETRRQAELALAQACYEAELARRQYDAVDPDYRLVAAELERRWNDRLVEVHRLEERVAALRTGQTAALTAEERARLMALGADVAALWHHPGATAETRKRILRTVIAEIVAKVVDDTIELVIHWQGGDHTHLSVPKNRSGKHRWRTDADTGDLIRALARQQPDRGIAAILNRAGKRTGKGNTWTEARVRSFRNAHGIAVYREGEMTERGEVTLEQAADRLKVSTMTVLRLIAGGTIQASQACKGAPWAILEAQLSGLEPLRPSVRRPVTDDPDQQTFDFQ

SEQ ID NO: 12512 - protein, 686 aa, Unknown
  Description of Unknown: Integrase A1080 sequence
  IPR006119,PF00239,cd00338,PF07508,PS51736, G3DSA:3.40.50.1390,SM00857,IPR025827,IPR036162,PTHR30461, PF13408,mobidb-lite,Coil,SSF53041,IPR011109
MMHEKIGPHHLERKAILYVRQSSAHQVLHNRESSTLQYAMRDRLTALGWSRIETVDDDLGRSAAGGVTRAGFDRMVAEVCLGKVGAVAAREVSRFARNSRDWQQLIEMCRVVDTVLIDQEAVYAPRQGNDRLLLGLKGSLNEYELDLLRQRSLSARYEKARRGELVVTVPVGFLKVGDRIEKDPDRRIQDAIALVFNKVAELGSARQALLWFLEHGLDLPVRRADGDVIWRRPNYATIHRMIANPIYGGAYAYGKSRSVPGYGGRSGIRRKARDEWLALIPDAHEGYISWERAEEIRKMVSDNVPASRHHGAPKHGDALLAGLFRCKRCGRKLTVRYTGANDNIPRYSCWRGLLDNGEPRCIAFGGLRVDDAIEEAVLGVVEPGAIAAAIEAERRMASQRDQVQDALLRDLEAARYAADRAFRQYDAADPENRLVTSELEARWNTALARAGEIEAKIAKHRTVAPQPIPMSASQVAALAGNLRAVWTAPTTDARLKKRIVRTLINEVVADLDDGTSEIVLVIHWVGGVHTELRLPKRRRGQRNATPDDIVDAVRQLVLIANDDVIAGVLNRNGLTTGNGNRWTRERVTALRSYRKIPVFRPRVDGEPWLNLGGAAKLLGITPKTLRLAAEAGQIEGAHPLPDGPWIFSRSKFATPQAHQILDRARQNPRHPTGSHPDQENLFPSTT

SEQ ID NO: 12513 - protein, 686 aa, Unknown
  Description of Unknown: Integrase A1081 sequence
  IPR006119,cd00338,PF07508,PS51736, G3DSA:3.40.50.1390,SM00857,IPR025827,IPR036162, PTHR30461,PF13408,SSF53041,PS51737, PF00239,IPR011109
MSTDNAMKISADHLRRDAFLYVRQSSLRQVFENTESTKRQYALRDRAVALGWPIERVHVIDNDLGLSGAQSQDRDGFQRLVTEVAMGHAGIVLGLEVSRLARNNADWHRLLELAAMSRTLIMDEDGVYDAASFNDRMLLGLKGTMSEAELHILKSRLQGGILNKARRGELELPLPIGLVYTPDMRVVLDPDRQIQDTVRMLFDTFREVGSACAVVRRLRSEKILFPRRIRRGIGKGDVLWSEIDHSRVIQILHNPRYAGAFAYGRTRTVYNAKLKSVQQKMPRSDWQVLIPQAHEGYISWDEFERNQTSLEQNAVGFSPGLRGRMPRQGNGLLQGRVLCGRCGARMRVHYEQFEGNLRPYYICNEAVVRHAGKACQWARGPAIDEAVSALLLEAMAPTAIEVALAVQEEISQRVEQAASLRDKQLQRARYEAELARRRYLKVDPDNRLVADALEADWNGKLRDLDTLQREHERQNETDQSLLDGAMQERIRALAADFPRIWNNERTSPVERKRMLGLLIEDVTLLVDEKINMHIRWRGGRTQSLAVARPRPMAVIRKTPEAVVALINELLETDNDQQIASRLNALGHRNWRGEAFTLKKVMLVRRAYGLKTRFERLRDSGMLTGEEVARRFGVSATTVHQLGRDGVLKRHRYATNHRYLYEPPGNVRLAKGVGGRYGSRQPRLIDA

SEQ ID NO: 12514 - protein, 685 aa, Unknown
  Description of Unknown: Integrase A1082 sequence
  IPR006119,PF00239,cd00338,PF07508,PS51736, G3DSA:3.40.50.1390,SM00857,IPR011109,IPR025827,PF13408, PTHR30461,mobidb-lite,PS51737,SSF53041,IPR036162
MRRLKTKAQYQSPGDPRNNALRGRAVALGWRDEQIIVIDNDQGESGASAAWREGFQRLVSDVGMGHAGIVMGLEVSRLARNNADWQRLLEICALADTLILDEDGVYDPASFNDRLLLGLKGTMSEAELHVIKARLRGGILNKVRRGEFRCLLPTGLVYDHFGHVTLDPDMQVRETIIHFFEMFSRLESASQTVKVFRNEGLLFPSRLHNGDTLFRPLTASTAMRVLNNPRYAGAYTYGRRQFRRTIDGKKTLRARDIDDWPACMPDAHPGYISWERHQENLKILKANGRGFEAARASIPREGPALLQGRAVCGQCGNHLRVRYAARRGRQEAWYICNRDHIYRGEPMCQSIAGPPVDEAIGMLIAEQMTPAAVELALDVRKEIQARHEEADRLRCRAIERAQTEADLAQRRFMLVDPNNRLVADTLEGEWNEKLRILANAREERERGREHDQFILDKAVHERLVAMTADFNELWKDPDTPSRERKRLLAHIIEDVTLLKLPAEGTTKLHVRFKGGKIQTLTTMNPQSSAQQIKTKPNIVELIDKLLDDYIYPEIAEILNEQGHRPGGTARRGCHDARFTPLKVAYLIHEYKLQSRYDRLRQRGMLTRQEAAVHLNISEQTVARWAKYGLIARHAYNGHYSLYEIPDGDLPQKQCSRWNQLQDRTAARQQTQTEPRTSTGEERGVV

SEQ ID NO: 12515 - protein, 685 aa, Unknown
  Description of Unknown: Integrase A1083 sequence
  IPR006119,PF00239,cd00338,PF07508, PS51736,G3DSA:3.40.50.1390,SM00857,IPR025827, PS51737,IPR036162,PTHR30461,PF13408, mobidb-lite,Coil,SSF53041,IPR011109
MTHVDLPASLLKRKAVVYVRQSTPAQVQLNRESQRRQYELVEEARRRGFRDVEVIDDDLGRSASGTVARPGFDKLVAWLCAGDVGAILCLDASRLARNGRDWHHLLELCGLVEARVIDLDGVYNPCRPNDRLLLGMKGSISEFELNILRTRMYEAVRSKARRGELRIGVPIGYIWHREIGLGLDPDARVQEAVRQIFSRFRQLGSARQTHLALHREGMHFPRPSDGRKLTALDWTPIRYRNVISVLKNPFYAGAYAYGKSKSRTAVVDGRAHKTYGHIRPLDEYDVLLKDHHEGYIDWGIYERNQKQLAINAYGQRDGAKSGRGGRSLLIGLMTCGQCGHRLRVAYRGRYPYPVYQCIGRRAHGLPRCMCFGGQRVDTAIARELMRVVQPIAIQAALVAERTHMETQREQQRILELELQQARYEASLAERRYAACDPDNRLIAAQLEKNWETSLRRVSEYEARLDDIKTHNSATPTPDFTGLAEDLDAAWSSSSVTMRTRQQLVRALINDTTVNIDEADCEIVLTIHWKGGRHSTLRLRKPQSGEHECVTSDDALAIIESMASRCEHIAATLNRMGLPTAQGKSWTAKRVGSIRRVRGIHAYKSAEKDGEWLTLTEAAKASNVTAHRIRSLIAAGILPAQQVVPGAPYQINASHLRDPRVATAMRRKGRPCQSPPESQIPMFTDT

SEQ ID NO: 12516 - protein, 683 aa, Unknown
  Description of Unknown: Integrase A1084 sequence
  IPR006119,PF00239,cd00338,PF07508,G3DSA:1.10.1660.10, PS51736,SM00857,G3DSA:3.40.50.1390,IPR025827,IPR041657, IPR036162,PTHR30461,PF13408,PS51737,SSF53041, PF12728,IPR011109
MKALGQAIVYIRQSTAGQLANNLESQRRQYGLADWARQLGWNDVAVIDDDLGRSGGGVARPGFEKLLAAICEGRVGAVVSIEASRLARNGRDWHTLLEFCGLVGTLILGEDGVYDPRHPNDRLLLGMKGTMSEMELSVLRQRSLEALKQKASRGELFMTVAIGYVRIGNNRIEKDPDRRITEAIALTFARFAEMQSVRQVHLWLRQERIPLPAVTYGAEGRLIEWKLPVYNTILHILTNPIYAGAYAFGRTGSRVSIEAGRKRVVRGFKKERKDWEVLIPNHHEGYLSWADYERNLGLIADNANGKNPMSRGALRRGEALLAGLLRCGHCGRKLHVAYSGANGNTGRYHCQGGFINHGGDRCISFGDMRIDRDIGAEVIVRLQPLGIEAALAAQALRSRANEDKRRQIALALEQARYEVGRARRQYDAVDPDNRLVASELETRWNERLTIARDLEAELEELTASPAAEPAPADRERLMMLGADLQRAWTSAGVTPEAKKRIVRTVIDEIVVRVEDNALDLVIRWHGGDHSALKVKKNRTGQHRWSVEGETIDLVRVLARQMPDKAIASVLNRAGKTTGRGNGWTQSRVCSLRSHNTIPTYREGERRERGEVTLDEAAAALSVSPSTVRRLIKDGQLSANQLCKGAPWIIHAADLDRNDVKGAATARRLRRPPSSNPLQKTLEL

SEQ ID NO: 12517 - protein, 677 aa, Unknown
  Description of Unknown: Integrase A1085 sequence
  IPR006119,PTHR30461:SF3,cd00338,PF07508,PS51736, G3DSA:3.40.50.1390,SM00857,IPR038109,IPR011109,PTHR30461, G3DSA:1.10.10.2600,SSF53041,PS51737,PF00239,IPR036162
MAEITIIQPREQPRRKLRCGAYCRVSTGREEQQHSYEAQRLWFMTLLGGSQTEELVDIYADIGISGTTTDRPEFMRMLNDCRHGCIDRILTKSISRFARNTRDCLAILRELRELGVTVFFEKENIDTARTADEMMIAIMGGLAQEESQSISRNIRWSLHRKMAAGTLGVARVPYGYDKVNGRLVINDEQAAVVRRIFSLYLGGMGARRIAALFNSEGLPAPESTAWNNITVYKMLAQEMYLGDIRWQKTVSVFMGTSHPNTGQANSFYVSGSHEPIIDRETFESAQALRLKSVRPAEKTNNSPFRQKVVCGICGRSYYLIGAARPYWQCTRRFDLVKPCTNDILHDETLSDLWRVIWTKFTNHADDVLLPLIGQLERIAEKVSENAESGRLDEIMQQKMTLRKMCAEGLISYGEVITSETELNAEYSSLIENCRKQKEHNSLLINEVKTLYKAVSAAHSDCCADILKSIRFAHDTADFELVSGIHIIMSIPKHKKRIITSHNPINAIRSLALCGGCGGRLSRRKVEGVYLWKCSNRRCSYWRSKHTDEDMIGNTTDVFSKVYADPRLVSLKCSMTEYRPTESVLTMLESLEKLIALGENAEMLIKAAVHLAEEKIGCIEYNVKTEQTAHIEDAIKNCVELPEFLIQAVRHIYVTPDRVRVKFINGKTVKSERSTNHE

SEQ ID NO: 12518 - protein, 675 aa, Unknown
  Description of Unknown: Integrase A1086 sequence
  IPR006119,PF00239,cd00338,PF07508, PS51736,G3DSA:3.40.50.1390,SM00857,IPR011109, IPR025827,PS51737,PF13408,PTHR30461, Coil,SSF53041,IPR036162
MSNTDLIPTALLARKAIVYVRQSSQSQVMTNLESQRRQYDLVDVARQHGFSDIETIDDDLGRSASGTVARPGFDRLVALLCAGQVGAVLCFDASRLARNGRDWHHLLELCGLVEARVIDHDGVYNPCRPNDRLLLGMKGSISEFELGVLRARMLDAARSKARRGELRLSVPFGYIWHREAGLGLDPDLRLQDVIRSIFTRFHELGSARQVLLSMTKDQVHFPRPSDEGRMTSFVWMPVRYRNVIGILKNPFYAGVYVYGKSEKRTAIVDGRARRTYGHGKPAGTWEVMIRDHHEGYITWDEYERNQQQLALNNYGRSGGTKSGRGGKALLSGLLTCGRCGRRLSVAYTGNPQSRPVYRCDKPNLMMGLPRCMTFGGPRVDAAVARELLRAVEPLAIEATFEAERMHRERQEDQRHIHDLELRQARYEASLAERRYAACDPDNRLIAAQLEKNWETALRRVRDLEVRKPADSPSTIEVDPDTFTNLADNLQAAWDSPDVTMRARQQLLRTLIADIVVDVDDAVREVVLTIHWKGGQHSELKVRKPQSGEHGCATTEDALAVMRSMAGRWSDEHIAASLNRMGMPTGQGKTWTAHRVASVRRVRAIHAYKSADKDGEWMTMTEAAAALGVTNHRIRHLIKTKVLSAEQVVPGAPYQIRASDLAGTVRNSVRWAGFIS

SEQ ID NO: 12519 - protein, 656 aa, Unknown
  Description of Unknown: Integrase A1087 sequence
  IPR006119,cd00338,PF07508,PS51736,G3DSA:3.40.50.1390, SM00857,IPR011109,PS51737,IPR025827,PTHR30461, PF13408,SSF53041,Coil,PF00239,IPR036162
MWLIERSHVHVAFGRVQVIDEDLGKSGAGGVDRHGFQKLIAEIGLGNAGLVVSLDASRLARNNRDWHQLLELCSVFGVVIADGERLYDPRAYHDRLLLGLSGIMSEAELHQLRMRLHQGERQKAARGELRLPLPAGLAYDRTGTIILNPDEEVQARFHLVFAKFRELQSARRVMRYLDRNGLSLPVRPLLGPSPHEVVWRAPDSARVLNILQNPAYAGAYVYGRRQKDPSRCRPGSLTGTVKVAIADWAVCLHAAHPGYISWEEFMANQGRLADNVCRYEAGHSGVPRKGAALLQGIAVCGRCGRRMSMRYTGPHADYPVYCCRSDRDQQGSALCQEVRALAVDALVERIVLDALVPDQIEIALATAGQLEQENRQLERQWALRVERARYEAERARRQYDAVEPENRLVARSLERAWEDKLRVVEAVEQQHARWRAQEPLLIGPTERAGLQALGENLPRIWNAATTSAADRKRILRFVIREVVLDQKRTRGQVWFKIVWQTGATSEHHVQRRVQAYRNYIDIDRLRQRIVELNAEHKMDGEIAAILNQEGFVAARGCAFKGENVWLLRTRWSIPTVKINGVDKNPMRWPDGSFSIQGAAAELCVTPQTVFDYLARGMLTGRQLTKGQPWQIELSDEQMSQLRNRVRRTKRSKKEAS

SEQ ID NO: 12520 - protein, 651 aa, Unknown
  Description of Unknown: Integrase A1088 sequence
  IPR006119,cd00338,PF07508,PS51736, G3DSA:3.40.50.1390,SM00857,IPR011109,IPR025827, IPR041657,Coil,SSF53041,PTHR30461, PF13408,mobidb-lite,PS51737,PF00239,PF12728,IPR036162
MSKITADHLSLSAFVYVRQSTAYQVANNLESQRRQYGLVERARQLGWETVEIVDDDLGRSGGGIARPGFEKLLAAICEGRVGAVVSLEASRLARNGRDWHTLLEFCGLVGTLIVDEEAIYDPRSPNDRLLLGMKGTMSEMELSVFRQRSVEAMRQKARRGELHLTVAVGYVKTDDARVEKDPDRRVQESILLVFRKFAELQTVRQVLLWFRQENVLVPSVNQGRGKPPIEWKAPVYHTLHHILTNPVYAGSYAYGRRGTRVMIKDGRKRVIRDTLRRNSKDWEVLIHDHHEGYISWAEFERNQHLIAENANGKSYIGRGSIRRGEALLPGLFRCGRCGRRLHIQYSGKGGNTQRYVCRGTFGDMAAANCIGFGGMRVDRAVAQEVLERLQPLGIEAALQAMEAHTQRHSDKRQQLENSIKQAQYEAARARRQYDAVDPDNRLVAGELERRWNEKLIQLRDLEIELETLSTDRDMPALSADDRARLMKLGRDLGQAWDSPSVSIETRKKIIRLLITEIVVDLVRALARQLPDLSIAAILNRSGKRTGHGASWTRSHVCSLRNIHGIPVYREGERAERGERTLDETADILKVSRATAYRMVSSGVLPARQLCAGAPWIIQLSDLQDDTVRREADARRSRRPISQDPVQNPLLF

SEQ ID NO: 12521 - protein, 629 aa, Unknown
  Description of Unknown: Integrase A1089 sequence
  IPR006119,PF00239,cd00338,PF07508,PS00398, G3DSA:3.40.50.1390,SM00857,IPR038109,PS51737,IPR036162, PTHR30461,G3DSA:1.10.10.2600,mobidb-lite,Coil,SSF53041, IPR006118,IPR011109
MPAGLRPARASAEWKRRLDRWCATRADAALSGRDEFNEARLPRIDSLNRASTPQDRWTMSTKAQSATSNTPRIYTYARFSSLQQADGSSIARQDAYAEAWAKQHGLILDRSLRMEDRGKSAHKGEHVKKGGALGAFIERIKAGDVVPGDTLIVENLDRLSRQSAQDAQTQFNAIVNTYGVDIVTMHDGVRYNREELARDPSPLFLALAVMVRAYDESSRKSSNARGAYRDKCERWLKGEYRGLIGQPRHIRASDGKLIKGTDPIWILYDTEAKRFELVPEKAAAMQRIIELYRQGHGSVEITRRMETEGLTISDKRAVVRIHKLITYPALKGDKVVVVDGQTYTLKGYYPPVVTETEFDELQLLVGKRGVRKGKGKVPAILTGMKMCYCGYCRQLMVGQTLTTTRADGTTHQNFRRLRCGSYANRAADCRGGASCSGVPVEKAIMTFCANQMNLDHLFTGNDKSDPLMRQLTAKRASLAKTDLKLKGIKDEMLNGDALPSTFREVLRELETNKRTLTQAITKLERELSINSAAQPAPAETWAELVSDVMALDYDARMKTRRLVQETFERIDVFSKGFECDGEHMAVRVTSKRGVVMGFEFNRRTGELIEATKTRKSKPLPKPARTPRMK

SEQ ID NO: 12522 - protein, 629 aa, Unknown
  Description of Unknown: Integrase A1090 sequence
  IPR006119,cd00338,PF07508,PS51736,G3DSA:3.40.50.1390, SM00857,IPR025827,IPR036162,PF13408,PTHR30461, SSF53041,Coil,PF00239,IPR011109
MMHEKIGPHHLERKAILYVRQSSAHQVLHNRESSALQYAMRDRLAALGWSQIETVDDDLGRSAAGGVTRAGFDRMVAEVCLGKVGAVAAREVSRFARNSRDWQQLIEMCRVVDTVLVDQEAVYAPRQGNDRLLLGLKGSLNEYELDLLRQRSLSARYEKARRGELVVSVPAGFVKAGDRIEKDPDRRIQEAIALVFNKVTELGSARQALLWFLEQGLDLPVRCANGDVIWRRPYYATIHRMIANPIYGGAYAYGKSRSVPGYVGRSGIRRKARDEWLALIPDAHEGYISWERAEEIRKMVSDNVPSSRHHGAPKHGDALLAGLFRCKRCGRKLTVRYTGANHNIPRYSCWRGLLDNGEPRCIAFGGLRVDDAIEEALLGVVEPGAIAAAVEAERNMANQRDQVQDALLRDLEAARYVADRAFRQYDAADPENRLVTSELEARWNKALTGVGEIEAKIAKHRTVTPQPFPMPASQVTALAGNLRTVWTAPTTDARLKKRIVRTLINEVVADLDDGASEIVLVIHWVGGVHTELRLPKRRRGQRNATPDDIVDAVRQLVLIANDDVIAGVLNRNGLTTGNGNRWTRERVTALRSYRKIPVFRPQIDGVEPWLNLGGAAKLLGITPKGDVTL

SEQ ID NO: 12523 - protein, 628 aa, Unknown
  Description of Unknown: Integrase A1091 sequence
  PTHR30461:SF3,G3DSA:3.40.50.1390,SM00857,cd03770, IPR025378,SSF53041,PF14287,IPR011109, PF07508,IPR038109,G3DSA:1.10.10.2600,IPR036162, PF13408,Coil,IPR006119,IPR025827,PTHR30461,PS51737,PF00239
MRKNEKITALYERLSRDDFGKDDDQQRESNSISNQKAMLEEFAARQGFTNIVHFTDDGISGTCFDRPGFLAMMKEVEAGNVEYLCIKDMSRMGRDYLKVGQIMEILRQRGVRLIAINDGVDSARGDDDFTPFRNIMNEYYARDTSRKIRSTFQSKGKSGKHLTGTVIYGYLWNEARDQWLVDPEAAEVVKRIFSMTIDGYGPYQIASKLKSEKVLIPSAYLAQHGEGVNKNKTFKDVYGWGSSTICNILEKREYLGHTINFKTRKHFKDKKSHYVPEDEWTIFENTHEPIIDQQTFDLVQKIRGNVRRYPDGWGEAAPLTGLLYCADCGGKMYVHRTNNGKRISQYTCSQYTKVPCGTLCKTQHRINEDVVLSLVSEMLKAIAEYAKHDRAEFVRVVQEAQSSQQTTEVRKQRTRLATAKQRVSELEVLLCKIYEDNILGKLSDSRYATLDAQYEKEQSELTAEISVLEKAVKSYEKHEKDADRFIALIDKYENFDKLTIAMLNEFIEKILVHERDRKGSIQTTQEVEIYFNFVGRFVPPAFGEVELTPEELEEIRKREERKDRLHQNYLKRKASGAQKRYEDKIKKRKKAEIEAKKAAIRAEDIAKGVFVPVSSLPQREPMKGVQTA

SEQ ID NO: 12524 - protein, 628 aa, Unknown
  Description of Unknown: Integrase A1092 sequence
  PTHR30461:SF3,G3DSA:3.40.50.1390,SM00857,cd03770,IPR025378, SSF53041,PF14287,IPR011109,PF07508,IPR038109, G3DSA:1.10.10.2600,IPR036162,PF13408,Coil,IPR006119, IPR025827,PTHR30461,PS51737,PF00239
MRKNEKITALYERLSRDDFGKDDDQQRESNSISNQKAMLEEFAARQGFTNIVHFTDDGISGTCFDRPGFLAMMKEVEAGNVEYLCIKDMSRMGRDYLKVGQIMEILRQRGVRLIAINDGVDSARGDDDFTPFRNIMNEYYARDTSRKIRSTFQSKGKSGKHLTGTVIYGYLWNEARDQWLVDPEAAEVVKRIFSMTIDGYGPYQIASKLKSEKVLIPSAYLAQHGEGVNKNKTFKDVYGWGSSTICNILEKREYLGHTINFKTRKHFKDKKSHYVPEDEWTIFENTHEPIIDQQTFDLVQKIRGNVRRYPDGWGEAAPLTGLLYCADCGGKMYVHRTNNGKRISQYTCSQYTKVPCGTLCKTQHRINEDVVLSLVSEMLKAIAEYAKHDRAEFVRVVQEAQSSQQTTEVRKQRTRLATAKQRVSELEVLLCKIYEDNILGKLSDSRYATLDAQYEKEQSELTAEISVLEEAVKSYEKHEKDADRFIALIDKYENFDKLTIAMLNEFIEKILVHERDRKGSIQTTQEVEIYFNFVGRFVPPAFGEVELTPEELEEIRKREERKDRLHQNYLKRKASGAQKRYEDKIKKRKKAEIEAKKAAIRAEDIAKGVFVPVSSLPQREPMKGVQTA

SEQ ID NO: 12525 - protein, 618 aa, Unknown
  Description of Unknown: Integrase A1093 sequence
  IPR006119,SSF46955,PF00239,cd00338,PS51736, G3DSA:3.40.50.1390,SM00857,IPR025827,IPR009061,PF13408, PTHR30461,SSF53041,IPR036162
MNVHLKVQSHHRERSAYLYIRQSSMRQVIDNTESAMRQYALRGRAIALGWREEQIIVIDNDQGESGASAVWREGFQRLVSDVGMGHAGIVMGLEVSRLARNNADWQRLLEICALADTLILDEDGVYDPASFNDRLLLGLKGTMSEAELHVIKARLRGGILNKARRGEFRCPLPTGLVYDHSGNVALDPDMQIRETIAHFFETFSRVGSASQTVKAVRQEGILFPSRLHDSQTVFRPLTPSTAMRVLQGRAVCGQCGRHFHMRYAARRGRQEAWYVCDRARSNRGEHVCQAIAAPPVDEAIGMLIADQMTPAAVELAIEVRKEIEARHEEADRLRCRAIERAQTEADLAQRRFMLVDPNNRLVADTLEGEWNEKLRILANAREERERAQEHDQFILNKAVHERLVTMTADFKKLWTNSETPNRERKRLLAHIIEDVTLLKLPKRGTTKAHIRFKGGKTQTLVTISPKSPSQQVKTSPDVIQLIDKLLDDHIFSEIADILNNQGYRPGSVTRRDQRNARFTTKRVTYLVREYKLRSRYDRLRDRGMLTKKEAAAHLNIHEHTLARWAEHGLVTSHAYNGHYYLYELPKSDLPQKQCSRWNQLVDRLAAHKENARHAKTFN

SEQ ID NO: 12526 - protein, 616 aa, Unknown
  Description of Unknown: Integrase A1094 sequence
  IPR029016,IPR003018,PS00676,PS50045,IPR009057,SSF46689,PF00158, cd00009,cd00569,G3DSA:3.40.50.300,G3DSA:1.10.8.60,PS00675, PF01590,IPR002078,PF02954,G3DSA:1.10.10.60,G3DSA:3.30.450.40, PS00688,PTHR32071,IPR002197,SSF52540,PR01590,IPR025662,SSF55781
  CONT. FROM ABOVE: ,PTHR32071:SF77,IPR025943,IPR003593,SM00382, IPR025944,IPR027417
MNLSQREHIANVVASVEQAAATQVLNPQGSDAVQASWLRCVNHHGLDPSRLQEARILPARQLREHCQQLEALRVVAQPGLEKLYQQIAPAGYILLLADAQGVAVDYLGNANAEISLRRAGLFLGAQWSEALSGTCAVGTALATRQAITIHQTDHFDATHIPLTCSAVPLFDSQGDLQAVLDISALTSPQPRSSQHLVLQLAQQQAQKIENAWLLHRHRHDWVLKLSRHPGWHDIEPEFLLAFDANGRLTGLNPAARHWLSAHPQPLGLPLSALFPGPLEQLLSTPQLEDISGQQRFYAQTVHPARPASTAGVTLSPKLAALSGGDPQLDQQLRRAGRLLDTSLHLLVQGETGSGKEYFARAFHQASQRRKGPFIAVNCAAIPASLLESELFGHLPGSFSGAGSKARPGLIQAAEGGTLFLDEIGDMPLEMQTRLLRVLAEQEVLPIGARQPQKVDIRVLSASHHPLTQRVAAGLFREDLLYRLQGACIQLPPLRERQDINWLIDQMLAGQAQLSPPARHALLSYRWPGNLRELHHALQYALAMCESGIIAMDDLPDTLRVTAPAQPVAVNDEQDALLRQLRAARWNMSETARQLGISRMTLYRRLQRLGIQLPERQ

SEQ ID NO: 12527 - protein, 612 aa, Unknown
  Description of Unknown: Integrase A1095 sequence
  PTHR30461:SF3,G3DSA:3.40.50.1390,SM00857,SSF53041,IPR006118, IPR011109,PF07508,IPR038109,PS00397,G3DSA:1.10.10.2600, IPR036162,cd00338,PS51736,PF13408,mobidb-lite, Coil,IPR006119,IPR025827,PTHR30461,PS51737,PF00239
MVVKPRPSLSKPRCVIYARVSTDKQAKQNISIPDQMARARVYADLQGWQVVGEYVDAGASGRDDTGRPQFREMLAEAKKKPRSFEFIVVHSFSRFYRDQPRSELERRELKRNGVQVRSLTQEIEDDGGGGTLALSVMGLIDEYFSREQSKHVRRAMEENARQGFRSGGTAPFGYEYKVAEMRGERAKKKLTINEAEAATVREAFELHAAGLGIAKITDRLNEKGSRTRSDRLWAKNVIHAMLSNETYVGRNYYRPTDPITEEKLPREGWITVPCPPIVSEALFESVQEQMRMRAPEITAPRLTTSPVLLSGIARCGSCLAPLQLATGTSWTKDTYRYYKCSGKVRIGACAGGKPVSISEGLLDDLVLTTLCESLFTADRLASIVKSWIEVRSKDRSAASSRLSSLREQLKGTKKRERNLWDLAEKHGLGLEEDFRQRLTEIVEERNNLTRLISLQEALVSETIKPLSKAEAGRIASELREGIQHPDVDVRRRYVRAFLSCVVVYEDEIIIGGHNSSVAEAASGCDLHPLDRTALVRASVQDWLGTFPGELPTPRSAIALIEPFCDVPADLAAALETDRLKTLAQQDSPGQAEAKRLLIRGEPAQPRPSEPKD

SEQ ID NO: 12528 - protein, 606 aa, Unknown
  Description of Unknown: Integrase A1096 sequence
  IPR006119,PTHR30461:SF3,PF00239,cd00338,PF07508, PS51736,G3DSA:3.40.50.1390,SM00857,IPR038109,IPR011109, PS51737,IPR025827,PTHR30461,PF13408,G3DSA:1.10.10.2600, Coil,SSF53041,IPR036162
MNTKVKLIKASNLGARNRNALHLDLKRVAAYCRVSTDSKDQLESYKSQVDYYTNLIKNNKNWTLAGIYADEATTGTTATKRADFMRLISDCQNGDIDMIITKSISRFARNTLDTLKYVRLLKENNVGVVFEEENIDTLTMDGELLLTILSSVAQQEVENTSAHVKKGLKMKMEKGELIGFQGCLGYDYDPITKSISINEEEAKIVRYIFKRYLEGNGGSVIGRELEEQGYLTPRGKTKWSDTTVLGVIKNEKYIGDILMGKTFTVDPITKRRLANFGESDKYHIENHHEAIISKEDFEKAQEIRLRRAQNRNTIANKDRKREKLSRQYAFSSMLECGFCGEILSRRTWHTSSIYKKINWQCVKSTKKGKKYCPHSKGIQEAAIEKAFVESYRQLCHADSTIIDDFLKIVEEEINDETLVKDLKKLENQLNRIISQERKLVDLHLEDSIDEEVYAKKYKKLTKQKEELLDEKKTLELTIKDEDSIKERLKQFKKVLENREIIEEFNRTVFESIVDKVVVGRIDKDGTVHPYDLTFYFKTGVKDSQDSNNFKDKRKNAKDNDINKLCSYKNDEDKKLCSQSKDNACGDGSSVVQTKHRTSFRYRNRGR

SEQ ID NO: 12529 - protein, 591 aa, Unknown
  Description of Unknown: Integrase A1097 sequence
  IPR006119,PTHR30461:SF3,cd00338,PF07508,PS51736, G3DSA:3.40.50.1390,IPR038109,SM00857,IPR011109,IPR025827, SSF53041,PF13408,PTHR30461,G3DSA:1.10.10.2600,mobidb-lite, PS51737,PF00239,IPR036162
MTRVALYARYSSDNQRAASIEDQFRLCEERAAREGWQVVDYYRDAAISGASMILRPGIQTLLRDAQAGQFDIVLAEALDRVSRDQADVATLFKRLQFAGVTIVTLAEGEISELHVGLKGTMNALFLKDLALKTHRGLRGRVEAGKSGGGLCYGYRVVHQMDARGELIRGEREIDPVQAEIVRRIFHEFASGRSALSIASRLNDEGIPSPTGGKWNNTTLRGNALRGTGILNNELYIGRLVWNRLRYLKDPQTGKRVSRLNPQSEWIVTEVPDLRIMDDDLWQAVRARQALIAEKSVNISAGIRASLNKLNGQRRPRSLLSGLVFCGVCGGPCSIRGGDRFACSTHMDNRSCANKTTIRRPELEDRVLSGLKDRLMTPEAAAEAMRAYVEETNRANHERRASTAGWQTELTRLRKGLKQMLQVIEDGGYTRGMVERMREMEAREDEVVALLAAQPQDVPDIHPNIAAIFKHKVERLAETLNHPEDRQDASEAIRALIEKIVLHPGKGRGEMHATLHGELGNLLDFAASRGQGTKNTNTPGARAPGVSVSGIAGTHNRRKLRSASNEQATLVAGACNRRKLLLVSGFVERLVA

SEQ ID NO: 12530 - protein, 577 aa, Unknown
  Description of Unknown: Integrase A1098 sequence
  IPR006119,PTHR30461:SF3,cd00338,PF07508,PS51736, G3DSA:3.40.50.1390,SM00857,IPR011109,PS51737,IPR025827, PTHR30461,PS00397,PF13408,SSF53041,Coil, PF00239,IPR006118,IPR036162
MRTPHLRAVSAPQTLQVALYARVSTDQQAEHHTIDSQLAELTARAEQDGHDLRDDLRFIDNGHSGASLIRPALEHLRDLVALSAIDLIYVHAPDRLARSYAHQVLLIEEFAHAGTQVVFLNHPIGTTPEDSLLLQLQGMFAEYERAKVLERSRRGKRHRAQTGAVSVLSRAPFGYRYITREAGGGDARYEIDEEAARIVRQIFTWVGHERLTLAGVCRRLHDSGLPSPTGRRHWSRAMIHSMLLNPAYAGQALYGRRQSVPWRPPLHPPRGHDGLPRRPWRQVLATPERHISIAVPAIVGEELFASVAEQLEENRRRSRERLAGVQYLLRGLLVCQKCGYGFTGHHHRGQWRYYRCCGTDRSRFHGAFRCDARLVATELLDEAVWTEVCRLLDDPARVIAEYQRRLDAVQATPHRLELDALGRQRAKARRAIERLIDSYTEGLIEKPEFEPRLAALRRRTARLEAEAKAHQEADEQVRSLHLVIGKLDLFAALVHDRLAGADWTTRRDIICTLVKRIEVADDVVRVIFRVDPGVSGPSEAGRTLHHCPTRPHYAMSEGCAGWAGAEPPAQGTSHAAE

SEQ ID NO: 12531 - protein, 577 aa, Unknown
  Description of Unknown: Integrase A1099 sequence
  PTHR30461:SF3,G3DSA:3.40.50.1390,SM00857,SSF53041,IPR006118, IPR011109,PF07508,IPR038109,PS00397,G3DSA:1.10.10.2600, IPR036162,cd00338,PS51736,PF13408,mobidb-lite, Coil,IPR006119,IPR025827,PTHR30461,PS51737,PF00239
MSDRRIALYARVSTEQQARDHTIASQVAALHERITADEQSLAPEDAYVDEGYSGSVLVRPALERLRDAVATGEIERVYVLAPDRLARRYAHQVLLMEEFRRAGAEVIFLNHAIGGTAEDDLLLQIQGVIAEYERSKILERSRRGRRHAAQSGLVSAFTTGPYGYRYVPKALGGGVARFEVVPEEARVVRLIFAWVGLERISLREVCRRLQQAGVVTRRGSTRWYASTLGGMLTNTTYIGRAIYGHARYVFGPPKLLRPLRGHPHPCRRPSVRVKVPREEWIEVPVPAMVDPAVFEAAQMQLQENRQRKRESRAGPRWLLQGLTVCRRCGYAYYGKTAPQSKRDPAKGVYCYYRCIGTDGYRFDDHAVCDNPQIRGDYLEQAVWDRVRALLEDPDRMAGEYHRRLTQTQDRTGSSDYVLQLERQIARLQRGIGRLIDSYAEGVIEPAEFQPRIAGLKTRRARLEEQRRVAVEEAQAERELTLMIGRLEEFATRVSDGLDELDFAGKQALIRTLVRRIEIDRNHVEVIFRVPPPTPEGSSPSEPHPHSETWHHCTSDNDAEGCKSLHLTAKEAVARNGL

SEQ ID NO: 12532 - protein, 575 aa, Unknown
  Description of Unknown: Integrase A1100 sequence
  IPR006119,PTHR30461:SF3,PF00239,cd00338,PF07508, PS51736,G3DSA:3.40.50.1390,SM00857,IPR038109,Coil, IPR036162,PTHR30461,G3DSA:1.10.10.2600,PS51737,SSF53041, IPR011109
MSKGNRVAIYARFSTDLQREASIEDQLVSCREAALRQGWQVVAEYSDRATSGASMFRAGIEALQRDAKAGRFDIVLSEGMDRLSRKLSDISRFHERMEHAGVRIWTITEEDVDDMKIGLKGTMNAMQLRDIALKTRRGQRGRVRQGKVAGGNSYGYDVVAGPADGKGRTEGGERAINPGKAAVVRRIFEDYARGLSPRRIAEALNTEGIPGPRGRAWGASTLHGNRERRTGILNNELYIGRLVWNRLQYRKDPDTGKRMSRPNAGDVLVTTDVPHLRIVDDDLWQRVRARQGALTSKGTQVAVWDRRRPKFLFSRLMKCGCCGSGVSKEGRDGFSCSAARSKGAAVCTNRTVIKQADLEGRVLHALEHHLMDEAAVRIFCEEYAAERNRLAAGATANRKGLEKELAQVKRDHAKLVDAIIAGVPVEQVKERMNALDARRKELERQLSAEAAPDPVRFHPSMSGAYRERIGALIRALREPEGMEEAKEAIRAMVEKIVLTPVMGPDGKTELAIDLHGALASLLRLATGLPMADVPRRAAGGANSVTASDGVSEAVEFVDKLVLVAGAGFEPAAFRL

SEQ ID NO: 12533 - protein, 571 aa, Unknown
  Description of Unknown: Integrase A1101 sequence
  IPR006119,PTHR30461:SF3,cd03768,PF00239,PF07508, PS51736,G3DSA:3.40.50.1390,IPR038109,SM00857,IPR011109, IPR025827,PS51737,PTHR30461,PF13408,G3DSA:1.10.10.2600, Coil,SSF53041,IPR036162
MPDNRKYAIYSRKSKFTGKGESIENQIEICRRALKSKYDVVDEDIVEFEDEGFSGGNTKRPKFQEMMERYRNGEFQLVICYRLDRISRNTSDFVNTYEELKEHSVCFRSVSDNIDDTSPMGRAMMMISSVFAQLERDIIAERITDNMHELAKSGRWLGGNPPTGYRSAETVGSMTVDGKIHKARMLEKNPEEAELVRLVFTKFVELRSITKVETYLLNNDFKSKKGNTLSRFAIKTILQNPVYAIADEDTWVYLNEKDMQLYGSRDDFDGIHGIMAYNKTIQKKGRSMKQKAPSEWIVAVGKHEGIIEGKRWVEVQHLLEKNRDKAYRKPKSNTALLSGLLFCACCGSFMRPKLSSRVNKQGEKVYDYLCELKERSHGLKCDNKRINGNELDRQICDEIKHLGEDDSGLMKLLRNSQKSLNETFADSQAEIDRLTEKKKQYEAERTNLVKALTFAGETMAAEDIISQINDLHTKTSELERQISEHRRLMENSDITDEQYHSLADMLSSFAKTIDTLDVMKKRDVIRCLVRRVEWDGENIHLYLMGEESGGGTDVLHSEPKCECSKWKMELI

SEQ ID NO: 12534 - protein, 570 aa, Unknown
  Description of Unknown: Integrase A1102 sequence
  IPR006119,PTHR30461:SF3,cd00338,PF07508,G3DSA:3.40.50.1390, IPR038109,SM00857,IPR011109,PS51737,PTHR30461, G3DSA:1.10.10.2600,SSF53041,Coil,PF00239,IPR036162
MLVAIYARHSTDKQDTSSADQVARCIQFCADRGWTVSHIFADEALSGATMSHRENAKALVAAALAGEFEKVLSEDLSRLSRSQSDIAALYEKLRFMGIDIETIADGTINELHIGLKGTMNALYLRDLADKTRRGLRAITLRGKIPGGLCYGYRTKHRLDEKGELVRGEREIHPGEAEVIRRIYSEYHDGAILSEICEGLNDDGIASPRGGTWSISALVGTASRQTGVLRHTLYKGWITWNRQEYRVNPETGKRNCVVRPQSEWLRIPVPELAIVDEDLFDAVQRMIEDRSSMRHIRAADAKARSRERAMERQRKARSLQMKTGQTGSWFFTRRLRCAETGHPLTAAPPGYYGSRRTALWMIPRETIIVQGLEALNTVDLDTIRTFQETLSPDRQRHESAIERLQQQIDQATDEVKALLSDLGNRTNRPVIRSFLDDKEKQITNARLQLYTHQRELDKLIFRTDLANESLNRWKRLLARLKHDPSDGLSTVLVRTCINRLLVHVERNADDEPVRLWCTADINVPELLKLNTAIMPWDLIPEPWSRAATVELKDIPKPAKAKAKAKQKKKTV

SEQ ID NO: 12535 - protein, 568 aa, Unknown
  Description of Unknown: Integrase A1103 sequence
  IPR006119,PTHR30461:SF3,PF00239,cd00338, PF07508,G3DSA:3.40.50.1390,SM00857,IPR038109, PS51737,IPR036162,PTHR30461,G3DSA:1.10.10.2600, Coil,SSF53041,IPR011109
MLVAIYARHSTDKQDTSSADQVARCIQFCADRGWTVSHIFADEALSGATMSHRENAKALVAAALAGEFEKVLSEDLSRLSRSQSDIAALYEKLRFMGIDIETIADGTINELHIGLKGTMNALYLRDLADKTRRGLRAITLRGKIPGGLCYGYRTKHRLDEKGELVRGEREIHPGEAEVIRRIYSEYHDGAILSEICEGLNDDGIASPRGGTWSISALVGTASRQTGVLRHTLYKGWITWNRQEYRVNPETGKRNCVVRPQSEWLRIPVPELAIVDEDLFDAVQRMIEDRSSMRHIRAADAKARSRERAMERQRKARSLQMKTGQTGSWFFTRRLRCAETGHPLTAAPPGYYGSRRTALWMIPRETIIVQGLEALNTVDLDTIRTFQETLSPDRQRHESAIERLQQQIDQATDEVKALLSDLGNRTNRPVIRSFLDDKEKQITNARLQLYTHQRELDKLIFRTDLANESLNRWKRLLARLKHDPSDGLSTVLVRTCINRLLVHVERNADDEPVRLWCTADINVPELLKLNTAIMPWDLIPEPWSRAATVELKDIPKPAKAKAKQKKKTV

SEQ ID NO: 12536 - protein, 567 aa, Unknown
  Description of Unknown: Integrase A1104 sequence
  IPR006119,PTHR30461:SF3,cd00338,PF07508,PS51736, G3DSA:3.40.50.1390,SM00857,IPR038109,IPR025827,PS51737, IPR036162,PF13408,PTHR30461,G3DSA:1.10.10.2600,SSF53041, Coil,PF00239,IPR011109
MKVAIYARYSSDNQRDASIADQLRMCRLHAEKQGWHVVEEYTDHAISGASLIRPGIQALMTDAMAGRFDVILSEAMDRLSRDQEDIAGIFKRMSYADVKMFTLSEGEVSHLHVGLKGTMNALFLKDLADKTRRGQRGRVEAGKSGGGNSYGYDVVKKLDANGEPIRGDRTINENQAAVVRRIFHDYAAGKSAKTIAFALNKDGIPSPSGGDWGFSTINGNPKRGNGILNNEMYVGKIVWNRQRFVKDPNTGKRQARPNPESEWVIQETPELRILDDDLWNAVKARQEKNKLTRDDNGSTDVRTVNHRRRPKYLFSGLTKCSCCGGGYSAISATLIGCSTARNKGTCDNRVNIRRDELESRVLNALRTRLVDPELFAHFCEVFTQEMNRLRMEGRVGIASAEAEIAKIDRELETLLNLILKGGAADALNAKMVSLEKRKKELELFLAEADEPPPLLHPSMALQYRKRIQQLYESLQDEEEGKRVEAADTIRSLVDQIVLTPVEGKVEIDVQGDLAGILTISTQTKNPAGERGGSQVKMVAGAGSNLHLLPEQVKMVAGTGFEPVTFRL

SEQ ID NO: 12537 - protein, 566 aa, Unknown
  Description of Unknown: Integrase A1105 sequence
  IPR006119,PTHR30461:SF3,PF00239,cd00338,PF07508, PS51736,G3DSA:3.40.50.1390,SM00857,IPR038109,PS51737, IPR025827,IPR036162,PF13408,PTHR30461,G3DSA:1.10.10.2600, Coil,SSF53041,IPR011109
MQEKRVIVIEPTQVIHEDINGLPTLKPKLKVCAYARVSTDSEDQLHSVEAQKSVYTQKIQENEDWDFIGLYADEGLSGTSIQKRPQFLQMIEDAKAGKIDLILTKSLSRFARNTVDTLTIIRELREINVDVFFEKENIYSSDTKVDFMLTIFSSIAQEEARNISENVKWGFRKRFKEGKVHINTKRFLGYDKDDDGNIVINEEQAKTVRIIYDMYISGSSLKEIVLFLTENELQNGRGEIFWTPATVSAILTNEKYCGDAVLQKRVTIDYLTHKSVKNDGHAPKYYIMNNHEPIVSRTKFELVQELKKKRGRKRKQSNYGNIYPLSGIVFCGECGAVMNRSYYNYGKATERVVLTCRKNNKEHICSNKPIDNDTLEKAIVKSIKELELSKDTFIDETLEIVRSCLSSSELETEISDLKKQITKTEKSIKDIIDLNVNSIADNTEFYKSIYNEKKAQLIDLKAQLNNKKSSLVNGHLHEERIQEMKEFLDGNIGLNKNILMGTYKFIIALSPSEVLLLISDTPMTKKSIKNELDVYKAMPSIYTDKVKSMNEKYDITYHVVDLREQE

SEQ ID NO: 12538 - protein, 564 aa, Unknown
  Description of Unknown: Integrase A1106 sequence
  IPR006119,PTHR30461:SF3,cd00338,PF07508,G3DSA:3.40.50.1390, SM00857,IPR038109,IPR025827,SSF53041,IPR036162, PF13408,PTHR30461,G3DSA:1.10.10.2600,mobidb-lite,PS51737, PF00239,IPR011109
MSLPSHGFTILRNAPDSARGATARSARRAAGAAEPMPTGSGRQLAVLYARYSSAKQNPMSCEDQLALCRETAANLNFEIAAEFFDAAASGRTLLRNRPGVCEMKARVAKGDVAVLIVEGIERIGRRARDIAEVSEWFESQNVDLVAANGGRIPWKLVPFHGAIAEFQSRETADKTRRGQVGTTRRGRVSAGLAYGYRVAPGAAEFNRVIDPAQAEVVRRIFEDYAAGLSPRQIVSTLNAEGIPSPTGMAWNDSTLRGNAQTRDGILRNEAYVGTLVYGRNRFTRDPDSGNRLSRPGEANSIVYVDRPELQIIPEDLWNRVQERLEKAYKLRVAQKRQLNETHRARHLLTGILRCGCCGGSITIVNGERYGCYNRKSKGLSVCGNRRTILRPKLEEAVLARIRAGLLTPDLARHFAAEVRRLWEEQSAGQTNAPARLKTDLARVKRSIENLINRLEGDDPGPHILERLRDREAEAARLTTELAALEAPAKNRQPPSAEELVAAYRGHVDRMESLLRDPAMIVEANDLLRHMLGHVSVHPDADRPRGFRIEITGDLLTFLLPSASK

SEQ ID NO: 12539 - protein, 564 aa, Unknown
  Description of Unknown: Integrase A1107 sequence
  IPR006119,PTHR30461:SF3,PF00239,cd00338,PF07508, PS51736,G3DSA:3.40.50.1390,IPR038109,SM00857,IPR011109, IPR025827,PS51737,PF13408,PTHR30461,G3DSA:1.10.10.2600, Coil,SSF53041,IPR036162
MRRAAVYARFSTELQNEKSTEDQIALCRAYAARNGLAIVAVYEDKARSGSSILGRDALMRLMEAAGQNAFDIVVVEALDRLSRDMADLAGLHKRLSFLDIEIQAVHDGIADAVLIGIRGLVGQMQREDGAKKVRRGMAGVVRDGRHAGGRAYGYRPVFGRPGELEIVEQEAEVVRRIFAAYAAGRTPRDLAGDLNRDGIAPPRGIHWNGSTINGNAQRGVGLLFNELYVGRIVWNKVRMLKNPDTGKRVSRPNPKDQWQTKEVAHLRIIEDETWHKAQARKAVRVNATSHVKRRPAHLLSGLLRCGVCGSGLSVHDRDKTGKTRIRCSAVRESGSCSNRRIIYLPEIEKAVLDGMRDQLKAPDLIEAYIRRYNQERRELSAQANAMRTALQGKRDRIEGERQRTIDLVIRSVIAEEDAKQRIAELKTQLSEVEAQLSGLDEPPSPVALHPATLQRYIETVDGLSKALADHATAADDRGPLIQNLRGLVHSVTVHPKRAREGFEIEVKGKLAALIGGAAFPTARYTEKPTGLGSRFNAAVTYDSGLEVVAGEGYRQFTAATEFVC

SEQ ID NO: 12540 - protein, 564 aa, Unknown
  Description of Unknown: Integrase A1108 sequence
  IPR006119,PTHR30461:SF3,cd00338,PF07508,PS51736, G3DSA:3.40.50.1390,IPR038109,SM00857,IPR025827,IPR036162, PF13408,PTHR30461,G3DSA:1.10.10.2600,SSF53041,PS51737, PF00239,IPR011109
MPRVALYARYSDDKQSPASIDDQFLICREQAAREGWRIVANYKDAAISGASVILRSGIQSLLQDAQMGRFDILLAEALDRVSRDQADVATLYKNLQFAGVKIVTLAEGEVSELHVGLKGTMNALFLKDLAKKTHRGLRGRVEKGKSGGGLCFGYDVVRRFSSEGEPVHGERSINAAEAEVIRQVFRQFANGLSPHAIACRLNDSGISAPTGKLWTSTTIRGHAKRGTGLLNNELYIGKLVWNRLRYLKNPQTGKRVSRINPKSEWIVTEVPDLRIVDEELWQAVKARQENIAIQYADVIEATRSAHTALNRTHRPKSLLSGLVYCGCCGGPYSLRGQGRFACSNHVDTKSCSNGHSITRDKLEARVLDGLRDRMMTPEVAAEAIRTYVEESNRINHQRRASEVADRTDLQKVLKAIKGLVTLAKEGKGTRALVDELLELEAQEDAIRARLAATPADVPDIHPNISEIYRRKVDRLTHALSQPEECQEAADALRALIERIDLTPGAKRGEVNAVLYGEFGRILEWIEQRRLAENAQSPGALAPGPCGMSVSVVAGVGFEPTTFRL

SEQ ID NO: 12541 - protein, 558 aa, Unknown
  Description of Unknown: Integrase A1109 sequence
  IPR006119,PTHR30461:SF3,PF00239,cd00338,PF07508, PS51736,G3DSA:3.40.50.1390,IPR038109,SM00857,IPR011109, PS51737,IPR025827,PF13408,PTHR30461,G3DSA:1.10.10.2600, Coil,SSF53041,IPR036162
MLKEKIKVYLYTRVSTSIQIEGYSLEAQKSRMKAFAIYNDYEIVGEYEDAGKSGKSIEGRKQFNRMMEDIKSGKDGVSFVLVFKLSRFARNAADVLSTLQIMQDYGVNLICVEDGIDSSKDAGKLMISVLSAVAEIERENIRIQTMEGRIQKAREGKWNGGFAPYGYKLEDGKLFINEEEAVAIRTIFDQYVNTTIGANGLSKYLENHGIRKIPRQNGKNPLFDAGLIRKILKNPVYNGKIAFGRRTLEKVHGTRNEYKQVEQDEYLISEGIHEAIVSDEVWQAAQVKLKSQAKKYEHVNKGKDTRTHLLSGIVKCPICGVGMFGNKCTKKKKDGTKYKDFYYYGCKHRQMIRGHKCTFSKQIREELLDDAVAEVIVKIVSNPKFASMMQEKINMKVDTSEIEKEIDNYQKELRKSHSTKFKLIEEIDNLDVEDKHYKRRKQDLDDRLYRMYDKIDELESSLIDAKAKKQTIEAEKLTGDNIYKVLIYFDKLYKVMNDVERRQLITALISEIQVYEEKQPNGQWLKSITFKLPIIDDDLNISLDNDEQVEAIALIQKM

SEQ ID NO: 12542 - protein, 558 aa, Unknown
  Description of Unknown: Integrase A1110 sequence
  PTHR30461:SF3,G3DSA:3.40.50.1390,SM00857,SSF53041,IPR006118, IPR011109,PF07508,PS00397,IPR036162,cd00338, PS51736,PF13408,mobidb-lite,Coil,IPR006119, IPR025827,PTHR30461,PS51737,PF00239
MRTPHLRAVSAPQTLQVALYARVSTDQQAEHHTIDSQLAELTARAEQDGHDLRDDLRFIDNGHSGASLIRPALEHLRDLVALSAIDLIYVHAPDRLARSYAHQVLLIEEFAHAGTQVVFLNHPIGTTPEDSLLLQLQGMFAEYERAKVLERSRRGKRHRAQTGAVSVLSRAPFGYRYITREAGGGDARYEIDEEAARIVRQIFTWVGHERLTLAGVCRRLHDSGLPSPTGRRHWSRAMIHSMLLNPAYAGQALYGRRQSVPWRPPLHPPRGHDGLPRRPWRQVLATPERHISIAVPAIVGEELFASVAEQLEENRRRSRERLAGVQYLLRGLLVCQKCGYGFTGHHHRGQWRYYRCCGTDRSRFHGAFRCDARLVATELLDEAVWTEVCRLLDDPARVIAEYQRRLDAVQATPHRLELDALGRQRAKARRAIERLIDSYTEGLIEKPEFEPRLAALRRRTARLEAEAKAHQEADEQVRSLHLVIGKLDLFAALVHDRLAGADWTTRRDIICTLVKRIEVADDVVRVIFRVDPGVSGPSEAGRTLHHCPTRPDPAPDVA

SEQ ID NO: 12543 - protein, 552 aa, Unknown
  Description of Unknown: Integrase A1111 sequence
  IPR006119,PTHR30461:SF3,PF00239,cd00338,PF07508, PS51736,G3DSA:3.40.50.1390,SM00857,IPR038109,IPR025827, Coil,IPR036162,PTHR30461,PF13408,G3DSA:1.10.10.2600, PS51737,SSF53041,IPR011109
MKVALYARYSSDNQRDASIEDQLRLCRLHAEKQGWTVVDSYTDRAISGASLLRPGIQELISDAMRGKFVVVLAEAMDRLSRDQEDIAGLFKRMAFGGVRIVTLSEGDVTHLHVGLKGTMNALFLKDLADKTRRGLRGRVADGKSGGGLCFGYDVVKQFAANGEPIRGDRTINEAEAAVVRRIFADYIAGKSSRQIAFELNKEGVPGPQDAEWGPSTIHGNPKRGVGILNNELYVGRLVWNRLRYLKDPDTGKRVSRLNPESEWVIQEVPEMRIIDQKVWNAVKARQKSLAYETSEPGENPLNERRRPKHLFAGLVKCGCCGGGYTMISKDLLGCATSRNKGTCENRLNIRRDALEASVLSGLRTHLMEPQLFKEFCDEFTREVNRLRIERSADIISQRKELERVQRDLDRAIQAILDGVPGGQLKDKIGSLEARKAELTGLLANAEEPPPLLHPNMAEIYRQRVAALYESLLSADGTAEAAELFRTLVDQVTLVPNEAELEIVLRGDLAAILRFAANKKNPDFLAEAGVLGALLSQESLVAGIGFEPMTFRL

SEQ ID NO: 12544 - protein, 550 aa, Unknown
  Description of Unknown: Integrase A1112 sequence
  IPR006119,PTHR30461:SF3,cd00338,PF07508,G3DSA:3.40.50.1390, SM00857,IPR011109,PS51737,PTHR30461,SSF53041, Coil,PF00239,IPR036162
MLCYSYVRFSTPDQAKGDSYRRQMEFASNYCKLHNLTLVEDLSFKDLGVSAYKGNNLKNGALGKFLELVVSGQIPCGSTLIIESFDRLSRQTAIKAQAVFFEIISAGITIVTAMDNRSYNLQSVADNPFDLMYSLMIMIRANEESETKSKRVKEAIKSKIDNKKIIPSKLPYWIKHNKNEDILELIPERAQTISYIIERYLSGFGINKLTRHLNETIPPFAGKSWYPLYLQKLLRSVSLYGERQFNMNDTLYIMDDYYPAIIDKSKFAVIQENLDSRAPTRGGKIPSAITGIRKVYCGYCQGVLVSQSTKRNGKIVDGLRRARCGTNNNAGSCITSSFRISIVESAIAEYCSQHFDLSLLAPESNSSKLDLAKYRLELKQLDTIIANYVKFISDGNISPAIISALDETEKNKKNLQQKIQKAELNTLANSKSEIAAKWKTIKTNLSVYDEENILKLRELIRGSIKRILVFQYGPWANTGPITTSSGKIIQPYKGNFSIQITFNNGVRKTLELGENVKDQEVDTINRTITENGNTYTPDEYILMIQKTLTK

SEQ ID NO: 12545 - protein, 550 aa, Unknown
  Description of Unknown: Integrase A1113 sequence
  IPR006119,cd03768,PS51736,G3DSA:3.40.50.1390, SM00857,IPR025296,PTHR30461:SF2,PF13700, SSF53041,PTHR30461,mobidb-lite,PF00239, IPR036162
MPVEFLTDEQAAAYGTFGEVPTRPELERFFFLDDDDRDLIALRRSDGHRLGMALQICTVRYIGTFLGDDPLAVPWEVVDYLAGQLGIEDASCVKSYAERRMTPYNHAQEIRERFGYHDYGDRKWSREFRTFLYGRAWTHAEGPVALFNHAVTWLRRHRVLLPGVSVLARQVSEARTVAERRLYESVAKATHKADRTLAPALVGLLERPEGKRVSELERLRMTDPQTAQASDADDVERHPCPRCHAQPGSPCRSRSGAVAGTYHTGRFTKVPRLAKLLRVPTPADRGPGQPWRPGTPIPAPVDPDTPSTDIRIGYARCSTLGQELDSQLDALAAKNIPRDKIFAEKISTRVRVRPKFEAALAAAREIKAHAPHCRVIFTVYEMKRLGRDAAELTALADHLAAHGLVLEMLAGPLAGIYDPTGHGRLLFAFFAAMAETERENIRESTLEGLDAAARKGKHGGRPPVITDDMLHTVLRRRANGETVEQIQPDLIIPTGRRKGQNPSLSSIYRALAEHEKQQTYPDAVAQAHADFAALQSAGSIPGQMAGSMVS

SEQ ID NO: 12546 - protein, 550 aa, Unknown
  Description of Unknown: Integrase A1114 sequence
  IPR006119,PTHR30461:SF3,PF00239,cd00338,PF07508, PS51736,G3DSA:3.40.50.1390,SM00857,IPR038109,PS51737, IPR036162,PTHR30461,G3DSA:1.10.10.2600,Coil,SSF53041, IPR011109
MNAVEIIDFNKLESKDRLKNVCAYARVSTKKELQETSLDLQVETYTKMIMDNPKWNFVGVYSDVGKSGTDTKYREQFNQMIELAIAGGIDLIITKSISRFARNTIDCLNIIQELKRHNIEVWFEKENISSFDPKVELTITIYASVAEEESKINSENTKWGVKKRFEDGIVPMVTSRVLGYKRDQNGNIAVDEDEAKIVRKVFNLYSKGYSQGYIAEELNKEGHITKHYKLAYSSGTIRGILNNEKYTGNALLQKSIRRRVGDKTGEKNQQTHPKYYVENSHPKIITKSLWDKVQSIKSQRMMKYNHTTDILELKKRAKNRSIYSGFVECFVCGKNYHYKVNNKREKWATEILICSSNREKKTCENDSLFVETFDEQLLSQINYVIKNKYEFLNKLNEVLTSHPEIRELNIEINTLEDKLDEIHHQIKSLALLEGDFETLVLDQLKTQKSNIEMKLTANKNKLLTSHNIESKIKHYKLLLKEFKKPIDDLSVFPFQDLFDKVLVNERNDIEFILNPFNTISSKSIYSFPEIITPYKIRKTLFETTSKISCF

SEQ ID NO: 12547 - protein, 548 aa, Unknown
  Description of Unknown: Integrase A1115 sequence
  PTHR30461:SF3,G3DSA:3.40.50.1390,SM00857,SSF53041,IPR006118, IPR011109,PF07508,IPR038109,PS00397,G3DSA:1.10.10.2600, IPR036162,cd00338,PS51736,PF13408,Coil, IPR006119,IPR025827,PTHR30461,PS51737,PF00239
MNIHSPTTTARAALYLRVSTARQAEHDISIPDQKRQGEAYCEQRGYQLVETYVEPGATATNDKRPEFQRMIEAGTSKPAPFDIVVVHSFSRFFRDHFEMEFYVRKLAKNGVKLVSITQEMGDDPMHQMMRQIMALFDEYQSKENAKHVLRAMNENARQGFWNGARPPIGYRIVAAEQRGSKIKKKLEIDPLHADTVRLIYRLFLEGDGTSGAMGVKAIATYLNERRFFTRDGGRWGLAQIHAILTRTTYIGEHRFNTRSHKDREKKPESEVAIMAVPPLIERETFDAVQARLKSRNPMVTPARVSSGPTLLTGICFCAKCGGAMTLRTGQGSTGATYRYYTCSTKARQGKTGCKGRTIPMDKLDHTVADYIGDRLLLPKRLETVLASVIDRRQERTERRREHLAELQRRITEADQRLGRLFDAIEAGMVDKDDAMAKERMVSLKALRDQAAADAERTQLALDSSGNQGVTPDMLKGFARKARERIRLNDGGYRRDHLRALAQRVEVADDEVRIMGSKSELLRTLVAASSVETAAFGVHSSVLKWRAIC

SEQ ID NO: 12548 - protein, 545 aa, Unknown
  Description of Unknown: Integrase A1116 sequence
  IPR006119,PTHR30461:SF3,cd00338,PF07508,PS51736, G3DSA:3.40.50.1390,SM00857,IPR038109,IPR011109,PS51737, PTHR30461,G3DSA:1.10.10.2600,SSF53041,Coil,PF00239, IPR036162
MELKNIVNSYNITNILGYLRRSRQDMEREKRTGEDTLTEQKELMNKILTAIEIPYELKMEIGSGESIDGRPVFKECLKDLEEGKYQAIAVKEITRLSRGSYSDAGQIVNLLQSKRLIIITPYKVYDPRNPVDMRQIRFELFMAREEFEMTRERMTGAKYTYAAQGKWISGLAPYGYQLNKKTSKLDPVEDEAKVVQLIFKIFLNGLNGKDYSYTAIASHLTNLQIPTPSGKKRWNQYTIKAILQNEVYIGTVKYKVREKTKDGKRTIRPEKEQIVVQDAHAPIIDKEQFQQSQVKIANKVPLLPNKDEFELSELAGVCTCSKCGEPLSKYESKRIRKNKDGTESVYHVKSLTCKKNKCTYVRYNDVENAILDYLSSLNDLNDSTLTKHINSMLSKYEDDNSNMKTKKQMSEHLSQKEKELKNKENFIFDKYESGIYSDELFLKRKAALDEEFKELQNAKNELNGLQDTQSEIDSNTVRNNINKIIDQYHIESSSEKKNELLRMVLKDVIVNMTQKRKGPIPAQFEITPILRFNFIFDLTATNNFH

SEQ ID NO: 12549 - protein, 545 aa, Unknown
  Description of Unknown: Integrase A1117 sequence
  IPR006119,PTHR30461:SF3,cd00338,PF07508,PS51736, G3DSA:3.40.50.1390,IPR038109,SM00857,IPR011109,IPR025827, PTHR30461,PF13408,G3DSA:1.10.10.2600,SSF53041,PS51737, PF00239,IPR036162
MSRPIEAASNVKIIPAMSSEELKQAKYRQTRVAAYCRVSTDHEEQANSYKVQIDYYTNLINSNSEWTMAGIYADEGISGTQTKNRKEFNKMIRKCRQKKIDLVLCKSISRFARNTVDCLEYIRELRLLGIGVIFEKENINTLAMNSEFIISLYGSFAQAESESISKNVSWGIEKSFKEGKVKYVMDKTLGYRMGEDGKPYIVEEEAEIVRRIYRMFLDGLSMQRIADIMQAEGAARRSGCTTWNRSNVNYILKNEKYAGDAILQKSYTIDCITHKRVKNNGEKNKYILHDCHPAIIDRDTYNRTQQELTRRCTIKQRSDKAVTAQGRYASKYALTDIMICGECGTPYRRVVWNSHGKKLPVWRCINRLDHGNRYCKHSPSLNEEHLQQAIIDAINTAYTHNTAFLQSMENNISIVLNDEDKNNTERVRIESRLAEIDKARDDLIHLVTSGSVGEDSLDKEFEALNDEESYLKTQLEAMKSQTEKRDEVRYSIMSAVEGIGEMENTMVDYDEVAVRKMIECIKVLSKTEILIIFKGGYECNAVVEK

SEQ ID NO: 12550 - protein, 545 aa, Unknown
  Description of Unknown: Integrase A1118 sequence
  IPR006119,PTHR30461:SF3,PF00239,cd00338,PF07508, PS51736,G3DSA:3.40.50.1390,SM00857,IPR038109,IPR025827, Coil,IPR036162,PTHR30461,PF13408,G3DSA:1.10.10.2600, PS51737,SSF53041,IPR011109
MPKNNDMASNVTMIPALSPAELKQSKYRQIRVAAYCRVSTDSEEQANSYQVQIEYYTNLINSNPEWTLAGIFADEGISGTQTKNRKQFNKMIRKCQQKKIDLVLCKSISRFARNTVDCLEYIRELRLLGIGVIFEKENINTMMMNSEFIISLYGSFAQAESESISKNVSWGIEKSFREGKVKYVLDKTLGYRMGEDGVPYIVEEEAEIVRRIYVMFLDGMSMQGIADQLQSEGIKRRSGSSTWNRANVNFILKNEKYAGDAILQKSYTIDCITHKRVKNNGEKNKYIVHDCHPAIIDRDTYNRVQQELAKRGAIKKRSAKARTELGQYSSKYALTDILICGECGTAYRRVTWTSHGHKRIVWRCISRLDHGSKYCKHSPSISEESLQNAIVKALNAVYSRNGDMLARMEQNILAVIGDNGDMQKQTAKIQKRLEEIEDERDSLVRQITSGAVDEDALDKNFESLNDEEAYLKTQLDDMQTKAKLSDEKKYALMAVGEELRRHDCHLAEYDDVTVRKVIEVIRVLSKNEVQIIFKDGHEMNVAVEK

SEQ ID NO: 12551 - protein, 544 aa, Unknown
  Description of Unknown: Integrase A1119 sequence
  IPR006119,PTHR30461:SF3,cd00338,PF07508,PS51736, G3DSA:3.40.50.1390,IPR038109,SM00857,PS51737,IPR025827, IPR036162,PTHR30461,PF13408,G3DSA:1.10.10.2600,SSF53041, Coil,PF00239,IPR011109
MTRAVIYARFSTELQSEKSTEDQIALCRAYAARIGLDVIGSYEDKARSGASIFGRDGLMRLMDAARDRAFEVVIVEALDRLSRDMEDLAGIHKRLSFLGVEIHAVHDGTADAILVGLRGLVGQLQREDGAKKVRRGMAGVIREGRHAGGRAYGYCPVPGRRGELEIVEEEAEIVRRIFAAYAAGRPPREIAGELNRDRIAPPRGTRWNASTINGNARRGNGLIFNELYAGRIVWNKVRMVKNPDTGKRISRPNPRDQWQEIAAPHLRIVDEGTWKCAQALKAEKARLSTNVKRRPAHLLSGLLRCGCCGSGMSVHDRDKTGKTRIRCSAVRENGSCSNRRILYLTDVEEAVLKGMTEELKDTRLIETYVRAYNEERKRLAATAISRRTRIERRRDRLEAERQRAIDMLIKGVLREEEGRARLDELRGQVLEAERELSQVGETPQIIALHPATLDSYIATVDRLAAVLTEHAAAEDDRGSLVSTFRALVHGVTVHPKAPREGFQVEVKGKLAALIGGAAFPQAKYSGGRVVAEERLEPPRGGRCV

SEQ ID NO: 12552 - protein, 543 aa, Unknown
  Description of Unknown: Integrase A1120 sequence
  PTHR30461:SF3,G3DSA:3.40.50.1390,SM00857,SSF53041,IPR006118, IPR011109,PF07508,IPR038109,PS00397,G3DSA:1.10.10.2600, IPR036162,cd00338,PS51736,PF13408,Coil, IPR006119,IPR025827,PTHR30461,PS51737,PF00239
MKAVIYARVSTQDQALGFSLATQKELCEKKARALGALEVEVVEDAYTGTELTRPSLDYVRQLVAAGKVDLVVVYDPDRLSRNLTDLLILCREFDKAGVRLEFVNFDWQKTPQGMLFLQMRGAFAEFEHALIKERTQRGKAKKAASGKIRCYAKPFGYGWDAEGDTLVINPQEAEIVKQMFEWLTDPLEPLTPWQITQKLGQVYPQGPRGKGWVHSSVVRMLKNPVYTGRLRRKDEQPDWKPVLVPAIIDQETFMRAQEMLARSKRFNPKTTRRRFLLQRLLVCGECGRRLTVVTHNNPQRAKYSYYTCPGRYPTKFDDQGRVGRCGLPPWRTEEIDKTVWDTIASIIKNPELFYQYITSEKLETASIPRRRLEEARKRLEQVQRVIERIDRAYFILEALPEEDYKRYRAEQEGELVRIEEDIKRLEAVINAQEQVQKGVEFLRQYAENLARSVDELNFFQKQNITRELVQRVKIYADGSLEIEGYFNLPFTGPGKNVPEHCEELTILTPQKNLKEPPCSSVLTCTHREACLYTYNFLIPAKTK

SEQ ID NO: 12553 - protein, 542 aa, Unknown
  Description of Unknown: Integrase A1121 sequence
  IPR006119,PTHR30461:SF3,PF00239,cd00338,PF07508, PS51736,G3DSA:3.40.50.1390,IPR038109,SM00857,IPR025827, Coil,IPR036162,PF13408,PTHR30461,G3DSA:1.10.10.2600, PS51737,SSF53041,IPR011109
MKKITAIAAKNKVDIHETALRKTRVCAYCRVSTDSLKQAESLETQSNYYEDYIKGNREWEFSGIFADQGISGTATANRAEFNKMIRACQLGKIDLIITKSISRFARNTADCLETVRYLKSLNVGVYFQRENINTKGADSELILSVLSSIAQDESRNISENTKWAFQKKFKQGKIQVNVKRFLGYDKNDEGKLVINPKEAEIVKRIYREYLNGSSLNEIKRGLERDKIKTVTDKEGWQGSTIKGILSNEKYYGNAVLQKTITVDYLTHKRKKNQGEAPKYEVKGSHDAIISKEEFLRVQALINKRALEFGNVPEGRNKYTQRYAFSGKIICGNCGAVFKRRTWNSKAKSKQIVWQCSTYINEGKSKCDMKAIDDATLKAVFVRMFNKLYESKEDFFKTFTDNIDKVLKQSAKCEDVFKIDREIENINEEIKSLVRQQIKGELQEKVFDTKYKILNERLQELKNSKDTVAFDNGKYAETLKRSKEIRRVIEMRETTLTEFDDNIFENLIEKIVALTPTHLEFHLKNGMKVEEEFIKKRGVNGLQ

SEQ ID NO: 12554 - protein, 541 aa, Unknown
  Description of Unknown: Integrase A1122 sequence
  IPR006119,PTHR30461:SF3,cd00338,PF07508,PS51736, G3DSA:3.40.50.1390,IPR038109,SM00857,IPR011109,IPR025827, PS51737,PF13408,PTHR30461,G3DSA:1.10.10.2600,SSF53041, Coil,PF00239,IPR036162
MNIAIYSRKSVFKEAGDSVQNQIELCDMYIKRNFFNNEEIKIEIFEDDGFSAKNTNRPEFKRMIKKIENGEIDKLICYKLDRISRSVADFSTVLDLLQKNNCDFISISEQFDTSSPIGRAMIYIASIFAQLERESIAERVKDSMMQMAKRGMFLGGKPSLGFNVKRIKYMNEEMREKEASVLVPNLKELELVSTIYKTYLECGSVTGLEKILFDNGIKNRNNSYYKTSVLVDILRNPVYVKSNNKVHTYLCDMGMQVCGSPNGNGYLIYNKSNVNGKKKDKSEWICAISKNKGYIEPQLWLEVQKLLDKNKDKKIKRLGTGNNVSLLAGLLKCKVCGANMLPRANGGQYKQTYYICTNKKKRGEEKCTCKNIRVDYVDNAVLDSIKIYSKEVLSKSLDSYIKDNINNNSDDYIKSNIEDQIKEKEIFMNSLIEKLAVSTNERVTGILMDQIDNADTEIRKLKIKLEDNLNEEKENKSIIENIRYFVNNLSSFSKNIEIIDSIQFKRECLSKIIDKVVWDSENFKAIVSYSIDIENNESKKK

SEQ ID NO: 12555 - protein, 540 aa, Unknown
  Description of Unknown: Integrase A1123 sequence
  IPR006119,PTHR30461:SF3,cd03768,PF07508,PS51736, G3DSA:3.40.50.1390,SM00857,IPR038109,IPR025827,Coil, IPR036162,PTHR30461,PF13408,G3DSA:1.10.10.2600,SSF53041, PS51737,PF00239,IPR011109
MKVAIYSRKSMFTGKGDSVENQVQMCKEYAQRNLNIDEFIVYEDEGFSGGNTNRPKFQELILDVKKKKFDILICYRLDRISRNVADFSSTLELLQDNNISFVSIKEQFDTSTPIGRAMVYIASVFAQLERETIAERIRDNMLELSKTGRWLGGQTPLGFDSEKITYFDNDMKERSFNKLCPVDKELNIVKLIYNKYLEAGSIHLTLKYLLSNNIKGKNGGDFASTSINDILRNPVYVQSNDLVFEYLKSKGINVSGNPNGNGILIYNKRNSKFKNKSMELWIAAVSNHTGIIPANRWLAVQHFLDKNSKKENPRKGTSRKALLSGILKCAKCGAPMRVSYGKARKDGTRNYYYTCTMKAHSGKTRCDNPNVRGDHLENEVVKYLKTLNTDFIIQELTAYKKEVAATETTSILKNIKDDIKIKKNDMNTLLNQLSKTESSVASEFILKKIDELGKEIKDLEAKAQNADNEKKENDLSILNIDIVLDSLKEFNVFFDNINDLKNDDYTIRRKRYLLEKIIDKITFNGDTKEISIDLWGSKKK

SEQ ID NO: 12556 - protein, 539 aa, Unknown
  Description of Unknown: Integrase A1124 sequence
  IPR006119,cd03768,PF00239,PS51736,G3DSA:3.40.50.1390, SM00857,IPR025827,PF13408,PS00397,PTHR30461, Coil,SSF53041,IPR006118,IPR036162
MAFNMRTVGYARVSTEEQGRRGISLETQKSRLKRNGATYIYQDIESGQKSTRPGFLQMIEDAKRGSVEEIIICDVTRLGRDGVVLASTVYELKARGVKWRFLDDNIDLDDPGGTILFFLKAGMSQSEVEKTKHRVKTSFKKLKEKGLPIGTLPYGYILDSLTRKAVIDEIPLLCLISDRPSNWDTPDSKEFYQELYSSNTEYYNFHTHEYINWKSLKNDTRLKSITIADLCRESIDTYIKVKCFRQVCNYFKDKYNLSGIRKGSMKETPRRYMFPFNNLTSFSRWIRNPVLYGHIHYKKEGNKRRDLLRGRIADFTTWAEEYEIKFDSHQRLISKEQEKMLYLISSPRQSLSSKPDKIHSKTDVLFSGLLFCPACKHHLTHRKSAGKSGFNYYFCRTTGCSNTNAIREDNLNKQVINEILNKTQSGQIEDHEKPSKPLEICRLEEEISELDKTLILHPNNQIFIKAKEDSLKKLSELENGYKCFDFYNKSAAEILNHPAMRNIGFLEFLSLEHRKIIYRNLIEFICIQNGKVDFISYNL

SEQ ID NO: 12557 - protein, 538 aa, Unknown
  Description of Unknown: Integrase A1125 sequence
  PTHR30461:SF3,G3DSA:3.40.50.1390,SM00857,SSF53041,IPR006118, IPR011109,PF07508,IPR038109,PS00397,G3DSA:1.10.10.2600,IPR036162 ,cd00338,PS51736,PF13408,Coil,IPR006119,IPR025827,PTHR30461, PS51737,PF00239
MRVALYARVSTQRQAQADGVAQQLDRLQAHAASQGWTVVAENIFRDDGYSGASLKRPGLERLRDRAALRHLDRVLITAPDRLARHYVHQVLLLEEITATGCQVEFLDRPMSQDPHDQLLLQIRGAVAEYERSLIAERMRRGRLRKLQAGLLLPWTRPPYGYRVDPDRPRDPAGVRCDEAEAAAVAEMFAWYGEEGRSLYGLAQKLLSDAIPPPRVKGRWNVTTLRGILTNPVYTGEVFAGRIQTAPRRLQAREEWIPVASIPTIVSQESFDRVQAKLAQNRQFARRNNTAHPYLLRALVSCGVCGLSCLGRCLPAGHRYYCCRGKLSPVNSHRDTPCPSRFIPASQVEALVWEDLRQLLTDPEAIRHALERAHGGHWLPQELRARRETLRRGQVSVAQQIERLTEVYLAGVVGLDEYRRRRGDLEQRQQALAAQEQQLAAQTERQADIARLGLSLEEFSRRIRQGLDQATWEQRRQLIEWLVTRVIVTNGEVEIRYVIPTSPAAQTGGICHLRSDYRVLLLQAEAVPACRYPLREDCP

SEQ ID NO: 12558 - protein, 536 aa, Unknown
  Description of Unknown: Integrase A1126 sequence
  IPR006119,PTHR30461:SF3,cd03768,PF07508,PS51736, G3DSA:3.40.50.1390,IPR038109,SM00857,IPR025827,Coil, IPR036162,PTHR30461,PF13408,G3DSA:1.10.10.2600,SSF53041, PS51737,PF00239,IPR011109
MIAAIYSRKSKFTGKGDSIENQIQMCQEYCTRLYGETMEFIIYEDEGFSGGNTNRPKFQELIKDASNKKFDVLICYRLDRISRNVADFSSTLELLQNYNVSFISIKEQFDTSTPMGKAMIYIASVFAQLERETIAERVRDNMLELAKSGRWLGGQTPLGFKSEEIIYFDQDFKERKMHKLTPVSDEMKTVRLIYDKYLELKSLSQVVKYLNQNFIKTKTGKDVWNKSGIQDILVNPVYVKADKNVILYLSDLGMTVVGNPGGKHGILTYNKKRGKAIYRDVEEWIAAIAKHEGVINAKDWLMVQKLLHENKEKAPRLGKTHNALLTGILKCAKCGSNMKVIHGRNKSGKVFYYKCTLKNSSGNTRCDNANVRTDDIEKILKEKLKEYSLNKGLLRKEVEEYKKELLSTKSYEFKNIDNIKKDIDNKKKQIENLVNQMSLSPVAAKYIIPQIENLNREIEDHQKKLIDVETSTNLISQADLSLEMIFKCLDKMQIIDELEDEEVKLIYNVMLDSVLWDGDTGNLTIKFWGDKKKLLL

SEQ ID NO: 12559 - protein, 534 aa, Unknown
  Description of Unknown: Integrase A1127 sequence
  IPR006119,PTHR30461:SF3,PF00239,cd00338,PF07508, G3DSA:3.40.50.1390,IPR038109,SM00857,IPR011109,IPR025827, Coil,PTHR30461,PF13408,G3DSA:1.10.10.2600,PS51737, SSF53041,IPR036162
MNTVYTLYRVSTKQQVDKTKDDIPMQREACHEFAEKMGWTIGKEFLEKGVSGFKVSASNRDAIQDLKAAALNKEFDILLVFMFDRIGRIDDETPFIVEWFVKQGIRVWSVQEGEQRFESHVDKLMNYIRFWQASGESEKTSMRIKTRMQQLKAEGSYTGGPVPFGYTLVNTGRLNKKGREVHDLAVDPVEADWVREIFSKTVNEGYGTFRCAELLNKNGVKTHKGSRFTSNSINRILRNRLLTGYVVSGDTESPHLKDLQIIDMTTFERAQKILEQRMKKNEETREIARKTQTQQLLSGIMVCGHCGGHLSTQKHIDRHTRQDGTEYVKVQPKYVCYHKSRGLCQCSGSTTYQVKRIDDAVCELIHDMFAGIKESPDEAVLKKNFDKEMTSYRAKITKLNREAEKQAQQLEKLESEVADSLMGNSRFSPDLLSKVIKSTEENIAETKTAIETLKSEMTGKKKAMESVKPMFEIFAGWAKEFDESTIEKKKMIISQLVSRIEVYKGYKIKVTLNMDYQEFCDNWDTLNSKSTINA

SEQ ID NO: 12560 - protein, 533 aa, Unknown
  Description of Unknown: Integrase A1128 sequence
  PTHR30461:SF3,G3DSA:3.40.50.1390,SM00857,cd03770,IPR025378, SSF53041,PF14287,IPR011109,PF07508,IPR038109, G3DSA:1.10.10.2600,IPR036162,PS51736,PF13408,Coil, IPR006119,IPR025827,PTHR30461,PS51737,PF00239
MLKQQANNKEKVALYSRLSRDDGLDKESNSIANQREMLKRYAKENKFYVYDEYIDDGFSGTTFNRPALNRMFEDIEAGKVNVVLVKDMSRLGRNNALFMYYVEEVFPDLDVRFIAINDMVDTAQDDNEIMPFKSVLNEYYARDISKKIRSSIRTTALTGGFTGAFAPYGYLVDPENKKKLIVDPETAPIVKRIFELSQQGTSTHQIARILCKDGILVPRAYRAKKKGILEQSKGFTFPTDWVGKNVKMILENQVYLGHMVSHKSQTKSFKNKKIVPVPKEDWIVVENTHEAIIDKETFEIVQKFISVKKQPNKTGKPNIFVGLVKCPDCGRNLAYSNPNGNEPRFRCRTYARNTELCTTHAISYKALYEIVQNDIKNHVNSMEELGDHFIKEMRELSETSGSQKIHQFNQELVSLEKRIDEIDSIFTKLIEQNALGKITDERFSKMSMNYETEQAEVVQSYRELKSKIKSEEEKVQGTDRFLETISKYKDVTELNRSMLCELIDSIYVYQAERIGKERTQKVEINYRFLAVSH

SEQ ID NO: 12561 - protein, 533 aa, Unknown
  Description of Unknown: Integrase A1129 sequence
  IPR006119,PTHR30461:SF3,PF00239,cd00338,PF07508, PS51736,G3DSA:3.40.50.1390,IPR038109,SM00857,IPR011109, IPR025827,PS51737,PTHR30461,PF13408,G3DSA:1.10.10.2600, Coil,SSF53041,IPR036162
MARVSVIPARQVAVINGVQREDKKRVCAYCRVSTDTEEQLTSYEAQVTYYESYIKGKPEYEFAGIFADEGISGTNTKHRVEFNKMIEAALAGKFDMIITKSISRFARNTLDCLKYVRLLKEKGVAVYFEKENIDTMDSKGEVLLTILSSLAQDESRNISENSRWGIVRRFQQGKVRVNHKRFLGYDKDENGELIVNEKQAEIVRRIYKEYLEGKGIRAIARGLEEDNVLTGAWGRKWHDSTIQKILRNEKYSGDALLQKTVTVDFLTHKRVKNKGEVQQYYVEDSHPPIISKETFQRVQEEIDRRANLVGYSEETKSRHTNKYAFSGKIVCGNCGSKFRRKRWGGNEKYKKYVWLCANHIDNGNEACNMQAVDEEKLKVAFIKSINKVIENRETFISNMMENINRVLESKEDSNDLKAINERLEELKVQMMNLVRLNVRNGLDSQIYDEEYQRLEEEMQQLKEKKTKFDNTDLMREKGLQKVKEIKKVLDGREDIIKKFDDELFSQMVEQVKVISLVEVEFVYKIGSVVKEIL

SEQ ID NO: 12562 - protein, 532 aa, Unknown
  Description of Unknown: Integrase A1130 sequence
  IPR006119,PTHR30461:SF3,cd00338,PF07508,PS51736, G3DSA:3.40.50.1390,IPR038109,SM00857,IPR025827,Coil, IPR036162,PTHR30461,PF13408,G3DSA:1.10.10.2600,SSF53041, PS51737,PF00239,IPR011109
MSNIKTAANVTLIPAKEQANSVFTGKKLKVAAYCRVSTDETEQMNSFGVQIAYYTDYIGSRPDWQMIGIFADEGISGTQTENRTQFNRMIELCRKGRIDLILCKSISRFARNTVDCLDFVRELKRLNVAVQFEKENINTLSVSSEFAITLYASFAQAESESISRNITWGIEKSFKEGNVRYQMRYTLGYRLVDGVPQIIEDEAVIVREIFSLFAGGMSLRKIAERLTSEGAARRNGSTVWNRDHVNSILKNEKYVGDAILQKYYTVDCLTHTCAKNNGQKPKYLVQNCHAPIIDRETWDRVQLELSRRSAMTKGNARGGRYRTEYALSELLVCGSCGCNYKRVLWKSGTGKRAVWRCKSTLDGGKARCDSPSLHEEALHSAIVRAINEQILDSSGFDRQSALSADTLESENADLERRIASVSARLGEIEVERNRLLADISAIPADVLGSKLKLLHTEEQELKSKLDELNSKRDSGRHDLYRIKAARNLTHGIEALGEFDNDLVRQVVEEITVKSADKVVVKFCGGEKVTVKV

SEQ ID NO: 12563 - protein, 530 aa, Unknown
  Description of Unknown: Integrase A1131 sequence
  IPR006119,PTHR30461:SF3,PF00239,cd00338,PF07508, cd18039,G3DSA:3.40.50.1390,IPR038109,IPR011109,SM00857, IPR025827,PS51737,PF13408,PTHR30461,G3DSA:1.10.10.2600, Coil,SSF53041,IPR036162
MIGGIYARSSLGQTKQGDTVKHQVQMIQEYAKRLEFNVSFDEKFIYPDDGESGYKTTLLQRPPMKQLLEDIDSGLIDIVFFKGISRFARDSGEAIQTSKRLIQKGVRVISIEENYDSDVSDPTFFQMYAVLAEAESRKTSIRVSLGNKQKSRNGLWAGSVPPFGYIKVKDITDKAKKEELISKGVHPQTLFPHPEKADIIRKIFDMYVNQGFGRKKIVNWVNSQGIKTQYGNKIGDITIKRILMNPAYIGVIVYGKTRYNYIDSDDGLRKIQKVINVDKEDWAICEDAHPPIIEREVFMKAQRLIKQKEKAFNKGRRFNNAKHPLTGLLKCSLCGAPMICQKRTNKKADGTKVTYRYYVCSTYHQKGRDVCPQANINADELEDYIHKQISQQIEKVKNDEYFLEGYSTYNPNEEINSQIKVIDREIEKNTNKSLTLLENKDLYDDQTFRDLNLKLKEEIVRLRKQKDELMDELKFAEEIMTKDDLKAKFDEFLELNLSDISRTREVFHEWINEVRVEDKKVIIDQKFKMI

SEQ ID NO: 12564 - protein, 529 aa, Unknown
  Description of Unknown: Integrase A1132 sequence
  IPR006119,PTHR30461:SF3,PF00239,cd00338,PF07508, PS51736,G3DSA:3.40.50.1390,IPR038109,SM00857,IPR011109, IPR025827,PS51737,PF13408,PTHR30461,G3DSA:1.10.10.2600, Coil,SSF53041,IPR036162
MLVIKSKVVEIIRACAYIRYSSDNQRDESLEAQIRAIKEFGKSNGYEVVKVYQDKAKSATTDKRPEFQQMIKDSGNDVFDAVIVHKLDRFSRNKYDSAQYKRKLKQNGVKLISVTENLDGSPESIILESVIEGMAEYYSKNLAREVMKGMRETAYQAKHTGGLPPLGYDVNSDKKYVINDREAESVRLIYEMYVTGYTQSQMVDELNARGFKTKVGAMFKSNSINSVLSNEKYTGVYVFNKSAKKDAFGKRNSHLQKDSSEIIRIEGGMPKIIEKELYDKAQEILRSRKKSKAVNKAKESYLLSGIIKCGECGYSMYGNRRKPKDKPLYVSYRCGCRKRTSSNVCNNKEIRKEYIEEYVLTELEARIFNDKAIPILVEGINENLRKQNKGDEDKKSVFQKELEEVEKQINNIVTAITNGFMQEEFKIKMEELKDRKIYLEGKLIELEANQSVTKVTEEDIRGLLSGFKEYVITKNIPECKNFIQNFVKEVIVYKTHVEVVFNVGLNLGEDNKYKFSSKSSIWSIRKKHN

SEQ ID NO: 12565 - protein, 529 aa, Unknown
  Description of Unknown: Integrase A1133 sequence
  IPR006119,PTHR30461:SF3,PF00239,cd00338,PF07508, PS51736,G3DSA:3.40.50.1390,SM00857,IPR038109,PS51737, IPR025827,IPR036162,PTHR30461,PF13408,G3DSA:1.10.10.2600, Coil,SSF53041,IPR011109
MRTARAVRMIPATAKLHEPVANNAIGQKRVAAYARVSTDNDEQLSSYEAQVDYYTRHIKSNPEWDFVEVYADEGISATTTKRRDGFNRMIADALDGKIDLIITKSISRFARNTVDTLTAVRQLKEKGVEVRFEKENICTMDSKGELLITIMSSLAQEESRSLSENVTWGQRKRFADGKVSLPYKQFLGYEKGDDGLPKIVKKEAEVVRLIYKLYIEGKTMAGIARHLIEKGIPTPGGKKKWQSSTVMSILKNEKYKGDAILQKTFTVDFLTKKKKVNEGEVPQYYVENSHPAIITPEAFDLVQSEIKKRREAKGYKTGGSCFSGKIICGECGSFYGSKVWHSTTKYRRTIWQCNHKFKNDRRCKTPHLYEDKIKEVFVEAFNEIINNKDEFLQCYEDMTKALTDTSTLDREIAKSQEELEIVAELLRKCVQENANSVLNQEEYQQRYSDLYQRYDNEQKRIAEINDKRREHNGKRESIMEFICRLEQSKTLLTEFDEGLWNATVEAIKVHSENNVSLIFKDGTELELNI

SEQ ID NO: 12566 - protein, 527 aa, Unknown
  Description of Unknown: Integrase A1134 sequence
  IPR006119,PTHR30461:SF3,PF00239,cd00338,PF07508, PS51736,G3DSA:3.40.50.1390,IPR038109,SM00857,IPR025827, Coil,IPR036162,PF13408,PTHR30461,G3DSA:1.10.10.2600, PS51737,SSF53041,IPR011109
MPKVTVIPSTINPITQMPIHANHVKKVAAYARVSTNSDEQYTSYEAQVNFYKKYIQEKPDWEYTEVYADEGLSGTTTKKRTEFNRMIKDALNGKINLIITKSISRFARNTLDTISFVRKLKAKGIEVFFEKENLWTLDPKSELILTIMASIAQEESRSISQNVTWGKRVGFQEGKVSFAYKRFLGYKKEDDKIVIDEDQAVIVRDIYRMFLVEGKTPTGIAKYLKSQHIKTPSGKSTKWQTNVVTSILTNEKYKGDALLQKTYTVNYLDHSKAINTGQIPQYYVENNHPAIIDRDTWEQVQIEIERRNKLGAHYSSSDVFASKLICEDCGSFYGKKKWHTNTKYERFVYQCNSKFHKGKDKCKTPHLNEDDIKRQFIKAYNLMAKDKQRVIKDTKDIIKLLTDTTKIDSEITKIDDEMVVITELVNKLVMENSKTDTDIDAYNKKYEKLSARYDKLKDYLDGLITEKESKLGQKKTMQTFINNLIESEDELVDWNERIWMLMVESAVVHRNQSITFKFHSGVTIKTS

SEQ ID NO: 12567 - protein, 526 aa, Unknown
  Description of Unknown: Integrase A1135 sequence
  IPR006119,cd00569,cd03768,PS51736,G3DSA:3.40.50.1390, SM00857,IPR009057,SSF46689,SSF53041,PTHR30461, PS00397,mobidb-lite,PF00239,IPR006118,IPR036162
MDTERRHGPRQLAAAAIRGRRPCPLLDHRKRLQRARARRMDHRGRGRWPERPPGAHRVRGGRAPRPHPRPGRRPCVHQRPAVEPAVARLGHRGPSDLGADRAPIPERAQSRDDRTRHMAHHPSPPRGPRHRNRAHPHHRGRGRHAGERGRAQRVRVRHGPHPPFGLRGHGRGTGQRPLHPPAAGRRGRRHRPLHRAIRNPHRPPPGQRSEHLRRHGLAGHSGHPRPHRRITRHPGPAHPARERRPPRHRRPNPQGPGPRPGSTPQGPPGLDQGPHRRALRRRSSHRPPLAQHAAPQGGHFRSIRVSTPPHGAPRARENGPMPTPGQQPLPQPGAVVGYARVSTREQTASLDEQRERLTQLGAVRVFEDVASGARADRPGLAAARDFMRDGDTLTVTRLDRLGRSMLDTLTTLRDLDAAGIRVRALDLNLDTGTAAGRMVVHVMAALSEYERELLAERTREGLAHARAQGRTGGRRPSLTPQQVEAITATLAAGMSIRDVATMHGVSERTISRVRAGIYGQSKRPQT

SEQ ID NO: 12568 - protein, 526 aa, Unknown; identical to SEQ ID NO: 12567
  Description of Unknown: Integrase A1136 sequence
  IPR006119,cd00569,cd03768,PS51736, G3DSA:3.40.50.1390,SM00857,IPR009057,SSF46689, SSF53041,PTHR30461,PS00397,mobidb-lite, PF00239,IPR006118,IPR036162

SEQ ID NO: 12569 - protein, 523 aa, Unknown
  Description of Unknown: Integrase A1137 sequence
  PTHR30461:SF3,G3DSA:3.40.50.1390,SM00857,SSF53041,IPR011109, PF07508,IPR038109,G3DSA:1.10.10.2600,IPR036162,cd00338, PS51736,PF13408,mobidb-lite,Coil,IPR006119, IPR025827,PTHR30461,PS51737,PF00239
MSRTVTAIPATKKPGTVTTPSGVPARRKVAAYARVSTEMEEQTSSYEAQIDYYTTYIRSRNDWQFAGMYCDEGISGTSMKRREGFQTMIDDALAGKIDLILTKSVSRFARNTVDSLTTVRKLKDAGVEVYFEKENIYTFDAKGELLITIMSSLAQEESRSISENVTWGHRKRFADGKVMVPYKSLLGYKKGADGNLVIDETQAPTVRLIYQLFLDGMAISEIKTELATRKILTPRGKEVWSTSTVRSILSNEKYKGDALLQKTFTTDFLTKKMKVNEGEVPQYYVSGNHEPIIEPRIWDQVQYELTTRHGNISSAKVGLFSTRLKCAQCGAWYGRKTWASNTKYKYTVWQCNHKYAVEHPCSSATVKDEHIKNAFVQALNQLIARQSRQSHLLQIFDSMFDTSRMEEQAAACQAKIVELTEQIEALIAENQQRALDQDAYQNKYTELDTAYRKTLACKASLEADIAANTAKHAAVTTALGDLAGEPVSEFRPSQWSALIDHAIVDEDTIRFVFRVGEVVRVQL

SEQ ID NO: 12570 - protein, 523 aa, Unknown
  Description of Unknown: Integrase A1138 sequence
  IPR006119,PTHR30461:SF3,PF00239,cd00338,PF07508, PS51736,G3DSA:3.40.50.1390,SM00857,IPR038109,IPR011109, PTHR30461,G3DSA:1.10.10.2600,PS51737,SSF53041,IPR036162
MEDWRTQDGTDHDPASPIVRAAEYVRMSTDHQKYSTENQAEAIRHYAAAHGIEIVRTYADAGKSGLKIDGRDALKQLIDDVQTGVADYTMVLVYDVSRWGRFQDADESAYYEYICKRSGISVEYCTEQFENDGSPVSTIVKGVKRAMAGEYSRELSVKVFAGQGRLIEKGFRQGGPAGFGLRRTLVDERGETKGILTRGEHKSIQTDRVILTPGPPEEVAIVRDIYHAFVHEGRSEQDIADDLNRRHIPTDLDRPWTRGTVHQVLINEKYAGDNVWNRQSFKLKKKRVRNDPEMWIRAAGAFDAIVERDLFEAAKAIIGARSFRLSDTEMLSALKVLLVSRGLLSGIIIDECEGMPSSSAYSSRFGSLLRAYDLVGYTPDRDYRYVAINQALRKLHPEILGQVLDGLRDMGSEVVQDVQTDRVIVNEEFSLSVVIVRCNPTPTGLLRWKIRFDTSRMPDITIVVRMDTANRAAFDYYLFPRLDLVADRLRLAEDNGLSLDAYRFDTLDLLYEIAAPVAIAEAA

SEQ ID NO: 12571 - protein, 523 aa, Unknown
  Description of Unknown: Integrase A1139 sequence
  IPR006119,PTHR30461:SF3,cd00338,PF07508, PS51736,G3DSA:3.40.50.1390,SM00857,IPR038109, IPR036162,PTHR30461,G3DSA:1.10.10.2600,SSF53041, PS51737,PF00239,IPR011109
MEDWRTRDGTDHEPASPCVRAAEYVRMSTDHQKYSTENQAEAIRHYAAAHGVEIVRTYADAGKSGLKIDGRDALKQLIDDVQTGVADYTMVLVYDVSRWGRFQDADESAYYEYICKRSGISVEYCTEQFDNDGSPVSTIVKGVKRAMAGEYSRELSVKVFAGQGRLIEKGFRQGGPAGFGLRRTLVDERGETKGILTRGEHKSIQTDRVILTPGPPEEVAIVRGIYHAFVHEGRSEQDIADDLNRRSIPTDLDRPWTRGTVHQVLINEKYAGDNVWNRQSFKLKKKRVRNDPEMWIRAAGAFDAIVERDLFEAAKAIIGARSFRLSDTEMLSALKVLLDSRGLLSGIIIDECEGMPSSSAYSSRFGSLLRAYDLVGYTPDRDYRYVAINRALRKLHPEILGQVLDGLRDMGSEVVQDFQTDRVIVNEEFSLSVVIVRCNPTPTGLLRWKIRFDTSRMPDITIVVRMDTANRAAFDYYLFPRLDLIADRLRLAEDNGLSLDAYRFDTLDLLYEIAAPIAIAEAA

SEQ ID NO: 12572 - protein, 522 aa, Unknown
  Description of Unknown: Integrase A1140 sequence
  IPR006119,PTHR30461:SF3,cd00338,PF07508,PS51736, G3DSA:3.40.50.1390,IPR038109,SM00857,PS51737,IPR036162, PTHR30461,G3DSA:1.10.10.2600,SSF53041,Coil,PF00239, IPR011109
MKLSHILQPNMKAAFYGRHSTDKQDMDMQLNSVMEVIRKYDCIHTHSFLDKAVSARKNKITSRKELENMFEAAKRKEFDFVIVYKSDRLARDPLEHQTIRIVMKTLDIPIIISSTESVYNTDTDLIVQLMEDGFTKYEVDTIIARTRSGLENKAKQGKWLGGKPPFGYTYDKSSEQFIEHTEELCYVKEIFNLYVNGHGFQYIAHTLPNGSRRGKDWGKENVKAIVLNPFYCGLLSWRRQTDGKQNERDIWIEAPNHYVKPIISRTTWEACWRIYSEKRNGNMVPKHYKTSFLLQGLLSCEKCQELMKTKNQQTVSSTNKKYGGKIYFCPNCKLRIEADLLHDKVVNQTLTDVKISGFHNVYHAIEQKIQYEIQELNNNIQKHQRLYENHIIKLHNITEELKQRMKNNDDKRFLKSLAIYRSDVQRKLDGIIQQINNFKQQITLKEKVEKSKEIWLHTLNEVFQDDVKLQEISDMDKRRFLLPLIQSVSIKENKKRNEYDISLQLRTDFSKRDVKKQISLIL

SEQ ID NO: 12573 - protein, 522 aa, Unknown
  Description of Unknown: Integrase A1141 sequence
  IPR006119,PF00239,cd00338,PF07508,PS51736, G3DSA:3.40.50.1390,SM00857,IPR038109,PS51737,IPR036162, PTHR30461,PS00397,G3DSA:1.10.10.2600,Coil,SSF53041, IPR006118,IPR011109
MRDVLEKGKKGAFYARVSSDRQTIDAQRHHVYEFIKNYECEIVKEYVDPGESAFKKKLIKRPQIMALLRDVEQGKYDFVITYADDRLARSEIEHVQIRVIMKEAKTDVILTSTGELYTERDIITQLIREGGTRYEVERISARTKDAYEQRTDYGQWMGGPVPFGYVQDENTKNFFILEDEKEIVLKIYQLYQNGEGFADIAKILNEQKAKTNTIHWKKERVKHILTNPIYAGYVTFGRLKPGSGNSIEGLSKWKMAKCEEIPPIMTKEEWLATFQMFEKKRNKELPPKQLKTEYVLRDLIYCKSCDAPLLPKNQETRGKNGKKYGIKKYMCSNKLCKVWFSTDELHALVFDSVIKEVTDKVISKSQTELMYEMEQILEKDIKQIKKEIQRLKKQVDNCLVWIKDAEREIDELYNQKKKLVKVNPKIDPLLDVMLDYRLHLLHEIRETEELIAKKEAKMKHIEDVDSNQSMLQKNVLQAFRIEFTNLQKDMKRVRQLLVYLIDKIIIDQNGKTEYILKINLEQ

SEQ ID NO: 12574 - protein, 522 aa, Unknown
  Description of Unknown: Integrase A1142 sequence
  IPR006119,PTHR30461:SF3,cd00338,PF07508,PS51736, G3DSA:3.40.50.1390,SM00857,IPR038109,IPR036162,PTHR30461, G3DSA:1.10.10.2600,SSF53041,PS51737,PF00239,IPR011109
MDEVATTLKAPSGRRVVRAAQYLRMSTEHQTYSIDNQRDAIRDYAEIMGYEIVATYEDAGRSGLNLGGRPGLQRLLADVESGRADFETVVVYDVSRWGRFQNIDESAAYEYRCQMAGVRIEFCAEQFANDGSIESDVLKAIKRSMAAEQSRMLSQKVFIGQARLIRMGFRQGSKVGFGLRRLLVDQHGRPKGILSPSEYKSLQTDRIILVLGPPDEIATVRWIFGHFVKTRKTELEMARLLNKRGVLSDLGRPWTRVSVHSVLTNENYIGNSIWNKHSARLRSHQVRNPPELWVRVENILEPIVDRKLFNRAQIVLKTIYRHLTNDEMLAALKALLARRGALSSFIIDAAPDCPPSTRYMSRFGTIVKAYELIGYEPPKNSRYIFVNRRLETMRLQIIEDLLAAVEKRGGIATHVMETDLLRINQEITVAIATGRCRVSSFGYPRWFAKADREPPPDIFVLIRMNPDDLSIRDYLIAPAHEIAGKSELHAINGARLDTYIFPTLNPLIRLAERASVGSAAWN

SEQ ID NO: 12575 - protein, 521 aa, Unknown
  Description of Unknown: Integrase A1143 sequence
  IPR006119,PTHR30461:SF3,cd00338,PF07508, PS51736,G3DSA:3.40.50.1390,SM00857,IPR038109, IPR011109,PTHR30461,G3DSA:1.10.10.2600,SSF53041, PS51737,PF00239,IPR036162
MQSDVPRTEGQEVPIRMRAAEYVRMSTEHQQYSTENQGDKIREYAARRGIEIVATYADEGKSGLRIDGRQALQRLIHDVENKRADFQIILVYDVSRWGRFQDADESAYYEYICRRAGIQVAYCAEQFENDGSPVSTIVKGVKRAMAGEYSRELSAKVFAGQCRLIELGFRQGGPAGYGLRRTLVDVQGAAKTELSRGEQKSLQTDRVILTPGPEEEVRIVNQIYRWFIDDGLVESEIAGRLNGMRLRTDLGREWTRATVHEVLTNEKYVGHNIYNRVSFKLKKVRVVNPPDMWIRREGAFTGIVPPDVFYTAQGIIRARARRYTDEELIERLRGLYRNRGFLSGLVINEAEGMPCAAVYAHRFGSLVRAYQLVGYTPDRDYRYVEINRQLRRMHPDLVQQIEREIANLGGSFERDPATDVLWVNREFTVSIVLARCHAVDSGHNRWKIRLDTSLAPDISVAARLDDGNQAVRDFYLLPRVDFGPSRISLAEQNTAELESYRFETLDYLYGMAARARLRVAA

SEQ ID NO: 12576 - protein, 520 aa, Unknown
  Description of Unknown: Integrase A1144 sequence
  IPR006119,PTHR30461:SF3,cd00338,PF07508,PS51736, G3DSA:3.40.50.1390,SM00857,IPR038109,IPR011109,PTHR30461, G3DSA:1.10.10.2600,SSF53041,PF00239,IPR036162
MAGDTEPTVCEGGSHTRAAEYVRMSTEHQQYSTENQRSKIRDYADQHRLRIVATYADEGKSGLRLDGRAALQRLIHDVEARTVDFQVILVYDVSRWGRFQDADESAYYEYVCRRAGINVVYCAEQFENDGSPVSTIVKGVKRAMAGEYSRELSTKVFAGQCRLIELGFRQGGPAGFGLRRVLLDQSGLIKSALGRGERKSLQTDRVVLMPGPESETGIVRLIYQWFIEESLSDAQIAARLNSMNVRTDLDRIWSRATVHEVLTNEKYIGNNIYNRVSFKLKKLRVANPPEMWIRKDGAFKPVLSPDIFYTAQGIMRARAHRYSSEELLERLRELYQSRGFLSGIVIDETEGMPSSSVYSYRFGSLVRAYQAVGFTPDRDYQYVEINRLLRRLHPEIVNNTERLIAEIGGETVRDPATDVLFINREFTVSIVLARCHHVGLGKRRWKVRFDASLLPDITVAIRMKDGNDLPYDYYLLPRVDFGQRDIQLSERNSVELETYRFDTLDYLYRMAERARLRRVA

SEQ ID NO: 12577 - protein, 520 aa, Unknown
  Description of Unknown: Integrase A1145 sequence
  IPR006119,PTHR30461:SF3,PF00239,cd00338,PF07508, PS51736,G3DSA:3.40.50.1390,SM00857,IPR038109, IPR011109,IPR025827,Coil,PF13408,PTHR30461,G3DSA:1.10.10.2600, PS51737,SSF53041,IPR036162
MTEKNIMVIPARKRVGSTAAKEKIKKLRVAAYCRVSTETEEQNSSYEVQVSHYTEFIKKNNEWEFAGIFADDGISGTNTKKRDEFNRMIAECMDGNIDMVITKSISRFARNTLDCLQYIRQLKDKNISVYFEKENINTTDAKGEVLLTIMASLAQQESQSLSQNVKLGLQYRYQQGKVQVNHKRFMGYTKDEDGNLTIVPEEAEIIKRIYREYLEGQSLVGIGRALEKDGILTAAGKPRWRPESVKKILQNEKYIGDALLQKTVTVDFLTKKRVKNEGHVPQYYVENSHEAIIPKELFLQAQEEIHRRSNIYTGEGKNKRIYSSKYALSAITFCGDCGDIYRRVYWNIHGRKEFVWRCVTRIEQGPEVCKNRTVKEDELYGAVMTAINKLLAGGNNMIKTLEENIHAVIGETTEYQISEINNSLEEKQKELIKLANKGQDYDHLADEIDELRDKRQILLVEDASLSGENERINELIEFIRKNKFRTLEYDDKLVRKIIQSVTVYEGHFVIAFKSGIEMEI

SEQ ID NO: 12578 - protein, 519 aa, Unknown
  Description of Unknown: Integrase A1146 sequence
  IPR006119,PTHR30461:SF3,PF00239,cd00338,PF07508, PS51736,G3DSA:3.40.50.1390,SM00857,IPR038109,IPR011109, PTHR30461,G3DSA:1.10.10.2600,SSF53041,IPR036162
MDKATTPPEFERRRARAAQYLRMSTERQIYSIDNQRDAIRNYAEIMGYDIVATYEDPGRSGLSILGRPGLKRLIEDIESRRADFETVVVYDVSRWGRFQNTDESASYEYRCQRAGVRIEFCAELFVNDGSIGSDVLKAIKRSMAAEYSRMLSNRVFAGQSRIVKLGFSGGGPAGYGLRRLLVDGSGNPKAILHRDERKGLASDRVVLVPGPENEVSTVRWIFNQFVKKGKTAVEIASALNARGLVTEFGRPWTGACVGTILASEKYVGNIVWNRISHRLLQNRLRNPPSAVVRADNVIEPLVPRALFDRAQAIRRARTYLRPDEELLADLTKLLKERGRLSSPIIDAAPGCHSASIYAHRFGSMNAAYQLIGYDGSANYRKLDIRRRLIQIRQQTIENLMSDIDGVGGSALYDPQTKIMRVNDEFSVAIWTAQYRMNVTGFPRWPFWKRGLIGPEVTILIRMESDNQTVRDFLIAPAHEAQSALHMLKANNGVRLDAFLFASLDPVVEMARREPMPANI

SEQ ID NO: 12579 - protein, 519 aa, Unknown
  Description of Unknown: Integrase A1147 sequence
  IPR006119,PTHR30461:SF3,cd00338,PF07508, PS51736,G3DSA:3.40.50.1390,IPR038109,SM00857, IPR011109,IPR025827,PF13408,PTHR30461, G3DSA:1.10.10.2600,SSF53041,Coil,PF00239,IPR036162
MLSRYEGGHHDKEAIAYVRFSTASQQYGDSLRRQNALISEWLSQHPDYELDDITYQDLGLSAYSGMNATRGALYDFLDAVEHGYIAAGTVLLVESLDRLSREKISDATERLKSILRSGVEVVTLCDHTHYSIDSLDDPYVLIKAILIAQRANEESETKSRRMRAAWQKKREDAAATGKLITRSCPRWLTVSPGGEKFELIEEHARTINLIFRLRLKGCSLNGITKTLNERGVPTLTGEIGRWNPSTIESLLGNKALTGTFTPSYQTMAKGVSEIRGYFPPVVPDKLFHDVQGVRLARFGNPGVSENPYLINIFRSLMYCGTCGHSIMLTSVDKKGAGYYACPMRRLHRCSEPAIRRDHVDAALVGVLLCSMDMLQANGTVMGTASQLENRLVELNMSINRLIAALQIAPDVPELAMKVRELSKELRAGELKLRALRNRGVAGSGEWIAGLNLADRRNRERCRDYAARHIDRLFLHTAEGRCDVHLLNGLRLINFPVKKKLPVSSFISSLAYLCGDTLIL

SEQ ID NO: 12580 - protein, 519 aa, Unknown
  Description of Unknown: Integrase A1148 sequence
  IPR006119,PTHR30461:SF3,PF00239,cd00338,PF07508, PS51736,G3DSA:3.40.50.1390,IPR038109,SM00857,IPR011109, PTHR30461,G3DSA:1.10.10.2600,SSF53041,IPR036162
MDRATTPPEFERRRARAAQYLRMSTERQIYSIDNQRDAIRNYAEVMGYDIVATYEDPGRSGLSILGRPGLKRLIEDIESRRADFETVVVYDVSRWGRFQNTDESASYEYRCQRAGVRIEFCAELFVNDGSIGSDVLKAIKRSMAAEYSRMLSNRVFAGQSRIVKLGFSGGGPAGYGLRRLLVDGSGNPKAILHRDERKGLASDRVVLVPGPENEVSTVRWIFNQFVKKGKTAVEIASALNARGLVTEFGRPWTGACVGTILASEKYVGNIVWNRISHRLLQNRLRNPPSAVVRADNVIEPLVTRALFDRAQAIRRARTYLRPDEELLADLTKLLKERGRLSSPIIDAAPGCHSASIYAHRFGSMNAAYQLIGYDGSANYRKLDIRRRLIQIRQQTIENLMSDIDGVGGSALYDPQTKIMRVNDEFSVAIWTAQYRMNVTGFPRWPFWKRGLIGPEVTILIRMESDNQTVRDFLIAPAHEAQSALHMLKADNGVRLDAFLFASLDPVVEVARREPMPANI

SEQ ID NO: 12581 - protein, 518 aa, Unknown
  Description of Unknown: Integrase A1149 sequence
  IPR006119,PTHR30461:SF3,cd00338,PF07508, PS51736,G3DSA:3.40.50.1390,IPR038109,SM00857, IPR036162,PTHR30461,G3DSA:1.10.10.2600,SSF53041, PS51737,PF00239,IPR011109
MTGAGDQTHKTENVRAAQYVRMSTEHQKYSTENQAIEIAKYARENGYVIVKTYMDSGKSGLKLDGRDALQSLIEDVSNGQTDFSIILVYDVSRWGRFQNADESAYLEYLCTRAGIAVEYCAEQFANDGSLTTTIIKNMKRAMAGEYSRDLSRKVFEGQRHLVELGYRQGGAAGFGLRRQLIDERGEPKALLAHGERKSIQTDRVILVPGPATEVAVVDRIYRLFVEKGQNECSIAGILNYENLFTDMGRPWTRGTVHQVLTNEKYVGNNVFNRISFKLKMHRVRNPPDAIIRASGVFQPIVSEDLFQRAAAIIAKRTVRLRDDEMLALLTQLLLKSGKLSAIIIDEQEGMPSSSIYGSRFGSLLRAYKLIGYTPDRDYRYVEINRLLRTLFPDVVSGIIASVENAGGRIVRDAATDLLKVNGEFAVSVVVCRCIETPAGSLRWKIRLDNGLHPDLSIAVRMAPGNEKILDYYLLPAIDFASANLAVAEDNPIGIDAYRCADLSRFIRLTERVPIRRAA

SEQ ID NO: 12582 - protein, 516 aa, Unknown
  Description of Unknown: Integrase A1150 sequence
  IPR006119,PF00239,cd00338,PF07508,PS51736, G3DSA:3.40.50.1390,IPR038109,SM00857,IPR011109,IPR025827, Coil,PTHR30461,PF13408,G3DSA:1.10.10.2600,PS51737, SSF53041,IPR036162
MVIPARKRVGSTAAKEKIKKLRVAAYCRVSTETEEQNSSYEVQVSHYTEFIKKNNEWEFAGIFADDGISGTNTKKRDEFNRMIAECMDGNIDMVITKSISRFARNTLDCLQYIRQLKDKNISVYFEKENINTTDAKGEVLLTIMASLAQQESQSLSQNVKLGLQYRYQQGKVQVNHKRFMGYTKDEDGNLTIVPEEAEIIKRIYREYLEGASLLQIARGLEADGILTAAGKAKWRPETLKKILQNEKYIGDALLQKTYTVDFLSKKRVKNNGIVPQYYVENSHEPIIPRELFMQVQEEMVRRANLRGGKGGKKRVYSSKYALSSIVYCGQCGDIYRRVHWNNRGYKSIVWRCVSRLEEKGSECTAPTINEETLQAAVVKAINELLDNKEPFLSTLQKNIATVLNEENDNATVDIDGKLEELQQQLLIQAKSKNDYEDVADEIHRLRELKQNALVENAEREGKRQRIAEMTDFLNEQSCELEEYDEQLVRRLIEKVTIYEDKLTVEFKSGIEIDEEI

SEQ ID NO: 12583 - protein, 516 aa, Unknown
  Description of Unknown: Integrase A1151 sequence
  IPR006119,PTHR30461:SF3,PF00239,cd00338,PF07508, PS51736,G3DSA:3.40.50.1390,SM00857,IPR038109,IPR036162, PTHR30461,G3DSA:1.10.10.2600,SSF53041,IPR011109
MVKSLKPQLDPERVIRAAEYVRMSTDHQKYSILNQSALIHVFAETNRMEIVATYADPGKSGLTLRSRPGLSRLLSDIVAGKVDFEVVLVYDVSRWGRFQDADESAHYEFLCRQAGIRVIYCAEQFGADGHPLASVLKALKRAMAGEFSRELSVKVAAGKARIASLGYRVGGIAGYGLRRQVLEDGQARGMLLRKGQLKYLQTDRVTLVPGPAEEVAVVARIYRDYIYLRKGELQIARALNAEGYSFFGKAWSRHLVRTILTNEKYIGVNILGRTIQRLAAPNINNPPEKWTRFEGAFVPIVSRDLFEAAARVRSFNVKAYTDAELLEALRVALKREGKLTVEIIERDPDLPAASTIRAHFGGVTGAYQRLGFAIGSRYRFYDIERALAAVRKQTQESLMQALEARSIECSVTAPNLIAFADRFAIEVRVCRHREPISYRCSGWRMAHEPASGSSHVLAIRMARGNQAIQDFLFLRRAEIQGVPPFLKASCDDQTAQFRYTDVPAVATAIADIALNL

SEQ ID NO: 12584 - protein, 515 aa, Unknown
  Description of Unknown: Integrase A1152 sequence
  IPR006119,PTHR30461:SF3,PF00239,cd00338,PF07508, PS51736,G3DSA:3.40.50.1390,SM00857,IPR038109, IPR011109,PS51737,PTHR30461,G3DSA:1.10.10.2600,Coil,SSF53041, IPR036162
MYHPQELDVFIYLRKSRKDLEEEKKAIEHGQHYDTLERHRTQLLELAHKEHHNIIDIFEEVVSGEYISERPMMQKLLREVESGIADAVLVMDLDRLGRGDMVDQGTIYRVFCYSETFIITPTEIINPNDENQELTFSIKSLIAREELKTIVKRMQRGRRASAKEGKSISRVPAYGYLRDNNLKLYPDPEKSWVIPIIFKLMVNGMGRQAIAQELDRLGISPPKGEYWNPSTISSITKNEVYLGHIIWGKIRYTKQNGKYIRKKVPKERWQRHDNAHPPLVSEELFQKANMAHSKRWRPPTIKTKKLSNPLAGILLCELCGHSMLYQPRKDRPNPQVRCVQPSCKGIQKGAALALVEQRILDGLQQIIESFEIQKNMVEKKQSKNNIQLQQKAVERKEQQVNDLQKQKNKLHDLLEKGVYDIETFLERQKSIVLRLKTTQEEIEQLEQEIKYIAEKEKHMHEFVPKIRNVLEAYYVTEDIDKKNHLLKSVLEKATYLRKTTWNRRDEFVIELYTKI

SEQ ID NO: 12585 - protein, 514 aa, Unknown
  Description of Unknown: Integrase A1153 sequence
  IPR006119,PTHR30461:SF3,PF00239,cd00338,PF07508, PS51736,G3DSA:3.40.50.1390,SM00857,IPR011109,IPR025827, PTHR30461,PF13408,SSF53041,IPR036162
MKLYSYQRWSSAVQEAGTTKTRQEDAARAYALRNGLEYCEIVDSGVSAYRGANKQGALGKFIDAVQQGVIERGVTLYVESLDRISREGINNALRLFQDILELDITIVTGMDGKVFTKQSINDNPFDLMMSILVFIRANEESTKKSLRTNGNAKALVERFKSGQPTNIKSMGGCPFWIDNSMSQYESVQKHVKYWPIAEEIVQQFLDGKSVFQVVKYLNATYPEGCYGKPWNYANVRKVRLSKAIYGVKEITISSTLHTLDNYYPALCTEGEFLRLQVIKDNNKYIGKVGDQKNNINLLCGMKLFRCGHCGSTMMAMKHKNTIRYMCEKGRMDSNGCRLWSFGSLGIEHCLMLVLTYAYIDTNRKGVQNKTDYSTRIASKNEAIDEISKRITNTIELVSMGLSNVEEVKVLIEGLNKQRTVLKTELDVLVTQQALSDSIDFETLMHDFFTHAQYAVLQSVDHEYREELRKVVFAMMDSVIAWKYGKNLYFSFRIKDHDEYFNFVPGTEKNTFRLY

SEQ ID NO: 12586 - protein, 512 aa, Unknown
  Description of Unknown: Integrase A1154 sequence
  IPR006119,PTHR30461:SF3,PF00239,cd00338,PF07508, PS51736,G3DSA:3.40.50.1390,SM00857,IPR038109, IPR011109,IPR025827,PS51737,PTHR30461,PF13408,G3DSA:1.10.10.2600, Coil,SSF53041,IPR036162
MKKMTVIPAVSQIRQGRIRVAAYCRVSSNKDDQEHSYETQVRYFTSLYRGSETSELVGVYADEGISGTSMDKRVEFQRLMEDCRAGKIDRIVTKSISRFARNTKDCLKSIRELKELGITIAFEKENIDTARLSDEMMITVMGGLAQEESQSISNNVRWGIQKKMASGTFGHCRVPYGYTKEKKTGKLIIEPDKAEVVRRIFDMYISGMGARKIALTLTDEGIPSPTGKAWNQKTVLNILEQEKYIGDTLWQKTYSKFMGEKFIPNSGQVPQYYIEGSHPAIISKEKFALVRDMRKASTPQKSTKVESPFRKKLICGKCGHTYALIRSKKRDYWQCGYRYDVGNPCNNTVLYADELQTAFTALCDKLHTHNAEIIGKCYAQLTELQRLMEYGTAEGANQLKTIADLKEQKLRLATLYRKRFITTEKYDREVTEIDMQISSLSRSMDRASENKDKTIDDMETLAELFKGYDGTPEARKEILETAVESITISGDTLTFRLPSGLEFTERLDRNGN

SEQ ID NO: 12587 - protein, 511 aa, Unknown
  Description of Unknown: Integrase A1155 sequence
  IPR006119,PTHR30461:SF3,PF00239,cd00338,PF07508, PS51736,G3DSA:3.40.50.1390,IPR038109,SM00857,IPR011109, PTHR30461,G3DSA:1.10.10.2600,PS51737,SSF53041,IPR036162
MSTDLQRDSPTNQKEVLARYATIHGIHIAATYEDYGKSGLSMRNRPALARLLQDVLDEKRIFSVLLVYDVSRWGRFQDVDESAHYEYVCRRAGVRVVYCAEPFENDNSASSNIMKTLKRAMAGEYSRELSLKVFLGQCRGTREGFRQGAAAGYALQRVLVDFNGNVKGPLHNGERKNLQSDHVVIVPGPAHEVALVRRVYEWFLTENLSPTRIAKRLNDFGLRTDLNRRWLKDAVTRLLTSEKYAGNNVYNRTSVRLHTPRVKNPPEQWVRAVGVFEPVVDRATFDAVQLRLDSRTHLMPDDDLLVKLVALHEKIGKVTAKAITADRSLPGVQTYRKRFGSLTEVYRTIGFDNGHDYGFLRVLRAAKILHSRLSDTVIATLRDAGHEVHHSLDKTLLCVDNEIRIRLNVRPATRTLYKPVRWIIKWPELHPPVDILVLARVDRFAVNFIDFFVLPRGSLGPQKQTELTEKPNPQLEMFRYSDLKILLELTARVSLEVFREPGNAANNYRPD

SEQ ID NO: 12588 - protein, 511 aa, Unknown
  Description of Unknown: Integrase A1156 sequence
  IPR006119,PTHR30461:SF3,cd03768,PF00239,PF07508, PS51736,G3DSA:3.40.50.1390,SM00857,IPR011109, PTHR30461,PS00397,Coil,SSF53041,IPR006118,IPR036162
MTEKTKIIVGYARVSSREQAVDSHALEQQIARLKAAGATEIFIDIESGSNDNRPALKKLMNLVELRQVNEVIITRIDRKARSLVKLRECIDIYQKAGVNLRILDQQIDLNTSQGKLMANVLGSLAEWETDALSDRIRHGKQHRRNQRAACESYPWGYQVIKDKYQLDTRLFLCLISDRPDNYLDLYNEDDVTKLPGLTIKQIARDCVDIFLQVQGVSRALKVIFAKYGLPRKHHKRNSRDSILHWTNAGFNNWLTNPVLCGHTAYFQRITISKGKRKKNKPEDWQIIHDTHPEHRLITDAEAVEIQQILKFNSKTGHFSFNQDPNHPVCYREYAYQTGLVFCAECGSKCITKSAKHKKGMYYYFACRYAGMGCGNKKSTRKCNIENALINTLVQRSQSLANELDQQATREQEKSEKLKQLESRLEALEKIPGFDPDLEKLKEKIRLQIAEEVNPFLSDSILSRSTEEIIRAGNNLAIWHTLSPDEKVKIYHQIVHQITIRNAEVEEVILKI

SEQ ID NO: 12589 - protein, 510 aa, Unknown
  Description of Unknown: Integrase A1157 sequence
  IPR006119,PTHR30461:SF3,cd00338,PF07508,PS51736, G3DSA:3.40.50.1390,IPR038109,SM00857,IPR011109,IPR025827, Coil,PTHR30461,PF13408,G3DSA:1.10.10.2600,SSF53041, PS51737,PF00239,IPR036162
MKAAIYARYSSDNQREESIEAQIRAINEFAERENIQIVKTYIDEARSATTDDRPQFLKMIKESELGLFDTLIVHKLDRFSRNRYDSAFYKKKLKDNNVRLISVLEHLDNSPESIILESVLEGMAEYYSVNLSREVMKGMRETALQCKHNGGLPPLGYDVAKDKTYIINPNEAKAVKLIYELYSNGVGYNLILSRLNELGYKTKKGKFFGKNSLYSILTNEKYNGIYVFNKSSKKINGKRNSHKHKLDEEIIKIKDGMPKIIDDDLWNEVKKKMDNNKAHRGAAQAKKIYLLSGLIYCGKCGHAMTGNSRHSGRNKTLYETYECSNRKRTKQCDMRAINKSLAEKIVIDALYDNIFSKKAIENLTRKILTYAQEQNKTITEDIITYKKELKDVDSKIDNIVEAIADGLYSPVMKEKLTSLESKKNALLIRIDEAEREAILTSPSKEMIKKYLSKDSDIKEKTPQQQKKVVQNYIKKVTIYDDEVITDTIVTCLGIGEAYRTRVHKLYITKY

SEQ ID NO: 12590 - protein, 509 aa, Unknown
  Description of Unknown: Integrase A1158 sequence
  IPR006119,PTHR30461:SF3,PF00239,cd00338,PF07508, PS51736,G3DSA:3.40.50.1390,IPR038109,SM00857,IPR011109, PTHR30461,G3DSA:1.10.10.2600,SSF53041,IPR036162
MKKAIAYLRFSTSSQQYGDSLRRQNKLVAEWLDSHPNYLLDDLTYKDLGLSAFDGSHAVHGAFSEFMEAVQGGYIPHGTVLLVESLDRLSREKIGEATERLRSILSAGIDVVTLTDHTHYTKDSLDDPYSLIKAILIAQRANEESEIKSRRMKSAWQKKREDAEASGRIITRSCPRWLRVSHDGKSFELIAEHAATLQEIFRLRLEGNSINGITKMLNDRNVVTLTGEAGRWNPSTVEKLLSNKALTGVYVPSYRTIANGIQEIPGYFPRVIADKTFSAVRGFRSRPYGKDKETNNPWLINLFRSVMTCKACGHSIMLNGIDARGMGYYVCPMRRLHRCDAPALRRDIADANLIRTVLAVVDKFQPGRTVKVPVRILQDRNILILKSIDQLVEALQVAPEVTALAERIKALHREFKSNEVTMHALKSRERLATVNDISLLNLALKTDREKCRRFVMRNFRDIRLDTASKTCDILFSNGFRLLNFPLLKSTDPGQLVSALAYTDDETLVL

SEQ ID NO: 12591 - protein, 508 aa, Unknown
  Description of Unknown: Integrase A1159 sequence
  IPR006119,PTHR30461:SF3,cd00338,PF07508,PS51736,G3DSA:3.40.50. 1390,SM00857,IPR038109,IPR025827,Coil,IPR036162,PF13408, PTHR30461,G3DSA:1.10.10.2600,SSF53041,PS51737,PF00239,IPR011109
MKKAIAYMRFSSPGQMSGDSLNRQRRLITEWLKVNSDYYLDTVTYEDLGLSAFNGKHAQSGAFSEFLDAIEHGYILPGTTLLVESLDRLSREKVGEAIERLKLILNHGIDVITLCDNTVYNIDSLNEPYSLIKAILIAQRANEESEIKSSRVKLSWKKKRQDALESGTIMTASCPRWLSLDDKRTAFIPDPDRVKTIELIFKLRMERRSLNAIAKYLNDHAVKNFSGKESAWGPSVIEKLLANKALIGICVPSYRARGKGISEIAGYYPRVISDDLFYAVQEIRLAPFGISNSSKNPMLINLLRTVMKCEACGNTMIVHAVSGRLHGYYVCPMRRLHRCDRPSIKRDLVDYNIINELLFNCSKIQPVENKKDANETLELKIIELQMKINNLIVALSVAPEVTAIAEKIRLLDKELRRASVSLKTLKSKGVSSLGDFHAIDLTSKNGRELCRTLAYKIFEKIIINTDNKTCDIYFMNGIVFKHYPLMKVISAQQAISTLKYMVDGEVYF

SEQ ID NO: 12592 - protein, 508 aa, Unknown
  Description of Unknown: Integrase A1160 sequence
  IPR006119,cd03768,PF00239,PF07508,PS51736, G3DSA:3.40.50.1390,SM00857,IPR025827,IPR036162,PTHR30461, PS00397,PF13408,Coil,SSF53041,IPR006118, IPR011109
MHQYNIVGYARVSSREQAENCHALEQQIDRLKSAGVEYVFVDVESGANPERLNYNKLIQLVEKGAIKMVIATRWDRLTRNELVYLQLKNLFQYSAVKLKLLDQGDVDLNSAFGELSADMQALFAVHERRMLKERVSRGFEYKRKKKSAWGRQPWGYKSENEKYVIDRSRIICLLSQRPYNYQELSDLPDNSSLLVQGLSKGEIAKEAIEYFLKVRKARDVLRYLYEKYGVSSKANNNNLLLTSQLLFWRSGQSFCEWIKNPVLRGHTAYNKYEPRNAQKRGNQKPPEEWEIHENTHPDERMLSDEEYCEVVTIIEQNSRTMGTMKTRSQLTGLIICGECGSKCINKNNQIYRYYGCRNSGIGCSNKKQIRVDLLEAKLFDFIIEKAHQFNGVDSVSQVIENPEDSSVVIKLKEQKQSLEKMLQDHYNLTIKKAINDLDLQIKKEISHSEIDDFSLATAAEVLVYPYITHLGFWYCLNTQERELIYHKLIKKIVVLDSQVTTIELKVSG

SEQ ID NO: 12593 - protein, 507 aa, Unknown
  Description of Unknown: Integrase A1161 sequence
  IPR006119,PTHR30461:SF3,PF00239,cd00338,PF07508, PS51736,G3DSA:3.40.50.1390,SM00857,IPR038109,IPR025827, PS51737,IPR036162,PF13408,PTHR30461,G3DSA:1.10.10.2600, Coil,SSF53041,IPR011109
MNNMIVVPAAAKVQRGLTRVAAYCRVSTSQENQEHSYEAQVRYFTNLYRSSSTETFVGIYADEGISGTSLDKRTEFQRMINDCRAGKIDRIVTKSVSRFARNTKDCLETLRELKALGVTVAFEKENIDTSRLSDEMMITVMGGLAQEESHSISRNVRWSIQRKMANGTFRHARVPYGYAKDDETGNLIVDPEQAEIIRRIFNMYVNGTGAHKIALTLNDEKIPSPTGIAWNKKTILKILDNEKYTGDTMWQKTYSEFMGEKFKPNHGQAAKYYIEGSHEAIISKELFEMAAKVKKKAAPKSFEKNNTPFRKKLICRKCGHTYTFISSKRRNYWQCNCRSAIDKPCDNRVLYNDELESAFTALCDKLHVHGTVILGKCAEQLAELQRLEQFGTAEGVKRMKELSDLKDQKQRFRGLYDKHFISEEKYQQQIGEIDLKIERLSREMSRLSGANDGISGEINTLLEMFEDYEGSDDDKKEIIESALEKITFVDETLTFRLQCGLEFTEVV

SEQ ID NO: 12594 - protein, 506 aa, Unknown
  Description of Unknown: Integrase A1162 sequence
  cd00569,PTHR35004,PF00665,IPR009057,IPR012337, SSF46689,IPR001584,G3DSA:1.10.10.60,SSF53098,IPR017894, PS50531,PS50994
MLTVETIARIRREHAKGKSIRAIARSLKVSRETVTKYLRSGETAPRYERQHQPLPKLAGFQEELERLITENERRPARDRLDYLGLFGRLKDAGFQGGYDTVRRYIKRFKQRQPPSGPVNAYVPLTFAPAEAYQFDWAEEWIILDGVTTKVQVAHARLCHSRMPFVAVYPRQTQEMVFDAHARAAAFYGGLCERGIYDNMKTAVDAVFVGKERRFNRRFAQMCSHYLVEPVACTPASGWEKGQVENQVGTLRQRLFTPRLRAKTLEEVNERLHDEVIVWAQQTSHPEDKSRTVWEVFQAERPALITVSDPFDGFHEATLSVSKTCLIHFDRNRYSVAAIAAGKPVQVRAYATRIVVWFNGAIVAEHPRAFGHGHTRYNPLHYLPVLVRKPGALRNGAPFRDWDLPPALATVRTRLGRGDDADRQFVGVLAAILTDGLEAVEVACREALASGTHSRDVILNILARRHDVTPAPAMAVPTALTLSIEPAADCGRYDRLRAVREGCHGTA

SEQ ID NO: 12595 - protein, 503 aa, Unknown
  Description of Unknown: Integrase A1163 sequence
  IPR006119,cd03768,PF07508,PS51736, G3DSA:3.40.50.1390,SM00857,IPR038109,IPR011109, IPR025827,Coil,PF13408,PTHR30461, G3DSA:1.10.10.2600,SSF53041,PS51737,PF00239,IPR036162
MNNRIDAIYARQSVDKKDSISIESQIEFCKYELKGGNCKEYTDKGYSGKNTDRPKFQELVRDIKRGLIAKVIVYKLDRISRSILDFANMMELFQQYDVEFVSSTEKFDTSTPMGRAMLNICIVFAQLERETIQKRVTDAYYSRSQRGFKMGGKAPYGFHTEPIKMDGINTKKLVVNPDEAANIRLIFEMYAQPTTSYGDITRYFAEQGILFYGKELIRPTLAQMLRNPVYVQADLDVYEFFKSQGTVIVNDAADFTGTNGCYLYQGRDVKPSKKNDLKDQMLVLAPHEGIVPADIWLACRKKLMNNMKIQSARKATHTWLAGKIKCGNCGYALMSIFNPSGRQYLRCTKRLDNKSCPGCGKIITSELEAVVYQQMVKKLEKHKTLTGRKKAAKANPKIAALQVELLHVDSEIEKLVDSLTGANNVLLSYVNVKIAELDGRKQELVKQIAELTVETISPGQVNQISGYLDTWDDVSFDDKRRVVDLMITTVAATSDSLNITWKI

SEQ ID NO: 12596 - protein, 503 aa, Unknown
  Description of Unknown: Integrase A1164 sequence
  IPR006119,cd00338,PF07508,G3DSA:3.40.50.1390,SM00857, IPR038109,PTHR30461:SF21,IPR036162,PTHR30461,G3DSA:1.10.10.2600, SSF53041,PS51737,PF00239,IPR011109
MRLPAQPLPSDLIDALYALPPGDTTGVVYLRISRDRDHDADGEVNQLWDILPLARRMGVRVVGVYLDNDISATTGSRKRTEYYEMLEILKRDSARVVLSWHSDRMHRNNRELEDYIDICEPRGILTHTVRAGTMDLSTAVGQAAARTFTAWAGAQARQTGERLALRQAANRREGRWAGGIRPFGWELDGESLRAAEAAEIRWATQAVVEGDSLRVIARQMNARGSRGTRGKEWIASTVKQILMRPRNCGLMSHEGQIVGRGRWAPAVSEEEWRACVDVLERRGARSVERGGRPPRWLGAMLYICGGCGQPTLRGMPVAGGKGQAKYACAPKVDRLPGVRHVTRQAAALDAWVQEALIERLSRPDAVKLLRRPDHARAEIDVAALHAELARLHGVLEALAEDYADGALTRSAMLLGTERARHRITVVGDELAAASEADPLAAIVGTDVRREWFGTEDGGMPGYSLERRRAILRRLVDVWVMPASPGRRAPSKEWWKDIDLRWKD

SEQ ID NO: 12597 - protein, 502 aa, Unknown
  Description of Unknown: Integrase A1165 sequence
  IPR006119,cd00338,PF07508,PS51736, G3DSA:3.40.50.1390,SM00857,IPR038109,Coil, IPR036162,PTHR30461,G3DSA:1.10.10.2600,SSF53041, PS51737,PF00239,IPR011109
MEGLVVLKKTVAYYRSSSKKQEHSVRMQKYYAKAYCRDHYMKLDYEYEDPYVSARIIHKNQRSGLRKLLEAIQNDEIEHLILYKRDRLARNVIEYMEIYELLQEKQIKVHFTTVGEPVMEYTPMNRYLEVIMAGFAQHEGEQINKRFDAMRQSKFDAGKAVSRIPYGFQNNKKKKEIEVVKDEMDIVMFIFNEFLNDTCTSLQQIKDSLDGKDFKKRKGLPWELQDIRRTLENSFYMGVYSIRLKGVQQEHQLEGTIPIEPHQWEAAQEKLNRILNKRGSTKMKKEIDKEDILYRMEGLLQCSYCKKQLEGVVKRRRDTFLIGYQCKEHRLYIDKEYIEQKTFEKMKCFFLNLREKEFDGLFQRYYKQNIKEIERIIQGHSQRLDQKKKTVHTKVQRWLTEKKNEKLHKELLGSYQHFQEYKQIKEELELKLNVLKKVPDVVKNLEGNIHKQLMLDSLSDYKSMELFQDLIFTVIVDRHGYEIIFKHPFLHYPEVHTCEDNS

SEQ ID NO: 12598 - protein, 499 aa, Unknown
  Description of Unknown: Integrase A1166 sequence
  IPR006119,PTHR30461:SF3,PF00239,cd00338,PF07508, PS51736,G3DSA:3.40.50.1390,IPR038109,SM00857,IPR011109, PTHR30461,G3DSA:1.10.10.2600,PS51737,SSF53041,IPR036162
MSTEHQQYSTQNQAQTIREYAERRGIRIVKTYSDDAKSGLIIGGRMALQQMIADVESGVADFSVILVYDVTRWGRFQDTDESAYYEYRCRKAGMQVAYCAEQFENDGSPTSTIVKSVKRAMAGEYSRELSVKVFAGQCRLIELGYRQGGPAGFGLRRALLNERGEVKTELKRGEHKSLQTDRVVLVPGPDDEVRTVRWIYSQFLKKGLSETEIATELNARGILTDLGRAWTRATVHQILTNEKYIGNNVYNRRSFKLKRKRVANGPEMWIRSDGAFDAIVEPKQFQKAQAIIAARNRRFSDEVMLERLARLFQRHGYISGLVIDEADGMPSSGAYAHRFGSLLRAYSLVGFTPDRDYRYIEANRLLRQFHGDEIERVIHEITLLGGAVIRNPATDLLTINGEFTASVVVARCRETSSGGLRWKIRFDTGLAPDITIAIRMNRTNTDALDYYLLPQFEMRSKPLGLAEENGLMLDAFRFETLNFFFDMARRVSVSEVTPW

SEQ ID NO: 12599 - protein, 499 aa, Unknown
  Description of Unknown: Integrase A1167 sequence
  IPR006119,PTHR30461:SF3,PF00239,cd00338,PF07508,PS51736,G3DSA:3. 40.50.1390,SM00857,IPR038109,Coil,IPR036162,PTHR30461,G3DSA:1. 10.10.2600,PS51737,SSF53041,IPR011109
MKAVIFARVSSRDQEDGHSLDAQIQCCYEYAIKKNFKVIEQFKIVESSTATGRPEFSKMVNFVKGQKDKIIVLCYGVDRLQRDFDEQYIELQRLIKQGRIEIHYAKSEFIEHKDMDSSDKFRKNLDVLLANDYRNKISDNVKRSARKKLADGTILGDSPLGYLNSKRMDKKKEKVNVYIDPLRGSLVKKMFEDYATGMYSMNEIRLRITEEGLRSKKGCQIGKSQVEQILQNPFYYGYMKYNDILYKHVHPALISKELYDECQLVRQGKRKSKSKRTQKPFVLKGLLKCHHCGCGYSPELKKEKYVYMRPTKSKGDCSYCHHLSEEKILIQIEDVLKGIKIPDNILAELNTELKKSSAAEYEHQIQESNKLQTQYQTIQTRIKRARELFLDAQVSKEEYDEMITGLQAERHNVEVRLQRLTEADDGFNKSLSTIFALASKAHDLFKSSELEEKRRIITILFPNLEMNAGKLMFTTRKPFDVFLNMPHRPKWLPGQDLNL

SEQ ID NO: 12600 - protein, 497 aa, Unknown
  Description of Unknown: Integrase A1168 sequence
  IPR006119,PTHR30461:SF3,cd00338,PF07508,G3DSA:3.40.50.1390, SM00857,IPR038109,IPR036162,PTHR30461,G3DSA:1.10.10.2600, SSF53041,PS51737,PF00239,IPR011109
MSTEHQKYSTENQAIEIAKYARENDYVIVKTYMDSGKSGLKLDGRDALQSLIEDVSNGQTDFSIILVYDVSRWGRFQNADESAYLEYLCTRAGIAVEYCAEQFANDGSLTTTIIKNMKRAMAGEYSRDLSRKVFEGQRHLVELGYRQGGTAGFGLRRQLIDERGEPKALLAHGERKSIQTDRVILVPGPATEVAVVDRIYRLFVEKGQNECSIAGILNSENLFTDMGRPWTRGTVHQVLTNEKYVGNNVFNRISFKLKMRRVRNPPDAIIRASGVFQPIVSKDLFQRAAAIIAERTVRLRDDEMLALLAQLLLKSGKLSAIIIDEQEGMPSSSIYGSRFGSLLRAYKLIGYTPDRDYRYVEINRLLRSLFPDVLSGIIAAVEHAGGRIIRDAATDLLKVNGEFTVSVVVCRCIETPAGNLRWKIRLDNGLHPDLSIAVRMAPGNEKILDYYLLPAIDFASANLAVAEDNAIGIDAYRCADLSRFIRLTERVPIRRAA

SEQ ID NO: 12601 - protein, 497 aa, Unknown
  Description of Unknown: Integrase A1169 sequence
  IPR006119,PTHR30461:SF3,cd00338,PF07508, PS51736,G3DSA:3.40.50.1390,SM00857,IPR038109, IPR011109,PTHR30461,G3DSA:1.10.10.2600,SSF53041, PS51737,PF00239,IPR036162
MSTDHQRYSTENQSEAIRDYARARGIEIVRTYADSGKSGLKIEGRDALRQLIEDVQIGTTDFTMVLVYDVSRWGRFQDADESAYYEYICRRAGISVQYCAEQFENDGSPVSTIVKGVKRAMAGEYSRELSAKVFAGQGRLIEKGYRQGGPAGFGLRRTLIDERGQVKGILQRGEHKSIQTDRVILTLGPVEEVELVREIYRRFVHHGESESEIATDLNKRGIKSDLGRNWTRGTVHQILINEKYAGDNVWNRQSFKLKKRHVRNDPDMWVRANGVFDAVIERFLFEAARTVINARSFRLSDEEMLQSLRDLYQRTGSLSGIVIDECDGMPSSSAYSSRFGSLLRAYSLVGFNPDRDYSYVEINRELRKLHPEVLEQVIGALKSSGSEAWQDSETDRVTVNEEFTLSIVIARCAQTPTGLLRWNLRFDTSLAPDITVVVRMDSANQKPFDYYLFPRLDLLAERLRMAEDNALQLDAYRFDDLAILYQIAAPVNLSEAA

SEQ ID NO: 12602 - protein, 497 aa, Unknown
  Description of Unknown: Integrase A1170 sequence
  IPR006119,PTHR30461:SF3,PF00239,cd00338,PF07508, PS51736,G3DSA:3.40.50.1390,IPR038109,SM00857,IPR036162, PTHR30461,G3DSA:1.10.10.2600,PS51737,SSF53041,IPR011109
MSTDHQRYSTENQSEAIRDYARARGIEIVRTYADSGKSGLKIEGRDALRQLIEDVQIGTTDFTMVLVYDVSRWGRFQDADESAYYEYICRRAGISVQYCAEQFENDGSPVSTIVKGVKRAMAGEYSRELSTKVFAGQGRLIEKGYRQGGPAGFGLRRTLIDERGQTKGILHRGEHKSIQTDRVILTLGPSEEVELVREIYRRFVHHGESENQIAADLNNRGIKSDLGRNWTRGTIHQILINEKYAGDNVWNRRSFKLKKKHVRNDPDMWIRADGVFDAVIERALFEAARTIINARSFRLSDEEMLRSLRDLYRQRGSLSGIVIDECDGMPSSSAYSSRFGSLLRAYSLVGFDPDRDYRYVEINRELRKLHPAVLDEVMGALKSSGSEAWQDNDTDHVTVNEEFTLSIVIARCFQTPTGLLRWNLRFDTSLAPDITIVVRMDSANQKPFDYYLFPRLDLLADRLRIAEDNALQLDAYRFDDLAILYQIAAPVNLSEAA

SEQ ID NO: 12603 - protein, 497 aa, Unknown
  Description of Unknown: Integrase A1171 sequence
  IPR006119,PTHR30461:SF3,cd03768,PF07508, PS51736,G3DSA:3.40.50.1390,SM00857,IPR038109, IPR011109,IPR025827,PF13408,PTHR30461, G3DSA:1.10.10.2600,SSF53041,PS51737,PF00239,IPR036162
MPNASLRAATYRRVSTEEQVSNHSLGNQADKLAAFAEQQGYAVVRDYVDPGHSGATRKRPGLEQLLHDARLGLFDTVLIYRLDRLARSTHLAYSVIQELMDVGVGVRSSSEPQIDSTTPMGKVSLGVTAIFAELERDTFMQRSQEGREKSLAAGIYNGGSVSYGYEIKDRRLVIQPQEAEVVRMIFQWYLEHRWATVRIAEELTALNIPTRFRGDGRLFRGKETLGCWRGGSIYRMLKSRTYIGEFQYGRRTASGKKDPDRVIKVAVPPIVDLEVWEAAQEMMVTNRVTALRNAKNIYMLKGLIRCAACGRSYLGAKTNGWAGYRCCGRVVPGAGPRHLACKNTHVPARMVEDPVWERITAILLDPGEVLGQQPLTLIPAELPLVEKALADARTSRERLTDLYLDANAGLSKEGYLSRLAGIDAQLAGLEARVLVLRDTQAQRRQQEQSEKRIYDLSAQYRDRLEHADDQLRQTLAHQLVKRITVQTDGSVDIEWVV

SEQ ID NO: 12604 - protein, 497 aa, Unknown
  Description of Unknown: Integrase A1172 sequence
  IPR006119,PTHR30461:SF3,cd00338,PF07508,G3DSA:3.40.50.1390, IPR038109,SM00857,IPR036162,PTHR30461,G3DSA:1.10.10.2600, SSF53041,PS51737,PF00239,IPR011109
MSTEHQQYSTLNQSDKIREYAERRGILIVRTYADEGRSGLRIDGRLGLQQLIHDVQSGTADFSVVLVYDVSRWGRFQDADESAYYEYICRRAGIQVAYCAEQFENDGSPVSTIVKGVKRAMAGEYSRELSVKVFAGQCRQVELGFRQGGAAGYGLRRLLIDQSGSVKFQLGRGEHKSLQTDRVVLTPGPQAEVDMVLQVYRWFVDDDMSEATIAVKLNTAGISTPTGREWSRAAVHEILTNEKYIGNNVYNRTSFKLKKVHVFNTPDMWIRKDGAFEGIVPRDLFFTVQGIIRARARRFSDEELIERLRRLFERRGFLSGLVINETDDMPSSSVYALRFGSLLRAYQLVGFTPGRDYRYLEINRYLRQLHPRIVAETAAQVAALGGQIVVDPATDLLDVNQEFRASIVLSRCRSNEFGRRHWRVRLDTSLRPDITVVVRLQPENKVALDYYLLPHLQFGASALSLAEQNAIELESFRFDSLDYFYGMAERFRLRRAA

SEQ ID NO: 12605 - protein, 497 aa, Unknown
  Description of Unknown: Integrase A1173 sequence
  IPR006119,PTHR30461:SF3,PF00239,cd00338, PF07508,G3DSA:3.40.50.1390,SM00857,IPR038109, IPR036162,PTHR30461,G3DSA:1.10.10.2600,PS51737, SSF53041,IPR011109
MSTEHQRYSTENQADAIRDYAARYNCAIVRTYADEGKSGLNIDGRAGLQKLIADVTGGHADFEIVLVYDISRWGRFQDADESAYYEYLCRRAGVRVEYCAEPFDNDGSLGSDIQKMLKRKMAGEYSRELSVKVFAGQCRLIEKGFRQGGPAGFGLRRQLVDEAGRSKALLARLEHKSIQTDRVVLVPGPSDEIEVVRHIYQSFVEDGRNEGEIAIMLNAEGIRTDLGRDWTRGTVHQVLINEKYIGNNVWNRGTAALKRKRTRNEPSMLIRAEGAFPAIVDRLLFDAAQAIIRGRSARLSDADMLDVLRRLLAEHGYLSGLMIDEAADCPSSSAYRSRFGSLLRTYSLVGYAPDRDFAYVESNRRLRQRNPQVVDEVLAALRAAGASVVLDPETAILTINEEVTAALLLCRCTQTAAGSLRWLIRLDGPVPPDITIAVRMEPGEEAVRDYYLLPSLDGRAARLRLAERNEAGLDTFRFATLEALYELMRRIPLAEVA

SEQ ID NO: 12606 - protein, 495 aa, Unknown
  Description of Unknown: Integrase A1174 sequence
  IPR006119,PTHR30461:SF3,cd00338,PF07508,PS51736, G3DSA:3.40.50.1390,SM00857,IPR011109,PTHR30461,SSF53041, PS51737,PF00239,IPR036162
MRAAGYVRMSSDRQELSIGTQLAAIHGYAQANHIEVVRVYEDAAKSGLQISNREGMKRLLRDVMDEPRPFDLVLVYDVSRWGRFQDIDAAAYYEYTCRLHGAKVIYVQEVFGSDDEPMTALLKTLKRAMAAEYARELGVKTRAGQDRAVHLGYQMGPLPCIGLTRMAVDRVGKRRPLARGQSKASQGERIAWGPGPPAEVALTRKIFSMYADTNATIRGVARQLRAVGTTAQDGRLFTESMVDRLLRCEALAGNFVWGSERYIGGLSRKKRPVTRADNVIEPVVPADLWMRVQAKLWARRRLRRDKEQLLQVLRERLTEHPELNALDLDALGLHSKKAYTNAFGSVSRALELAGRDSGAVRALHERRKLVGRKVGDRMTSDIAGLLQEIGMDCRVHPRSRVLVIGGTVKLRLQLLWPRTYRGVQRWHVLKSRRPVAHLVLLAQMDDGGSATRFVLLNPKEYRETAPWLDEELPPYLEPIATGVELIQALRVRLAQ

SEQ ID NO: 12607 - protein, 494 aa, Unknown
  Description of Unknown: Integrase A1175 sequence
  IPR006119,PTHR30461:SF3,cd00338,PS51736, G3DSA:3.40.50.1390,SM00857,IPR025827,PF13408, PTHR30461,SSF53041,PF00239,IPR036162
MIAAVYIRKSREDKNKPSHRLTVQREQLPAYALAQGWQVEIYDDGHASAARGKVEELHERARLESDVRSGKINLILVIELSRLSRDDSLQDYVSWLYLCSQHGVKLATPSRQLDPSQHSDWMLLLMEGGFSSVEMKVLQARMAEGRAEAYRAGKWLSGNPPMPYKYDRGAGGLIVDPDQMPTFRKMMRLAELYPASQVADRVGIPSVTVRRAISDDRLLMYQGARRDPDSGATIDGQWPAVIDHLQAERIRRNRGSRRKAPRRQYAAMLSNLDILTCGYCGHSYRAWKNGRTRVDGTRLDYYGCRHKDKSDACQSRMIPTHILEERVLTNLFGLLSKAAELQRAWEARQDSDDTPGKLADIDREIEKCHTKKQRLVEAVADGLLSPADVRQKRNEIDNTIGTLNQKRAGLLSAQAIAPDWDALKITRQAFDHLYQAEQREVIASLIAQIRIFPTYALITYRFPRNENGDNIARIHLPERQKPAGPRQVYKVKKQ

SEQ ID NO: 12608 - protein, 487 aa, Unknown
  Description of Unknown: Integrase A1176 sequence
  IPR006119,PTHR30461:SF3,PF00239,cd00338,PF07508, PS51736,G3DSA:3.40.50.1390,SM00857,IPR038109,IPR011109, PS51737,IPR025827,PF13408,PTHR30461,G3DSA:1.10.10.2600, Coil,SSF53041,IPR036162
MTRVALYARYSSDNQREASIEDQLRICREQAKREKWKIVGTYKDAGISGASMILRPGIQALLQDAQAGQFDIVLAEALDRISRDQADVATFYKHLKFAGVPIVTLSEGEISELHVGLKGTMNALFLKDLAAKTHRGIRGRVEDGKSGGGLCFGYNVVKQLDARGDPIRGDREINEAEANIVRRIFREFAAGVGPRTIARTLNEEGVPGPAGKLWSDTTIRGHVKRGTGLVNNELYIGRLIWNRLRYIKDPSTGKRVSRLNPESDWIIKDVPELRIVDDELWHSVRVRQGEIAEKFANVTEAVRKHHKKNRLNGTRRPKSLLSGLVFCGCCGGPYSLRGADRFACSNHISKGACSNSRTIPRECLEARVLSGLKDRMMAPEIVEEAMRAYAEETNRLNRERRSSGDSWKAELVKIEKQIRGIIEAIKAGMFHESMKAEMDTLEARKTELNTLLADAPEDTPDILPSASAIYAKKVSALTKALNRKEER

SEQ ID NO: 12609 - protein, 485 aa, Unknown
  Description of Unknown: Integrase A1177 sequence
  IPR006119,cd00338,PF07508,PS51736,G3DSA:3.40.50.1390, SM00857,IPR011109,PTHR30461,PS00397,SSF53041, PF00239,IPR006118,IPR036162
MKLKPIIGYARVSTEEQANTHALEQQISRLINTGVQKVYFDIESGREQDRDQFKKVLELVIRQEISELRAIRWDRLARNAYLYLEVKKIFKISGVKLILLDQGEVDFNTASGELHSDLQVLFSVHESRMLQERVNRGLDYRRSRNAAWMQPPWSYLIVNEKYELDHTPLPYCFLIHKPDNAAELSHEPDDSPKLVRISRAKIAREVFEYFLLVRKPTKVLKHLHEVYGLQKNSEDNLPEFKNFPISIWGLKYWLQNPVFQGHTAYHKLKSNGSLKSPDDWDIRRDTHPEQRLINEEEAQEIKAIFASNTKRFGQVDAKFYLTGHIFCEKCRAKCNLKQNRDYAYYGCPHSATVCDNRPNVRLFKIEQAIIAQLVLRSKQVSESPSNTTKSERLVELERQYFELDQIAGSDFNPALKEAKEKLLKAIEAEPTPTQDIAQQILRHPMAKKINFWYTLTQTEREIFYDLLLARVVIGKGEVTSVLLKV

SEQ ID NO: 12610 - protein, 484 aa, Unknown
  Description of Unknown: Integrase A1178 sequence
  IPR006119,cd00338,PF07508,PS51736, G3DSA:3.40.50.1390,SM00857,IPR038109,PS51737, IPR036162,PTHR30461,G3DSA:1.10.10.2600,SSF53041, Coil,PF00239,IPR011109
MKTVAYYRSSIDSQENSIEMQQNSVLTRSIDMALIIDEEYIDEAVSARKIGLKKRSALQKLLQDIKNNNVETLFVFKRDRLARNVMEYYEIYQILRNKKINVILTAPNEPPVYYTPIGEYLELIMAGMAQREGEQIIERLKQTLKSNFQSGKNPGRLPYGFKWNKETKEIELIDEQVQIVKRIYQELVSGKYESLKELCSVLGLKENGKFWTSADIRKIALNPTYIGLRTMNIFGEDVTSKYERLSIIDKNTWEKACSIVTVLSPKKTHQDYVFEQVLFPLQDLLICSKCNESLQKVKARRKDNLKYKCLNHSSVYVFKSTIEPLVFERCKEYFHSLLTSHFYELFDRYEQDAKKQVKQKIQTIEEKIKLMNEKLITKVDTWYHETDAPYKEQKEIEIMALYDELAKYKKQKERVIQELSDVKQLREKISNYQSSISLSYDDIKENRQLGSFFQDLIQQVKTDGKNCEIVFKHPFLRTQEVLTS

SEQ ID NO: 12611 - protein, 479 aa, Unknown
  Description of Unknown: Integrase A1179 sequence
  IPR006119,PF00239,cd00338,PF07508,PS51736, G3DSA:3.40.50.1390,SM00857,IPR011109,PTHR30461:SF21,IPR025827, PF13408,PTHR30461,PS51737,SSF53041,IPR036162
MAKAKTPGQRVGVGSAAIYARISADVEGTGLGVARQVQDCRKLAADRGWQVGDEYVDNDVSAYSGKPRREYARMLDDLKSGARDAVIVYNLDRLHRRPVELEEFVALCESVGVRDVATVTADIDLGNDDGLFMARIFAAFAAKESGRKSARIRRKMLQNAEQGLPHGSARPFGYEPDKITVCSKEAKVIREMVARYLAGASIRSLTIWLNDAGLAPAVAKSWQTTAVRQILASGRIAGLREHHGEVIGPAAWPAIITHAERDRILARMTARSVTKTRAPRTYLLSGLLRCGRCGNRLFSQARHNNPQNRVRRYVCLKGPDHGGCGRLTVVALPVEELLTDAVLTRLDSPHLANVLAGKASVDADVAALSAQLEADTTRLDELAALYAQGAVTAREWIAARDPITDRITATRRDIAAATDTTNVTELAGTGHLLRGQWDDLDIDRQQTIIKAVLDHAVIAAGTPGARSLDINRVRPHWGV

SEQ ID NO: 12612 - protein, 477 aa, Unknown
  Description of Unknown: Integrase A1180 sequence
  IPR006119,cd03768,PF00239,PS00398, PS51736,G3DSA:3.40.50.1390,SM00857,IPR036162, PTHR30461,PS00397,mobidb-lite,Coil, SSF53041,IPR006118,PTHR30461:SF2
MSDQRIGYVRVSSVDQNTDRQLDGIPLSRVFTDKASGADTKRPELDRLLAFVREGDTVVVHSLDRLARNLDDLRRLVQRMTLQGVRIEFVKESLTFTGEDSPMANLMLSVMGAFAEFERALLRERQREGIGQAKLRGVYRGRKPSLTEKQIAAEYGDPHRQNRVDLSRHPLHTPTIQSPASPIAVGSISQYAVPQRPQRTPSLSSTRSRTSLIVLFSIRTSPCCSFRIRIRRNRRRGRSPREEIFRRKILGRSWPESPGPLPFSDCGRYAPLSSRFRTSRNRQGPPSLPSSGNPRSSPETRREPPEHLFWKGGKSRKRIPPIRSCSLKLLRVGIMDGAGPSKCRIPKTEKHGPQFTQVGLFPAIPTEKRKPSPGGSCEGQSPDMGQGFPAPVRKIGGVRSTNVFVFVLPSLVSPCEKIFKPIKTGREEARERSDPCSSSFALRAPVPAPFFPGKKMKNSVRLPPPLLFFEGGSYLTL

SEQ ID NO: 12613 - protein, 476 aa, Unknown
  Description of Unknown: Integrase A1181 sequence
  PTHR30461:SF3,G3DSA:3.40.50.1390,SM00857,SSF53041,IPR006118, IPR011109,PF07508,IPR038109,PS00397,G3DSA:1.10.10.2600, IPR036162,cd00338,PS51736,PF13408,IPR006119, IPR025827,PTHR30461,PS51737,PF00239
MTETRCALYARVSSEAQTRDNTIASQVVALQERIAADGFLLEPDHSYVDDGYSGSLLLRPALERLRDAVAGGQVDRLYVHAPDRLARRYAHQALLIDEFRRAGVEIVFLNRPIGGTAEDDLLLQVQGVIAEYERAKILERSRRGRRHAACSGSVSALTGAPFGYRYVSRDQGGGLARFEVVEAEAHIVRLIFAWVGLDRMSLREVCRRLEQIGCRTRTGTTPCYASTIRGILANPAYVGRAAFGRARYLPPRPRLRPIRGHLQPSPHATSRVAVPPEEWIEIPVSSLVDPAVFEAVHAQFEENRKRKRQRTPSSDWLLQGLTVCRRCGYAYYGKRAPRVHKYDPTDTLRYYRCIGTDGHRFSGHRVCDNPQVRGDHLEEAVWDQVKGLLEDPHRVAGEYRRRLLAARDQVREPEEIVRLERQMATLRRGIGRLIDSYAEGIIDKAEFEPRIAGLKQRFSQLQERHQAAVEVAECEL

SEQ ID NO: 12614 - protein, 472 aa, Unknown
  Description of Unknown: Integrase A1182 sequence
  IPR006119,PF00239,cd00338,PF07508,PS51736, G3DSA:3.40.50.1390,SM00857,PTHR30461:SF21,PS51737,IPR036162, PTHR30461,Coil,SSF53041,IPR011109
MTSTIVRVVIYCRISKDRIGAHLGVDRQEFECREMARKRGWTVVAVFADNDLSAYSGKPRPGYRRLLALIEAGEADAVLCWHTDRLHRHGDPMELENYIDLCQPRNIPTYAKQAGTLDLTTAWGRKDARNRAVDARYESEHASERLVEKMTELARDGLFLGGPRPFGFDSDGLTPRPAEIAAIARAIQDVLAGASIGSVARAWNELGLKPPQGAKEWIPASVRSVLMRPRNAGLSVHRRQVVGNATWAPIVSEAQWRALKSMLDDPERRPKGNLSLKWQGSNGYYCGKCDGKATMRSNSVWSPKRKILQPAYRCRAVNHNTIIAEPVDDLVNAVIADLLRRENVSLLPSADPDELRSAQAELTALGNRKKQLAALYGANEIDEQEWSEARASLTGALERAQAKVAELSAGSTLAGIADAPDPGRAFLASTVERRRAVITAVAVVSIMPNNPKGYTREAGKIDPNRVDITPIG

SEQ ID NO: 12615 - protein, 467 aa, Unknown
  Description of Unknown: Integrase A1183 sequence
  PTHR30461:SF3,G3DSA:3.40.50.1390,SM00857,SSF53041, IPR011109,PF07508,IPR038109,PS50157, G3DSA:1.10.10.2600,IPR036162,cd00338,IPR013087, PS51736,PF13408,Coil,IPR006119,IPR025827,PTHR30461,PS51737,PF00239
MKCVIYRRVSTDMQVEEGISLDMQKLRLEQYAKSQDWLVVNDYCDEGYSAKNTERPAFQQMIRDMKKKQFDIILVYRLDRFTRSVSDLHSILKIMDEYNVKFKSSTEIFDTTTATGRMFITLVATLAQWERETTAERVRDSMHKKAELGLRNGAKAPMGYNLKKGNLYINHTEAEIVKYIFEMYKTKGVVSIVKSLNSRGVKTKQGKIFNYDAVRYIINNPIYIGKIRWGEDILTDIAQEDFETFINKDTWYTVQQIQDSRKVGKVRLQNFFVFSNVLKCARCGKHFLGNRQVRSHNRIAVGYRCSSRHHQGICDMPQVPENILEKEFLNLLEDAVVELDASDEKPVELSNLQEQYNRIQDKKARLKFLFIEGDIPKKEYKKDMLTLNQEENIIQKQLANITDTVSSIEIKELLNQLKDEWNNLNNESKKAAVNAIISSITVDIIKPARAGKNPIPPVIKVMDFKLK

SEQ ID NO: 12616 - protein, 463 aa, Unknown
  Description of Unknown: Integrase A1184 sequence
  IPR006119,PTHR30461:SF3,PF00239,cd00338,PF07508, PS51736,G3DSA:3.40.50.1390,IPR038109,SM00857,IPR011109, PS51737,PTHR30461,PS00397,G3DSA:1.10.10.2600,Coil, SSF53041,IPR006118,IPR036162
MKVAIYARVSTDEQAKEGFSIPAQRERLRAFCASQGWEIVQEYIEEGWSAKDLERPQMKQLLKDIKKGNIDIVLVYRLDRLTRSVLDLYLLLQTFEKYNVAFRSATEVYDTSTAMGRLFITLVAALAQWERENLAERVRFGIEQMIDEGKKPGGHSPYGYKFDKDFNCTIIEDEANVVRMIYRMYCDGYGYRSIADRLNELGIKPRIAKEWNHNSIRDILTNDIYIGTYRWGNKVVLNNHPPIVSEALFRKVQKEKNNRSVDRKRVGKFILTGLLHCGNCNGHKMQGSFDKREQKTYYRCLKCNRITHEKNILESLLAEVQQLITSKEYFMSKFSHQFDEPKTIDASALTKELEKIKRQKEKWYDLYMDDNNPIPKEELFAKINELNEKEKEIYETLSECELEEKESIEEKYNRISKMTDFKQQFEQADDFTKKELLFSIFEKIVMYREKGRGKKISLDYTLK

SEQ ID NO: 12617 - protein, 463 aa, Unknown
  Description of Unknown: Integrase A1185 sequence
  IPR006119,PTHR30461:SF3,cd00338,PF07508,PS51736, G3DSA:3.40.50.1390,SM00857,IPR038109,PS51737,IPR036162, PTHR30461,PS00397,G3DSA:1.10.10.2600,SSF53041,Coil, PF00239,IPR006118,IPR011109
MRVAIYVRVSTDEQAKEGFSIPAQRERLRAFCESQGWEIVQEYIEEGWSAKDLNRPQMQRLLKDIKKGNIDIVLVYRLDRLTRSVLDLYLLLQTFEKYNVAFRSATEVYDTSTAMGRLFITLVAALAQWERENLAERVKFGIEQMIDEGKKPGGHSPYGYKFDKDFNCTIIEDEANVVRMIYRMYCDGYGYRSIADRLNELGIKPRIAKEWNHNSVRDILTNDIYIGTYRWGNKVVLNNHPPIISKSLFRKAQKEREKRKVDRTRVGKFLLTGLLYCGNCDGHKMQGSFDKREQKTYYRCLKCNRITNEKNILEPLLDEIQLLITSKEYFMSKFSDQYDQQEAFDVSTLTRELEKIKRQKEKWYDLYMDDHNPIPKEELFSKINELNKKEEEIYSQLNEVEPEENEPIEEKYNRLSKMLDFKKQFEQANFFTKKELLLSIFEKIVIYREKGKFKKITLDYTLK

SEQ ID NO: 12618 - protein, 463 aa, Unknown
  Description of Unknown: Integrase A1186 sequence
  IPR006119,PF00239,cd00338,PF07508,PS51736, G3DSA:3.40.50.1390,SM00857,IPR011109,PTHR30461,PS51737, SSF53041,IPR036162
MTSANAIIYARISKDRTGAGLGVERQAEDCRALAERLGWTVLRVESDNDISAYSGKRRPGYERTLAALESGEASAVIAWHSDRLHRRNTELEPFLDIVERTGAQVATVQSGPVDLASPSGRMTARILGAVAQQEVEHTTARIKAQKAQTAAAGGYRGGMRPFGYERDGMTIREHEAAIIRRAIADVTAGKTISAVRRELNAAEIRTSSGREWSLPGVRNVLTRWRNAGKVEREGEPVADAQWPAIVTVDELLAVRAVLANPARRVSPGNQRRWQGAGVYIDAYTGDPMVCTKSSGTNPTPVYRPAARTAGCASVVAVDLDEYVSAAVCARLGQPDARELLAAPEVDTRGLSGQREALDARLREAASLFSSGAITGAQLTEITADLRAQLDTIDAQLDAATADPELAELLRADDIRAAWDGPNGLHVDTRARLIKSLARVTVHKMTVKGVKRTFKPECVDIEWL

SEQ ID NO: 12619 - protein, 456 aa, Unknown
  Description of Unknown: Integrase A1187 sequence
  IPR006119,PF00239,cd00338,PF07508, PS51736,G3DSA:3.40.50.1390,IPR038109,SM00857, PTHR30461:SF21,Coil,IPR036162,PTHR30461, G3DSA:1.10.10.2600,PS51737,SSF53041,IPR011109
MEAAVYLRQSVDKYGDELAITRQREDCLKLCGARAWIPHEYVDNDRSATKGPRPAYEQMLDDIRTGVIGAVVVWDLDRLHRRPMELEHFIDLADDKHLALASVGGDADLSTDNGRLFARIKGAVSRAEIERKSARQKRAARQRAEAGIWWIGPRPFGYTEAGEVVDTEAGALREAYSAILASASLYSIAAQWNSAGIKTTRGNAWTGRSVKQTLVRPRYAGFRFYRDEILGKADWPAIVPEALWRAVRDILADPSRRAPWTGRKYLLTGLARCGKCGATVTTTTKAQVGRVVYVCKHCYGISRKQAEVDNWVIWRVANALAQPDAWRALLGGTSEDAALLREEQAALRSRLDMLATDFADGVLTRDQLRTATERIRRRLADVESQMFGPDAHRYFGDVIDADDPRVAFRELPLDRKRALIETMATVTIMPIGHGGTKVFDPLMVEILPRNGFVCRP

SEQ ID NO: 12620 - protein, 453 aa, Unknown
  Description of Unknown: Integrase A1188 sequence
  IPR006119,PF00239,cd00338,PF07508,PS51736, G3DSA:3.40.50.1390,SM00857,IPR025827,IPR036162,PF13408, PTHR30461,PS51737,SSF53041,IPR011109
MNSESHQKITSAHLSRMAYLYVRQSTLRQVLENTESTQRQYALRERAAALGWPLEHIVVIDRDLGQSGASAADREGFQQLVSEVSLGHVGIVLGLEVSRLARNSTDWHRLLELCAFADTLILDEDGLYNPGLFNDRLLLGLKGTMSEAELHVLKARLRGGILSRARRGELKQMLPVGFVHDVQDRVILDPDVQVQGAVRLFFETFKRTGSCLAVVKDFHARGLLFPRRLRSGAHKGELVWAELLHCRARQIIHNPRYAGAFVFGRTKQRHLPNGKICSRLVPSEEWILLRDMHPGYISWEEYQSNRQQVQGNALSWSDDRRRSPAREGNALLQGLVICGTCGERMTVRYHLHRGQSVPTYWCGRRPMHRGESGLCQTVHGGTLDTAIGDVVIEAMTPFAIEVALTVQEELVSRHEEADRLRRQHVERARYEADLAQRRFPEGGPGQPVGRRCA

SEQ ID NO: 12621 - protein, 452 aa, Unknown
  Description of Unknown: Integrase A1189 sequence
  IPR006119,PTHR30461:SF3,cd03768,PF00239,PF07508,PS51736,G3DSA:3 .40.50.1390,SM00857,IPR038109,IPR011109,PTHR30461,G3DSA:1.10 .10.2600,PS51737,SSF53041,IPR036162
MSKHVIPKRRCAVYTRKSHEEGLDQDYNSIDAQKDAGHAYITAHRSEGWISVNDNYDDPAYSGGTLERPALKRLMRDIEEDKIDTVVVYKIDRLTRSLHDFSQLVEIFERMNVSFVSVTQEFNTTSSMGRLMLNILLSFAQFEREVTAERIRDKVASSKRKGLWMGGIPPLGYDVKDRLLVVNSNEAKTVRHIFSRFLEIGSATLLVKELRLDGISTKSWTTKDNKYRPGKLIDKGFIYKLFQNRTYLGEIGHKGQWYEGKHDAIIDKTLWEAVHKKLADSYKAKGNNTRAKVPFLLKGLLFDTEGRALTTSFANSRHKNGKRYRYYLSIRDAKEGAGTSDLTRFPASELETAVTTQVMTLLKSSEIVKEVTTIAQVHDDELDEAMVAVALTKMTTLWEQLFPDEQARLIHLMIEKIIITPNAMDLRLRKNGLEQLAQEITPETLKKKVVNG

SEQ ID NO: 12622 - protein, 442 aa, Unknown
  Description of Unknown: Integrase A1190 sequence
  IPR006119,PF00239,cd00338,PF07508,PS51736, G3DSA:3.40.50.1390,IPR038109,SM00857,IPR011109,IPR025827, PTHR30461,PF13408,G3DSA:1.10.10.2600,PS51737,SSF53041, IPR036162
MTRIIRKITPKAPKAPIKKRVAAYARVSSGKDAMLQSLSAQISYYSEFIQKRYDWEYAGVYADEAATGTKDNRKEFQRLLSDCRSGKIDMVITKSISRFARNTLTVLETVRELKGISVDVYFEKENIHSISGDGELMLTILSSFAQAESLSVSENCKWRIRKRFAEGELVNLRFMYGYRIEKGRVEVNQKQAKIVRMIFNDYISGLGCTAIANKLRRMGIQSLRGGIWNSDIVAQIIKNEKYIGNALLQKKHVSNHLTKKLIANKGVLPKYYAEGTHPPIIDAATFQLAREIMAKNWILNEGKKAAGTYPFTSKIKCGKCGKNYKRKTTHGQAFWNCSTHIKYGKEVCHTKRIPESILCLVAANALGIEEFDEVTFNRQIEEIQIPDANLLLFVFNDGRTDLREWQSKSRSESWNEEAREKARMRQIEYLEGRKGECVRHVQ

SEQ ID NO: 12623 - protein, 437 aa, Unknown
  Description of Unknown: Integrase A1191 sequence
  IPR006119,PTHR30461:SF3,cd00338,PF07508,PS51736, G3DSA:3.40.50.1390,IPR038109,SM00857,IPR011109,IPR025827, PTHR30461,PF13408,G3DSA:1.10.10.2600,SSF53041,PS51737, PF00239,IPR036162
MKEKKITKIEALSKLPKKTRVAAYARVSNGKDAMLHSLSAQINYYKKMIQDNNDWQFVGVYADEALTGTKDSRQEFQQLLEDSKAGKIDMIITKSISRFARNTMTLLETVRELDKLNVDVFFEEQNIHSISSEGEMVLTLLASVAQEESRSVSENMKWRIKKEFEQGEIWGGRSPLGYSLKNKTFRVIPKEAEVVQLIYKLYVDGNGAEAICQILDAKGIKPKESKKWGPTSIIKILSNRNYTGDLLLQKTYLNNHLSKKQVINKGELDRYLVKGNHEAIISNELFDKVQKLKHQRAIKNKSNLPKKKTFLHGLIQCGICGSTYTPKKMRKKDIWICSKSASKGQDVCDSKLVPHNIIVEASNHILEMDQNNEDTFKSKVTKIIVQENRMLEFHMKDGKILNYRWKHKSRSKSWTPEMKEQARLRALEQHHGGGENA

SEQ ID NO: 12624 - protein, 435 aa, Unknown
  Description of Unknown: Integrase A1192 sequence
  mobidb-lite,cd00569,PF02796,IPR010921,IPR009057, SSF46689,IPR006120,Coil,SSF48295
MTGTAELVIFVTDATGFAMQVYGYKHEKVLTKLLNEALFHYMRNPGWIKVIVKKHRYYACQLVTIPLLAYIKKRVPDKRLQVEAERVMANIAVNYEEKVPETWIMVNENFFTPIPSPEENKFLSQKLNNSLSKMDFIEPEQEKEALGKKKSVKPVKVKSPATSKRKGSPDADKVIERVQLGWRVRDICEEQGCSEAYVYKLIKKRNGCSAMDYRWKQWELISFMYHAEPKVTLEEIEKTCGVTRAAIYHALRKVAERDGKKNEYRERPKKLSAEDVENIKQKLENGALRKEICKEYGITRETLIRYIGRRENYRVIPEELKEAAIRLRIQGKTLQQTADILSVNLHWVKKVWREKKHSPTVIEKRLKYDNRNALTKRDREQAVNAVLKGGHTRNQIYTQYGINALTLRRYIRAAQKREAEALSRKAEDSDKNDDS

SEQ ID NO: 12625 - protein, 432 aa, Unknown
  Description of Unknown: Integrase A1193 sequence
  PTHR30461:SF3,cd03768,G3DSA:3.40.50.1390,SM00857,IPR009057, SSF46689,SSF53041,IPR006118,cd00569,PF02796, IPR006120,IPR036162,PS51736,G3DSA:1.10.10.60, mobidb-lite,IPR006119,PS00398,PTHR30461,PF00239
MLIGYGRVSTADQNPAHQIDALRRAGVEPGDIHIDTASGAKASRPKLDLVLTLARRGDTIVITRLDRLGRSMLHLVNLGADLRARGIGLKVLEQGIDTDTAEGRAMFGMLSVLAEFQRELIVANTRDGLEAARARGRTGGRRPKLTVHQIEQAQRLYDEGRHTVQQIADILGVKRGTLYGHLDKNSIGTRPHSGPATPLPTTSAPAAVVVDQADPAPGIAPAITETATATPQTLGVPAGDPTDGRPGSPGGSSAVVTEAAPTGLVDLGGLVPEPDPIRPLPAADADEHAETNSSTREFARERPNLAWRLKQTARMNLPEPPAVCPNDACGYTAHETSERGRLLEDIKVVWLEPADDGGLIEARHCHRCRPREVPIADIECAACDCGGPLLTGVYATELRDTGEIPALVRRWLSVRRWRVTDAGPVCPDHPDS

SEQ ID NO: 12626 - protein, 432 aa, Unknown; identical to SEQ ID NO: 12625
  Description of Unknown: Integrase A1194 sequence
  PTHR30461:SF3,cd03768,G3DSA:3.40.50.1390,SM00857,IPR009057, SSF46689,SSF53041,IPR006118,cd00569,PF02796, IPR006120,IPR036162,PS51736,G3DSA:1.10.10.60,mobidb-lite, IPR006119,PS00398,PTHR30461,PF00239

SEQ ID NO: 12627 - protein, 416 aa, Unknown
  Description of Unknown: Integrase A1195 sequence
  IPR006119,PTHR30461:SF3,PF00239,cd00338,PF07508, PS51736,G3DSA:3.40.50.1390,SM00857,IPR038109,IPR011109, IPR025827,PF13408,PTHR30461,G3DSA:1.10.10.2600,PS51737, SSF53041,IPR036162
MAQVSVVTPVRPPTPKLVNVAAYTRVSTNAVEQLASLSAQVSYYSRLIQSTPGWAYAGVFTDEGVTGTSMKSRQGLADLMNTARAGKIDLVLCKSISRLARNTVDLLATVRELKDLGVAVRFERERIDTLSADGELLLTLLASFAQEESRSLSQNVKWAIRNRYKNGGTNSFVVYGYSWADGQFTIIEDEAKIVRLLFANYLDGISPEKTAAILNGQGARSRGGGRFYGSVFRRMLENERYKGCQMLQKMYRPTIQAPTCALNDGELPRYWVEQALPPIIDEEMFDAVQAEIAHRREIGPAATPSKNTGVFTGRICCGACGKNYQRKTRTYKSGTSYKFWRCWSACTGNGNPCRGHNLRETLLEQACADMLGTQSFDPVQVGEQIVMIEAFPHQLTFHLADGTMTPVGLTSEGRLA

SEQ ID NO: 12628 - protein, 408 aa, Unknown
  Description of Unknown: Integrase A1196 sequence
  PTHR30461:SF3,cd03768,G3DSA:3.40.50.1390,SM00857,IPR009057, SSF46689,SSF53041,IPR006118,cd00569,PF02796, PS00397,IPR006120,IPR036162,PS51736,G3DSA:1.10.10.60, IPR006119,PS00398,PTHR30461,PF00239
MFVPLLGYARVSTSDQSLTGQIDALRAAGCERVWTDVASGARARRPGLDELVAAVVAGDTVVVTRLDRLGRSLPHLLGLVENLAAAGVGLRSLAEEIDTSSATGRLVLHVFGALAEFERGINHERTMGGLAAARARGRIGGRPPALRGRRLAHARELAAAGMPVAEIADTLLVGRSTVYRALNGSREQDGEEMTSSPIDRVWSVRDAVLKWLYLKAMVDGNRHPVLKADDIANAVEWQGDSLTQQEVAEASEWLRDQEYISGTASWGHGVVRPSITAKGEALADAGKSVRGGNAPADPQGATTIHISNSANVAIGSPGATQTYTVAEQIKRALAVADALEAAADGPPEAVEHAHQIAVEIKREAAEPQPNPSRLKQLLLYAITAGVGALGQTAATDLVHLASQALQTF

SEQ ID NO: 12629 - protein, 408 aa, Unknown; identical to SEQ ID NO: 12628
  Description of Unknown: Integrase A1197 sequence
  PTHR30461:SF3,cd03768,G3DSA:3.40.50.1390,SM00857,IPR009057, SSF46689,SSF53041,IPR006118,cd00569,PF02796, PS00397,IPR006120,IPR036162,PS51736,G3DSA:1.10.10.60, IPR006119,PS00398,PTHR30461,PF00239

SEQ ID NO: 12630 - protein, 402 aa, Unknown
  Description of Unknown: Integrase A1198 sequence
  cd03768,G3DSA:3.40.50.1390,SM00857,IPR009057,SSF46689, SSF53041,IPR006118,cd00569,PF02796,PS00397, IPR006120,PTHR30461:SF2,IPR036162,PS51736,G3DSA:1.10.10.60, mobidb-lite,IPR006119,PS00398,PTHR30461,PF00239
MTRYGTLLGLHGQPTDRVIIVRTGPKTTRVKFPWPDKPGFNPDEVRVGTDTVLDDGGVLWEKYQRTPHAATWLSYSGDPQGLLHVHRVYKNVIKASLYEGNGSWSRVEDFHPDAVRFDAGEGWPKARTDELVTNTSHQPASVATPTTPAPPVKKGPVFHAPTTDPTPAPQPAARSPQQSSVATPPTPTSKPHKTNPIKAIQTAQTPAPPAPKATASGQRVGYLRVSSTDQNLARQREALGVLDREFVDELSARSRAHRPALEECMAYLRTGDELVVASIDRLARSLVDLRTIIDQVTAKGASVRFLKEGLVFSATDQDPRATLMLGILGSFAEFERSIIRERQAEGIALAKKAGKYTGRKRALSPEQVEHARMRVEAGETKTAIAQGLGVGRATLYRALSVD

SEQ ID NO: 12631 - protein, 402 aa, Unknown; identical to SEQ ID NO: 12630
  Description of Unknown: Integrase A1199 sequence
  cd03768,G3DSA:3.40.50.1390,SM00857,IPR009057,SSF46689, SSF53041,IPR006118,cd00569,PF02796,PS00397, IPR006120,PTHR30461:SF2,IPR036162,PS51736,G3DSA:1.10.10.60, mobidb-lite,IPR006119,PS00398,PTHR30461,PF00239

SEQ ID NO: 12632 - protein, 481 aa, Unknown; identical to SEQ ID NO: 11787
  Description of Unknown: Integrase A1200 sequence
  SSF53041,PF13408,PS51737,PF00239,G3DSA:1.10.10.2600, cd00338,PTHR30461,G3DSA:3.40.50.1390,PF07508,SM00857, PS51736

SEQ ID NO: 12633 - protein, 707 aa, Unknown
  Description of Unknown: Integrase A1201 sequence
  cd03770,PF14287,PTHR30461:SF3,SSF53041, SM00857,PF13408,PS51737,PF00239, PTHR30461,G3DSA:3.40.50.1390,PF07508,G3DSA:1.10.10.2600, PS51736
MSRTSRITALYERLSRDDDLTGESNSITNQKKYLEDYARRNGFENIRHFTDDGFSGVNFNRPGFQSLIKEVEAGNVETLIVKDMSRLGRNYLQVGFYTEVLFPQKNVRFLAINNSIDSNNASDNDFAPFLNIMNEWYAKDTSNKIKAIFDARMKDGKRCSGSIPYGYNRLPSDKQTLVVDPVASEVVKRIFTLANDGKSTRAIAEILTEEKVLTPAAYAKEYHPEQYNGNKFTNPYLWAMSTIRNILGRQEYLGHTVLRKSVSTNFKLHKRKSTDEEEQYVFPNTHEPIISQELWDSVQKRRSRVNRASAWGTHSNRLSGYLYCADCGRRMTLQTHYSKKDGSVQYSYRCGGYASRVNSCTSHSISTDNVEALILSSVKRFSRFVLNDEQAFALELQSLWNEKQEEKPKHNQSELQRCQKRYDELSTLVRGLYENLMSGLLPERQYKQLMKQYDDEQAELETKMETMKTELAEEKVSSVDIKHFISLIRKCKNPTEISDTMFNELVDKIVVYEAEGVGKARTQKVDIYFNYVGQVDIAYTEEELAEIETQKEQEEQQRLARQRKREKAYREKRKAQKIAENGGEIVKTKVCPHCNKEFIPTSNRQVFCSKECCYQARQDKKKTDREAERGNHYYRQRVCAVCGNSYWPTHSQQKFCSEECQRVNHNKKTLEFYHHKKEKEKLQCKDLSQTKERVSDMNLSGTITTPA

SEQ ID NO: 12634 - protein, 533 aa, Unknown
  Description of Unknown: Integrase A1202 sequence
  PF14287,SSF53041,PTHR30461:SF3,SM00857,PF13408, PS51737,PF00239,PTHR30461,PF07508,G3DSA:3.40.50.1390, cd03770,G3DSA:1.10.10.2600,PS51736
MLKQQANNKEKVALYSRLSRDDGLDKESNSIANQREMLKRYAKENKFYVYDEYIDDGFSGTTFNRPALNRMFEDIEAGKVNVVLVKDMSRLGRNNALFMYYVEEVFPDLDVRFIAINDMVDTAQDDNEIMPFKSVLNEYYARDISKKIRSSIRTTALTGGFTGAFAPYGYLVDPENKKKLIVDPETAPIVKRIFELSQQGTSTHQIARILCKDGILVPRAYRAKKKGILEQSKGFTFPTDWVGKNVKMILENQVYLGHMVSHKSQTKSFKNKKIVPVPKEDWIVVENTHEAIIDKETFEIVQKFISVKKQPNKTGKPNIFVGLVKCPDCGRNLAYSNPNGNEPRFRCRTYARNTELCTTHAISYKALYEIVQNDIKNHVNSMEELGDHFIKEMRELSETSGSQKIHQFNQELVSLEKRIDEIDSIFTKLIEQNALGKITDERFSKMSMNYETEQAEVVQSYRELKSKIKSEEEKVQGTDRFLETISKYKDVTELNRSMLCELIDSIYVYQAEGIGKERTQKVEINYRFLAVSH

SEQ ID NO: 12635 - protein, 411 aa, Unknown; identical to SEQ ID NO: 11976
  Description of Unknown: Integrase A1203 sequence
  PTHR30461:SF3,SSF53041,PF13408,PS51737, PF00239,G3DSA:1.10.10.2600,PTHR30461,cd00338, G3DSA:3.40.50.1390,PF07508,SM00857,PS51736

SEQ ID NO: 12636 - protein, 513 aa, Unknown
  Description of Unknown: Integrase A1204 sequence
  PTHR30461:SF3,SSF53041,SM00857,PS51737,PF00239, PTHR30461,cd00338,G3DSA:3.40.50.1390,PF07508,G3DSA:1.10.10.2600, PS51736
MKYLALHENSRIAVYSRKSREDRDSEDTLAKHRNELEYLIKRENFKNVQWFEKVVSGETIDERPMFSLLLPRIENGEFDAVCAVAMDRLSRGSQIDSGRILEAFKQSGTLFITPKKTYDLSIEGDEMLSEFESIIARSEYRAIKRRTINGKKNATREGRLHSGSVPYGYKWDKNLKAAVVVEEKKKIYRMMIKWFLEEEYSCTVIAEMLNELKVPSPSGRSIWYGEVVSEILSNDFHRGYVWFGKYKKSKSNNSIVQNKNLDEVLIAKGHHETMKTDEEHALILNRIEKLRTYKVAGRRLNMNTHRLSGIVRCPYCHKAQAIEQPKGRRKHVRKCLRKSAERTKECEETKGIHEEVLFQSIMKEIKKYNESLFSPTEQDVNDDSYTAQLIGLREKAVKKAKGRIERIKEMYLDGDISKTEYKEKLKISQETLQKAENELAELIASTEFQNALSAETKKEKWSHHKVQEMIESTDGMSNSEINLILKMLISHVTYTVEDLGDGTKNLNIKVYYN

SEQ ID NO: 12637 - protein, 512 aa, Unknown; identical to SEQ ID NO: 11588
  Description of Unknown: Integrase A1205 sequence
  SSF53041,SM00857,PS51737,PF00239,PTHR30461, cd00338,G3DSA:3.40.50.1390,PF07508,G3DSA:1.10.10.2600 ,PS51736

SEQ ID NO: 12638 - protein, 592 aa, Unknown
  Description of Unknown: Integrase A1206 sequence
  SSF53041,PTHR30461:SF3,PF13408,PS51737,PF00239, G3DSA:1.10.10.2600,cd00338,PTHR30461,G3DSA:3.40.50.1390,PF07508, SM00857,PS51736
MKITLLYYIKKFNIYCNRYLSQQINISVDIIGFYQFKNVTNSVTDVLKRGDNLDRICIYLRKSRADEELEKTIGVGETLSKHRKALLKFAKEKKLNIMEIKEEIVSADSIFFRPKMIELLKEVENNQYTGVLVMDIQRLGRGDTEDQGIIARIFKESHTKIITPMKTYDLDDDLDEDYFEFESFMGRKEYKMIKKRMQGGRVRSVEDGNYIATNPPFGYDIHWINKSRTLKFNSKESEIVKLIFKLYTEGNGAGTISNYLNSLGYKTKFGNNFSNSSIIFILKNPVYIGKITWKKKDIRKSKDPHKVKDTRTRDKSEWIIADGKHEPIIDEKIWNKAQEILNNKYHIPYKIANGPANPLAGVVICSKCNSKMVMRKYGKKLPHLICNNKECNNKSARFDYIEKAVLEGLDEYLKNYKVNVKANNKTSDIEPYEQQSNALNKELILLNEQKLKLFDFLEREIYTEEIFLERSKNLDERINTTTLAINKIKKILDNEKKKNNKNDIVKFEKILEGYKKTNDIQKKNELMKSLVFKIEYKKEQHQRNDGLLYIYFLSFCVRCISYLTQFISFFVYPYRILEIYLTFSFFIISYEH

SEQ ID NO: 12639 - protein, 540 aa, Unknown
  Description of Unknown: Integrase A1207 sequence
  PTHR30461:SF3,SSF53041,SM00857,PF13408, PS51737,PF00239,PTHR30461,cd00338, G3DSA:3.40.50.1390,PF07508,G3DSA:1.10.10.2600,PS51736
MKAIAIYARKSLFTGKGDSIGAQVDTCKRFIDYKFANEDYEIRTFKDEGWSGKTTDRPDFTNMVNLIKSKKIDYVITYKLDRIGRTARDLHNFLYELDNLGIVYLSATEPYDTTTSAGRFMISILAAMAQMERERLAERVKSGMIQIAKKGRWLGGQCPLGFDSKREIYIDDMGKERQMMRLTPNKEEIKIVKLIYDKYLEMGSMSQVRKYCLENSIRGKNGGDFSTNTLKQLLTSPIYVKSSDNIFKYLESQNINVFGTPNGNGMLTFNKTKEIRIERDKSEWIAAVGKHKGIIDDNKWLQIQQQLQQQSEKQIKSSGRQGTTSTGLLSGIIKCSKCGNNLLIKTGHKSKKNPGTTYSYYVCGKKDNSYGHKCDNKNVRTDEADSAVITQLKLYNKELLIKNLKEALIQNEKTDTDNIEILESKLKEKEKAVSNLVKKLSLIDDESISNIILNEVTNINKEINDIKLQLSNETLKINEVTKATLDTEIYIKILENFNKKIDDITDPIEKMNLLKSALESVEWNGDSGEFKINLIGSKKK

SEQ ID NO: 12640 - protein, 452 aa, Unknown; identical to SEQ ID NO: 11908
  Description of Unknown: Integrase A1208 sequence
  SSF53041,PTHR30461:SF3,PS00397,SM00857,PF13408, PS51737,PF00239,cd00338,PTHR30461,G3DSA:3.40.50.1390, PF07508,G3DSA:1.10.10.2600,PS51736

SEQ ID NO: 12641 - protein, 447 aa, Unknown
  Description of Unknown: Integrase A1209 sequence
  PTHR30461:SF3,SSF53041,SM00857,PF13408, PS51737,PF00239,G3DSA:1.10.10.2600,cd00338, PTHR30461,G3DSA:3.40.50.1390,PS00397,PS51736
MLRCAIYIRVSTEEQAMHGLSMDAQKADLTDYAKKHNYEIIDYYVDSGKTARKRLSKRKDLQRMIEDVKLNKIDIIIFTKLDRWFRNVRDYYKIQEVLEDHNVDWKTIFENYDTSTANGRLHINIMLSVAQDEADRTSERIKRVFENKLKNNEPTSGSLPIGYKIKEKSIIIDEEKAPIAKDVFDFYYYHQSQTKVFKEILNKYNLSLCEKTIRRMLENKLYIGIYREHENFCPPLIDKNKFDEVQLILKRRNIKYIPTKRIFLFTSLLICKECRHKMIGNAQIRNTKAGKIEYILYRCNQSYARHTCNHRKVIYENKIETYLLNNIESELKKFIYDYELEDIPKVKNKVNKTNIKRKLEKLKELYINDLIDIDMYKEDYKKYTEILNTKEEKIEQRNLQPLKDFLNSDFKSLYSSISREEKRLLWRGIISEIQIDCNNDITIIPHP

SEQ ID NO: 12642 - protein, 500 aa, Unknown
  Description of Unknown: Integrase A1210 sequence
  PTHR30461:SF3,SSF53041,PS00397,SM00857,PF13408, PS51737,PF00239,cd00338,PTHR30461,G3DSA:3.40.50.1390, PF07508,G3DSA:1.10.10.2600,PS51736
MIAIYVRVSTEEQAIKGSSIDSQIEACIKKAGTKDVLKYADEGFSGELLERPALNRLREDASKGLISQVICYDPDRLSRKLMNQLIIDDELRKRNIPLIFVNGEYANSPEGQLFFAMRGAISEFEKAKIKERTSSGRLQKMKKGMIIKDSKLYGYKFVKEKRTLEILEEEAKIIRMIFNYFTDHKSPFFGRVNGIALHLTQMGVKTKKGAKVWHRQVVRQILMNSSYKGEHRQYKYDTEGSYVSKQAGNKSIIKIRPEEEQITVTIPAIVPAEQWDYAQELLGQSKRKHLSISPHNYLLSGLVRCGKCGNTMTGKKRKSHGKDYYVYTCRKNYSGAKDRGCGKEMSENKLNRHVWGEIFKFITNPQKYVSFKEAEQSNHLSDELELIEKEIEKTKKGRKRLLTLISLSDDDDLDIDEIKAQIIELQKKQNQLTEKCNRIQSKMKVLDDTSSSENALKRAIDYFQSIGADNLTLEDKKTIVNFIVKEVTIVDSDTIYIETY

SEQ ID NO: 12643 - protein, 460 aa, Unknown
  Description of Unknown: Integrase A1211 sequence
  SSF53041,PTHR30461:SF3,PS51737,PF00239, G3DSA:1.10.10.2600,PTHR30461,G3DSA:3.40.50.1390,PF07508, cd03768,SM00857,PS51736
MKVAIYTRVSSAEQANEGYSIHEQKKKLISYCEIHDWNEYKVFTDAGISGGSMKRPALQKLMKHLSSFDLVLVYKLDRLTRNVRDLLDMLEEFEQYNVSFKSATEVFDTTSAIGKLFITMVGAMAEWERETIRERSLFGSRAAVREGNYIREAPFCYDNIEGKLHPNEYAKVIDLIVSMFKKGISANEIARRLNSSKVHVPNKKSWNRNSLIRLMRSPVLRGHTKYGDMLIENTHEPVLSEHDYNAINNAISSKTHKSKVKHHAIFRGALVCPQCNRRLHLYAGTVKDRKGYKYDVRRYKCETCSKNKDVKNVSFNESEVENKFVNLLKSYELNKFHIRKVEPVKKIEYDIDKINKQKINYTRSWSLGYIEDDEYFELMEEINATKKMIEEQTTENKQSVSKEQIQSINNFILKGWEELTIKDKEELILSTVDKIEFNFIPKDKKHKTNTLDINNIHFKF

SEQ ID NO: 12644 - protein, 463 aa, Unknown
  Description of Unknown: Integrase A1212 sequence
  PTHR30461:SF3,SSF53041,PS00397,SM00857,PS51737, PF00239,cd00338,PTHR30461,G3DSA:3.40.50.1390,PF07508, G3DSA:1.10.10.2600,PS51736
MKVATYVRVSTDEQAKEGFSIPAQRERLRAFCESQGWEIVEEYIEEGWSAKDLDRPQMQRLLKDIKKGNIDIVLVYRLDRLTRSVLDLYLLLQTFEKYNVAFRSATEVYDTSTAMGRLFITLVAALAQWERENLAERVKFGIEQMIDEGKKPGGHSPYGYKFDKDFNCTIIEDEANTVRMIYRMYCDGYGYHSIAKRLNELGIKPRIAKEWNHNSVRDILTNDIYIGTYRWGNKVVLNNHPPIISETLFRKVQKEKEKRRVDRTRVGKFLLTGLLYCGNCNGHKMQGTFDKREQKTYYRCLKCNRITNEKNILEPLLDEIQLLITSKEYFMSKFSDQYDQKEEVDVSALKKELEKIKRQKEKWYDLYMDDRNPIPKEDLFAKINELNKKEEEIYNKLNEVEPEDKEPVEEKYNRLSKMIDFKQQFEQANDFTKKELLFSIFEKIVIYREKGKLKKITLDYTLK

SEQ ID NO: 12645 - protein, 582 aa, Unknown
  Description of Unknown: Integrase A1213 sequence
  SSF53041,PTHR30461:SF3,SM00857,PF13408, PS51737,PF00239,PTHR30461,cd00338, G3DSA:3.40.50.1390,PF07508,G3DSA:1.10.10.2600
MTNPASRPKAYSYIRMSSAIQIKGDSFRRQAEASAKYAAEHDLDLIDDYKLADLGVSAFKSDNLTTGALGRFVAECEAGEIEAGSFLLIESLDRLSRDKILDAFSLFARILKTGVKIVTLSDGQVYDGSSDQVGSIYYAISVMIRSNDESKIKSTRGLANWSQKRKLAAEHGVKMSSQCPAWLKLSVDRKSYLIDKERAKIVQRIFEASASGKGANLITKELNRDKVPTFGRGALWAEAFVSKTLRNRAVLGEFQPGQYVSGKRQPAGDPIPGYFPPVIEEELFDIVQASLRGRLLAGGRRGEGQSNIFTHVAFCGYCGSKMRHRSKGSRVKGNPPHRYLTCFNRFNGPGCDCKPLPYAAFERSFLTFVRDVDLRGLLEGAKRKSEAKTIADRITVNEEKVRKADERIRDYLIKIEGAPDLAEIFMERIRELKAEKDDLVRSIEESNDALSKIKSDNVTDEELASLISTFQNPCGENRIRLADRIKSIIERIDVYPNGEIRKDDPAIDLVRASGDPDAEKIIAAMNAGSRLKDDPYFIVTFRNGAVQTVVPNPSNPDDIRVSVYAGEKTRRVEGSAYEYESD

SEQ ID NO: 12646 - protein, 519 aa, Unknown
  Description of Unknown: Integrase A1214 sequence
  SSF53041,PS51737,PF00239,cd00338,PTHR30461, G3DSA:3.40.50.1390,PF07508,G3DSA:1.10.10.2600
MQLDATLTLRDEGLSAFHQRHIKQGALGVFLRAIEDGRIQPGSVLIVEGLDRLSRAEPIQAQAQLAQIINAGITVVTASDGREYNRERLKAQPMDLVYSLLVMIRAHEESDTKSKRVKAAIRRQCEGWVAGTWRGIIRNGKDPHWVRLGEHGKFEHVPERVLAVRTMIDLFLEGHGAIEITRRLTEQNLYVSNAGNYSVHMYRIVRNQALIGEKRISVDGEEFRLDGYYPPILTREEFAELQQTMSERGRRKGKGEIPNIITGLSITVCGYCGRAMTTQNSKARAPKGKSVVRRLSCPMNSFNEGCPIGGSCESEIVERALMRYCSDQFNLSRLLEGDDGTARRTAQLAVARQRASDIEAQIQRVTDALLSDDGKAPAAFTRRARELETQLEEQRREIEALEHQIAASSAHGIPAAAEAWAQLVDGVLALDYDARMKARQLVADTFRKIVVYQRGFAPIDDAAADRWKRSGTIGLMLVTKRGGMRLLNVDRRTGCWQAEDDLDPSLIPSDGLPMLPLDA

SEQ ID NO: 12647 - protein, 547 aa, Unknown; identical to SEQ ID NO: 11488
  Description of Unknown: Integrase A1215 sequence
  SSF53041,PTHR30461:SF3,PF00239,PTHR30461,cd00338, G3DSA:3.40.50.1390,PF07508,SM00857

SEQ ID NO: 12648 - protein, 500 aa, Unknown; identical to SEQ ID NO: 11649
  Description of Unknown: Integrase A1216 sequence
  PTHR30461:SF3,SSF53041,PS51737,PF00239, PTHR30461,cd00338,G3DSA:3.40.50.1390,PF07508, SM00857,PS51736

SEQ ID NO: 12649 - protein, 463 aa, Unknown
  Description of Unknown: Integrase A1217 sequence
  SSF53041,SM00857,PTHR30461:SF21,PS51737,PF00239, cd00338,PTHR30461,G3DSA:3.40.50.1390,PF07508,mobidb-lite, PS51736
MRAAVYLRISEDRSGEQLGVARQREDCLKLCGQRKWVPVEYLDNDVSASTGKRRPAYEQMLADITAGKIAAVVAWDLDRLHRRPIELEAFMSLADEKRLALATVAGDVDLATPQGRLVARLKGSVAAHETEHKKARQRRAARQKAERGHPNWSKAFGYLPGPNGPEPDPRTAPLVKQAYADILAGASLGDVCRQWNDAGAFTITGRPWTTTTLSKFLRKPRNAGLRAYKGARYGPVDRDAIVGKAQWSPLVDEATFWAAQAVLDAPGRAPGRKSVRRHLLTGLAGCGKCGNHLAGSYRTDGQVVYVCKACHGVAILADNIEPILYHIVAERLAMPDAVDLLRREIHDAAEAETIRLELETLYGELDRLAVERAEGLLTARQVKISTDIVNAKITKLQARQQDQERLRVFDGIPLGTPQVAGMIAELSPDRFRAVLDVLAEVVVQPVGKSGRIFNPERVQVNWR

SEQ ID NO: 12650 - protein, 509 aa, Unknown
  Description of Unknown: Integrase A1218 sequence
  SSF53041,PS51737,PF00239,G3DSA:1.10.10.2600,PTHR30461, cd00338,G3DSA:3.40.50.1390,PF07508,SM00857
MPIAPEFLSLAYPGQEFPAYLYGRASRDPKRKGRSVQSQLDEGRATCLDAGWPIAGEFKDVDRSASAYARRTRDEFEEMIAGIQAGECRILVAFEASRYYRDLEAYVRLRRVCREAGVLLCYNGQVYDLSKSADRKATAQDAVNAEGEADDIRERNLRTTRLNAKRGGAHGPVPDGYKRRYDPDSGDLVDQIPHPDRAGLITEIFRRAAAAEPLAAICRDLNERGETTHRGKAWQRHHLHAILRNPAYIGHRRHLGVDTGKGMWAPICDDEDFAETFQAVQEILSLPGRQLSPGPEAQHLQTGIALCGEHPDEPPLRSVTVRGRTNYNCSTRYDVAMREDRMDAFVEESVITWLASDEAVAAFEDNTDDERTRKARIRLKVLEEQLEAAQKQARTLRPDGMGMLLSIDSLAGLEAELTPQIDKARQESRSLHVPALLRDLLGKPRADVDRAWNEALTLPQRRMILRMVVTIRLFKAGSRGVRAIEPGRITLSYVGEPGFKPVGGNRAKQ

SEQ ID NO: 12651 - protein, 474 aa, Unknown
  Description of Unknown: Integrase A1219 sequence
  SSF53041,PTHR30461:SF3,PS00397,SM00857,PS51737, PF00239,PTHR30461,G3DSA:3.40.50.1390,PF07508, cd03768,G3DSA:1.10.10.2600,PS51736
MAVGIYIRVSTQEQASEGHSIESQKKKLASYCEIQGWDDYRFYIEEGISGKNTNRPKLKLLMEHIEKGKINILLVYRLDRLTRSVIDLHKLLNFLQEHGCAFKSATETYDTTTANGRMSMGIVSLLAQWETENMSERIKLNLEHKVLVEGERVGAIPYGFDLSDDEKLVKNEKSAILLDMVERVENGWSVNRIVNYLNLTNNDRNWSPNGVLRLLRNPALYGATRWNDKIAENTHEGIISKERFNRLQQILADRSIHHRRDVKGTYIFQGVLRCPVCDQTLSVNRFIKKRKDGTEYCGVLYRCQPCIKQNKYNLAIGEARFLKALNEYMSTVEFQTVEDEVIPKKSEREMLESQLQQIARKREKYQKAWASDLMSDDEFEKLMVETRETYDECKQKLESCEDPIKIDETYLKEIVYMFHQTFNDLESEKQKEFISKFIRTIRYTVKEQQPIRPDKSKTGKGKQKVIITEVEFYQ

SEQ ID NO: 12652 - protein, 464 aa, Unknown
  Description of Unknown: Integrase A1220 sequence
  PTHR30461:SF3,SSF53041,PS00397,SM00857, PF13408,PS51737,PF00239,PTHR30461, G3DSA:3.40.50.1390,PF07508,cd03768,G3DSA:1.10.10.2600, PS51736
MKRAALYIRVSTMEQAKEGYSIPAQTDKLKAFAKAKDMAVAKVYTDPGFSGAKMERPALQEMISDIQNKKIDVVLVYKLDRLSRSQKNTLYLIEDVFLKNNVDFISMQESFDTSTPFGRATIGMLSVFAQLERDTITERMHMGRTERAKQGYYHGSGIVPLGYDYVHGELIINDYEAQIIQEIYDLYVNQGKGQQYITKRMVAKYPDKVKTLTIVKYALTNPLYIGKISWDGKVYDGHHSPIIDKSMYDKAQEIIARMAQKGGEQHGNQLGLLLGITYCGKCGAEVFRYVSGGKKYRYNYYMCRSVKKMLPSLVKDWNCKQPSLRQEVVEKKVIDSLKSLDFKKIERELKQVENKTKSKITTINNQISKKHNEKQKILDLYQYGTFDVTMLNERMKKIDNEINALTANIANLEGTKSESLINKLETLKTFNWETETTENKILIIKEFVERIELFDDEVIIKYKF

SEQ ID NO: 12653 - protein, 452 aa, Unknown
  Description of Unknown: Integrase A1221 sequence
  SSF53041,PTHR30461:SF3,SM00857,PF13408,PS51737,PF00239, G3DSA:1.10.10.2600,PTHR30461,G3DSA:3.40.50.1390,PF07508, cd03768,PS00397,PS51736
MKAAIYIRVSTQEQVENYSIQAQTEKLTALCRSKDWDVYDTFIDGGYSGSNMNRPALNEMLSKLHEIDAVVVYRLDRLSRSQKDTITLIEEYFLKNNVEFVSLSETLDTSSPFGRAMIGILSVFAQLERETIRDRMVMGKIKRIEAGLPLTTAKGRTFGYDVIDTKLYINEEEAKQLRLIYDIFEEEQSITFLQKRLKKLGFKVRTYNRYNNWLTNDLYCGYVSYKDKVHVKGIHEPIISEEQFYRVQEIFSRMGKNPNMNKESASLLNNLVVCSKCGLGFVHRRKDTVSRGKKYHYRYYSCKTYKHTHELEKCGNKIWRADKLEELIIDRVNNYSFASRNIDKEDELDSLNEKLKIEHAKKKRLFDLYINGSYEVSELDSMMNDIDAQINYYEAQIEANEELKKNKKIQENLADLATVDFNSLEFREKQLYLKSLINKIYIDGEQVTIEWL

SEQ ID NO: 12654 - protein, 452 aa, Unknown
  Description of Unknown: Integrase A1222 sequence
  SSF53041,PTHR30461:SF3,PS00397,SM00857,PF13408,PS51737, PF00239,PTHR30461,G3DSA:3.40.50.1390,PF07508,cd03768, G3DSA:1.10.10.2600,PS51736
MKAAIYIRVSTQEQIENYSIQAQTEKLTALCRSKDWDVYDIFIDGGYSGSNMNRPALNEMLSKLHEIDAVVVYRLDRLSRSQRDTITLIEEYFLKNNVEFVSLSETLDTSSPFGRAMIGILSVFAQLERETIRDRMVMGKIKRIEAGLPLTTAKGRTFGYDVIDTKLYINEEEAKQLQMIYDIFEEEKSITTLQKRLKKLGFKVKSYSSYNNWLTNDLYCGYVSYADKVHTKGVHEPIISEEQFYRVQEIFSRMGKNPNMNRDSASLLNNLVVCGKCGLGFVHRRKDTVSRGKKYHYRYYSCKTYKHTHELEKCGNKIWRADKLEELIIDRVNNYSFASRNVDKEDELDSLNEKLKTEHVKKKRLFDLYISGSYEVSELDAMMADIDAQINYYEAQIEANEELKKNKKIQENLADLATVDFDSLEFREKQLYLKSLINKIYIDGEQVTIEWL

SEQ ID NO: 12655 - protein, 465 aa, Unknown; identical to SEQ ID NO: 11864
  Description of Unknown: Integrase A1223 sequence
  PTHR30461:SF3,SSF53041,SM00857,PF13408,PS51737, PF00239,G3DSA:1.10.10.2600,cd00338,PTHR30461, G3DSA:3.40.50.1390,PF07508,PS00397,PS51736

SEQ ID NO: 12656 - protein, 470 aa, Unknown
  Description of Unknown: Integrase A1224 sequence
  PTHR30461:SF3,SSF53041,PS00397,PF13408, PS51737,PF00239,G3DSA:1.10.10.2600,PTHR30461, cd00338,G3DSA:3.40.50.1390,PF07508,SM00857, PS51736
MKGESELDKKAAIYIRVSTQEQATEGYSIQAQTDRLIKYVEAKDFILYKKYIDAGYSASKLERPAMQDLIQDVQSKKVDVVIVYKLDRLSRSQKDTMYLIEDIFRPNDVELISMQESFDTSTAFGSATVGMLSVFAQLERKSISERMITGRVERAKKGFYHTGGQDRPPAGYQFNSDNQLIINEYEAAAIKDLFRLYNDGLGKSSISEYLKKNYPGKNKWLPSSIDRMLKNSLYIGKVKFSGAEYDGIHEPIIDEVTFYKTQKEIARRKQTNTKRYNYVALLGGLCECGICGAKMANRRAVGRKGKVYRYYRCYSKKGSPKHMMKTDGCSSKAQQQFIIDEAVINNLKNIDVEAELKRRSAPQTNTSLISSQIESIDKQINKLIDLFQVDSMPLDVISEKIDKLNKEKQSMEKLLERKNKLDKTELQHRFDVLKSFDWDNSSIESKRVVIEMLVQKVIIHDNSIEIILVE

SEQ ID NO: 12657 - protein, 452 aa, Unknown
  Description of Unknown: Integrase A1225 sequence
  SSF53041,PTHR30461:SF3,PS00397,SM00857,PF13408, PS51737,PF00239,PTHR30461,G3DSA:3.40.50.1390,PF07508, cd03768,G3DSA:1.10.10.2600,PS51736
MKAAIYIRVSTQEQIENYSIQAQTEKLTALCRSKDWDVYDIFIDGGYSGSNMNRPALNEMLSKLHEIDAVVVYRLDRLSRSQRDTITLIEEYFLKNNVEFVSLSETLDTSSPFGRAMIGILSVFAQLERETIRDRMVMGKIKRIEAGLPLTTAKGRTFGYDVIDTKLYINEEEAKQLQMIYDIFEEEKSITTLQKRLKKLGFKVKSYSSYNNWLTNDLYCGYVSYADKVHTKGVHEPIISEEQFYRVQEIFSRMGKNPNMNRDSASLLNNLVVCGKCGLGFVHRRKDTISRGKKYHYRYYSCKTYKHTHELEKCGNKIWRADKLEELIIDRVNNYSFASRNVDKEDELDNLNEKLKTEHKKKKRLFDLYISGSYEVSELDAMMADIDAQINYYEAQIEANEELKKNKKIQENLADLATVDFDSLEFREKQLYLKSLINKIYIDGEQVTIEWL

SEQ ID NO: 12658 - protein, 504 aa, Unknown
  Description of Unknown: Integrase A1226 sequence
  PTHR30461:SF3,SSF53041,SM00857,PS51737, PF00239,cd00338,PTHR30461,G3DSA:3.40.50.1390, PF07508,G3DSA:1.10.10.2600,PS51736
MRICMYLRKSRADEELEKTLGEGETLSKHRKALLKFAKEKNLNIVEIKEEIVSGESLFFRPKMLELLKEIENKQYSGVLVMDMQRLGRGNMQDQGIILETFKKSNTKIITPMKTYDLSNDFDEEYSEFEAFMSRKELKMINRRMQGGRVRSVEDGNYIATNAPYGYDIHWINKARTLKPNQKESEIVKLIFKLYIEGNGAGTIAKHLNSLGYKTKFGNSFNNSSIIFILKNPVYIGKITWKKKDIRKSKDPNKVKDTRTRDKSEWIIVDGKHDPIIDQITWKQAQEILNNRYHVPYKLVNGPANPLAGLIICTTCKSKMVMRKLRGTDRILCKNNKCNNISNRFDAVEKSVVESLENYLKAYKVNLPELNKTSNLKLYEQQISTLKKELKILNEQKLKLFDFLERGIYDEDTFLKRSKNLDERIEITNESLSNLNQIIAKENKAIKKEDIIKFEKVLDSYKSTADIRLKNELMKTLIFKIEYTKNKKGNDFKIKVFPKLKPLNI

SEQ ID NO: 12659 - protein, 545 aa, Unknown
  Description of Unknown: Integrase A1227 sequence
  PTHR30461:SF3,SSF53041,PF13408,PS51737,PF00239, G3DSA:1.10.10.2600,PTHR30461,G3DSA:3.40.50.1390,PF07508,cd03768, SM00857,PS51736
MIAAIYSRKSKFTGKGESVENQIEMCKEYLKRNFNNIDDIEIYEDEGFSGKDTNRPKFKKMIKAAKNKKFNILICYRLDRISRNVADFSNTIEELQKYNIDFISIKEQFDTSTPMGRAMMNIAAVFAQLERETIAERIKDNMVELAKTGRWLGGTSPLGYKSEPIEYSNEDGKSKKMYKLTEVENEMNIVKLIYKLYLEKRGFSSVATYLCKNKYKGKNGGEFSRETARQIVINPVYCISDKTIFKWFKSKGATTYGTPDGIHGLMVYNKREGGKKDKPINEWIIAVGKHRGVISSDIWLKCQNLIQQNNAKSSPRSGTGEKFLLSGMVVCKECGSGMSSWSHFNKKTNFMERYYRCNLRNRASNRCSTKMLNAYKAEEYVANYLKELDINAIKKMYHSNKKNIIDYDAKYEVNKLNKSIEENKKIIQGIIKKIALFDDLDILGMLKNELERLKKENDEMKIKLKELKSILELEDEEEIFLSTMEENISNFKKFYDFVNITQKRILIKGLVESIVWDTGGEEKILEINLIGSNTKLPSGKVKRRE

SEQ ID NO: 12660 - protein, 461 aa, Unknown; identical to SEQ ID NO: 11887
  Description of Unknown: Integrase A1228 sequence
  SSF53041,PTHR30461:SF3,PS51737,PF00239, G3DSA:1.10.10.2600,PTHR30461,G3DSA:3.40.50.1390,PF07508, cd03768,SM00857,PS51736

SEQ ID NO: 12661 - protein, 471 aa, Unknown
  Description of Unknown: Integrase A1229 sequence
  SSF53041,PTHR30461:SF3,PS00397,PF13408,PS51737, PF00239,G3DSA:1.10.10.2600,cd00338,PTHR30461,G3DSA:3.40.50.1390, PF07508,SM00857,PS51736
MTVGIYIRVSTEEQVKEGFSISAQKEKLKAYCTAQGWEDFKFYVDEGKSAKDMHRPLLQEMISHIKKGLIDTVLVYKLDRLTRSVVDLHNLLSIFDEFNCAFKSATEVYDTSSAMGRFFITIISSVAQFERENTSERVSFGMAEKVRQGEYIPLAPFGYTKGTDGKLIVNKIEKEIFLQVVEMVSTGYSLRQTCEYLTNIGLKTRRSNDVWKVSTLIWMLKNPAVYGAIKWNNEIYENTHEPLIDKATFNKVAKILSIRSKSTTSRRGHVHHIFKNRLICPACGKRLSGLRTKYINKNKETFYNNNYRCATCKEHRRPAVQISEQKIEKAFIDYISNYTLNKANISSKKLDNNLRKQEMIQKEIISLQRKREKFQKAWAADLMNDDEFSKLMIDTKMEIDAAEDRKKEYDVSLFVSPEDIAKRNNILRELKINWTSLSPTEKTDFISMFIEGIEYVKDDENKAVITKISFL

SEQ ID NO: 12662 - protein, 580 aa, Unknown
  Description of Unknown: Integrase A1230 sequence
  PTHR30461:SF3,SSF53041,PF13408,PS51737, PF00239,G3DSA:1.10.10.2600,cd00338,PTHR30461, G3DSA:3.40.50.1390,PF07508,SM00857,PS51736
MDPQHKPTRALIVIRLSRLTDETTSPERQLEACERFCAARGWEVVGVAEDLDVSAGTTSPFERPSLSQWIGDGKDNPGRIGEFDTVVFYRVDRLVRRVRHLHDVIAWSERFDVNMVSATESHFDLSTTIGALIAQLVASFAEMELEGISQRATSAHRHNVQLGKFVGGSPPFGYMPEETPDGWRLVHDPDVVPIILEVVDRVLEGEPLRRITDDLNARGATTARDLVKQRKGKETEGHKWHSNVLKRRLMSPAMLGYALRREPLTDSKGKPKLSAKGAKLYGPEEIVRGPDGLPVQRAEPILPKPLFDRVVAELEARELQKEPTKRINSMLLRVLYCGVCGQPVYRAKGQGGRSDRYRCRSIQDGANCGNPSVLTYELDDLVEESILVLMGDSERLAHVWNPGEDNASELAEVEARLADRTGLIGVGAYKAGTPQRATLDTLIEADAKLYERLKAATPRPAGWTWEPTGETFAEWWAALDTGARNVYLRNMGVRVTYDKRPVPEQVSAGEKPRVHLELGEVRKMAEQVAVTGTIGTLTRNYTRLGEIGITHVDIDAGSGKAVFVTKSGERFELPLNIPEE

SEQ ID NO: 12663 - protein, 516 aa, Unknown
  Description of Unknown: Integrase A1231 sequence
  SSF53041,PTHR30461:SF3,SM00857,PS51737,PF00239, cd00338,PTHR30461,G3DSA:3.40.50.1390,PF07508,G3DSA:1.10.10.2600, PS51736
MYRPESLDVCIYLRKSRKDVEEERRAIEEGSSYNALERHRKRLFAIAKAENHNIIDIFEEVASGESIQERPQMQQLLRKLEGNEIDGVLVIDLDRLGRGDMLDAGMIDRAFRYSSTKIITPTDVYDPDDESWELVFGIKSLISRQELKSITKRLQNGRIDSVKEGKHIGKKPPYGYLKDENLRLYPDPEKAWIVKKIFELMCDGKGRQMIAAELDRLGIDPPVTKRGAWDSSTITSIIKNEVYTGVIVWGKFKHKKRNGKYTRHKNPQEKWIMYENAHEPIISKELFDAANEAHSSRHKPAVITSKKLTNPLAGILKCKLCGYTMLIQTRKDRPHNYLRCNNPACKGKQKQSVFNLVEEKLLYSLQQIVDEYQAQKVEEVEIDDSKLISFKEKAIISKEKELKELQAQKGNLHDLLEQGIYTVEIFLERQKNLVERITSIENDIEVLQKEIETEQIKEHNKTEFIPALKTVIESYHKTTNIELKNQLLKTILSTVTYYRHPDWKTNEFEIQVYFKI

SEQ ID NO: 12664 - protein, 515 aa, Unknown
  Description of Unknown: Integrase A1232 sequence
  PTHR30461:SF3,SSF53041,PF13408,PS51737, PF00239,G3DSA:1.10.10.2600,cd00338,PTHR30461, G3DSA:3.40.50.1390,PF07508,SM00857,PS51736
MKTAIYLRKSRADLEAEARGEGETLAKHRSTLLKIAKEMNLNVLSVREEIVSGESLVKRPEMLALLEEIEDNKYDAVLCMDMDRLGRGGMKEQGIILETFKRSNTKIMTPRKTYDLNDEWDEEYSEFEAFMARKELKIITRRMQRGRIASVEAGNYLGTHAPFGYDIHRLNKRERTLTINSEEASVVRMIFDWYANEDMGASAIRNKLNDLGYKSKLGNDWNPYSILDILKNNIYIGKVTWQKRKEVKRPDAVKRSCARQDKSDWIIADGKHEPIIPESLFEQAQEKLNSRYHVPYNTNGIKNPLAGIIKCSKCGYSMVQRYPKNRKETMDCKHRGCENKSSYTELIEKRLLEALKEWYINYKADFEAHKQGDKLKETQVIQMNEAALRKLEKELVDVQKQKNNLHDLLERGVYTVDMFLERSQVISDRINEITSTMENLKKEIKTEIKKEKVKKDTIPQVEHVLDLYFKTDDPKKKNSLLKSVLEKAVYKKEKWQRLDDFELVLYPKLPQDGDI

SEQ ID NO: 12665 - protein, 471 aa, Unknown; identical to SEQ ID NO: 11845
  Description of Unknown: Integrase A1233 sequence
  SSF53041,PTHR30461:SF3,PF13408,PS51737,PF00239, G3DSA:1.10.10.2600,PTHR30461,G3DSA:3.40.50.1390,PF07508,cd03768, SM00857,PS51736

SEQ ID NO: 12666 - protein, 485 aa, Unknown
  Description of Unknown: Integrase A1234 sequence
  PTHR30461:SF3,SSF53041,SM00857,PF13408, PS51737,PF00239,PTHR30461,G3DSA:3.40.50.1390, PF07508,cd03768,G3DSA:1.10.10.2600,PS51736
MSKKVAIYTRVSTTNQAEEGYSIDEQIDKLKMYCEAMDWKVSEIYTDAGFTGSKLTRPAMEKMITDIGLKKFDTVIVYKLDRLSRSVRDTLYLVKDVFTKNEIDFISLSESIDTSSAMGSLFLTILSAINEFERENIKERMTMGKIGRAKSGKSMMWAKTAFGYSHNQETGILEINPLEASIVEQIFNEYLKGTSITKLRDKLNEDGHIAKELPWSYRTIRQTLDNPVYCGYIKYKNNTFEGLHKPIISHETYLSVQKELEARQQQTYEKNNNPRPFQAKYLLSGIARCGYCGAPLRIVLGHRRKDGSRTMKYQCVNRFPRKTKGVTTYNDNKKCDSGAYDMQWIEDIVLKTLNGFQKSDKKLRKILNIKEESKVDTSGFQKQLKSINNKIQKNSDLYLNDFITMDDLKKRTEMLQGEKKLIQARINEVDKPSTSEIFDLVKSELGETTISKISYEDKKKIVNNLISKVDVTADNIDIIFKFQLA

SEQ ID NO: 12667 - protein, 475 aa, Unknown
  Description of Unknown: Integrase A1235 sequence
  PTHR30461:SF3,SSF53041,PS00397,SM00857,PF13408, PS51737,PF00239,PTHR30461,G3DSA:3.40.50.1390,PF07508, cd03768,G3DSA:1.10.10.2600,PS51736
MITTNKVAIYVRVSTTNQVEEGYSIDEQKDKLEAYCKIKDWKIYDVYVDGGFSGANTQRPELERLISDVKRKKVDIVLVYKLDRLSRSQKDTLFLIEDVFAKNDVAFISLQENFDTSTPFGKASIGMLSVFAQLEREQIKERMMLGKEGRAKNGKSMSWTTIAFGYDYSKETGVLSVNPTQALIVNRIFTEYLNGKPVVKIIRDLNAEGHVGRKRPWGETITKYLLKNETYLGKVKYKDKVYEGQHEPIITQELFDLVQLEVERRQISAYEKYNNPRPFRAKYMLSGLMKCGYCGASLGLRYTRKDKNGISHHKYQCRNRHSKDLEKRCESGWYSKEELERGVIKELERIKFDPKYKNETLAKKEETIKVEEIKKQLERINNQVSKLTELYLDEIITRKELDEKNDKIKTERQFLEEQLENQKSNVLSIRKRKLTRLLKDFDVEKLSYEDASKIVKNIIKEIIVTKDGMSITLDF

SEQ ID NO: 12668 - protein, 473 aa, Unknown; identical to SEQ ID NO: 11830
  Description of Unknown: Integrase A1236 sequence
  SSF53041,PTHR30461:SF3,SM00857, PF13408,PS51737,PF00239,G3DSA:1.10.10.2600,PTHR30461, G3DSA:3.40.50.1390,PF07508,cd03768,PS00397,PS51736

SEQ ID NO: 12669 - protein, 485 aa, Unknown; identical to SEQ ID NO: 11761
  Description of Unknown: Integrase A1237 sequence
  PTHR30461:SF3,SSF53041,PF13408,PS51737,PF00239, G3DSA:1.10.10.2600,PTHR30461,cd00338,G3DSA:3.40.50.1390,PF07508, SM00857,PS51736

SEQ ID NO: 12670 - protein, 477 aa, Unknown; identical to SEQ ID NO: 11819
  Description of Unknown: Integrase A1238 sequence
  SSF53041,PTHR30461:SF3,SM00857,PF13408, PS51737,PF00239,G3DSA:1.10.10.2600,PTHR30461,G3DSA:3.40.50.1390, PF07508,cd03768,PS00397,PS51736

SEQ ID NO: 12671 - protein, 461 aa, Unknown
  Description of Unknown: Integrase A1239 sequence
  SSF53041,PTHR30461:SF3,SM00857,PS51737,PF00239, G3DSA:1.10.10.2600,PTHR30461,G3DSA:3.40.50.1390,PF07508,cd03768, PS00397,PS51736
MKVAVYCRVSTLEQKEHGHSIEEQERKLKSFCDINDWTVYDTYIDAGYSGAKRDRPELQRLMNDINKFDLVLVYKLDRLTRNVRDLLDLLEIFEKNDVSFRSATEVYDTTTAMGRLFVTLVGAMAEWERETIRERTQMGKLAALRKGIMLTTPPFYYDRVDNKFVPNKYKDVILWAYDEAMKGQSAKAIARKLNNSDIPPPNNTQWQGRTITHALRNPFTRGHFDWGGVHIENNHEPIITDEMYEKVKDRLNERVNTKKVRHTSIFRGKLVCPVCNARLTLNSHKKKSNSGYIFVKQYYCNNCKVTPNLKPVYIKEKEVIKVFYNYLKRFDLEKYEVTQKQNEPEITIDINKVMEQRKRYHKLYASGLMQEDELFDLIKETDQTIAEYEKQNENREVKQYDIEDIKQYKDLLLEMWDISSDEDKEDFIKMAIKNIYFEYIIGTGNTSRKRNSLKITSIEFY

SEQ ID NO: 12672 - protein, 460 aa, Unknown
  Description of Unknown: Integrase A1240 sequence
  SSF53041,PTHR30461:SF3,SM00857,PF13408, PS51737,PF00239,PTHR30461,G3DSA:3.40.50.1390,PF07508,cd03768, G3DSA:1.10.10.2600,PS51736
MKVAIYTRVSTLEQREKGHSIDEQERKLRSFCDINDWTVKDVYVDAGFSGAKRDRPELTRLLDDISEFDLVLVYKLDRLTRSVRDLLDLLEVFENNNVAFRSATEVYDTTTAIGRLFVTLVGAMAEWERETIRERSLMGKRAAIKKGMILTAPPFYYDRVNNTYIPNQYKDVVLDVYNKVKKGYSIAHIARLYNNSDVKPPNGNEEWTTRMLMHALRNPVTRGHYQWGEIYIEDSHEPIITDEMYNTIIDRLDKHTNTKVVAHTSVFRGKLICPNCGYALTLNSQKRKRKNDTIVYKTYYCNNCKITKGMKPHHITETETLRVFKDHLSKIDLKQYETQEKEKQSHVTIDLSKVMEQRKRYHKLYASGMMQENELFELIKETDEMIEEYEKQRKQVDVKEFDICKIKEIKDVLLKSWDIFTLEDKADFIQMSIKAINIEYTKLKRGKSSNSMKIKDIEFY

SEQ ID NO: 12673 - protein, 458 aa, Unknown; identical to SEQ ID NO: 11895
  Description of Unknown: Integrase A1241 sequence
  SSF53041,PTHR30461:SF3,PS51737,PF00239,G3DSA:1.10.10.2600, PTHR30461,G3DSA:3.40.50.1390,PF07508,cd03768,SM00857, PS51736

SEQ ID NO: 12674 - protein, 462 aa, Unknown
  Description of Unknown: Integrase A1242 sequence
  PTHR30461:SF3,SSF53041,PS00397,PF13408,PS51737, PF00239,G3DSA:1.10.10.2600,cd00338,PTHR30461,G3DSA:3.40.50.1390 ,PF07508,SM00857,PS51736
MKVAIYVRVSTDEQAKEGFSIPAQRERLRAFCASQGWEIVQEYIEEGWSAKDLDRPQMQRLLKDIKKGNIDIVLVYRLDRLTRSVLDLYLLLQTFEKYNVAFRSATEVYDTSTAMGRLFITLVAALAQWERENLAERVKFGIEQMIDEGKKPGGHSPYGYKFDKDFNCTIIEEEADVVRMIYRMYCDGYGYRSIADRLNELMVKPRIAKEWNHNSVRDILTNDIYIGTYRWGDKVVPNNHPPIISETLFKKAQKEKEKRGVDRKRVGKFLFTGLLQCGNCGGHKMQGHFDKREQKTYYRCTKCHRITNEKNILEPLLDEIQLLITSKEYFMSKFSDRYDQQEVVDVSALTKELEKIKRQKEKWYDLYMDDRNPIPKEELFAKINELNKKEEEIYSKLSEVEEDKEPVEEKYNRLSKMIDFKQQFEQANDFTKKELLFSIFEKIVIYREKGKLKKITLDYTLK

SEQ ID NO: 12675 - protein, 545 aa, Unknown
  Description of Unknown: Integrase A1243 sequence
  PTHR30461:SF3,SSF53041,SM00857,PS51737,PF00239, cd00338,PTHR30461,G3DSA:3.40.50.1390,PF07508,G3DSA:1.10.10.2600, PS51736
MELKNIVNSYNITNILGYLRRSRQDMEREKRTGEDTLTEQKELMNKILTAIEIPYELKMEIGSGESIDGRPVFKECLKDLEEGKYQAIAVKEITRLSRGSYSDAGQIVNLLQSKRLIIITPYKVYDPRNPVDMRQIRFELFMAREEFEMTRERMTGAKYTYAAQGKWISGLAPYGYQLNKKTSKLDPVEDEAKVVQLIFKIFLNGLNGKDYSYTAIASHLTNLQIPTPSGKKRWNQYTIKAILQNEVYIGTVKYKVREKTKDGKRTIRPEKEQIVVQDAHAPIIDQEQFQQSQVKIANKVPLLPNKDEFELSELAGVCTCSKCGEPLSKYESKRMRKNKDGTESVYHVKSLTCKKNKCTYVRYNDVENAILDYLSSLNDLNDSTLTKHINSMLSKYEDDNSNMKTKKQMSEHLSQKEKELKNKENFIFDKYESGIYSDELFLKRKAALDEEFKELQNAKNELNGLQDTQSEIDSNTVRNNINKIIDQYHIESSSEKKNELLRMVLKDVIVNMTQKRKGPIPAQFEITPILRFNFIFDLTATNNFH

SEQ ID NO: 12676 - protein, 481 aa, Unknown; identical to SEQ ID NO: 11790
  Description of Unknown: Integrase A1244 sequence
  SSF53041,PTHR30461:SF3,SM00857,PF13408,PS51737, PF00239,G3DSA:1.10.10.2600,PTHR30461,G3DSA:3.40.50.1390, PF07508,cd03768,PS00397,PS51736

SEQ ID NO: 12677 - protein, 552 aa, Unknown
  Description of Unknown: Integrase A1245 sequence
  PTHR30461,PTHR30461:SF3,PF00239,PF07508,G3DSA:3.40.50.1390, SM00857,SSF53041
MPGMTTETGPDPAGLIDLFCRKSKAVKSRANGAGQRRKQEISIAAQETLGRKVAALLGMQVRHVWKEVGSASRFRKGKARDDQSKALKALESGEVGALWCYRLDRWDRGGAGAILKIIEPEDGMPRRLLFGWDEDTGRPVLDSTNKRDRGELIRRAEEAREEAEKLSERVRDTKAHQRENGEWVNARAPYGLRVVLVTVSDEEGDEYDERKLAADDEDAGGPDGLTKAEAARLVFTLPVTDRLSYAGTAHAMNTREIPSPTGGPWIAVTVRDMIQNPAYAGWQTTGRQDGKQRRLTFYNGEGKRVSVMHGPPLVTDEEQEAAKAAVKGEDGVGVPLDGSDHDTRRKHLLSGRMRCPGCGGSCSYSGNGYRCWRSSVKGGCPAPTYVARKSVEEYVAFRWAAKLAASEPDDPFVIAVADRWAALTHPQASEDEKYAKAAVREAEKNLGRLLRDRQNGVYDGPAEQFFAPAYQEALSTLQAAKDAVSESSASAAVDVSWIVDSSDYEELWLRATPTMRNAIIDTCIDEIWVAKGQRGRPFDGDERVKIKWAART

SEQ ID NO: 12678-13000 - skipped (323 entries)

SEQ ID NO: 13001 - DNA, 260 bp, Unknown
  Description of Unknown: LeftRegion for integrase B2 sequence
ataatcgtcaactcctttctttgattgcattatagcacacgtttgcaaaaatatcaaccggttagtcgataaatttactgataaatatattgtatgctgaaaggatgactttgatacacagctaatagcattttttcctttagcctgtctgcttcgtgcagatgggcttttttcatgcctgcgaggaggtggttacgcaaatggcatccagaatccagggcatcaccgttgagatcggcggcgataccacaaagctctcc

SEQ ID NO: 13002 - DNA, 260 bp, Unknown
  Description of Unknown: LeftRegion for integrase B3 sequence
gatacggattacacggtagatcaaaagcgcaacccgtctctgccagaggatgttactactatgctttctgggctcgacagcgcggacctcgaaaaagttatgatctacgcccgcggtttgctggacggggacaagtatcagaaacgccgtccgcggtaaagcaggaagtgcttctggcacgaaatagaaaggggcagacaatgagagtatccgtaaacttaaacgcacaaaagccggataccacgacaaacgccgtcatt

SEQ ID NO: 13003 - DNA, 260 bp, Unknown; identical to SEQ ID NO: 13002
  Description of Unknown: LeftRegion for integrase B4 sequence

SEQ ID NO: 13004 - DNA, 260 bp, Unknown; identical to SEQ ID NO: 13002
  Description of Unknown: LeftRegion for integrase B5 sequence

SEQ ID NO: 13005 - DNA, 260 bp, Unknown
  Description of Unknown: LeftRegion for integrase B6 sequence
atacggattacacggtagatcaaaagcgcaacccgtctctgccagaggatgttactactatgctttctgggctcgacagcgcggacctcgaaaaagttatgatctacgcccgcggtttgctggacggggacaagtatcagaaacgccgtccgcggtaaagcaggaagtgcttctggcaacgaaatagaaaggggcagacaatgagagtatccgtaaacttaaacgcacaaaagccggataccacgacaaacgccgtcatt

SEQ ID NO: 13006 - DNA, 260 bp, Unknown; identical to SEQ ID NO: 13002
  Description of Unknown: LeftRegion for integrase B7 sequence

SEQ ID NO: 13007 - DNA, 260 bp, Unknown
  Description of Unknown: LeftRegion for integrase B8 sequence
gatacggattacacggtagctcaaaagtgcgacccgtctctgccagaggatgttactactatgctttctgggctcgacagcgcggacctcgaaaaagttatgatctacgcccgcggtttgctggacggggacaagtatcagaaacgccgtccgcggtaaagcaggaagtgcttctggcacgaaatagaaaggggcagacaatgagagtatccgtaaacttaaacgcacaaaagccggataccacgacaaacgccgtcatt

SEQ ID NO: 13008 - DNA, 260 bp, Unknown; identical to SEQ ID NO: 13002
  Description of Unknown: LeftRegion for integrase B9 sequence

SEQ ID NO: 13009 - DNA, 260 bp, Unknown
  Description of Unknown: LeftRegion for integrase B10 sequence
ctgactatcttctcggtctaagtaaagttagattttcacaggacgaactttcggaagaagaattgcttttactcaacgcttatagaactgccagtgtacagggacgatttcatattatccaagtctgtatgaacgaaaaggattcaaaaggggaaactatcattgcaggataataagcattgaggaatggaggaagaaccatgtacgaagagattaagactgcttgtctatatctacgatattcaagtagcaaccaaact

SEQ ID NO: 13010 - DNA, 260 bp, Unknown
  Description of Unknown: LeftRegion for integrase B11 sequence
tttccttttccgtgaaatgcacccaagaagagacattcaagaaggaaaacaaggaagggaaagcgtataagtttcacaatattaacgaactcacatatcgttttaccgcccctagtgatataccagatgccgaaacaatccctgatccattatatagcacaatagtaaaatggctcaacaaaaagtgaggtgattcggttttggctaagtataagcaagtcgtgcaggaacaaatcggcgtaatctatgcccggtattcc

SEQ ID NO: 13011 - DNA, 260 bp, Unknown
  Description of Unknown: LeftRegion for integrase B12 sequence
tgctaaatttggagatgcttgtatctcttttgaggccgcaaaaggcaacggcgttacggcaacaatttccggttgccctgatatttgctttttcccggatgatgaaattactcgactgcttacgctgtatgggcataatagatgtctcggcggatatcgtcccaagttaaaagcggaaatttggccggaggagcaaggcaatgcagaagagtagtaatcacttgggcagccaagtcggcgtaatctatgccaggtattct

SEQ ID NO: 13012 - DNA, 260 bp, Unknown
  Description of Unknown: LeftRegion for integrase B13 sequence
acaggtcttttgattgtgtgtagtgacccggcgcaaaagaaaattgatagagccgatgccctgaatattccgattgtttcggagcagcaatggtttgaacttatgccggaacttgaggccgttggaatgtggaacggaaagcaaattctgtttgcggacaatgatggcatctaccgtgttgaagtgggcggtgaaagctgatggccagaaaaaagaatattgctgctggcctcgatgccgtcatctatgcccggtactca

SEQ ID NO: 13013 - DNA, 260 bp, Unknown
  Description of Unknown: LeftRegion for integrase B14 sequence
gacacacctcctgaaacagatactcttatggttgtcattgttgatgacgaagaaggatttgttaagaaaatcagcattgatgaagatactgtgacccttcgctcttttaatccacactatcctccccgtgtttttggcggtgttgaaattggacgattgcgctttgtcggtagagtcatggagttaaaaaggagatttgcatgaaaaaatttccaatcgacctctcctgtctgacagaggaagaaatctctcaatttcag

SEQ ID NO: 13014 - DNA, 260 bp, Unknown
  Description of Unknown: LeftRegion for integrase B15 sequence
tgcagccattataagccttgtcggcatcggaatcatcgccattccgacgggcattatttccgctggattcacgtctttgattggaaaggatagagaagaaaccgacaaaaagaactattgcccatattgcggccataggctcgacgaataacaaagcgtttttgcattttctgaaaaaaagtttacgagtaggtgattgcatgaaagcggccatatacgcccgtttttcgagccataatcaacgtgaggaatccattgaa

SEQ ID NO: 13015 - DNA, 260 bp, Unknown
  Description of Unknown: LeftRegion for integrase B16 sequence
taactctcaaagatcgcttgttttctcaaccttccttaaatgaacaagaagtagaattggttaatttattccgctcttgtaaaccgtctgtgcaattccaagttgttcatattatgatgacggaaaaagaaaaaacagactctacggaagagtctgctatcgtctaaggtcatcgacctaaatgaatggagaaagaccctatgaagaagttcaagttccctatcgacttgtctatgctgacagaagaagagatcaaccaa

SEQ ID NO: 13016 - DNA, 260 bp, Unknown
  Description of Unknown: LeftRegion for integrase B17 sequence
ccagtgataacgagcctgattgggcgtatatggacgagtacatgcgaacaataatggaaagcgcagcgtccgatttgtctgctatgcagtcaatcggttaatagcgtgtaagcccgccgttccatctgggcggtgggcttatttccaaaggagtgaaccatgaaaacctataagcagaaaagaagggagggggtaaacctatggcacgtaagaagaaattcgcgccgaacgacaacaatcttgcgatagcgtactatcgc

SEQ ID NO: 13017 - DNA, 260 bp, Unknown; identical to SEQ ID NO: 13012
  Description of Unknown: LeftRegion for integrase B18 sequence

SEQ ID NO: 13018 - DNA, 260 bp, Unknown
  Description of Unknown: LeftRegion for integrase B19 sequence
atccgacagttttttgattttggcaaagatatccgaccattcgctcgtagtcatacggcatggctcctttctcaaatttactgtcggcagcaactgaattatatcaaatacgcacccgcttttcagggattcgtagaattataccgaaaatcggaaaaatattgcgaattttgaagaagataatcgtgaggtgatggttgatggcccgaaaaaagaatattgctgcgggtcagaatgccgtcatttatgcccgctattcc

SEQ ID NO: 13019 - DNA, 260 bp, Unknown
  Description of Unknown: LeftRegion for integrase B20 sequence
ctggatcattgacatggttatgatctgttgcaacaaattcaccgacagcaccggcgcggtggttggtctgaaggttgctgagtataccagacagccggatcctgatcttgcagaggcttctctggaggagcagcgggaggcagcggccgagactgccagagcttacggctataccgtaatagagtcaggcgctcaggataatgccgacaagtaaaaacacggctcgaaaatatgccgcaggaggtagctcggataattcc

SEQ ID NO: 13020 - DNA, 260 bp, Unknown
  Description of Unknown: LeftRegion for integrase B21 sequence
cttcgatcaaggacttatgacggttctgcctgatcttacgattcaggtctcggactatgtgaaggacagctatgacgaccagaatacaagagactggctgcttggcgtagagggtacaaaaatcatcaggccaaagagattcgcgccaaatcgcgatatgctggcctatcacaatgagttcgtcttcctgaggtgattccatgcagcgagcagtgatatacgccaggtacagtcctggaccaaatcagacagagcagtcg

SEQ ID NO: 13021 - DNA, 260 bp, Unknown
  Description of Unknown: LeftRegion for integrase B22 sequence
aagaccggcggcttttatcgcatcattactcacagtgccgttgctatttgatctattgattcatggctacatcggttcagaaccatcaaaagaagggttttggtttgactttgggatattggttgctgagtggatcgtagtccgatatgggctttcttggatatggaagaagatttctggcgggaaataaaaggtcctttatgtatggatgccttagaaagggaaacgatatggatgaatttgctgcccgcccggtagcc

SEQ ID NO: 13022 - DNA, 260 bp, Unknown
  Description of Unknown: LeftRegion for integrase B23 sequence
ccccaagacggcccggaacaagaatgtgctggtgatcggcggctccggcagcggcaagacccgcttctatgtgaagcccaacctcatgcaatgctttcccacttccgactatcccacctcattcgtggtcacagacccgaatggtaatttacaataaggataaagggagcgcgcaccctcaagaaaggaggttacaccccatgaagaaacagccggacaagggaaaaatcacagccctgtacgagcgtctttcccatgac

SEQ ID NO: 13023 - DNA, 260 bp, Unknown
  Description of Unknown: LeftRegion for integrase B24 sequence
aatttttgggcatatcagccaaaaatacttggcgttgttcgatgcggccataacatatatgaaataaaaaaaccgcccacggcggcaaccgtaggcggtttacatagacagcttgttcaaaagaggaacaatgcagcccaagcaactgcattatacctctttcgggcgggcttttacaagtctcccggaggtgtttttttatgagtttggcgctggagctggcacaaacgcaaattgcacgggcgaagccggcagaagat

SEQ ID NO: 13024 - DNA, 260 bp, Unknown
  Description of Unknown: LeftRegion for integrase B25 sequence
ttcggacggtggtcctgcggatgcagccgatgagatggagaatctgttgggaggaggtggaagctgatggattccaatattgaagattaccgcaacaccgccagctactatgatggacaggcaatgagagatggtagttggcgaaagcggtatgtaaaaaggtaagagccagtcataaggctggcgggaaggagagcattatgacaagacagaaagtagaagtgatcccagccagtgttcgttctgtccagaacggcgga

SEQ ID NO: 13025 - DNA, 260 bp, Unknown; identical to SEQ ID NO: 13024
  Description of Unknown: LeftRegion for integrase B26 sequence

SEQ ID NO: 13026 - DNA, 260 bp, Unknown
  Description of Unknown: LeftRegion for integrase B27 sequence
acagcatacagttccagtattgcccaagttttaattatgaaaacataatgaaaaatttggacaagttgccttgtcgcttaaccgaacaagaaatgaacaaattagatccatacagacaatacagattataaaaaagcccgctccgacagaaacgggcacaatgacgcaaccaacgaaaagtaataaagcggagagagagtatgacaaatgcagtgatatatgcccggtatagcccggggccgaatcaaacggatcaatca

SEQ ID NO: 13027 - DNA, 260 bp, Unknown
  Description of Unknown: LeftRegion for integrase B28 sequence
gttcatctcgcggggctcctttctcgaacttttgttcgatttatattgtagactcattttttgaggttgtcaatagaaactttaaagaaaaatatcggttcctatcagcaccgatgtgtaaaataaataaaaaagcccgctcccgtgagaacaggaacgagcgagaaagtgacaatgaaaagtaagaaagcggagagagtatgacaaatgcagtaatatatgcccggtatagcccggggccaaatcaaacggatcaatca

SEQ ID NO: 13028 - DNA, 260 bp, Unknown
  Description of Unknown: LeftRegion for integrase B29 sequence
gttcatctcgcggggctcctttctcgaacttttgttcgatttatattgtagactcattttttgaggttgtcaatagaaactttaaagaaaaatatcggttcctatcagcaccgatgtgtaaaataaataaaaaagcccgctcccgtgagaacaggaacgagcgagagagtgccacagaaaagtaagaaagcggagagagtatgacaaatgcagtgatatatgcccggtatagcccgggaccaaatcaaacggatcaatca

SEQ ID NO: 13029 - DNA, 260 bp, Unknown
  Description of Unknown: LeftRegion for integrase B30 sequence
ccttgcggtctgcatcgtgtcgctcccggtcggcttgatcattgtagccgttggagcgtaccgggcggtaaaagccggggatatttatgatgctgcagttgctcggtacgagcagcaaatctcggactatgttgactggctggatgaagtcaacgcaaaataaaaagccgccctctgtgggcggcgggaggttgctctgaatgcgcgcaaaaaagaaaccggccatgcttgagccggatatgcaggatgccgtgatctac

SEQ ID NO: 13030 - DNA, 260 bp, Unknown
  Description of Unknown: LeftRegion for integrase B31 sequence
acttgggatgctggaggactggccgaaggtcagtcgtagtggaagcaaggctgcgctggaagatgcacaggctgaaattgagcggtggaggcaagagttccttgctgggaatatctcggcgaagaaatacgttaaaattgcggatgctctcatatccaaataaaaagccgccctcggtgggcggcgggaggttgctctgaatgtgcgcaaaaaagaaaccggccatgcttgagccggatatgcaggatgccgtgatctac

SEQ ID NO: 13031 - DNA, 260 bp, Unknown
  Description of Unknown: LeftRegion for integrase B32 sequence
aaattcgtagatggtctttttgttcttctaaaagtcgaggtgtgataaagccgctttataaataagaatgaattgaaatataatttatatatgaaaagattgttatgagacattctggaaagacttgaaaactgtcaatgttatatatataataatatgtgaaatatacaacattggatattgtagaagggagcaatacggtgaaaaaaagtaaacctccacaaaggattgctggctatctgcgcattagcgatgaagac

SEQ ID NO: 13032 - DNA, 260 bp, Unknown
  Description of Unknown: LeftRegion for integrase B33 sequence
ccatattccgataccctatggatagggtatctataccgtatccataccgtaccgatacctcgcgtgcgcgcgtgcgtgtgcgcgcgatcgtgcgcgcactgtctctgtacctgtatctgtatctgagactgtatctgtaatctgtttctgattctgaatatctactactgcaaatctatcgttagaagggggtggcgctgttgccgagaaaacctgcaaagcacccggcgaagccgaagcggggcaagaagctggaagtc

SEQ ID NO: 13033 - DNA, 260 bp, Unknown
  Description of Unknown: LeftRegion for integrase B34 sequence
catattccgataccctatggatagggtatctataccgtatccataccgtaccgatacctcgcgtgcgcgcgtgcgtgtgcgcgcgatcgtgcgcgcactgtctctgtacctgtatctgtatctgagactgtatctgtaatctgtttctgattctgaatatctactactgcaaatctatcgttagaaggggggcggcgctgttgccgagaaaacctgcaaagcacccggcgaagccgaagcggggcaagaagctggaagtc

SEQ ID NO: 13034 - DNA, 260 bp, Unknown
  Description of Unknown: LeftRegion for integrase B35 sequence
tatctatgaattgtttagaagacaataaacttatatgttttataagtaaataaaaaagacacgtcatgcgcgaacatgaagtgtcaaaatgaaaaaccacaaaagctatcacactcttaacaataatagagaaactataattgtataggtttttctatacgattatagcataaaatttaaaagaaagaaagtgctataatatgaatttagaaacatttttgagaattttacacatacctagtaatctatctattgacgag

SEQ ID NO: 13035 - DNA, 260 bp, Unknown
  Description of Unknown: LeftRegion for integrase B36 sequence
ttgctcgaaatgtacgttttcttgctcgaatggtaaaaaagcataaaaaaagacgcctcgcgcgcgaacacgaagcgttgaaatgaaaaaccacaaaagctatcacacttaaaacaaaaatagaagaaacaaccaactataattgtataggtttttctatacgattatagcataaaattataaagaaagaaagtgctataatgaatttagatacatttttacaaataatgaacgtatctagggaccttactgtcgacgag

SEQ ID NO: 13036 - DNA, 260 bp, Unknown
  Description of Unknown: LeftRegion for integrase B37 sequence
atgctcgaaatgtacgttttcttgctcgaaaggtaaaaaaacataaaaaaagacgcctcgcgcgcgaacacgaagcgttgaaatgaaaaaccacaaaagctatcacacttaaaacaaaaatagaagaaacaaccaactataattgtataggtttttctatacgattatagcataaaattataaagaaagaaagtgctataatgaatttagatacatttttacaaataatgaacgtatctagggaccttactgtcgacgag

SEQ ID NO: 13037 - DNA, 260 bp, Unknown
  Description of Unknown: LeftRegion for integrase B38 sequence
tgaattgtttagatcataataaactaatttgttttattgaaaagtaaaaaagacgcctcatgcgcgaacatgaagcgttgaaatgaaaaaccacaaaagctatcacacttaaaacaataatagaagaaacaaccaactataattgtataggtttttctatacgattatagcataaaattataaagaaagaaagtgctataatgaatttagatacatttttacaaataatgaacgtatctagggaccttactgtcgacgag

SEQ ID NO: 13038 - DNA, 260 bp, Unknown
  Description of Unknown: LeftRegion for integrase B39 sequence
ttgctcgaaatgtacgttttcttgctcgaatgggaaaaaaacataaaaaaagacgcctcgcgcgcgaacacgaagcgttgaaatgaaaaaccacaaaagctatcacacttaaaacaaaaatagaagaaacaaccaactataattgtataggtttttctatacgattatagcataaaattataaagaaagaaagtgctataatgaatttagatacatttttacaaataatgaacgtatctagggaccttactgtcgacgag

SEQ ID NO: 13039 - DNA, 260 bp, Unknown
  Description of Unknown: LeftRegion for integrase B40 sequence
aattgtttagatcacaacagactaatttgttttattgaaaaataaaaaaaagacgcctcgcgcgcgaacacgaagcgttgaaatgaaaaaccctaaaagctatcacactcaaaacaaaaatagaagaaacaaccaactataattgtataggtttttctatacgattatagcataaaattataaagaaagaaagtgctataatgaatttagatacatttttacaaataatgaacgtatctagggaacttactgtcgacgag

SEQ ID NO: 13040 - DNA, 260 bp, Unknown
  Description of Unknown: LeftRegion for integrase B41 sequence
gaattgtttagatcataataaactaatttgttttattgaaaaataaaaaaagacgcctcgcgcgcgaacacgaagcgttgaaatgaaaaaccctaaaagctatcacacttaaaacaaaaatagaagaaacaaccaactataattgtataggcttttctatacgattatagcataaaattataaagaaagaaagtgctataatgaatttagatacatttttacaaataatgaacgtatctagggaccttactgtcgacgag

SEQ ID NO: 13041 - DNA, 260 bp, Unknown; identical to SEQ ID NO: 13035
  Description of Unknown: LeftRegion for integrase B42 sequence

SEQ ID NO: 13042 - DNA, 260 bp, Unknown
  Description of Unknown: LeftRegion for integrase B43 sequence
tgctcgaaatgtacgttttcttgctcgaaaggtaaaaaagcataaaaaaaagacgcctcgcgcgcgaacacgaagcgttgaaatgaaaaaccctaaaagctatcacacttaaaacaaaaatagaagaaacaaccaactataattgtataggcttttctatacgattatagcataaaattataaagaaagaaagtgctataatgaatttagatacatttttacaaataatgaacgtatctagggaccttactgtcgacgag

SEQ ID NO: 13043 - DNA, 260 bp, Unknown; identical to SEQ ID NO: 13035
  Description of Unknown: LeftRegion for integrase B44 sequence

SEQ ID NO: 13044 - DNA, 260 bp, Unknown; identical to SEQ ID NO: 13042
  Description of Unknown: LeftRegion for integrase B45 sequence

SEQ ID NO: 13045 - DNA, 260 bp, Unknown; identical to SEQ ID NO: 13040
  Description of Unknown: LeftRegion for integrase B46 sequence

SEQ ID NO: 13046 - DNA, 260 bp, Unknown; identical to SEQ ID NO: 13035
  Description of Unknown: LeftRegion for integrase B47 sequence

SEQ ID NO: 13047 - DNA, 260 bp, Unknown
  Description of Unknown: LeftRegion for integrase B48 sequence
tgaattgtttagatcataataaactaatttgttttattgaaaagtaaaaaagacgcctcgcgcgcgaacacgaagcgttgaaatgaaaaaccacaaaagctatcacacttaaaacaaaaatagaagaaacaaccaactataattgtataggtttttctatacgattatagcataaaattataaagaaagaaagtgctataatgaatttagatacatttttacaaataatgaacgtatctagggaccttactgtcgacgag

SEQ ID NO: 13048 - DNA, 260 bp, Unknown
  Description of Unknown: LeftRegion for integrase B49 sequence
tgctcgaaatgtacgttttcttgctcgaaaggtaaaaaaacataaaaaaaagacgcctcgcgcgcgaacacgaagcgttgaaatgaaaaaccacaaaagctatcacacttaaaacaaaaatagaagaaacaaccaactataattgtataggtttttctatacgattatagcataaaattataaagaaagaaagtgctataatgaatttagatacatttttacaaataatgaacgtatctagggaccttactgtcgacgag

SEQ ID NO: 13049 - DNA, 260 bp, Unknown
  Description of Unknown: LeftRegion for integrase B50 sequence
ttgctcgaaatgtacgttttcttgctcgaatggtaaaaaagcataaaaaaagacgcctcatgcgcgaacatgaagcgttgaaatgaaaaaccacaaaagctatcacacttaaaacaaaaatagaagaaacaaccaactataattgtataggtttttctatacgattatagcataaaattataaagaaagaaagtgctataatgaatttagatacatttttacaaataatgaacgtatctagggaccttactgtcgacgag

SEQ ID NO: 13050 - DNA, 260 bp, Unknown
  Description of Unknown: LeftRegion for integrase B51 sequence
ttgctcgaaatgtacgttttcttgctctaatggtaaaaaagcataaaaaaagacgcctcgcgcgcgaacacgaagcgttgaaatgaaaaaccacaaaagctatcacacttaaaacaaaaatagaagaaacaaccaactataattgtataggtttttctatacgattatagcataaaattataaagaaagaaagtgctataatgaatttagatacatttttacaaataatgaacgtatctagggaccttactgtcgacgag

SEQ ID NO: 13051 - DNA, 260 bp, Unknown
  Description of Unknown: LeftRegion for integrase B52 sequence
ttgttcgaaatgtacgttttcttgctcgaatggtaaaaaagcataaaaaaagacgcctcatgcgcgaacatgaagcgttgaaatgaaaaaccacaaaagctatcacacttaaaacaaaaatagaagaaacaaccaactataattgtataggtttttctatacgattatagcataaaattataaagaaagaaagtgctataatgaatttagatacatttttacaaataatgaacgtatctagggaccttactgtcgacgag

SEQ ID NO: 13052 - DNA, 260 bp, Unknown
  Description of Unknown: LeftRegion for integrase B53 sequence
ttgctcgaaatgtacgttttcttgctcgaatggtaaaaaagcatagaaaaagacgcctcgcgcgcgaacacgaagcgttgaaatgaaaaaccacaaaagctatcacacttaaaacaaaaatagaagaaacaaccaactataattgtataggtttttctatacgattatagcataaaattataaagaaagaaagtgctataatgaatttagatacatttttacaaataatgaacgtatctagggaccttactgtcgacgag

SEQ ID NO: 13053 - DNA, 260 bp, Unknown
  Description of Unknown: LeftRegion for integrase B54 sequence
tgctcgaaatgtacgttttcttgctcgaaaggtaaaaaagcataaaaaaaagacgcctcgcgcgcgaacacgaagcgttgaaatgaaaaaccctaaaagctatcacacttaaaacaaaaatagaagaaacaaccaactataattgtataggcttttctatacgattatagcataaaattataaagaaagaaagtgctataatgaatttagatacatttttacaaatgatgaacgtatctagggaccttactgtcgacgag

SEQ ID NO: 13054 - DNA, 260 bp, Unknown
  Description of Unknown: LeftRegion for integrase B55 sequence
ttgctcgaaatgtacgttttcttgctcgaaaggtaaaaaaacataaaaaaagacgcctcgcgcgcgaacacgaagcgttgaaatgaaaaaccacaaaagctatcacacttaaaacaaaaatagaagaaacaaccaactataattgtataggtttttctatacgattatagcataaaattataaagaaagaaagtgctataatgaatttagatacatttttacaaataatgaacgtatctagggaccttactgtcgacgag

SEQ ID NO: 13055 - DNA, 260 bp, Unknown
  Description of Unknown: LeftRegion for integrase B56 sequence
tgctcgaaatgtaggttttcttgctcgaaaggtaaaaagacataaaaaaaagacgcctcatgcgcgaacatgaagcgttgaaatgaaaaaccacaaaagctatcacacttaaaacaaaaatagaagaaacaaccaactataattgtataggtttttctatacgattatagcataaaattataaagaaagaaagtgctataatgaatttagatacatttttacaaataatgaacgtatctagggaccttactgtcgacgag

SEQ ID NO: 13056 - DNA, 260 bp, Unknown
  Description of Unknown: LeftRegion for integrase B57 sequence
tgctcgaaatgtacgttttcttgctcgaaaggtaaaaaaacataaaaaaaagacgcctcgcgcgcgaacacgaagcgttgaaatgaaaaaccctaaaagctatcacacttaaaacaaaaatagaagaaacaaccaactataattgtataggcttttctatacgattatagcataaaattataaagaaagaaagtgctataatgaatttagatacatttttacaaataatgaacgtatctagggaccttactgtcgacgag

SEQ ID NO: 13057 - DNA, 260 bp, Unknown
  Description of Unknown: LeftRegion for integrase B58 sequence
tgaattgtttagatcataataaactaatttgttttattgaaaagtaaaaaagacgcctcatgcgcgaacatgaagcgttgaaatgaaaaaccacaaaagctatcacacttaaaacaaaaatagaagaaacaaccaactataattgtataggtttttctatacgattatagcataaaattataaagaaagaaagtgctataatgaatttagatacatttttacaaataatgaacgtatctagggaccttactgtcgacgag

SEQ ID NO: 13058 - DNA, 260 bp, Unknown
  Description of Unknown: LeftRegion for integrase B59 sequence
gaattgtttagatcataacaaactaatttgttttattgaaaaataaaaaaagacgcctcgcgcgcgaacacgaagcgttgaaatgaaaaaccctaaaagctatcacacttaaaacaaaaatagaagaaacaaccaactataattgtatagatttttctatatgattatagcataaaattataaagaaagaaagtgctataatgaatttagatacatttttacaaataatgaacgtatctagggaacttactgtcgacgag

SEQ ID NO: 13059 - DNA, 260 bp, Unknown; identical to SEQ ID NO: 13042
  Description of Unknown: LeftRegion for integrase B60 sequence

SEQ ID NO: 13060 - DNA, 260 bp, Unknown; identical to SEQ ID NO: 13042
  Description of Unknown: LeftRegion for integrase B61 sequence

SEQ ID NO: 13061 - DNA, 260 bp, Unknown; identical to SEQ ID NO: 13037
  Description of Unknown: LeftRegion for integrase B62 sequence

SEQ ID NO: 13062 - DNA, 260 bp, Unknown; identical to SEQ ID NO: 13035
  Description of Unknown: LeftRegion for integrase B63 sequence

SEQ ID NO: 13063 - DNA, 260 bp, Unknown
  Description of Unknown: LeftRegion for integrase B64 sequence
aattgtttagatcataataaactaatttgttttattgaaaaataaaaaaaagacgcctcgcgcgcgaacacgaagcgttgaaatgaaaaaccctaaaagctatcacacttaaaacaaaaatagaagaaacaaccaactataattgtataggcttttctatacgattatagcataaaattataaagaaagaaagtgctataatgaatttagatacatttttacaaataatgaacgtatctagggaccttactgtcgacgag

SEQ ID NO: 13064 - DNA, 260 bp, Unknown; identical to SEQ ID NO: 13054
  Description of Unknown: LeftRegion for integrase B65 sequence

SEQ ID NO: 13065 - DNA, 260 bp, Unknown
  Description of Unknown: LeftRegion for integrase B66 sequence
tgaattgtttagatcataataaactaatttgttttattgaaaagtaaaaaagacgcctcgcgcgcgaacacgaagcgttgaaatgaaaaaccctaaaagctatcacacttaaaacaaaaatagaagaaacaaccaactataattgtataggtttttctatacgattatagcataaaattataaagaaagaaagtgctataatgaatttagatacatttttacaaataatgaacgtatctagggaccttactgtcgacgag

SEQ ID NO: 13066 - DNA, 260 bp, Unknown; identical to SEQ ID NO: 13057
  Description of Unknown: LeftRegion for integrase B67 sequence

SEQ ID NO: 13067 - DNA, 260 bp, Unknown; identical to SEQ ID NO: 13054
  Description of Unknown: LeftRegion for integrase B68 sequence

SEQ ID NO: 13068 - DNA, 260 bp, Unknown
  Description of Unknown: LeftRegion for integrase B69 sequence
ttattatagatatcatggactttaataaagtaacttatatatgatgcaatttagatatattaaataaaattaattttctatttgcatcatatatttttatatacagattttactttttgaaatataagtaatgtgtttacatattggaaatactatatttaagggtattttcaatataaaaccttagggaggtttgacttatgaaggctgcaatttattcaagaaaatcaaaatttactggaaaaggagactctatagaa

SEQ ID NO: 13069 - DNA, 260 bp, Unknown
  Description of Unknown: LeftRegion for integrase B70 sequence
aagacggatggattgtaaaaacagaattataaagttgcgtgaaagcacaggactgaaccggaaagatttttgcaagctcgtccatattccttaccggactatgactgaatgggaattggacaaccgccatgcaccggattatgtgctgtggcttttggagtattatatccgcaacgagggacttatggtaaaaggaaggaatgagggaggtggagattctgaaaaagaaacaacttaaatgctatctttatacaagagtg

SEQ ID NO: 13070 - DNA, 260 bp, Unknown
  Description of Unknown: LeftRegion for integrase B71 sequence
aagacggatggattgtaaaaacagaattattaagttgcgtgaaagcacaggactgaaccggaaagatttttgcaagctcgtccatattccttaccggactatgactgaatgggaattggacaaccgccatgcaccggattatgtgctgtggcttttggagtattatatccgcaacgagggacttatggtaaaaggaaggaatgagggaggtggagattctgaaaaagaaacaacttaaatgctatctttatacaagagtg

SEQ ID NO: 13071 - DNA, 260 bp, Unknown
  Description of Unknown: LeftRegion for integrase B72 sequence
atggttgagctttatacgatacaaagatatttgcaatataacactcttgcagaaaatcatttactgcattttgacgaatgggcaagtacatttggagaaactgtaactgcaatcgaacttaatcctgagggctatactttaataggacgataaaattaactgtcctaaattgaaaatacataaggaaggaggttaagagaatgtcaaggacttcaaagattacagcactttatgagagattatcaagagatgatgacctg

SEQ ID NO: 13072 - DNA, 260 bp, Unknown
  Description of Unknown: LeftRegion for integrase B73 sequence
agggctatactttagtaggacgataaataatgcgtttctaaattgaaaataggctatcaaaatcggtcttggaacttcaaaaaaatattttgattttcttgaaaaacagttccgctttgtacccctattttctcctattagcagagggagtaatccctgtaatgctaaatcggattacataaggaaaggaggataagagaatgtcaaggagttcaaagattacagcactctatgagcgtttgtcgagagatgatgatctt

SEQ ID NO: 13073 - DNA, 260 bp, Unknown
  Description of Unknown: LeftRegion for integrase B74 sequence
acgtatttgtcaatatgaatatacgtgttttacgtaatataaattcaaagggcgcaataaccacaaaaaacgcccccggtgctaccaacaccgagagcgtttccgaatcagattgccccataaggtgatatggtaacaaccgaccaacagccatattgtaccaccttgcgggcaggattgcaaacccaaaaggtgataccatgaaaaagaagcaaccaaatacccgccatggccgggctgcgatttacgcccggtattcg

SEQ ID NO: 13074 - DNA, 260 bp, Unknown
  Description of Unknown: LeftRegion for integrase B75 sequence
gagaacagtaatttttcttatatgactcgccgcattggcggcaccacctataaagttaaagtagtattcagtgatacagagaaggaaacgatggaggataaaattttacggatgattcgcaatgaaacggttacaactggcggaacttgtggtataatagattcaccacaaatgagccgacagtctgaaaggagcgcatcatgagcgtaaaacagactgaaggaaaaatcacagctttatatgaaaggctgtcccgtgat

SEQ ID NO: 13075 - DNA, 260 bp, Unknown
  Description of Unknown: LeftRegion for integrase B76 sequence
acgttcaaggccgatcatttaccttgtaagcacatttacaagctggccttaattaaagggctgattcagtagttttataataaaataaaaacagccggtcaacgactgcaatcactgaccggctttaataccaggcaaccgaaaaaggtcttctgatattggaaataagcaccctatattatagcaaagaaggccagaaaatgcaatcggctttcttttttataccctttttcggttcctggagaaaggggcttttcatg

SEQ ID NO: 13076 - DNA, 260 bp, Unknown
  Description of Unknown: LeftRegion for integrase B77 sequence
acccggatagtgacaatgtcgaagacgacgagacgctcaatctgattttcgacgaagaagggtctgagggaactgagaatcgccttgacgctctcgtggaagcagcagtcgcagctggatttgaaattgtcgagcgcgacttcacgaaggacgctatcgagcgcgacgaaagagacgcacaagcaaggggcgctaaataggtggcacgaaaaaatcccaagataccagatgccacccatccactctcctgcgtcctgtac

SEQ ID NO: 13077 - DNA, 260 bp, Unknown
  Description of Unknown: LeftRegion for integrase B78 sequence
acgctttacttcatgatgacaagttaataaatcaatttaaagataaccataatggaaattatgagtttgaagcaaatttatttgcagtagcattactatttaatgaagaagactttaatattaagtttaataaattagataattacatcctacagggaattcttgatagcaatatagaattagtctaaggagatgataaattgaacaccattgctatttatactcgtaaatctaaattcactggaaaaggtgaatctatt

SEQ ID NO: 13078 - DNA, 260 bp, Unknown
  Description of Unknown: LeftRegion for integrase B79 sequence
cgttcaaggccgatcatttaccttgtaagcacatttacaagctggccttaattaaagggctgattcactagttttataataaaataaaaacagccggtcaacgactgcaatcactgaccggctttaataccaggcaaccgaaaaaaggtcttctgatattggaaataagcaccctatattatagcagagaaggccaggaaatgcaatcggctttcttttttataccctttttcggttcctggagaaaggggcttttcatg

SEQ ID NO: 13079 - DNA, 260 bp, Unknown; identical to SEQ ID NO: 13075
  Description of Unknown: LeftRegion for integrase B80 sequence

SEQ ID NO: 13080 - DNA, 260 bp, Unknown
  Description of Unknown: LeftRegion for integrase B81 sequence
gtactttctggccgcccaaacaatgcgttgcaacatttcagaagtaaacggaaaatatgaacttgagaaattaaactaactgaataaaaaacagccggtcaacgactgcaatcactgaccggctttaataccaggcaaccgaaaaaggtcttctgatattggaaataagcaccctatattatagcagagaaggccaggaaatgcaatcggctttcttttttataccctttttcggttcctggagaaaggggcttttcatg

SEQ ID NO: 13081 - DNA, 260 bp, Unknown
  Description of Unknown: LeftRegion for integrase B82 sequence
gtactttttggccgctcaaacaatgcgttgcaacatttcagaagtaaacggaaagtatgaactagagaaattaaattaactgaataaaaaacagccggtcaacgactgcaatcactgaccggctttaataccaggcaaccgaaaaaggtcttctgatattggaaataagcaccctatattatagcagagaaggccaggaaatgcaatcggctttcttttttataccctttttcgattcttggggaaaggggtttttcatg

SEQ ID NO: 13082 - DNA, 260 bp, Unknown
  Description of Unknown: LeftRegion for integrase B83 sequence
tattttctggccgctcaaacaatgcgttgtaacatttcggaagtaaacggaaaatatgaactagaaaaattaaactaactgaataataaaacagccggtcaacgactgcaatcactgaccggctttaataccaggcaaccgaaaaaggtcttctgatattggaaataagcaccctatattatagcagagaaggccaggaaatgcaatcggctttcttttttataccctttttcgattcctggggaaaggggcttttcatg

SEQ ID NO: 13083 - DNA, 260 bp, Unknown
  Description of Unknown: LeftRegion for integrase B84 sequence
cgttcaaggccgatcatttaccttgtaaacatatttacaagttggccttaatcaaagggctgattcagtagttttacaataaaataaaaaacagccggtcaacgactgcaatcattgaccggctttaataccaggcaaccgaaaaaggtcttctgatattggaaataagcaccctatattatagcaaagaaggccagaaaatgcaatcggctttcttttttataccctttttcggttcctggagaaaggggcttttcatg

SEQ ID NO: 13084 - DNA, 260 bp, Unknown
  Description of Unknown: LeftRegion for integrase B85 sequence
tattttctggccgctcaaacaatgcgttgtaacatttcggaagtaaacggaaaatatgaactagaaaaattaaactaactgaataataaaacagccggtcaacgactgcaatcattgaccggctttaataccaggcaaccgaaaaaggtcttctgatattggaaataagcaccctatattatagcaaagaaggccagaaaatgcaatcggctttcttttttataccctttttcggttcctggagaaaggggcttttcatg

SEQ ID NO: 13085 - DNA, 260 bp, Unknown
  Description of Unknown: LeftRegion for integrase B86 sequence
gtactttttggccgctcaaacaatgcgttgcaacatttcagaagcaaacggaaagtatgaactagagaaattaaattaactgaataaaaaacagccggtcaacgactgcaatcactgaccggctttaataccaggcaaccgaaaaaggtcttctgatattggaaataagcaccctatattatagcagagaaggccaggaaatgcaatcggctttcttttttataccctttttcggttcctggagaaaggggcttttcatg

SEQ ID NO: 13086 - DNA, 260 bp, Unknown
  Description of Unknown: LeftRegion for integrase B87 sequence
cgttcaaggccgatcatttaccttgtaagcacatttacaagctggccttaattaaagggctgattcagtagttttataataaaataaaaacagccggtcaacgactgcaatcactgaccggctttaataccaggcaaccgaaaaaaggtcttctgatattggaaataagcaccctatattatagcaaagaaggccagaaaatgcaatcggctttcttttttataccctttttcggttcctggagaaaggggcttttcatg

SEQ ID NO: 13087 - DNA, 260 bp, Unknown; identical to SEQ ID NO: 13075
  Description of Unknown: LeftRegion for integrase B88 sequence

SEQ ID NO: 13088 - DNA, 260 bp, Unknown
  Description of Unknown: LeftRegion for integrase B89 sequence
acgttcaaggccgatcatttaccttgtaagcacatttacaagctggccttaattaaagggctgattcagtagttttataataaaataaaaacagccggtcaacgactgcaatcactgaccggctttaataccaggcaaccgaaaaaggtcttctgatattggaaataagcaccctatattatagcaaagaaggccagaaaatgcaatcggctttcttttttataccatttttcggttcctggagaaaggggcttttcatg

SEQ ID NO: 13089 - DNA, 260 bp, Unknown
  Description of Unknown: LeftRegion for integrase B90 sequence
gttcaaggccgatcatttaccttgtaaacatatttacaagttggccttaatcaaagggctgattcagtagttttacaataaaataaaaaacagccggtcaacgactgcaatcattgaccggctttaataccaggcaaccgaaaaaaggtcttctgatattggaaataagcaccctatattatagcagagaaggccaggaaatgcaatcggctttcttttttataccctttttcggttcctggagaaaggggcttttcatg

SEQ ID NO: 13090 - DNA, 260 bp, Unknown
  Description of Unknown: LeftRegion for integrase B91 sequence
cgttcaaagccgatcacttaccttgtaagcacatttacaagttggccttaattaaagggctgattcagtagttttacaataaaataaaaaacagccggtcaacgactgcaatcactgaccggctttaataccaggcaaccgaaaaaggtcttctgatattggaaataagcaccctatattatagcagagaaggccaggaaatgcaatcggctttcttttttataccctttttcggttcctggggaaaggggcttttcatg

SEQ ID NO: 13091 - DNA, 260 bp, Unknown
  Description of Unknown: LeftRegion for integrase B92 sequence
cctggcgaaaatagcagctatgggagttcttgtgaatcttacccagggcagctatgaatttgatataccaatcagcgaaattaaagatgtgcaggaaaagaaacggcttttcagcaaaaccctttctgtgactacagcttccggagaggaatatcaatttgcatttactaaactggtggagtggcaaatcgctttttccaatgccctttctgctgaaagataacggggttactgacactatggcaaagagagaattgatg

SEQ ID NO: 13092 - DNA, 260 bp, Unknown
  Description of Unknown: LeftRegion for integrase B93 sequence
ttgtcagaccccacagaccctatattgtcagaccctgacaaaccccttgtagagaacatagtttcagtacttgtagattccttatttaaacagacctttatggaaaaatctgatggttgttcataaggcatatctgcgttacaataggcaccaccaaaggacttatgagcagattgtttgtttttgaaaggagtttagttatggctatattgaataatgagatgcaggtaatactttccacagatgcagaggaaatgtct

SEQ ID NO: 13093 - DNA, 260 bp, Unknown
  Description of Unknown: LeftRegion for integrase B94 sequence
atatcgccaactggtcggccgctcaaggtgcaactaccgcaccgcagcccgttcagcaggtagtggagcagaaaccgtctcccgccgatgaaatccgcaaatacaagggcctgctggatgacggtatcatcacgcaggaagaatttgaagctaagaaaaagcaactgctgggcctgtaaatttgaaaggagcgtgacggcatgagaaaaaagtccaacctcaatgcggctactcgtgccgtcatctatgccaggtattcc

SEQ ID NO: 13094 - DNA, 260 bp, Unknown
  Description of Unknown: LeftRegion for integrase B95 sequence
ctgtagcgattgcggatttagctttgactttacaacgcaaaaagatatcgatgacaagtgtaaatcattgttaaatggcggaataggctctattgtagttgcggtcattttggggattgctatgtttgctataaatggatatctgcattgaaaacgaataaaagtgttatgtgttgattaaaaggttagggggtgacagtttgagttcagttgacaaaatcgccgtcgtttacgcgcggtattcatcccacggtcagacc

SEQ ID NO: 13095 - DNA, 260 bp, Unknown
  Description of Unknown: LeftRegion for integrase B96 sequence
gaatacgtgacatgccttgcagggcgtagatggtctttgactaagcgggcaaagcaagtgatagagaagtatcccggcctgttggacgaaggacgaaagagagccgaaatactatccggtgagaaataaagcgccccggtgcgtccgccaagacacatcaccggggcaacagtctctcctagaaaggagacgattagattatggcacacaagacggcggttctatacgcccgctattcctcggacaagcagcgcgaggcg

SEQ ID NO: 13096 - DNA, 260 bp, Unknown
  Description of Unknown: LeftRegion for integrase B97 sequence
gcttcgcaatttggaaaacatctgcaagctaaaatccaagagcaagtgaacagcgaaagcaattcttctcttttacttgaacagatgaacgaattgtttaacaatgtttccaaattgtccgaaactgaacaaaaggctttttataccggacttgtaaaagggatagagcgttgggaaaatgaacagaagggggaataataatgccggaagcattaaacgcggtcatatacgcccgctattcctccgatcgtcagacagaa

SEQ ID NO: 13097 - DNA, 260 bp, Unknown
  Description of Unknown: LeftRegion for integrase B98 sequence
gacggaataaggcattttcacaactaaataaaaacagccggccaacgactgcaatcatcgaccggctttaataccaggcaaccgaaaaacggccttctgatattggaaataagcaccatatattatagcaaagaaggcctgaaaaatcaatcggctttcttttttataccctttttcggtgcctggggaaagggctatttatggcatacgccaagaagaaaaaaatcctgaatttctggacaaagaaaaaggcggcttta

SEQ ID NO: 13098 - DNA, 260 bp, Unknown
  Description of Unknown: LeftRegion for integrase B99 sequence
acggaataaggtattttgtaaccgaataaaaacagccggtcaacgactgcaatcatcgaccggctttaataccaggcaaccgaaaaacggccttctgatattggaaataagcaccctatattatagcaaagaaggccggaaaaatcaatcggctttcttttttatacccttttttcggtgcctggggaaaggggctatttatggcatacgccaaagcgaaaaaacacctgaaaatctggacgaagaaaaaggcggcgtta

SEQ ID NO: 13099 - DNA, 260 bp, Unknown
  Description of Unknown: LeftRegion for integrase B100 sequence
cggaataagtgtatttaacaataaaataaaaaacagccggtcaacgactgcaatcactgaccggctttaataccaggcaaccgaaaaacggccttctgatattggaaataagcaccctatattatagcaaagaaggccaggaaaatcaatcggctttctttttatacccttttttcggtgcctggggaaaggggcttttcatggcttatgtcaggaataagaaaaagatcctgaaattctggtcgaaaaagaaagcggct

SEQ ID NO: 13100 - DNA, 260 bp, Unknown
  Description of Unknown: LeftRegion for integrase B101 sequence
ggaataagtgtatttaacaataaaataaaaaacagccggtcaacgactgcaatcatcgaccggctttaataccaggcaaccgaaaaaacggccttctgatattggaaataagcaccctatattatagcaaagaaggccaaaaaaatcaatcggctttcttttttataccttttttcggtgcctggggaaaggggctatttatggcatacgccaaagcgaaaaagcacctgaaaatctggacgaagaaaaaggcggctttg

SEQ ID NO: 13101 - DNA, 260 bp, Unknown
  Description of Unknown: LeftRegion for integrase B102 sequence
acggaataaggtattttgtaaccgaataaaaacagccggtcaacgactgcaatcatcgaccggctttaataccaggcaaccgaaaaacggccttctgatattggaaataagcaccatatattatagcaaagaaggcctgaaaaatcaatcggctttcttttttatacccttttttcggtgcctggggaaaggggctatttatggcatacgccaaaacaaaaaaacacctgaaaatctggacgaagaaaaaggcggcttta

SEQ ID NO: 13102 - DNA, 260 bp, Unknown
  Description of Unknown: LeftRegion for integrase B103 sequence
acggaataaggtattttgtaaccgaataaaaacagccggtcaacgactgcaatcatcgaccggctttaataccaggcaaccgaaaaacggccttctgatattggaaataagcaccatatattatagcaaagaaggcctgaaaaatcaatcggctttcttttttatacccttttttcggtgcctggggaaaggggatatttatggcatacgccaaaacaaaaaaacacctgaaaatctggacgaagaaaaaggcggcttta

SEQ ID NO: 13103 - DNA, 260 bp, Unknown
  Description of Unknown: LeftRegion for integrase B104 sequence
ggctgattcagtagttttataataaaataaaaacagccggtcaacgactgcaatcactgaccggctttaataccaggcaaccgaaaaaggtcttctgatattggaaataagcaccctatattatagcagagaaggccaggaaatgcaatcggctttcttttttatacccttttttcggttcctggggaaaggggcttttcatggcttatgtcaggaacaagaaaaagatcctgaaattctggtcgaaaaagaaagcggcc

SEQ ID NO: 13104 - DNA, 260 bp, Unknown
  Description of Unknown: LeftRegion for integrase B105 sequence
acggaataaggtattttgtaaccgaataaaaacagccggtcaacgactgcaatcatcgaccggctttaataccaggcaaccgaaaaacggccttctgatattggaaataagcaccatatattatagcaaagaaggcctgaaaaatcaatcggctttcttttttatacccttttttcggcgcctggggaaaggggctatttatggcatacgccaaaacaaaaaaacacctgaaaatctggacgaagaaaaaggcggcttta

SEQ ID NO: 13105 - DNA, 260 bp, Unknown; identical to SEQ ID NO: 13098
  Description of Unknown: LeftRegion for integrase B106 sequence

SEQ ID NO: 13106 - DNA, 260 bp, Unknown
  Description of Unknown: LeftRegion for integrase B107 sequence
agacggaataaggtattttgtaaccgaataaaaacagccggtcaacgactgcaatcatcgaccggctttaataccaggcaaccgaaaaacggccttctgatattggaaataagcaccctatattatagcaaagaaggcctgaaaaatcaatcggctttcttttttataccctttttcggtgcctggggaaagggctatttatggcatacgccaagaagaaaaaaatcctgaatttctggacaaagaaaaaggcggcttta

SEQ ID NO: 13107 - DNA, 260 bp, Unknown
  Description of Unknown: LeftRegion for integrase B108 sequence
gctgattcagtagttttataataaaataaaaacagccggtcaacgactgcaatcactgaccggctttaataccaggcaaccgaaaaaaggtcttctgatattggaaataagcaccctatattatagcaaagaaggccaggaaaatcaatcggctttcttttttatacccttttttcggcgcctggggaaaggggcttttcatggcttatgtcaggaataagaaaaagatcctgaaattctggtcgaaaaagaaagcggct

SEQ ID NO: 13108 - DNA, 260 bp, Unknown
  Description of Unknown: LeftRegion for integrase B109 sequence
cggaataagtgtatttaacaataaaataaaaaaacagccggtcaacgactgcaatcatcgaccggctttaataccaggcaaccgaaaaacggccttctgatattggaaataagcaccctatattatagcaaagaaggccgaaaaaatcaatcggctttcttttttatacccttttcggtgcctggggaaaggggctatttatggcatacgccaaagtgaaaaaacacctgaaaatctggacgaagaaaaaggcggcttta

SEQ ID NO: 13109 - DNA, 260 bp, Unknown
  Description of Unknown: LeftRegion for integrase B110 sequence
ctgattcagtagttttacaataaaataaaaaacagccggtcaacgactgcaatcactgaccggctttaataccaggcaaccgaaaaaggtcttctgatattggaaataagcaccctatattatagcagagaaggccaggaaatgcaatcggctttcttttttataccccttttttcggttccttgggaaaggggcttttcatggcttatgtcaggaataagaaaaagattctgaaattctggtcgaaaaagaaagcggcc

SEQ ID NO: 13110 - DNA, 260 bp, Unknown
  Description of Unknown: LeftRegion for integrase B111 sequence
acggaataaggcattttgtaaccgaataaaaacagccggtcaacgactgcaatcattaaccggctttaataccaggcaaccgaaaaacggccttctgatattggaaataagcaccctatattatagcaaagaaggccggaaaaatcaatcggctttcttttttatacccttttttcggtgcctggggaaaggggctatttatggcatacgccaaagcaaaaaaacacctgaaaatctggacgaagaaaaaggcggcgtta

SEQ ID NO: 13111 - DNA, 260 bp, Unknown
  Description of Unknown: LeftRegion for integrase B112 sequence
gacggaataaggcattttgtaaccgaataaaaacagccggtcaacgactgcaatcattaaccggctttaataccaggcaaccgaaaaacggccttctgatattggaaataagcaccctatattatagcaaagaaggccggaaaaatcaatcggctttcttttttataccttttttcggtgcctggggaaaggggctatttatggcatacgccaaagcaaaaaaacacctgaaaatctggacgaagaaaaaggcggcgtta

SEQ ID NO: 13112 - DNA, 260 bp, Unknown
  Description of Unknown: LeftRegion for integrase B113 sequence
cggaataagtgtatttaacaataaaataaaaaaacagccggtcaacgactgcaatcatcgaccggctttaataccaggcaaccgaaaaacggccttctgatattggaaataagcaccctatattatagcaaagaaggccgaaaaaatcaatcggctttcttttttataccctttttggtgcctggggaaaggggctatttatggcatacgccaaagtgaaaaaacacctgaaaatctggacgaagaaaaaggcggcttta

SEQ ID NO: 13113 - DNA, 260 bp, Unknown
  Description of Unknown: LeftRegion for integrase B114 sequence
acggaataaggtattttgtaaccgaataaaaacagccggtcaacaactgcaatcatcgaccggctttaataccaggcaaccgaaaaacggccttctgatattggaaataagcaccctatattatagcaaagaaggccggaaaaatcaatcggctttcttttttatacccttttttcggtgcctggggaaaggggctatttatggcatacgccaaagcgaaaaaacacctgaaaatctggacgaagaaaaaggcggcgtta

SEQ ID NO: 13114 - DNA, 260 bp, Unknown
  Description of Unknown: LeftRegion for integrase B115 sequence
agacggaataaggtattttgtaaccgaataaaaacagccggtcaacgactgcaatcatcgaccggctttaataccaggcaaccgaaaaacggccttctgatattggaaataagcaccatatattatagcaaagaaggcctgaaaaatcaatcggctttcttttttataccctttttcggcgcctggggaaagggctatttatggcatacgccaagaagaaaaaaatcctgaatttctggacaaagaaaaaggcggcttta

SEQ ID NO: 13115 - DNA, 260 bp, Unknown; identical to SEQ ID NO: 13098
  Description of Unknown: LeftRegion for integrase B116 sequence

SEQ ID NO: 13116 - DNA, 260 bp, Unknown
  Description of Unknown: LeftRegion for integrase B117 sequence
gacggaataaggtattttgtaaccgaataaaacagccggtcaacgactgcaatcatcgaccggctttaataccaggcaaccgaaaaacggccttctgatattggaaataagcaccctatattatagcaaagaaggccggaaaaatcaatcggctttcttttttatacccttttttcggtgcctggggaaaggggctatttatggcatacgccaaagcgaaaaaacacctgaaaatctggacgaagaaaaaggcggcgtta

SEQ ID NO: 13117 - DNA, 260 bp, Unknown
  Description of Unknown: LeftRegion for integrase B118 sequence
ctgattcagtagttttacaataaaataaaaaacagccggtcaacgactgcaatcactgaccggctttaataccaggcaaccgaaaaaaggtcttctgatattggaaataagcaccctatattatagcagagaaggccaggaaatgcaatcggctttcttttttatacccttttttcggttcctggggaaaggggcttttcatggcttatgtcaggaacaagaaaaagatcctgaaattctggtcgaaaaagaaagcggcc

SEQ ID NO: 13118 - DNA, 260 bp, Unknown
  Description of Unknown: LeftRegion for integrase B119 sequence
acggaataagtgtatttaacaataaaattaaaaacagccggtcaacgactgcaatcatcgaccggctttaataccaggcaaccgaaaaatggccttctgatattggaaataagcaccctatattatagcaaagaaggccagaaaaatcaatcggctttcttttttatacccttttcggtgcctggggaaaggggctatttatggcatacgccaaagcaaaaaaacacctgaaaatctggacgaagaaaaaggcagctttg

SEQ ID NO: 13119 - DNA, 260 bp, Unknown
  Description of Unknown: LeftRegion for integrase B120 sequence
ggctgattcagtagttttataataaaataaaaacagccggtcaacgactgcaatcactgaccggctttaataccaggcaaccgaaaaaggtcttctgatattggaaataagcaccctatattatagcagagaaggccaggaaatgcaatcggctttcttttttatacccttttttcggttcctggggaaaggggcttttcatggcttatgtcaggaataagaaaaagatcctgaaattctggtcgaaaaagaaagcggct

SEQ ID NO: 13120 - DNA, 260 bp, Unknown
  Description of Unknown: LeftRegion for integrase B121 sequence
ggaataagtgtatttaacaataaaataaaaaaaacagccggtcaacgactgcaatcatcgaccggctttaataccaggcaaccgaaaaacggccttctgatattggaaataagcaccctatattatagcaaagaaggccgaaaaaatcaatcggctttcttttttatacccttttcggtgcctggggaaaggggctatttatggcatacgccaaagtgaaaaaacacctgaaaatctggacgaagaaaaaggcggcttta

SEQ ID NO: 13121 - DNA, 260 bp, Unknown
  Description of Unknown: LeftRegion for integrase B122 sequence
aactagaaaaattaaactaactgaataataaaacagccggtcaacgactgcaatcactgaccggctttaataccaggcaaccgaaaaaggtcttctgatattggaaataagcaccctatattatagcagagaaggccaggaaatgcaatcggctttcttttttatacccttttttcggttcctggggaaaggggcttttcatggcttatgtcaggaataagaaaaagatcctgaaattctggtcgaaaaagaaagcggcc

SEQ ID NO: 13122 - DNA, 260 bp, Unknown
  Description of Unknown: LeftRegion for integrase B123 sequence
gaacttgagaaattaaactaactgaataaaaaacagccggtcaacgactgcaatcactgaccggctttaataccaggcaaccgaaaaaaggtcttctgatattggaaataagcaccctatattatagcagagaaggccgggaaatgcaatcggctttcttttttataccctttttcggttcctgaagaaaggggcttttcatggcttatgtcagaaataagaaaaagatcctgaaattctggtcgaaaaagaaagcggct

SEQ ID NO: 13123 - DNA, 260 bp, Unknown
  Description of Unknown: LeftRegion for integrase B124 sequence
ggctgattcagtagttttataataaaataaaaacagccggtcaacgactgcaatcactgaccggctttaataccaggcaaccgaaaaaggtcttctgatattggaaataagcaccctatattatagcaaagaaggccagaaaatgcaatcggctttcttttttatacccttttttcggttcctggagaaaggggcttttcatggcttatgtcaggaataagaaaaagatcctgaaattctggtcgaaaaagaaagcggct

SEQ ID NO: 13124 - DNA, 260 bp, Unknown
  Description of Unknown: LeftRegion for integrase B125 sequence
aactagaaaaattaaactaactgaataataaaacagccggtcaacgactgcaatcactgaccggctttaataccaggcaaccgaaaaaggtcttctgatattggaaataagcaccctatattatagcagagaaggccaggaaatgcaatcggctttcttttttatacccttttttcggttcctggggaaaggggcttttcatggcttatgtcaggaacaagaaaaagatcctgaaattctggtcgaaaaagaaagcggct

SEQ ID NO: 13125 - DNA, 260 bp, Unknown; identical to SEQ ID NO: 13103
  Description of Unknown: LeftRegion for integrase B126 sequence

SEQ ID NO: 13126 - DNA, 260 bp, Unknown
  Description of Unknown: LeftRegion for integrase B127 sequence
gacggaataaggtattttgtaaccgaataaaaacagccggtcaacgactgcaatcatcgaccggctttaataccaggcaaccgaaaaacggccttctgatattggaaataagcaccctatattatagcaaagaaggccggaaaaatcaatcggctttcttttttataccctttttcggtacctggggaaaggggctatttatggcatacgtcaaagcgaaaaaacacctgaaaatctggacgaagaaaaaggcggcttta

SEQ ID NO: 13127 - DNA, 260 bp, Unknown
  Description of Unknown: LeftRegion for integrase B128 sequence
cggaataaggcatttttgttactaaataaaaaacagccggtcaacgactgcaatcattaaccggctttaataccaggcaaccgaaaaacggccttctgatattggaaataagcaccctatattatagcaaagaaggccagaaaaatcaatcggctttcttttttataccctttttcggtgcctggggaaaggggctatttatggcatacgccaaagcaaaaaaacacctgaaaatctggacgaagaaaaaggcggctttg

SEQ ID NO: 13128 - DNA, 260 bp, Unknown
  Description of Unknown: LeftRegion for integrase B129 sequence
gaataagtgtatttaacaataaaataaaaaaaaacagccggtcaacgactgcaatcatcgaccggctttaataccaggcaaccgaaaaacggccttctgatattggaaataagcaccctatattatagcaaagaaggccgaaaaaatcaatcggctttcttttttatacccttttcggtgcctggggaaaggggctatttatggcatacgccaaagtgaaaaaccacctgaaaatctggacgaagaaaaaggcggcttta

SEQ ID NO: 13129 - DNA, 260 bp, Unknown
  Description of Unknown: LeftRegion for integrase B130 sequence
gacacacctcctgaaacagatactcttatggttgtcattgttgatgacgaagaaggatttgttaagaaaatcagcattgatgaagatactgtgacccttcgctcttttaacccacactatcctccccgtgtttttggcggtgttgaaattggacgattgcgctttgtcggtagagtcatggagttaaaaaggagatttgcatgaaaaaatttccaatcgacctctcctgtctgacagaggaagaaatctctcaatttcaa

SEQ ID NO: 13130 - DNA, 260 bp, Unknown
  Description of Unknown: LeftRegion for integrase B131 sequence
taatggggtctttgatagcgaaatacgccgataaaatagatttagacagcttacctgacgttcctaaatatgttgagaatgtaaataataaagaaaaaactttgaattgtttggtcgatgctcttgtattttagagattgttgcgttataataatataatcgtgacttatagttccaaactcttatgaggagtgagaatgatgagaaaaaaggtctacatatatacgagagtatcaaccagtatgcaagttgacggttat

SEQ ID NO: 13131 - DNA, 260 bp, Unknown
  Description of Unknown: LeftRegion for integrase B132 sequence
cgtaactactaatgaattgttaggtattgatatagtagaatatacagttacagatttagaagaaactcttaaaattattttgcaatcagatgaattagaaatagatggattgacagttactgaaaatgaaaaagaagaattaaaagatttctttagcttggctgtaaatagtataaaaagaaggaggaaaaaagaataaaatggaaacagtggggatatactctaggaagagtaaatttactggcaaaggtgaaagcata

SEQ ID NO: 13132 - DNA, 260 bp, Unknown
  Description of Unknown: LeftRegion for integrase B133 sequence
ttagaggtttctaccaacgaactacttggaattgatatagtagaacacaccgtagatgatatcttagatactgttgaagccatatttgaatctgatgagttaaagatagatgatattaaattgacttctaaagaaaaggaaattcttaaatctatatatataaacggaatagatataattagattaatgaggtcaaactcatgaaaagagtagctgtttatagccgaaaatcaaagtttactggaaaaggtgattctatc

SEQ ID NO: 13133 - DNA, 260 bp, Unknown
  Description of Unknown: LeftRegion for integrase B134 sequence
ccttacggtctgtgtcgtgtcgctcccggttggcttgatcattgtagccgttggagcgtaccgggcggtaaaggctggggatatttatgacgctgcggttgctcggtacgagcagcaaatctcggactatgttgactggctggatgaagtcaacgcaaaataaaaagccgccctcggtgggcggcgggaggttgctctgaatgtgtgcaaaaaagaaaccggccatgcttgagccggatatgcaggatgccgtgatctac

SEQ ID NO: 13134 - DNA, 260 bp, Unknown
  Description of Unknown: LeftRegion for integrase B135 sequence
ccttgcggtctgcattgtgtcgctcccggtcggcttgatcattgcgtccgttggagtgtaccgggcggtaaaggccggggatatttatgacgctgcggttgctcggtacgagcagcaaatctcggactatgttgactggctggatgaagtcaacgcaaaataaaaagccgccctcggtgggcggcgggaggttgctctgaatgtgcgcaaaaaagaaaccggccatgcttgagccggatatgcaggatgccgtgatctac

SEQ ID NO: 13135 - DNA, 260 bp, Unknown
  Description of Unknown: LeftRegion for integrase B136 sequence
agacaaaaacggaaatggcttgcgctcttttgaagcagtatcttgtaaaaggtgatatggcatcaaaagaaatctatgaaaggcttggagaagctggaataagtcgcagaaccatagctgagacaaaacatgtgctgggaatacaaagctatagaaaaatgcgccagtggtactggacgctcagggaataaggtgaaaccgtgaaagaaaacagtggacaagaccgtaagcagaaaatccgtgataaatataaaggcacg

SEQ ID NO: 13136 - DNA, 260 bp, Unknown
  Description of Unknown: LeftRegion for integrase B137 sequence
acaggtcttttgattgcgtgtagtgacccggcgcaaaagaaaattgacagagccgatgccttgaatattccaatcatttcagagcagcaatggtatgaactcatgccagaacttgaagccgttggaatgtggaacggaaagcaaattctgtttgcggacaatgatggcatctaccgtgttgaagtgggcggtgaaagctgatggccagaaaaaagaatattgctgctggcctcgatgccgtcatctatgcccggtactca

SEQ ID NO: 13137 - DNA, 260 bp, Unknown
  Description of Unknown: LeftRegion for integrase B138 sequence
acaatattttcgagccaatcatttataagtcgccaatggtgggcgggcaatattttgataacagaaatgctctgtatctaacttaattatacgattggcgaagaaatgcgtcaatacggaaaataagtattgaaaatagttggaacaagtactaaaataaggttgggacaataaaacagagttatactgcgaggaagattatgaagaataaaaagattaaatgcgatatatataccagagtatccacaaccatgcaggta

SEQ ID NO: 13138 - DNA, 260 bp, Unknown
  Description of Unknown: LeftRegion for integrase B139 sequence
ggaaagcactggcatgaatcgcaaggaattttgtaaatattttcagattccctatcggactgtgacagaatgggaactggataaccgccatgcgccggaatatgtactccgtttgttggagtactacattcagaatgaaggtctggcgaagaagaaagtaacggatgaatgtttagagctggaagaaaggggcggcctgcatgaagaaaactaaaacaaaatgttatctctacacacgggtatctacatccatgcaggtg

SEQ ID NO: 13139 - DNA, 260 bp, Unknown
  Description of Unknown: LeftRegion for integrase B140 sequence
ctttaatctgaaagaacgggtagacatcataaccgacgatgacaagttcaacatcaacacgattctcaacgcagacaagcagcgtgaggcactgataaaaatggctgaagactacatttatctgaatccgcctgaccaccagaagtggttgaatggagtggtttctgccatcacaaacttacgggaggacggataaggatatggcaaaggatgaaaacaaggaatcggaaatccgaggcgatgagcaagaaatcgtagac

SEQ ID NO: 13140 - DNA, 260 bp, Unknown
  Description of Unknown: LeftRegion for integrase B141 sequence
ttgcaaagcaacaatggctacttgatgtatgtcaagtgcaatgaactaaaaatagtgattgtggaaaaaaatcaagagaacgtactcttatagtatagagcagcaacgctcatgcaaggatggcaagtgtaccagtgtttttgtacatttcccttatgaatttgccccttgtacaatgaaagaacaaggaggcgttcgaaatgacagactatattgggaattacaagaatcgaccgcgcagggtggtgttttatggccgc

SEQ ID NO: 13141 - DNA, 260 bp, Unknown
  Description of Unknown: LeftRegion for integrase B142 sequence
atatttcacatatctgccaacaaaggaacagctaaaagcagagattgaaaggcagaaagaaatattttatatgcagcatcctgcattgtctgaaaaagataaagaagatatgaagaaatagtaagacagctaatacaattcagttgttcggaattcccgaacagctgaagggagaattttgacacaggagataacatctgatgaaaaaacagcagaaatgttacatatatacaagagtttccatttccatgcaggtagat

SEQ ID NO: 13142 - DNA, 260 bp, Unknown
  Description of Unknown: LeftRegion for integrase B143 sequence
agacgaaaacggaagtggcttgcacccttctaaagcaatatcttgtaaaaggtgatatggcatcaaaagaaatctatgaaaggcttggagaggcaggaattagccgcagaaccatagctgagacaaaacgtgtgttaggaatacagagctatagaaaaatgcgccagtgggactggacgcttaaagaataaggtgaaaccgtgaaggaaaacagtggacaagaccgtaagcagaaaattcgtgataaatataaaggcaca

SEQ ID NO: 13143 - DNA, 260 bp, Unknown
  Description of Unknown: LeftRegion for integrase B144 sequence
aattttcgggcatatcagccaaaaatacttggcgttgttcgatgcggccataacatatatgaaataaaaaaaccgcccacggcggcaaccgtaggcggtttacatagacagcttgttcaaaagaggaacaatgcagcccaagcaactgcattatacctctttcgggcgggcttttacaagtctcccggaggtgtttttttatgagtttggcgctggagctggcacaaacgcaaattgcacgggcgaagccggcagaagat

SEQ ID NO: 13144 - DNA, 260 bp, Unknown
  Description of Unknown: LeftRegion for integrase B145 sequence
cataaagataagcttcttttgaattcatctttcactatgaatttaaaagaagaatatcaagctgatctattcgctacttacatgtatatgaactataaagatataaatcaatctaaggatatatgtatttaccctaaaagaatatcagaacttaaagaaaaattttaactaagatattgaaattactaggaggtttatatatgaaaactgtcgctatatatagtagaaaatctcgttttactggtaaaggtgattctatt

SEQ ID NO: 13145 - DNA, 178 bp, Unknown
  Description of Unknown: LeftRegion for integrase B146 sequence
agcttcatagcgctggcgatagtgatcgaatatattcatggcatgccgtccttttgtataatctgggaacatttgcgaatcagcacttttagcgtaattcttcaacgggataaaaaaaatgctccgtccaataagttatgaacgcgtctcaacttttcagcaagtggagatgggcaaa

SEQ ID NO: 13146 - DNA, 247 bp, Unknown
  Description of Unknown: LeftRegion for integrase B147 sequence
ctctaggggttggcgaagtacttcaagtacacttctgttaaattccggcaactcaatcaagcgaaaacacttgcacagttgtgattttcgctgtaactttgcacttactagaatgagtaagaggtatgtagttatactgtatctcagattcatactacaaagttaacgattaaaaacggaatataatatgaaagcagccttcttaattagatgctccactaaatatcaagacttggataggcaagtt

SEQ ID NO: 13147 - DNA, 260 bp, Unknown
  Description of Unknown: LeftRegion for integrase B148 sequence
ggtggtgggtggttccggcagcggcaagacccggttttggctcaagcccaaccttttacaatgtcacagttcctatgtggttactgacccaaagggttataattatcaaggataaagcaaagatgcgtttacaaagttagaaaaatatcgtatctttgttacatatcgtgttcccactaaaaataaaagaaggtgaaactatggcgaaatccaaccaaggaaaaatcacggcactgtacgaaaggctttccagagatgat

SEQ ID NO: 13148 - DNA, 260 bp, Unknown
  Description of Unknown: LeftRegion for integrase B149 sequence
agtatttctatataggtaatttagagaataagtatccaattgctagactgcaagatatggtaaactaatattttaagtgtatttgattttttctactaacatcacaacaaaataacatataaatatatttagagtattagtttagcatataaatgcttctaatactcttttgtgtttttatgagaaaggagacgatataaatggattcaaagaatcaagaagaaaaaagaattgctggtatttatattcgtgttagtaca

SEQ ID NO: 13149 - DNA, 260 bp, Unknown
  Description of Unknown: LeftRegion for integrase B150 sequence
cgttctgccgcattggcataggcactgcgatcttgccggcagatggtaagaaactcctgcagtgtgaactcttcgtccttggcagcttcgtagcgctggcgatagtgatcgaatatattcatggcatgccgtcctttcgtatactatgggaacattttgatttaatacttttagcgtagttcttcaacgggataaaaattatgctccgtcctatatgttatgagcgagtatcaagcattcagcaaatcgaagggggcgga

SEQ ID NO: 13150 - DNA, 109 bp, Unknown
  Description of Unknown: LeftRegion for integrase B151 sequence
acattttgatttaatacttttagcgtagttcttcaacgggataaaaattatgctccgtcctatatgttatgagcgagtatcaagcattcagcaaatcgaagggggcgga

SEQ ID NO: 13151 - DNA, 260 bp, Unknown
  Description of Unknown: LeftRegion for integrase B152 sequence
taaaatagctaaaatttgacatttctgaaaatcgtgatataatactatcagtaaattatttatgtttacctgttaggagttgattatatgtttttggtttgttccaagaaaatatattgtaatataaacagatttaagagatgtcaaggataacttgtgtgttttctttgatatctcttttttgttaggaggtttataaattggttgatgaaaagaaaaaatgtggattgtatatgagggtttctacagaagaccaagct

SEQ ID NO: 13152 - DNA, 260 bp, Unknown
  Description of Unknown: LeftRegion for integrase B153 sequence
atcacggaagattcacgaagtttccatctgcgcaaggatgcttgccgcgcggaatccgcctgtcgggatctattttatctcagaagatatgtacacacttgcctcgtattatcgcgaagatcttcgggagccttgcttctttcccacacctgattgggagatactgcccgatgatgaattggacctgagaggtatgctccatgagtaactccacaaagaaagcagctgaacaggcagaacgcgaaaaggtaaagagacgg

SEQ ID NO: 13153 - DNA, 260 bp, Unknown
  Description of Unknown: LeftRegion for integrase B154 sequence
tgacatttcttgaaatcgtgatataatatagccaattaatgcatatagctgttcgtcaaaagctatatgtttacgagcactttgaaaaatttatattatattacaattatattgtattttgttaaacggatttaagagatgtcaaaagtactcgtattgtactttgatgtctcttttttgttagattggaggtttgaaaattgaaagatgaaaagaaaaaatgtggcttatatatgagagtatcaacagaagaccaagca

SEQ ID NO: 13154 - DNA, 260 bp, Unknown
  Description of Unknown: LeftRegion for integrase B155 sequence
atccaggaagatccacgaaatttccatctgtgcaaggatgcttgccgcacggaatccgcctgtcggaatctactttatctcagaagatatgtatacacttgcttcgtattatcgtgacgatcttcgggaaccgtgcttctatcccgcacctgactgggagatactgcccgatgatgaattggacctgagaggtatgcttcatgagtaactccacaaagaaagcagctgaacaggcagagcgggaaaaggtaaaaaaacgg

SEQ ID NO: 13155 - DNA, 260 bp, Unknown
  Description of Unknown: LeftRegion for integrase B156 sequence
ttttgacatttctaaaaatcgtgatataatgttgccagtaaaattattatgtttattaggagatgttgtatatgattttaagcaaattgtatttaacaatagatatatttaatgcaaagaggtgtcaatagtagttttgagtgctattgtgcctcttttctttatttttatataaatttttagaatggaggttttacaagttgaacaatgaaaagaaaaaatgtggattatacttaagagtatcaacagatgatcaagca

SEQ ID NO: 13156 - DNA, 260 bp, Unknown
  Description of Unknown: LeftRegion for integrase B157 sequence
ctaactattgactttttaagacaaaaatattattatatatagcaactgaaagtatattcctaaatgtattaatgggggttatgcattatgggaataaaaaagaaattttattttaatagtaaaagttagagagataaaggtagtagtatgtatttctattgcttttatctctctttttttgaagaaaggatgtgttatgtgtggaaagcaaagttaaaaatctatgtggactatatttaagggtatcaactgaagatcaa

SEQ ID NO: 13157 - DNA, 260 bp, Unknown
  Description of Unknown: LeftRegion for integrase B158 sequence
tgaagttggtaaaaaggttcgtgaaaccattgccgaattaggcggtaccatgcccgaagatttgcccaccccagaaaaaagcataaaacagatagaaaaagagcataagaaagcttctattgaaattgatgaatagtaaagcgattgcatctatcattggttagcttgcttatagtttataagcatttgaggtgatttttgtgtactgcatttatttaagaaaatcccgtgccgatatggaggccgaggccagaggcgaa

SEQ ID NO: 13158 - DNA, 260 bp, Unknown
  Description of Unknown: LeftRegion for integrase B159 sequence
gttatgatattttccgtgacaaagagggcgtattcgttattccatacggagcgcagcaggtaaaacagcccgatgggcaatatgtttatgattttccgaacgatgaagtaaccgatatgctgaataagcatcattgcaatagatgtgctggcggttatgttacaaaggcgcgcgagtaagcccgaaaggagcgtgacggcatgaaaaagcgaatcaacactaattccgcagcccgtgctgtcatctatgcccggtattcc

SEQ ID NO: 13159 - DNA, 260 bp, Unknown
  Description of Unknown: LeftRegion for integrase B160 sequence
gtttgtaagctattgacattgttttcaaaaatgatattataaataaccaatgaaagagtattctctagaaagagaggtacatctatgataaaatatatatgtaaacaaaattttataataattaacgttttgaggagtcagtagtatttagactttactaatactactttctcctctttttttgtaaaggagttgagtttatgggaatattaaataacgacattaaagttcgtgctggtctttatatgagggtatcaact

SEQ ID NO: 13160 - DNA, 260 bp, Unknown
  Description of Unknown: LeftRegion for integrase B161 sequence
cgtcagataatcctactctctctgacatggaacaattattagtaactacattccgtaatacggatacattaggacaggctaatatcatacacgcttgtttggctgagcgtgatagagttgaaaaaggtaaagtcgaacatactgaaaaagaaaagagcattgctgccgtataataaatttgtcagaatggaggaaacgccatgtatgaggatataaaaacagcctgcctatatgtcagattctcaagccataaccagact

SEQ ID NO: 13161 - DNA, 260 bp, Unknown
  Description of Unknown: LeftRegion for integrase B162 sequence
cgctgcacttcaaagaaaacggcaaggaggatatgaacgataaaatcaagcggctgatcaaaatgggctgcgaaggttgagaaagcgaggaattacgatgaaaacccggaaatatttacattgtccgctttactgcggcttagaaatcggctatactgtaattgccacaaatgagctggctgtctgaaagaggtatcgttatgaacaacagacagtcacaagaaaaaatcaccgccatctattgccgcctgagccgcgac

SEQ ID NO: 13162 - DNA, 260 bp, Unknown
  Description of Unknown: LeftRegion for integrase B163 sequence
gcgtattggaacaacttgaaacagccgaaacggctattcttagattctcctgcgaggaaagcggagaagtttatgatcacactcttacccaaaatgagatagatgcgctatattgcggattactattgagggtaaacaacagagagttaagcaatcttatttatcgttacaataatccaaagtgaagcgggaggtgcagaatgtctccacgcaagaaactggcggaccagcaggaacgctattccggcaccgccgtcatc

SEQ ID NO: 13163 - DNA, 260 bp, Unknown
  Description of Unknown: LeftRegion for integrase B164 sequence
gatacacctcctgaaacagatactcttatggttgtcattgttgatgacgaagaaggatttgttaagaaaatcagcattgatgaagatactgtgacccttcgctcttttaacccacactatcctccccgtgtttttggcggtgttgaaattggacgattgcgctttgtcggtagagtcatggagctaaaaaggagatttgcatgaaaaaatttccaatcgacctctcctgtctgacagaggaagaaatctctcaatttcaa

SEQ ID NO: 13164 - DNA, 260 bp, Unknown
  Description of Unknown: LeftRegion for integrase B165 sequence
ttcgttccggacggctgagggtaaggacgtttctgaaaagctgctccctgccctgaacaatctcggcacggcttttgcccatatcattccgtcatttcatccgattgatctgctggttggaattgctgttggcgttgctatgaaatttgtgatgaaaatgagagccgccaataaaaagaagttccggcaaggcacagagtatggctctgccgtatgtggtgcataatcttaactgtaaggaaaactatgtggacgcagga

SEQ ID NO: 13165 - DNA, 260 bp, Unknown
  Description of Unknown: LeftRegion for integrase B166 sequence
tgcgttccggacagctgagggtaaggacgtttcggaaaaactgctccctgccctgaacaatctcggcacagcgtttgcccatatcattccatcttttcacccggttgatctgctggttggaattgctgttggcgttgctatgaaatttgtgatgaaaatgagagctgccaacaaaaagaagttccggcaaggcacagagtatggctctgctgtatgtggtgcataatcttaactgtaaggaaaactatgtggacgcagga

SEQ ID NO: 13166 - DNA, 260 bp, Unknown
  Description of Unknown: LeftRegion for integrase B167 sequence
tggcttaaaataggcaaataatagcaaatatgtcttgactttaaataaaaaatatttataataaatggtaattaatttgtttcgtgtattgggggttgatatatatgaaacaaataaaatttaagtataacataaacaagattattataagaggtgtcaaaggcataatttgattaagtgtctttgtcacctcttttttgatgaagaataagaagaaaggaaatgatttattaatgagtgaagaaaagaaaattgcaggt

SEQ ID NO: 13167 - DNA, 260 bp, Unknown
  Description of Unknown: LeftRegion for integrase B168 sequence
acagctgcaggggaagtgatcgagtgtgccggtggtcttttggggctgccggtctttttgtgctatgggaaccgcatagggaaaggcagcttttggagtgatatttttggtcgttctgcgagttggcggtaagtgctgactccgatatattatatgcaaggcaaccgtatgacgatgggcaaccgaaatgaggtggaaatttgagaaagaaatgttacatatatacccgtgtttctacggcagtgcaggtggacggatac

SEQ ID NO: 13168 - DNA, 260 bp, Unknown
  Description of Unknown: LeftRegion for integrase B169 sequence
tgagattacgatcctgactcgtatgcttgctgctcttgaaaaaccggtcgggatctactttgtttcggagaacatcttcacgcttgcctcctattaccagcatgacaatcatgacagggagttctttccctcaggagattgggaagtgctgccggaggatgaggcggaagaacttccgctcttaatgggaggtgtagaagatgcttgataccgagagcaagcgtcggaaagaacagcagaagcagaaggttaagaagcgg

SEQ ID NO: 13169 - DNA, 260 bp, Unknown
  Description of Unknown: LeftRegion for integrase B170 sequence
cgctgtcgataaagccacaggtattgacgatcaccatgtcggcgtcgtcgtagctcggtacgacgtcatagccttcggtacgcagttcagtcaggattcgctccgaatcaaccaggtttttcgggcatcctaatgatataaaaccaatcttagacatttttttgtacaattatttgctcacaatgccggggattatatagatgccgcaactttatagctacatcaggtggtcaagtgatcgccaagagaaagggacaacc

SEQ ID NO: 13170 - DNA, 260 bp, Unknown
  Description of Unknown: LeftRegion for integrase B171 sequence
ctacgagatcacatttcttgcaagaatcctcgcagcgttggcgaaaccagtcggcatctattttgtatccgaagatatttttacgatggcttcctgctatcaggataccctgcacgattggggcatgttccccgatcattggtcagtcctcccggacaatatttccgaggaaagtcttcttttagcaggagaacattcagatgcataattcggaagccagacgacgcaaggagcggcaaaaggaacagatcaagcagcga

SEQ ID NO: 13171 - DNA, 260 bp, Unknown
  Description of Unknown: LeftRegion for integrase B172 sequence
aaacgattatgttactgggtacgagtcgcggcaggcttccgcatccgctgcacaatcagtctcatccaacacggttgtttcagttgtggatgaaattcgcggcttgaagcagctgttggacgagggtattctaacggaagaagaatttacagcaaagaaaaagcagcttctcggaatttgaaagtgaacggtgatggttgatggccagaaaaaagaatatcgctgctggcctcgatgccgtcatctatgcccggtactcg

SEQ ID NO: 13172 - DNA, 260 bp, Unknown
  Description of Unknown: LeftRegion for integrase B173 sequence
ttttgactagtaactgaataatcgtgcatagttagagcttccgctaggaggctctattttttgttctcacgagctacttctttcaaaaaatattacttttcaataaccagagggatgctgctatacctctggttattttcaatttgatcggaggtccaatatactaattgcaaagactttgtaccattggagctaaatcgatgaatcagaatgaagcaaagctctctaaagaagagcagaaagctaaaatacgagaacga

SEQ ID NO: 13173 - DNA, 260 bp, Unknown
  Description of Unknown: LeftRegion for integrase B174 sequence
ctcagagctgtaactgaataatggttttcaaatgagagcttccttcctgggggctcttttctcattgctttagcaaactttttcaaaaaaatatcgtttttcaataaccagagggatgcttgtatacctctggttattttcattttgatcggcggctcaatatactaaatgcaacatcatctatcattggagcacagtatatgaaccagaacgaagcgaagctctcaaaggaagagcagaaagcgaaaatacgagagcga

SEQ ID NO: 13174 - DNA, 260 bp, Unknown
  Description of Unknown: LeftRegion for integrase B175 sequence
tatttattctttaattatcacgattatttctacataaatgatttaactaatcaatatccactctcaagtttaagagaatttatcaaggctaactgatactaaaagttatttttgtttttgtaaagtataacgtaaaaaaggtgttagttagcaaataagctagtctaacgccttttttgttagagaatggaggttatttgatggaatataatgaacaaaataacactgaaaaaaagaatgttgcaggaatttatattcgt

SEQ ID NO: 13175 - DNA, 260 bp, Unknown
  Description of Unknown: LeftRegion for integrase B176 sequence
ttccaagaagacttatgaggtcgtgctctgtgccaggttgttggcagctcataagcctcctattgggatctatttcatttctgaggatctgtttaccctggcaagctactatcgtgaagacttatttgatacttacttccttccgagccctgactgggaggtgcttccggatgatgatgatgaaagacgaggttatttgaatgattgatctggacaagcgccgccttaaagaacagcagaaagcaagacaaagacaacgt

SEQ ID NO: 13176 - DNA, 260 bp, Unknown
  Description of Unknown: LeftRegion for integrase B177 sequence
aatctgcttttgttgatctacgctgagtgcttcaaacatggccaaggcttccttgtcagaaaccttaccttctttgttagtgatatgacatattctactccaatcttaggaagttcttcctatgtattagcgccaagtgatattatagcactttatctttcgtttgccattggtaaatagaggaaaggataacggacattatgacagttaaaaaatttccaatcgacctctcctgtctgacagaggaagaaatctctcaa

SEQ ID NO: 13177 - DNA, 109 bp, Unknown
  Description of Unknown: LeftRegion for integrase B178 sequence
agacatttttttgtacaatcagttgctcacaatgccggggattatatagatgccgcaactttatagctatatcaggtggtcaagtgatcgccaagaaaaaggaacaacc

SEQ ID NO: 13178 - DNA, 260 bp, Unknown
  Description of Unknown: LeftRegion for integrase B179 sequence
gatacaccccctgaaacagatactcttatggttgtcattgttgatgacgaagaaggatttgttaagaaaatcagcattgatgaagatactgtgacccttcgctcttttaatccacactatcctccccgtgtttttggcggtgttgaaattggacgattgcgctttgtcggtagagtcatggagttaaaaaggagatttgcatgaaaaaatttccaatcgacctctcctgtctgacagaggaagaaatctctcaatttcag

SEQ ID NO: 13179 - DNA, 260 bp, Unknown
  Description of Unknown: LeftRegion for integrase B180 sequence
gatacacctcccgaaacagatactcttatggttgtcattattgatgacgaagaaggatttgttaagaaaatcagtattgatgaagatactgtgacccttcgttcttttaacccgcactatcctccccgtgtttttggcggtgttgaaattggacgattgcgctttgttggtagagtcatggagctaaaaaggagatttgcatgaaaaaatttccaattgacctctcctgtctgacagaggaagaaatctctcaatttcaa

SEQ ID NO: 13180 - DNA, 260 bp, Unknown
  Description of Unknown: LeftRegion for integrase B181 sequence
gatttatcattgtttgaacgaggaaagtataacacagaatttcaaatttttctaccgtctatgtgacatgacaagccttttttgaaaaatcgtcactttgacgggcgataaagaagcagaaaccactatacagacagccgccccgtatggtatactatttgtacggaatagcggggcggctgtcggaaatggaggaaaccatgattagacagaccacccaattagcacccgttaccgccctttacgcaagattgagtaaa

SEQ ID NO: 13181 - DNA, 260 bp, Unknown
  Description of Unknown: LeftRegion for integrase B182 sequence
acaagcgacaaacaggcataagaaaacggcagaaatcctttattttcaaaggtttctgccgttttgaatatactccttctcagaagatctatacactttggcatcgtattatcgcgacgatcttcgagagccttgttttctcccagctccagactggaagatcctacctgatgatgagctggacgtgagaggtgcactccatgagtaaatcaaccaaaaaagcagccgatcaagcagaacgcgagaaagtacacaagcga

SEQ ID NO: 13182 - DNA, 260 bp, Unknown
  Description of Unknown: LeftRegion for integrase B183 sequence
gtccagagatgcccaagaaatgacgatttgtgcaagaatactcgccgctcgcaagcctcctgttggcatctacttcatatcagaagatctatacactttggcctcatattatcgtgatgaccttcgggagccctatttcttcccaacatccggctggaaaatcttgcctgatgacgagctggatatgagaggtgctctccatgagtaaatcagcaaagaaagcagccgaccaagcagaacgtgagaaagtacataagcga

SEQ ID NO: 13183 - DNA, 260 bp, Unknown
  Description of Unknown: LeftRegion for integrase B184 sequence
gtccagagatgctcaagaaatggcgatttgcgcaagaatgctcgctgctcgcaagcctcctgttggcatctacttcatatcagaagatctatacactttggcatcgtattatcgcgacgatcttcgagagccttgttttctcccaacccctgactggaagatcctgcctgatgacgagctggatatgagaggtgcactccatgagtaaatcagccaagaaagccgctgatcaagcagaacgcgagaaagtacataagcga

SEQ ID NO: 13184 - DNA, 260 bp, Unknown
  Description of Unknown: LeftRegion for integrase B185 sequence
gtccagagatgcccaagaaatgacgatttgcgcaagaatgctcgctgctcgcaagcctcctgttggcatctacttcatatcagaagatctatacactttggcctcatattatcgtgatgaccttcgggaaccctgtttcttcccaacaccagactggaaaatcttgcctgatgacgagctggatatgagaggtgctctccatgagtaaatcagcaaagaaagcagccgaccaagcagaacgcgagaaagtacataagcga

SEQ ID NO: 13185 - DNA, 260 bp, Unknown; identical to SEQ ID NO: 13184
  Description of Unknown: LeftRegion for integrase B186 sequence

SEQ ID NO: 13186 - DNA, 260 bp, Unknown
  Description of Unknown: LeftRegion for integrase B187 sequence
gtccagagatgctcaagaaatggcgatttgcgcaagaatgctcgctgctcgcaagcctcctgttggcatctacttcatatcagaagatctatacactttggcatcgtattatcgcgacgatcttcgagatccttgttttctcccaacccctgactggaagatcctgcctgatgacgagctggatatgagaggtgcgctccatgagtaaatcagcaaagaaagcagccgaccaagcagaacgtgagaaagtacataagcga

SEQ ID NO: 13187 - DNA, 109 bp, Unknown
  Description of Unknown: LeftRegion for integrase B188 sequence
agacatttttttgtacaatcagttgctcacattgccggggattatatagatgccacaactttatagctacatcaggtggtcaacagatcgccaggacaaagggacaacc

SEQ ID NO: 13188 - DNA, 260 bp, Unknown
  Description of Unknown: LeftRegion for integrase B189 sequence
aaaggaatccgagcaagtcggcccaacagtcacctcatttcaacgagaggggtggctgttgggtcaattgttcaaaaagaaaaactgaagataataaaaagtcttgatttctccatcaaaacatggtatatacattatacgaaacagtgctttgaaagaacgctccaccgttcaatgacgtgtaaagagaggtgcttgccatgaccgctgtgatctacgcccgctattccagtgataaccagcgcgaagaatccatcgaa

SEQ ID NO: 13189 - DNA, 260 bp, Unknown
  Description of Unknown: LeftRegion for integrase B190 sequence
catgaaactggccggataatctagactgtatttagctcgtgagatggatatatacctgtcctctaggggttggcgaagtacttcaagtacacttctattaaattccggcaactcaatataaagaaatcacttgcatagttctgtgacttttggtaatttcgcttccgaaacgaagataacgaatttaaaaccaacagaatatgaaggcagcatttctaatcagatgttctactaagaatcaagatttaaacagacagacc

SEQ ID NO: 13190 - DNA, 199 bp, Unknown
  Description of Unknown: LeftRegion for integrase B191 sequence
tccagcggttggcgaagaacctccaatacgttgcggctgtactctggcagttcaatataaagaaatcacttgcatagttctgtgacttttggtaatttcgcttccgaaacgaagataacgaatttaaaaccaacagaatatgaaggcagcatttctaatcagatgttctactaagaaccaagatttaaacagacagacc

SEQ ID NO: 13191 - DNA, 109 bp, Unknown
  Description of Unknown: LeftRegion for integrase B192 sequence
ggtaatttcgcttccgaaacgaagataacgaattaaataccaaacaaatatgaaagcagcatttctaatcagatgttctactaagaaccaagatttaaacagacagacc

SEQ ID NO: 13192 - DNA, 236 bp, Unknown
  Description of Unknown: LeftRegion for integrase B193 sequence
ggcgcatgacctcgagcacgctccggttgaattcgggcaattcaatcaagcgaaaacacttgcacagttgtgattttcgctgtaactttgcacttactagaatgagtaagaggtatgtagttatactgtatctcagattcatactacaaagttaacgattaaaaacggaatataatatgaaagcagccttcttaataagatgctctactaaatatcaagacttggataggcaagtt

SEQ ID NO: 13193 - DNA, 260 bp, Unknown
  Description of Unknown: LeftRegion for integrase B194 sequence
cataaaacttgccgggtactctacattgcatcggatgcgtgacacggtaatcttcctatcttccagcggttggcgaagaacctccaatacgttgcggctgtactctggcagttcaatataaagaaatcacttgcatagttctgtgacttttggtaatttcgcttccgaaacgaagataacgaatttaaaaccaacagaatatgaaggcagcatttctaatcagatgttctactaagaaccaagatttaaacagacagacc

SEQ ID NO: 13194 - DNA, 260 bp, Unknown
  Description of Unknown: LeftRegion for integrase B195 sequence
catgaaactggccggataatctagactgtatttagctcgtgagatggatatatacctgtcctctaggggttggcgaagtacttcaagtacacttctattaaattccggcaactcaacatagtaaaatcacttgcacagttctgtaacttttggtaatttcgcttccgaaacgaagataacgaattaaataccaaacaaatatgaaggcagcatttctaatcagatgttctactaagaaccaagatttaaacagacagacc

SEQ ID NO: 13195 - DNA, 260 bp, Unknown
  Description of Unknown: LeftRegion for integrase B196 sequence
cataaaactggcagggtattccacattgcttttcacacgggaaatggtgatctttcggtcttccagcggttggcggaggacttccagtacgctgcgattgaattctggcaattcaatataaagaaatcacttgcatagttctgtgacttttggtaatttcgcttccgaaacgaagataacgaatttaaaaccaacagaatatgaaggcagcatttctaatcagatgttctactaagaaccaagatttaaacagacaaacc

SEQ ID NO: 13196 - DNA, 201 bp, Unknown
  Description of Unknown: LeftRegion for integrase B197 sequence
cctctaggggttggcgaagtacttcaagtacacttctgttaaattccggcaactcaacataaagaaatcacttgcacagttatgtaacttttggtaatttcgcttccgaaacgaagataacgaattaaataccaaacaaatatgaaagcagcatttctaatcagatgttctactaagaaccaagatttaaacagacagacc

SEQ ID NO: 13197 - DNA, 260 bp, Unknown
  Description of Unknown: LeftRegion for integrase B198 sequence
catgaagttggccggataatcaacagataagcgggcacgagagaccgttatcgtccggtcttccaatggttggcgcatgacctcgagcacgctccggttaaattcgggcaattcaacataaagaaattacttgcatagttctgtgacttttggtaatttcgcttccgaaacgaagataacgaattaaataccaaacaaatatgaaagcagcatttctaatcagatgttctactaagaaccaagatttaaacagacagacc

SEQ ID NO: 13198 - DNA, 260 bp, Unknown
  Description of Unknown: LeftRegion for integrase B199 sequence
atgcagggcttcagcgccgatcttctttggctgcgagtacgccgcagcatcgcacaataaaaatattccccgatacgcgtcgcgcggcacctcgcgtatcgggttttgtttttttgaggggggtaaagctcccagcccttgacaaaaaaaccgtttgcggttactatagccgcaaacgggttttttgtgaggtggttttaatgcatggcgcatatatccttgcgcgctactccacggacaggcaaaacgaggacagcata

SEQ ID NO: 13199 - DNA, 260 bp, Unknown
  Description of Unknown: LeftRegion for integrase B200 sequence
catgaaactggccggataatctagactgtatttagctcgtgagatggatatatacctgtcctctaggggttggcgaagtacttcaagtacacttctattaaattccggcaactcaacataaagaaatcacttgcatagttctataacttttggtaatttcgcttccgaaacgaagataacgaatttaaaaccaacagaatatgaaggcagcatttctaatcagatgttctactaagaaccaagatttaaacagacaaacc

SEQ ID NO: 13200 - DNA, 260 bp, Unknown
  Description of Unknown: LeftRegion for integrase B201 sequence
catgaaactggccggataatctagactgtatttagctcgtgagatggatatatacctgtcctctaggggttggcgaagtacttcaagtacacttctattaaattccggcaactcaacataaagaaattacttgcatagttctgtgacttttggtaatttcgcttccgaaacgaagataacgaatttaaaaccaacagaatatgaaggcagcatttctaatcagatgttctactaagaatcaagatttaaacagacagacc

SEQ ID NO: 13201 - DNA, 109 bp, Unknown
  Description of Unknown: LeftRegion for integrase B202 sequence
ggtaatttcgcttccgaaacgaagataacgaatttaaaaccaacagaatatgaaggcagcatttctaatcagatgttctactaagaaccaagatttaaacagacagacc

SEQ ID NO: 13202 - DNA, 260 bp, Unknown
  Description of Unknown: LeftRegion for integrase B203 sequence
catgaaactggccggataatccagactgtatttagctcgtgcgatggatatatgcctgtcctctaggggttggcgaagtacttcaagtacacttctgttaaattccggcaactcaacataaagaaattacttgcatagttctgtaacttttggtaatttcgcttccgaaacgaagataacgaatttaaaaccaacagaatatgaaggcagcatttctaatcagatgttctactaagaaccaagatttaaacagacagacc

SEQ ID NO: 13203 - DNA, 260 bp, Unknown
  Description of Unknown: LeftRegion for integrase B204 sequence
cataaagctggcagggtattctacattgctttttacacgggagatagtaattttacggtcctccaaaggttggcggagaacttccagcacactgcgattgaattccgggagttcaacataaagaaatcacttgcatagttctgtgacttttggtaatttcgcttccgaaacgaagataacgaatttaaaaccaacagaatatgaaggcagcatttctaatcagatgttctactaagaaccaagatttaaacagacagacc

SEQ ID NO: 13204 - DNA, 109 bp, Unknown
  Description of Unknown: LeftRegion for integrase B205 sequence
ggtaatttcgcttccgaaacgaagataacgaattaaataccaacagaatatgaaggcagcatttctaatcagatgttctactaagaaccaagatttaaacagacagacc

SEQ ID NO: 13205 - DNA, 260 bp, Unknown
  Description of Unknown: LeftRegion for integrase B206 sequence
cataaaactggcagggtattccacattgcttttcacacgggaaatggtgatctttcggtcttccagcggttggcggaggacttccagtacgctgcgattgaattctggcaactcaacataaagaaatcacttgcatagttctgtaacttttggtaatttcgcttccgaaacgaagataacgaatttaaaaccaacagaatatgaaggcagcatttctaatcagatgttctactaagaaccaagatttaaacagacagacc

SEQ ID NO: 13206 - DNA, 109 bp, Unknown; identical to SEQ ID NO: 13191
  Description of Unknown: LeftRegion for integrase B207 sequence

SEQ ID NO: 13207 - DNA, 221 bp, Unknown
  Description of Unknown: LeftRegion for integrase B208 sequence
tgacacggtaatcttcctatcttccagcggttggcgaagaacctccaatacgttacggctgtactctggcagttcaacataaagaaatcacttgcatagttctgtaacttttggtaatttcgcttccgaaacaaagataacgaacttaaaaccaacagaatatgaaggcagcatttctaatcagatgttctactaagaaccaagatttaaacagacagacc

SEQ ID NO: 13208 - DNA, 260 bp, Unknown
  Description of Unknown: LeftRegion for integrase B209 sequence
catgaaactggccggataatctagactgtatttagctcgtgagatggatatatacctgtcctctaggggttggcgaagtacttcaagtacacttctattaaattccggcaactcaacataaagaaatcacttgcatagttctgtgacttttggtaatttcgcttccgaaacgaagataacgaacttaaaaccaacagaatatgaaggcagcatttctaatcagatgttctactaagaaccaagatttaaacagacagacc

SEQ ID NO: 13209 - DNA, 151 bp, Unknown
  Description of Unknown: LeftRegion for integrase B210 sequence
aactcaatataaagaaatcatttgcatagttctgtgacttttggtaatttcgcttccgaaacgaagataacgaatttaaaaccaacagaatatgaaggcagcatttctaatcagatgttctactaagaatcaagatttaaacagacagacc

SEQ ID NO: 13210 - DNA, 260 bp, Unknown
  Description of Unknown: LeftRegion for integrase B211 sequence
catgaaactggccggataatccagactgtatttagctcgtgcgatggatatatgcctgtcctctaggggttggcgaagtacttcaagtacacttctgttaaattccggcaactcaacataaagaaatcacttgcatagttctgtgacttttggtaatttcgcttccgaaacgaagataacgaacttaaaaccaacagaatatgaaggcagcatttctaatcagatgttctactaagaaccaagatttaaacagacagacc

SEQ ID NO: 13211 - DNA, 201 bp, Unknown
  Description of Unknown: LeftRegion for integrase B212 sequence
cctctaggggttggcgaagtacttcaagtacacttctgttaaattccggcaactcaacataaagaaattacttgcatagttctgtgacttttggtaatttcgcttccgaaacgaagataacgaattaaataccaaacaaatatgaaagcagcatttctaatcagatgttctactaagaaccaagatttaaacagacagacc

SEQ ID NO: 13212 - DNA, 260 bp, Unknown
  Description of Unknown: LeftRegion for integrase B213 sequence
catgaaactggccggataatctagactgtatttagctcgtgagatggatatatacctgtcctctaggggttggcgaagtacttcaagtacacttctattaaattccggcaactcaacataaagaaatcacttgcatagttctgtaacttttggtaatttcgcttccgaaacgaagataacgaacttaaaaccaacagaatatgaaggcagcatttctaatcagatgttctactaagaaccaagatttaaacagacagacc

SEQ ID NO: 13213 - DNA, 260 bp, Unknown
  Description of Unknown: LeftRegion for integrase B214 sequence
catgaaactggccggataatctagactgtatttagctcgtgagatggatatatacctgtcctctaggggttggcgaagtacttcaagtacacttctattaaattccggcaactcaacataaagaaattacttgcatagttctgtgacttttggtaatttcgcttccgaaacgaagataacgaattaaataccaaacaaatatgaaagcagcatttctaatcagatgttctactaagaaccaagatttaaacagacagacc

SEQ ID NO: 13214 - DNA, 148 bp, Unknown
  Description of Unknown: LeftRegion for integrase B215 sequence
tcaatataaagaaatcacttgcatagttctgtgacttttggtaatttcgcttccgaaacgaagataacgaatttaaaaccaacagaatatgaaggcagcatttctaatcagatgttctactaagaatcaagatttaaacagacagacc

SEQ ID NO: 13215 - DNA, 260 bp, Unknown
  Description of Unknown: LeftRegion for integrase B216 sequence
cataaaactggcagggtattccacattgcttttcacacgggaaatggtgatctttcggtcttccagcggttggcggaggacttccagtacgctgcgattgaattctggcaactcaacatagtaaaatcacttgcatagttctgtaacttttggtaatttcgcttccgaaacgaagataacgaatttaaaaccaacagaatatgaaggcagcatttctaatcagatgttctactaagaaccaagatttaaacagacagacc

SEQ ID NO: 13216 - DNA, 260 bp, Unknown
  Description of Unknown: LeftRegion for integrase B217 sequence
ttttagaatcacgtttatatatcctctcaattccaaaatagtcaacacaaatttaaaaggcataccaaaccttattttatacacactttttcttattatgaaatgtactggaaggataatactatccctctggtccatttttatttataaatccattccttataattaaagtacttatggtaaagaaaggttgatatgcgatgaaggaaaacgaagaaaagctgagtagtgcggctgctcaaaaagaaaaaataagacag

SEQ ID NO: 13217 - DNA, 260 bp, Unknown
  Description of Unknown: LeftRegion for integrase B218 sequence
cataaaacttgccggatactctacattgcatcggatgcgtgacacggtaatcttcctatcttccagcggttggcgaagaacctccaatacgttgcggctgtactctggcagttcaacataaagaaatcacttgaatagttctgtaacttttgctaatttcgcttccgaaacgaagataacgaattaaataccaaacaaatatgaaagcagcatttctaatcagatgttctactaagaaccaagatttaaacagacagacc

SEQ ID NO: 13218 - DNA, 260 bp, Unknown
  Description of Unknown: LeftRegion for integrase B219 sequence
catgaaactggccggataatctagactgtatttagctcgtgagatggatatatacctgtcctctaggggttggcgaagtacttcaagtacacttctattaaattccgacaactcaacataaagaaatcacttgcatagttctgtaacttttggtaatttcgcttccgaaacgaagataacgaacttaaaaccaacagaatatgaaggcagcatttctaatcagatgttctactaagaaccaagatttaaacagacagacc

SEQ ID NO: 13219 - DNA, 260 bp, Unknown
  Description of Unknown: LeftRegion for integrase B220 sequence
catgaaactggccggataatccagactgtatttagctcgtgcgatggatatatgcctgtcctctaggggttggcgaagtacttcaagtacacttctgttaaattccggcaactcaacataaagaaatcacttgcatagttctgtgacttttggtaatttcgcttccgaaacgaagataacgaatttaaaaccaacagaatatgaaggcagcatttctaatcagatgttctactaagaatcaagatttaaacagacagacc

SEQ ID NO: 13220 - DNA, 260 bp, Unknown
  Description of Unknown: LeftRegion for integrase B221 sequence
aacaaaagggaggagcgataatgaaaaagaaaatcgatagcttatatgcggcacttatgcttatagaaattctatatgagcgtgggcttataaacaaagccacacttgacgccgtgagagaaaaagttaaatccgaaaatccgcacaattcacaggcagcataatgtcaaatatacttaaaaacacaaggaggaatttttatgacaaacacaatttttaaaaacaatacgaaaatcggaaatccttacgattttcttgac

SEQ ID NO: 13221 - DNA, 260 bp, Unknown
  Description of Unknown: LeftRegion for integrase B222 sequence
cataaaacttgccgggtactctacattgcatcggatgcgtgacacggtaatcttcctatcttccagcggttggcgaagaacctccaatacgttgcggctgtactctggcagttcaacataaagaaattacttgcatagttctgtgacttttggtaatttcgcttccgaaacgaagataacgaattaaataccaaacaaatatgaaagcagcatttctaatcagatgttctactaagaaccaagatttaaacagacagacc

SEQ ID NO: 13222 - DNA, 260 bp, Unknown
  Description of Unknown: LeftRegion for integrase B223 sequence
cataaagcttgccggatagtcgaggctgtatttggcgcgcgagatggagatgtggcggtcttccaaaggttgccggagcacttcgatcacactgcggttgaattccggtaactcaacataacaaaatcacttgcatagttctgtaacttttggtaatttcgcttccgaaacgaagataacgaattaaataccaaacaaatatgaaggcagcatttctaatcagatgttctactaagaaccaagatttaaacagacagacc

SEQ ID NO: 13223 - DNA, 109 bp, Unknown
  Description of Unknown: LeftRegion for integrase B224 sequence
ggtaatttcgcttccgaaacgaagataacgaatttaaaaccaacagaatatgaaggcagcatttctaatcagatgttctactaagaatcaagatttaaacagacagacc

SEQ ID NO: 13224 - DNA, 260 bp, Unknown
  Description of Unknown: LeftRegion for integrase B225 sequence
acaggtcttttgattgtgtgtagtgacccggcgcaaaagaaaatcgacagagccgatgccttgaatattccaatcatttcagagcagcaatggtatgaactcatgccagaacttgaagccgttggaatgtggaacggaaagcaaattctgtttgcggacaatgatggcatctaccgtgttgaagtgggcggtgaaagctgatggccagaaaaaagaatattgctgctggcctcgatgccgtcatctatgcccggtactcg

SEQ ID NO: 13225 - DNA, 260 bp, Unknown
  Description of Unknown: LeftRegion for integrase B226 sequence
tcgtttagtgtaagaatcttttttacttcttacacgaaccttgaaaacgaaacagcctgcccgtagtgataccagaactgaataggcattcagcgtgtcttttttggttaatacgtcccggaaacatcagaacccggtacaggaacggatatgggatgagaacaggcaattaataaacaaaggaaggaggacatctgactatgacagagaaacagggattcatgacagcgttgtatgaacgtcttagtcgtgatgatgaa

SEQ ID NO: 13226 - DNA, 260 bp, Unknown
  Description of Unknown: LeftRegion for integrase B227 sequence
acgtcgtggaataccaaaacccggtggattttctttttgaagaactggcaaaaaagaagcccaacagctttgccgggcggcagtacaaactttacaagctggctgccggtgatatatgctctaagtgacttcttaatcatgattttgtcatggttagtgaagcaatcacttagagcatttttgtttcaggaggtacagccatgagaaatgaaaaaattaccccactgtacgagcgcctgagccgggacgatgagttacag

SEQ ID NO: 13227 - DNA, 260 bp, Unknown
  Description of Unknown: LeftRegion for integrase B228 sequence
ttcacttttgatttcaccacgcaaaaagaccttgacaacgagtataaaaagctcaataacggggagattggttctgtagtagcgacagttatattcggtgccttatttattgcagttttaggtttcctaaaatagtaatcgtttttcagccattaaatgcaaatttgaggctgttttcgttaaataaggggggtgacagtttgagttcagttgacaaaatcgccgttgtttacgcgcggtattcgtcccacggtcagacc

SEQ ID NO: 13228 - DNA, 260 bp, Unknown
  Description of Unknown: LeftRegion for integrase B229 sequence
aatttacgtattttttaccaatatcaatacttttataaacaaaagaatcccccggtgttaccagcaccgagggacctgcaagaacgtgttaccagcacgctcaattatcaacccctaacaccacatcaagagtcgatataatattataacatattatgcacggctcttacaatcatagctattgaaaggagccgtgtattatggctaaacatgctattactataccccaaaacccaaaagctgctctgtatatccgcgtt

SEQ ID NO: 13229 - DNA, 260 bp, Unknown
  Description of Unknown: LeftRegion for integrase B230 sequence
atttacttttgatttcaccacgcaaaaagacctcgacaacgagtataaaaagctcaataacggggagattggttctgtagtagcgacagttatattcggtgccttatttattgcagttttaggtttcctaaaatagtaatcgttttacagccattaaatgcaaatttaaggctgttttcgttaaataggggggtgacagtttgagttcagttgacaaaatcgccgttgtttacgcacggtattcttcccacgggcagacc

SEQ ID NO: 13230 - DNA, 260 bp, Unknown
  Description of Unknown: LeftRegion for integrase B231 sequence
gggacgccgagacgcgcacgatcgtgcaccgcacggtgaagaagatctatgacgtgtctgcggtcagcatccccgcaaacgataatacagaaatcaatgctcgcagctggtgttgtatgctctaaaagacttcttaatcagatgatttggaagtctcttagaacacacaactttacataccgaagaaaggagacaaaaccatgagcaaaagcgagaaaatcactgctctttacgagcgtttgagccgagacgatgatatg

SEQ ID NO: 13231 - DNA, 260 bp, Unknown
  Description of Unknown: LeftRegion for integrase B232 sequence
aaacctcgttcggaggatggaatggcaactggatctggcgctaagagagcagcaaagaaccgggaggtttccttacggaaggaaacagaggtgcagtgtggaattgtacggttactgtacgaggacggaagtttatcagagaaggaatatgaggacattgtagagttgttgtatgcaaaagaaaaaggaggaaaacagaaatgagcgagctttcaaaattttcgccgcagacacgggtggcaatctacaaccgggtgtct

SEQ ID NO: 13232 - DNA, 260 bp, Unknown
  Description of Unknown: LeftRegion for integrase B233 sequence
aaacctcgttcggaggatggaatggcaactggatctggcgctaagagagcagcaaagaaccgggaggtttccttacggaaggaaacagaggtgcagtgtggaattgtacggttactgtacgaggacggaagtttatcagagaaggaatatgaggacattgtggagttgttgtatgtaaaagaaaaaggaggaaaacagaaatgagcgagctttcaaaattttcgccgcagacacgggtggcaatctacaaccgggtgtct

SEQ ID NO: 13233 - DNA, 260 bp, Unknown; identical to SEQ ID NO: 13231
  Description of Unknown: LeftRegion for integrase B234 sequence

SEQ ID NO: 13234 - DNA, 260 bp, Unknown
  Description of Unknown: LeftRegion for integrase B235 sequence
aaacctcgttcggaggatggaatggcaactggatctggcgctaagagagcagcaaagaaccgggaggttttcttacggaaggaaacagaggtgcagtgtggaattgtacggttactgtacgaggacggaagtttatcagagaaggaatatgaggacattgtggagttgttgtatgcaaaagaaaaaggaggaaaacagaaatgagcgagctttcaaaattttcgccgcagacacgggtggcaatctacaaccgggtgtct

SEQ ID NO: 13235 - DNA, 260 bp, Unknown
  Description of Unknown: LeftRegion for integrase B236 sequence
aaacctcgttcggaggatggaatggcaactggatctggcgctaagagagcagcaaaggaccgggaggtttccttacggaaggaaacagaggtgcagtgtggaattgtacggttactgtacgaggacggaagtttatcagagaaggaatatgaggacattgtggagttgttgtatgcaaaagaaaaaggaggaaaacagaaatgagcgagctttcaaaattttcgccgcagacacgagtggcaatctacaaccgggtgtct

SEQ ID NO: 13236 - DNA, 260 bp, Unknown
  Description of Unknown: LeftRegion for integrase B237 sequence
aaacctcgttcggaggatggaatggcaactggatctggcgctaagagagcagcaaagaaccgggaggtttccttacggaaggaaacagaggtgcagtgtggaattgtacggttactgtacgaggacggaagtttatcagagaaggaatatgaggacattgtggagttgctgtatgcaaaagaaaaaggaggaaaacagaaatgagcgagctttcaaaattttcgtcgcagacacgggtggcaatctacaaccgggtgtct

SEQ ID NO: 13237 - DNA, 260 bp, Unknown
  Description of Unknown: LeftRegion for integrase B238 sequence
gtggtctattttctttactgcaactgccttctataatggcagcatgtctttaagttcaccaattcaattctacaagaaagtataaaattccctcaaattttgactgtaggtttatagcttaacctgtggtcgattttatactgctctcattccttttataatgatagggacaatattttattaaaggaatgatatttgatatgaaagaaacggaaaaactgggaaatgctcagtcccaaaaagaaaaaatcagagagcgt

SEQ ID NO: 13238 - DNA, 200 bp, Unknown
  Description of Unknown: LeftRegion for integrase B239 sequence
ctgaccactttgcggtcaagcaataccgcaaatacaagctggcggcgggtgctgtatgctttagaagacttcttaatcagtcgattaggaagtcgcctaaaacatacaaccttacataatcgaagaaaggagacaatcgcatggatacaagaatgataactgccctgtacgagcgactaagccgtgatgatgacttagag

SEQ ID NO: 13239 - DNA, 260 bp, Unknown
  Description of Unknown: LeftRegion for integrase B240 sequence
cgcagatgcgttggcaacttcagaccaggttcggatagaaaatatttcggcgaaccagaagtttgaagcgtttatcacttcgttggcgcatatagtcgaaaagtacggcatgaaagtgcttaatgagggtgatggagctgcgtgaaaatcgcagctttacataatggatatttccccaaaataattttggaggtatagaaatgaaccgatatggaaagagatgtgttctatatccgcgtgtcagcacagaaatgcaggta

SEQ ID NO: 13240 - DNA, 260 bp, Unknown
  Description of Unknown: LeftRegion for integrase B241 sequence
ttgtgaaagcgaccgtcaaagacggcgcgaaagaaaccgcagtcaagaaaatccgtcggctgctccaaaacgatttgaacaaggcagccacttaaaaattaaagattttttcatttcctacaagcagacggatggggcatgatatggtataatatacttgtatcatgcctcgttttccggctgcggaataggaggaacttatgagcaaacagccggaaatggtgattgcacggaacccccgtgcgacacggaataacgat

SEQ ID NO: 13241 - DNA, 260 bp, Unknown
  Description of Unknown: LeftRegion for integrase B242 sequence
attatgaccggcctgaacacagcgtttcactcccttgtccccagctttcatcccattgacctgtgcgtgggcgttgccgccgccatcgccattcggctggcggtctatatcaagggcaaaaacgcaaagaaattccgcaaaaatcttgagtacggcagcgcccgttggagtgcataattttaagtgtaaaggacacctatatggacgcacaggaggttatgcacatgactgattatagcaaaattaccgccctttactcc

SEQ ID NO: 13242 - DNA, 260 bp, Unknown
  Description of Unknown: LeftRegion for integrase B243 sequence
gcatggcgcaatatttaatggcacatactgtaatggagtatggttctgtatggacggttatatcaatgatgtatacaaagacagtcctatttatagttcgctatttgaaaaatacttgcatagttgtgatgttgtttatatatttgtaggcagaactgatttaatagatgtaaatgtagtaaaaacaactggaataagatatgaaagcggcatttttaataagatgttctactaagaatcaagatttagataggcagaca

SEQ ID NO: 13243 - DNA, 260 bp, Unknown
  Description of Unknown: LeftRegion for integrase B244 sequence
cggtggaacgcaaggtactggcagacattctgaatcgaaaacaggaactcaccgccctgcccaatgcggcagaaaacgagtgcggtatcctcaatgcagagctgaaggagggtcaaacgtccccaccgaagcattttaccgatgtgatatgttatcatcgtgggtagttgatatgcagaattggaggtgagaaacgacccatgaaaaagaaaaaagtcaaagaaattggcattacagcgttatatgaacgcctttctcgt

SEQ ID NO: 13244 - DNA, 260 bp, Unknown
  Description of Unknown: LeftRegion for integrase B245 sequence
tgcaagactgacgactacagtcgtgaaattgttcgggaaaaggcggctgacggaagcgtggtgtgtgaaaccgagggcaagtgggtgtacaacactgatatgcttttaccaggtgttgtatgctttaagagacttattcatcacgatatgagtaagtctcttaaaacatataaggctacaaagcagaaaggagaccccccatgagcaaacagaaaataaccgccctatatgagcgtttgagccgtgacgacgaactgcaa

SEQ ID NO: 13245 - DNA, 260 bp, Unknown
  Description of Unknown: LeftRegion for integrase B246 sequence
caatgtaacgaagaaaccgcaggagattacaatcatgtcccgctatcttgcaacactgccgcatccggtcggaatctactttatctccgaagatattttcacccttgcttcttattatcaagaagatatgcgggacacagacttcttccccgatggatgggtgagcctgccggacgatgattccgagaggaggctgctgcatgattgacaaaacgaaacgcttagaaaaagagcaagccaaggcaaagaccaaaaagcgc

SEQ ID NO: 13246 - DNA, 260 bp, Unknown
  Description of Unknown: LeftRegion for integrase B247 sequence
tccgatctcggaatttctcttgcggaagccttgcataaagaattaaattacgaacaaaaccaagccgcaaagggcgtttattcggctattcacgctttattagaaaatcttaaacagcttcccgaaaatgagcgactttcgataataaaagagctttgccatttctgtaatgagtatttgaaaatgaagggggaagaataatgcagcaagcattaaacgcggtcatatacgcccgctattcttcccatagccagcaggaa

SEQ ID NO: 13247 - DNA, 260 bp, Unknown
  Description of Unknown: LeftRegion for integrase B248 sequence
aagatattcttcggagcaatgattggtctttaattgaaaaaatacttttaaaggacagcaatttaaaagacctataattgaatcacaaatccatttcactttatataaaccatccgttattcaattaactggtggtttatgtctttttctcacaaaaaaattataatgaaaataaatcgcaatacaaggaatgataacctatgaaagaatatgaagaaagaactgaaacaatcgaacaacaaaaagcccttattcgtgag

SEQ ID NO: 13248 - DNA, 260 bp, Unknown
  Description of Unknown: LeftRegion for integrase B249 sequence
tgaccgtggcggcagaaattcgctttggaaagatattgttaagcatcacaaggaattagagcaaatcagggcgattgaggactttgacagcgatacagttatcgttgagcagggtgttgtatgctttaagagacttattcatcacgatatgagtaagtctcttaaaacatataaggctacaaagcagaaaggagacccccatgagcaaacagaaaataaccgccctgtatgagcgtttgagccgtgacgatgaactgcaa

SEQ ID NO: 13249 - DNA, 260 bp, Unknown
  Description of Unknown: LeftRegion for integrase B250 sequence
ttgatatggcggtcttccaatggctggcggagtacttccagagtggttttattgaactccggaagttcacaaaacaaaaaatacttgcataattgggagaaaagttgtatctttgcagtcggaatagggaatgtaactgctttatacagagcatgattccccgagcattaataaaaagtataatataaaacaagataattatgaaggctgcatttttgatacgctgctctacaaagaagcaggattataaccgtcaggta

SEQ ID NO: 13250 - DNA, 260 bp, Unknown
  Description of Unknown: LeftRegion for integrase B251 sequence
ttgatgtggcggtcttccaatggctggcggagtacttccagagtggttttattgaactcaggaagttcacaaaactaaaaatacttgcataattgggagaaaagttgtatctttgcagtcggaatagggaatgtaactgctttatacagagcatgattccccgagcattaacaaaaagtataatataaaacaagataattatgaaggctgcatttttaatacgctgctctacaaagaagcaggattataaccgtcaggta

SEQ ID NO: 13251 - DNA, 260 bp, Unknown
  Description of Unknown: LeftRegion for integrase B252 sequence
ctttgaatattttgttacaagtatcatatagattttttaggttctcttttgtctgtattgatgggtttatgaagtttattgttgtattgcctatctgcacttttaccacctcaaagatatgtatgttgtgtatcaatcatttatgtatgaatactttataattaaatattaactatttgaatactttattacaataaggaatgaatataaaaaatatgacaattacaccaatttttgaagaaatagatttaatgctacta

SEQ ID NO: 13252 - DNA, 260 bp, Unknown
  Description of Unknown: LeftRegion for integrase B253 sequence
ctgtagcgattgcggatttagctttgactttacaacgcaaaaggatatcgatgacaagtgtaaatcattgttaaatggcggaataggatctattgtagttgcggtcattttgggtattgctctgtttgttataaacggatacctgcattgaaaatgaataaaagtgttatatattgattaagagggtagggggtgacagtttgaatccagttgacaaaatcgccgttgtttacgcacgatattcttcccacgggcagacc

SEQ ID NO: 13253 - DNA, 260 bp, Unknown
  Description of Unknown: LeftRegion for integrase B254 sequence
ttgatacgttatagcattcagcttgcttttttgaagcagctgttggaaagaaagctcataaccgatagagagtattcccttatcaaacagcgcttaatgaaagattatcgtgtggtttccgaactatcctcttgattttgtgtcgcattggcgttatgattaacgcaatgaaaggaacacattcaacaaggaggtcaagcatgaaagacgttgaagtcattaaagcgcgcaacacgctctctccacgagcgcgtacgaac

SEQ ID NO: 13254 - DNA, 260 bp, Unknown
  Description of Unknown: LeftRegion for integrase B255 sequence
atattgaaaaaagataaccagaatattgacaatgagatgatatacgcagctttaaagttaattcaaaatttacataaacaaggaaagattaagaaacatattttttgcaatatactagaagagtattctgatcgtattgacatatctaattttcaatgataaaattaatcacaaaattaggattataaaggaggaatagcgtgtaccaatatagccaagaatgcctacctgctagaaatgtcgttgtatatgctagagta

SEQ ID NO: 13255 - DNA, 260 bp, Unknown
  Description of Unknown: LeftRegion for integrase B256 sequence
atactgcgaggattgcggatacagctttgactttaccacacaggatgacctcaatgcccaatataataaactgaacacaaacgagggatgcgccattttggtggcgatcattctcggcgttattcttataacaatttggttttacagccattaaatgcaaatttgaggccgttttcgttaaataagaggggggtgacagtttgagttcagttgacaaaatcgccgttgtttacgcacggtattcttcccacgggcagacc

SEQ ID NO: 13256 - DNA, 260 bp, Unknown
  Description of Unknown: LeftRegion for integrase B257 sequence
acaggtcttttgattgtgtgtagtgacccggcgcaaaagaaaatcgacagagcggatgccctgaatattccgatcgtttcggagcagcaatggtttgagctcatgccagaacttgaagccgttggaatgtggaacggaaagcaaattctgtttgcggacaatgatggcatctaccgtgttgaagtgggcggtgaaagctgatggccagaaaaaagaatattgctgctggcctcgatgccgtcatctatgcccggtactca

SEQ ID NO: 13257 - DNA, 260 bp, Unknown
  Description of Unknown: LeftRegion for integrase B258 sequence
aacagaggtgaggagcgataatgaataagaaaatcgacagcttatatgcagcgcttatgcttattgaaattctatatgagcgtgggcttataaacaaggccacatttgatgccgtgagagaaaaagttaaatccgaaaatccgcacaattcacaggcggcttaatgtcaaatatacttaaaaacacaaggaggaatttttatgacaaacacaatttttaaaaacaacacgaaaatcgggaatccttacgattttcttgac

SEQ ID NO: 13258 - DNA, 260 bp, Unknown
  Description of Unknown: LeftRegion for integrase B259 sequence
agcacccgttaatgtcataaaactttagataaaattatatgaggaggatttagaatgaataatgaactattaagatatagcctccaattatctatgctgtctatgttactttctaagcacttgctcagtgatattgaatataaaaagataaaactaaagctgatgaaaaagtataatatctctacagaattatatttataatgttttgcaagtgtggtataatagaactgcatagaaagatacaaaaaggaggcagtgca

SEQ ID NO: 13259 - DNA, 260 bp, Unknown
  Description of Unknown: LeftRegion for integrase B260 sequence
aaccgaagggaggagcgataatgaataagaaaatcgacagcttatatgcggcgtttatgcttattgaaattctatatgagcgtgggcttataaacaaagccacacttgacaccgtgagagaaaaagttaaatccgaaaatccgcacaattcacaggcggcttaatgtcaaatatacttaaaaacacaaggaggaatttttatgacaaacacaatttttaaaaacaacacgaaaatcggaaatccttacgattttcttgac

SEQ ID NO: 13260 - DNA, 260 bp, Unknown
  Description of Unknown: LeftRegion for integrase B261 sequence
tattgcaagtatcatatagattttttaggttgtcttttgtttgtgtaggtgggtttataaaattaattgttgtgtttcctatttgcatttgatcacctcaaaaaattctatgttatgtacgattgatttatgatgaatactttatgattaaatattaactatttgaaaactttatgacaataagaaaaaggtgttaatcaatgaatgaaattccaatatttgaagaaatagatttaatgctattgaggaaatcaagaagt

SEQ ID NO: 13261 - DNA, 260 bp, Unknown
  Description of Unknown: LeftRegion for integrase B262 sequence
attgcaagtatcatatagattttttaggttgtcttttgtttgtgctggtgggtttataaaattgattgtagtatttcctatttgcatttgatcacctcaaaaaattctatgttatgtatgattgatttatgtatgaatactttatatttaaatattaactatttgaaaactttatgacaataagaaaaaggtgttaattaatgaacgaaattccaatatttgaagaaatagatttaatgctattaagaaaatcaagaagt

SEQ ID NO: 13262 - DNA, 260 bp, Unknown; identical to SEQ ID NO: 13261
  Description of Unknown: LeftRegion for integrase B263 sequence

SEQ ID NO: 13263 - DNA, 260 bp, Unknown
  Description of Unknown: LeftRegion for integrase B264 sequence
caaaagcaccagtgcagatgataatcagccgtgaatatgtcggcacacagaccgttacagaagcgtttgtcccgattatctccgaggatattcggaagaagattgccgagggcgacaccttcgacaatgaggggctgtccgcttagaatgtacgcaatgggacatgaaaacagataggacagatacggaggttttacagtatggcaggaatcaaagaagaaaagaaaatctatttagtcggcatttattgccgcttatct

SEQ ID NO: 13264 - DNA, 260 bp, Unknown
  Description of Unknown: LeftRegion for integrase B265 sequence
aaatggaagcattactcataagcaggctgttgataaagcgactggagaatatcgaaaatataagacaagaacgctcagcgacgtggaaaatgattatttaaattcgataaagatgttggaacagaaaactgacggcaaaaaataacagacgatgaaagctgaattatgccacaggctgtggcacaaatgaggatggcgatatgaaagaaaaaacaaaagtatatatttatacgagagtatctactgccgttcaggtagac

SEQ ID NO: 13265 - DNA, 260 bp, Unknown
  Description of Unknown: LeftRegion for integrase B266 sequence
attgcaagtatcatatagattttttaggttgtcttttgtttgtgctggtgggtttataaaattgattgtagtatttcctatttgcatttgatcacctcaaaaaattctatgttatgtatgattgatttatgtatgaatactttatatttaaatattaactatttgaaaactttatgacaataagaaaaaggtgttaattaatgaacaaaattccaatatttgaagaaatagatttaatgctattaagaaaatcaagaagt

SEQ ID NO: 13266 - DNA, 260 bp, Unknown; identical to SEQ ID NO: 13265
  Description of Unknown: LeftRegion for integrase B267 sequence

SEQ ID NO: 13267 - DNA, 260 bp, Unknown
  Description of Unknown: LeftRegion for integrase B268 sequence
gtggactcatctcgaaacgcccgttccgcgcccctcaccacaccatttctacggtagcaatgaccggtggaggaagtttcccccagcccggtgaaatcagtctggcacataacggcattttatatcttgatgaaaaaacgagaaaagacttgtgccattcggaaattattattacctttgcagcgtaattcgttgaaataatgggtaatgcaactataaaaaaagcagcttttcttgttcgctgctccaccaataaacaa

SEQ ID NO: 13268 - DNA, 260 bp, Unknown
  Description of Unknown: LeftRegion for integrase B269 sequence
agggaattgacaaatcataaaaaagtgatattataaataaccaatgaaagaggtattctctagaaagagaggtacatctatgataaaatatatacataaacaaaaattttataatattgaatattgtgaggagtcagtagtatttagactttattaaatactattggctcctcttttttagtaaaaggagttgaagatttatggataacgaaaagaaagttgcaggattatatatcagggttagtactgaagatcaagct

SEQ ID NO: 13269 - DNA, 260 bp, Unknown
  Description of Unknown: LeftRegion for integrase B270 sequence
aaataatataatcagtgatgaaaatggtgcattgattattataaatatcttatatgaacaaggtattattaataaaagaacttatgataatattttgaaaaagtataagattacataatatagaaaaatactgttgaaaataaggcttattttatatataatagtatataaaataggctttatttttgaaaggagataacatggataattatatagcatccctcgatagaaatagaccaagaaatattgctttttatgga

SEQ ID NO: 13270 - DNA, 260 bp, Unknown
  Description of Unknown: LeftRegion for integrase B271 sequence
aaataatataatcagtgatgaaaatggtgcattgattattataaatatcttatatgaacaaggcattattaataaaagaacttatgataatattttgaaaaagtataagattacataatatagaaaaatactgttgaaaataaggcttattttatatataatagtatataaaataggctttatttttgaaaggagataacatggataattatataacgtccctcgatagaaatagaccaagaaatattgctttttatgga

SEQ ID NO: 13271 - DNA, 260 bp, Unknown
  Description of Unknown: LeftRegion for integrase B272 sequence
attgcatgtatcgtaaatgatttttaatttttcttttgttggtggttgcataataacttttactttcataaaaatcacctcaaaacaatatatgtagttatataaaaaacaatgcttttgtttcattcatacgacaagattttactatttgaaacaattttatttaatcaaataatttcatcaaggggaacataaaaattatggaaattgaaaacatagaacaactttttaatattttatcaacaattaaagtacaccaa

SEQ ID NO: 13272 - DNA, 260 bp, Unknown
  Description of Unknown: LeftRegion for integrase B273 sequence
ttgtcagcgtttcggtagatttttccgtttttcagcaaaataaaaacgcccacggtgttaccagcaacgcaggcgtttcagatcagcttactcagagagatggtacagggataaaacctgtccagagcaatagcagacctcgcagatgttattgtaccacctccgggcaggcttgtcaaagtgtacccggaggtatttttatgggcaaaagacaaaaggcaaccggcggcgatgcggtcatctacgcccgctattcttcc

SEQ ID NO: 13273 - DNA, 260 bp, Unknown
  Description of Unknown: LeftRegion for integrase B274 sequence
ttttacgaatcaatgattggcatctatcctcaaaacacaattacgatgctgataacccgaatgattattaaatcattcaataacaatccaatatctatttctacataaaccatctgttaatcacttaactgatggtttatgtctttttcaatccaaaaattctatgatagttatatcaactataaaggatgtcgctattgatgaaagaaagtgaagaacgaagcagtaatattgatgaacagaaagccagaatccggcaa

SEQ ID NO: 13274 - DNA, 260 bp, Unknown
  Description of Unknown: LeftRegion for integrase B275 sequence
ttttacgaatcaatgattggcatctatcctcaaaacacaattacgatgctgataacccgaatgattattaaatcattcaataacaatcaaatatctatttctacataaaccatctgttaatcacttaactgatggtttatgtctttttcaatccaaaaattctatgatagttatatcaactataaaggatgtcgctattgatgaaagaaagtgaagaacgaagcagtaatattgatgaacagaaagccagaatccggcaa

SEQ ID NO: 13275 - DNA, 260 bp, Unknown
  Description of Unknown: LeftRegion for integrase B276 sequence
gagaacatctcgcccgactgcccatagaaatagtcaaacattctggtttcctcgcttatcctgccttgtcacatccttgacacctccgttcgtagtatgatgaaatatgtatgactatcgttatttttctttacaaagatggcctgccatgctacaatagccgcatctacggccaccggacaacaggaaaggagtatcttatggccaaaactgccgacaccattgccatctattcccgcaaatcccgctacaccggcaag

SEQ ID NO: 13276 - DNA, 260 bp, Unknown
  Description of Unknown: LeftRegion for integrase B277 sequence
attgcatgtatcgtaaatgatttttaatttttcttttgttggcggttgcataataacttttactttcataaaaatcacctcaaaacaatatatgtagttatataaaaaacaatgcttttgtttcattcatacgaactaattttactatttgaaacaattttatttaatcaaataatttcatcaaggggaacataaaaattatggaaattgaaaacatagaacaactttttaatgttttatcaacaattaaagtacaccaa

SEQ ID NO: 13277 - DNA, 260 bp, Unknown
  Description of Unknown: LeftRegion for integrase B278 sequence
ttttacgaatcaatgattggcatctatcctcaaaacacaattacgatgctgataacccgaatgattattaaatcattcaataacaatcaaatatctatttctacataaaccatccgttaatcacttaaccgatggtttatgtctttttcaatccgaaaattctatgatagttatatcaactataaaggatgtcgctattgatgaaagaaagtgaagaacgaagcagtaatattgatgaacagaaagccagaatccggcaa

SEQ ID NO: 13278 - DNA, 260 bp, Unknown
  Description of Unknown: LeftRegion for integrase B279 sequence
ttttacgaatcaatgattggcatctatcctcaaaacacaattacgatgctgataacccgaatgattattaaatcattcaataacaatcaaatatctatttctacataaaccatccgttaatcacttaaccgatggtttatgtctttttcaatccaaaaattctatgatagttatatcaactataaaggatgtcgctattgatgaaagaaagtgaagaacgaagcagtaatattgatgaacagaaagccagaatccggcaa

SEQ ID NO: 13279 - DNA, 260 bp, Unknown
  Description of Unknown: LeftRegion for integrase B280 sequence
aaataatataatcagtgatgaaaatggtgcattgattattataaatatcttatatgaacaaggcattattaataaaagaacttatgataatattttgaaaaagtataagattacataatatagaaaaatactgttgaaaataaggcttattttatatataatagtatataaaataggctttatttttgaaaggagataacatggataattatatagcgtccatcgatagaaatagaccaagaaatattgctttttatgga

SEQ ID NO: 13280 - DNA, 260 bp, Unknown
  Description of Unknown: LeftRegion for integrase B281 sequence
ttttacgaatcaatgattggcatctatcctcaaaacacaattacgatgctgataacccgaatgattattaaatcattcaataacaatcaaatatctatttctacataaaccatccgttaatcacttaaccgatggtttatgtctttttcaatccaaaaattctatgatagttatatcaactataaaggatgtcgctattgatgaaagaaagtgaagaacgaagcagtaatattgatgaacaaaaagccagaatccggcaa

SEQ ID NO: 13281 - DNA, 260 bp, Unknown
  Description of Unknown: LeftRegion for integrase B282 sequence
aaataatataatcagtgatgaaaatggtgcattgattattataaatatcttatatgaacaaggcattattaataaaagaacttatgataatattttgaaaaagtataagattacataatatagaaaaatactgttgaaaataaggcttattttatatataatagtatataaaataggctttatttttgaaaggagataacatgaataattatatagcgtccctcgatagaaatagaccaagaaatattgctttttatgga

SEQ ID NO: 13282 - DNA, 260 bp, Unknown
  Description of Unknown: LeftRegion for integrase B283 sequence
aggcaaaaaatggtaattatgtcttgactttaactacaaactctttataatagaaaaccaagaaaagaagttttatgtttttgaggggttaatataaaacaaatataatttagcagatatactttagaggtgtcaaagacataaaacctaatgtctttgtcgcctcttttttgatgaagaataagaaaggaaatttatttatgagtgaagaaaagaaaatcgcaggaatatacataagagttagtactgaagatcaagct

SEQ ID NO: 13283 - DNA, 260 bp, Unknown; identical to SEQ ID NO: 13278
  Description of Unknown: LeftRegion for integrase B284 sequence

SEQ ID NO: 13284 - DNA, 260 bp, Unknown
  Description of Unknown: LeftRegion for integrase B285 sequence
tttgcaaaccctctgcccagcctgcatccgcttgatttgctggtgggtctgtgctgcggtgcagggttacgactggcggtctatctgcgtggcaaaaatgccaagaagtaccgccacggcatggagtacggctctgcccggtggagtgcataattttaagtgtaaatgacacatacatggacgcacaggaggttatgcacatgactgattatagcaaaattacagccctttactcccgcctttccgtgggcgacgaggac

SEQ ID NO: 13285 - DNA, 260 bp, Unknown
  Description of Unknown: LeftRegion for integrase B286 sequence
ttttacgaatcaatgattggcatctatcctcaaaccataattacgatgctgacaacccgaatgattattaaatcattcaataacaatcaaatatctatttctacataaaccatccgttaatcacttaaccgatggtttatgtctttttcaatccaaaaattctatgatagttatatcaactataaaggatgtcgctactgatgaaagaaagtgaagaacgaagcagtaatattgatgaacagaaagcccgaattcggcaa

SEQ ID NO: 13286 - DNA, 260 bp, Unknown
  Description of Unknown: LeftRegion for integrase B287 sequence
agcagaccgcccccaggcggcagaagccccgtcttattgttcagcgggtattcaccggggaaaagagcatggaagatgttcttttccccgttatttacgaggatttgcggcggcagcttgaacgccgccgcaccttggacaaggagggcgagagcggataaactgtccgtaaagtctgttcaacacaaggaggtatcacgatgggaacgaagaaagacagcaccatttatgacgtggcgatttattgcagactgtcaaaa

SEQ ID NO: 13287 - DNA, 260 bp, Unknown
  Description of Unknown: LeftRegion for integrase B288 sequence
tttgcgtcgcccctgccgagcttttccccggtagatatgctgataggcattgccggagctatccttatccggctgattgtctacactaaaggcaagaacgcaaagaaataccgtaagggcgtagaatatggctctgcccgttggagtgcataattttaagtgtaaatgacacatacatggacgcacaggaggttatgcacatgactgattatagcaaaattacagccctttactcccgcctttccgtgggcgacgaggac

SEQ ID NO: 13288 - DNA, 260 bp, Unknown
  Description of Unknown: LeftRegion for integrase B289 sequence
tttgcaaccccgcttccgagccttgcccctatggatttgcttatcggtattgtgggggctgtccttatccggcttatggtgtacttcaaaggcaagaacgcgaagaaataccgaaaaggtatcgaatacggttcagcccgttggagtgcataattttaagtgtaaatgacacatacatggacgcacaggaggttatgcacatgactgattatagcaaaattacagccctttactcccgcctttccgtgggcgacgaggac

SEQ ID NO: 13289 - DNA, 260 bp, Unknown
  Description of Unknown: LeftRegion for integrase B290 sequence
ttcggcatgaacatattttactatattttagcacaatgttgcttgtagaagaagatttcaaacaaaataaaaagcgttcacagtgctaccaacactatgaacgccacagaccagtttaccctatatggtaatagctgacctcacagaagctattgtatcatatcaaggggagcttatcaagttttaccttggaggatttcatggcaaaaaagaaaaagcccaccgggggcgttgccatcatctatgcccgctactcatct

SEQ ID NO: 13290 - DNA, 260 bp, Unknown
  Description of Unknown: LeftRegion for integrase B291 sequence
ttccgattgctctttttgagttcttcaaactctgcgtttgaatagaaccaatcagagcagtcgcgccccctcttttcatgattgcgggcaatgtgattaatagtttcatagacgttcaaaaggttttgtctgttcatacggctgacctcaattttttacatcaacggtataacaaaaatttgaaagaagtgtgaaaagaaatgcacaataaatatgatatcaacgaatatgttgtcaaacttgataaactcggaaagata

SEQ ID NO: 13291 - DNA, 260 bp, Unknown
  Description of Unknown: LeftRegion for integrase B292 sequence
ggctactggctgtaaaatgctggtagccctcattttttagttgtatctagtatataaggggtgtataatagataggaactgaaaacagcctcataaagccctctattttatcgagggtaaagaagtctacacctaatatataaaagtggctgtatgaggcacacaggagctcacaggactattacaggagggtaaacaggatggcatacaggaaaataacggatataagagatactattggtatgagagcggtattttat

SEQ ID NO: 13292 - DNA, 260 bp, Unknown
  Description of Unknown: LeftRegion for integrase B293 sequence
tagtgtaaaaatatttttcttccttgaatattttgttgcaagtatcataaatctgttttaatttttctttcgttaaaggttttttgttaaatgtaatattcattttgtaccccctttaatgaattgtatgtattttataagttttcaattacttaaattaagtttactatctgaaacataattataggagtggtaaattaatgcaatcctcagaagaagctataaaatttttagatgaataccttatatatttaaggaaa

SEQ ID NO: 13293 - DNA, 260 bp, Unknown
  Description of Unknown: LeftRegion for integrase B294 sequence
tgcgaacatttcggcataccgctgcgctccctgcagcactgggagattggcgacaggaagcccgccccattcgtcatcggcctcatgcgcaaatgctacgagcttgagcgcgagaacgagcgcctgcgcgactgcatcgacacgctcgaccgtcagaacgacgagctgaaggcactcctcaaaggcgagggggtggttcaatgacgagaaaggcaaagacctgtttcatctatgtccgcgtctcaacgaagatgcaggtg

SEQ ID NO: 13294 - DNA, 260 bp, Unknown
  Description of Unknown: LeftRegion for integrase B295 sequence
aaaggagcgcgacatgaataaagcgttattactagcattgaacgaacacatataccttcagggactaatcagcagagaaatgaaagaaaaaattgatgttgagattctttctgaaaattaagccaaactattgagcagagatgagattgaaggtataataatcttatctctgctcttccgactagaagggagaacggggcatgaacgtttatcgtactagagaaatactgaaaacttgcagcatttttgacttgaaatta

SEQ ID NO: 13295 - DNA, 260 bp, Unknown
  Description of Unknown: LeftRegion for integrase B296 sequence
atatcgccaactggtcggccgctcaaggtgcggctaccgcaccgcagcccgttcagcaggtagtggagcagaaaccgtctcccgccgatgaaatccgcaaatacaagggcctgctggatgacggtatcatcacgcaggaagaatttgaagctaagaaaaagcaactgctgggcctgtaaatttgaaaggagcgtgacggcatgagaaaaaagtccaacctcaatgcagctactcgtgccgtcatctatgccaggtattcc

SEQ ID NO: 13296 - DNA, 174 bp, Unknown
  Description of Unknown: LeftRegion for integrase B297 sequence
tgttgttgtaaaatttagtgaacattttacagcaccgccgaaacattatacggatgtaatacactttgagagtaggcagtggaaatattcaaaatgcaaaggagcaggatagcaatgaaaatcaaggataagagatttaaaatcacagctttatacgagcgactctcaaaggat

SEQ ID NO: 13297 - DNA, 260 bp, Unknown
  Description of Unknown: LeftRegion for integrase B298 sequence
catatcgtatgttaggaattgagaagcaagccaagttgattcaatatttgcttcaattaaaaagtgataaaagtgagaataattgactttttccataaagtcctctatatattcgttcttatagaacactttaccgaaaacgctaaaatcgccacttttatcactttccgtaaatcatatattatataaggattacagaaatggatgtagtattgtatttaagatatagttccgaaagacaaaatgaacaatcaatcgag

SEQ ID NO: 13298 - DNA, 260 bp, Unknown
  Description of Unknown: LeftRegion for integrase B299 sequence
ggctactggctgtaaaatgctggtagccctcattttttagttgtatctagtatataaggggtgtataatagatagaaactgaaaacagcctcataaagccctctattttatcgggggtaaagaagtctacacctaatatataaaagtggctgtatgaggcacacaggagctcacaggactattacaggagggtaaacaggatggcatacaggaaaataacggatataaaagatactattggtatgagagcggtattttat

SEQ ID NO: 13299 - DNA, 260 bp, Unknown; identical to SEQ ID NO: 13265
  Description of Unknown: LeftRegion for integrase B300 sequence

SEQ ID NO: 13300 - DNA, 260 bp, Unknown
  Description of Unknown: LeftRegion for integrase B301 sequence
aaattgataaaaaagaatacaataaaatattcgccgcattgaaactaatagaagcattgtttattgatggaaaaataaaatatcatgtatttaggaatatcctagatgactataaagatgttgttgatttatctgagtttaaatgctatacttgatacatctattaacaaacatcgtattattatgaggaataaaaataaatgtatgatatttacaatcaaaaaccaaccagccgaaaagttgtaatttatgcacgcgtt

SEQ ID NO: 13301 - DNA, 260 bp, Unknown
  Description of Unknown: LeftRegion for integrase B302 sequence
tgttgccaaaagataaaatatcagaagctaaagaattaataatgaattgccttcaaaatgaagatatgattttggtttcaacaattaaggaattggctaatgataaaaatatatctttaagaacattaaataaggcaaaaaaagaattagaaatcgcatcagttagaagtaatgataaatggtattggaagttgtaggtgatgtatgttatgtcaactgaggaggaaaaacaaaaagtaagggaaagacaaaaaggttat

SEQ ID NO: 13302 - DNA, 260 bp, Unknown
  Description of Unknown: LeftRegion for integrase B303 sequence
tgttgccaaaagataaaatatcagaagctaaagaattaataatgaattgtctacaaaatgaggatatgattttggtttcaacaattaaggaattggctaatgataaaaatatatctttaagaacattaaataaggcaaaaaaagaattagaaatcgcatcagttagaagtaatggtaaatggtattggaagttgtaggtgatgtatgttatgtcaactgaggaggaaaaacaaaaagtaagggaaagacaaaaaggttat

SEQ ID NO: 13303 - DNA, 260 bp, Unknown
  Description of Unknown: LeftRegion for integrase B304 sequence
aaattgataaaaaagaatataataaaatatttgccgcattgaaactaatagaagcattgtttattgatggaaaaataaaatatcatgtatttaagaatatcctagacgattataaagatgtcgttgatttatctgagttcaaatgatatacttaatacatctattaacaaacatcgtattattatgaggaataaaaataaatgtatgatatttataatcaaaaaccaaccaaccgaaaagttgtgatttatgcgcgcgtt

SEQ ID NO: 13304 - DNA, 260 bp, Unknown
  Description of Unknown: LeftRegion for integrase B305 sequence
aattgataaaaaaagaatataataaaatatttgccgcattgaaactaatagaagcattgtttattgatggaaaaataaaatatcatgtatttaagaatatcctagacgattataaagatgtcgttgatttatctgagttcaaatgatatacttaatacatctattaacaaacatcgtattattatgaggaataaaaataaatgtatgatatttataatcaaaaaccaaccaaccgaaaagttgtgatttatgcgcgcgtt

SEQ ID NO: 13305 - DNA, 260 bp, Unknown; identical to SEQ ID NO: 13265
  Description of Unknown: LeftRegion for integrase B306 sequence

SEQ ID NO: 13306 - DNA, 260 bp, Unknown
  Description of Unknown: LeftRegion for integrase B307 sequence
tatttaatggaagtgataaagtttttataaatgattattctaaatgtattaaattaaaagatatgggagttcatattaaaaacaattaaatgtttttaaactaggcgtacaaaaaggaagtgaaatacttgaggttaaaagtatggactttttgtgcttttaatctctttcaaaaaaataatagaaagagagatgaaattatgaacgatgaaaagaaaattgcagatgtttatattagagttagtacactcgaccaagca

SEQ ID NO: 13307 - DNA, 260 bp, Unknown
  Description of Unknown: LeftRegion for integrase B308 sequence
cccgaggctatcggcgtatttaacgccaaaggaaagcagctcggaaacgtaaatgcagagttagcaagcgatttgatacataaatatcctaacaacaaaatgaaagttacaatttcagatataacaggcggcggagacaagaattacggttgtaatcttcacgtcgttatctacaaggcataattaaggaggcgggcaaaatggcaagagccgcaaagcaagacaataattcagaaataattgacggcgtgatatatgcc

SEQ ID NO: 13308 - DNA, 260 bp, Unknown
  Description of Unknown: LeftRegion for integrase B309 sequence
gaaaggtcagtatttccggcgcgtcagagttagaagaacggctactcagatacttttctttttgtgacgcagagggtaaattgcgtattattcaatgcgccatgaatgaatttgaccgaacagcaaaagaaaaaacagacccttcggaagagcctgttgttggctaaggtcatcgacctgtctgaatggagaaagacgctatgaaaatcacaaaattccctattgacctctccatgttgaccgaagaggaaatagaccag

SEQ ID NO: 13309 - DNA, 260 bp, Unknown
  Description of Unknown: LeftRegion for integrase B310 sequence
aaattgataaaaatgaatataataaaatattcgccgcattgaaactaatagaagcattgtttattgatgggaaaataaaatatcatgtatttaggaatatcctagatgactataaagatgttgttgatttatctgagtttaaatgctatacttgatacatctattaacaaacatcgtattattatgaggaataaaaataaatgtatgatatttacaatcaaaaaccaaccagccgaaaagttgtaatttatgcgcgtgtt

SEQ ID NO: 13310 - DNA, 260 bp, Unknown
  Description of Unknown: LeftRegion for integrase B311 sequence
taaatcgttttactttgttgcatttttatgctatattattaaagcaatgcaacataatgacacaattcagcataattgcaacatttgcgaaaagaatgaaaaggaagtgacatatttgtgaatgaaagtattggcacgaagctgaaaatattaaggcgcgggagaaagctgacacaaatttgaaaaaaggaagaaatataatgaaatacaacttgaacgattacagaattgaagttgacaaactcggtaaaatcatcatt

SEQ ID NO: 13311 - DNA, 260 bp, Unknown
  Description of Unknown: LeftRegion for integrase B312 sequence
aattgataaaaaagaatacaataaaatattcgccgcattgaaactaatagaagcattgtttattgatggaaaaataaaatatcatgtatttaggaatatcctagatgactataaagatgttgttgatttatctgagtttaaatgctatacttgatacattctattaacaaacatcgtattattatgaggaataaaaataaatgtatgatatttacaatcaaaaaccaaccagccgaaaagttgtaatttatgcgcgtgtt

SEQ ID NO: 13312 - DNA, 260 bp, Unknown; identical to SEQ ID NO: 13309
  Description of Unknown: LeftRegion for integrase B313 sequence

SEQ ID NO: 13313 - DNA, 260 bp, Unknown
  Description of Unknown: LeftRegion for integrase B314 sequence
atgttgttccgcttgcacgatttaatccgctgaaattcctcatcggaataaaaccaagcggaacgttctacccctttgattctatgtttatgcgcgataagattgatagtttcatagacatttaatagatggtatttgttcattcagatcacctcttgaatagattaaaaaacaaaaatttgaaaaaaggaagaaatataatgaaatacaacttgaacgattacagaattgaagttgacaaactcggtaaaatcatcatt

SEQ ID NO: 13314 - DNA, 260 bp, Unknown
  Description of Unknown: LeftRegion for integrase B315 sequence
ctcctgtcttccaatggttgccgcagtacctcaagtacgtttctattaaactccggcagttcgctattcttaaaatacttgcaccattgttggacctttcttatctttgcgagaggtaaggactattatctgtgctattagattgtattatagatagttagctaatagtcttgattgcaataatattaaatgtaacagatatgagagctgcatttttgattaggtgctcaactaagaagcaagactatgagcgacaggta

SEQ ID NO: 13315 - DNA, 253 bp, Unknown
  Description of Unknown: LeftRegion for integrase B316 sequence
cttccaatggttgacgcaacacttccaacactcctcggttgaattccggcaattcgctattcttaaaatacttgcaccattgtagaaactttcttatctttgcgagaggtaaagactattatctgtgctattatattgcattatagatagttagctaatagtcttgattgcaataatattaaatgtaacagatatgagagctgcatttttgattaggtgctcaactaagaagcaagactatgagcgacaggta

SEQ ID NO: 13316 - DNA, 260 bp, Unknown
  Description of Unknown: LeftRegion for integrase B317 sequence
gagtattagaaaacgcatgttgggaaaaatatgacctctcctaaaattaattttcaagatcatgaaaggataattgcaatgtttaatgaaaaagtactgatgataaagatggcagatatactacagcaagagaatctcatatcatatgatgaacagcagaaaatgaaggcattgattcgtgaaagcgaggaaatttagtcatgcttcgagctgtaatttactgccgatgctcaacagaagaagagtctcaaaaggacgca

SEQ ID NO: 13317 - DNA, 260 bp, Unknown
  Description of Unknown: LeftRegion for integrase B318 sequence
tggcggtcttccaatggttgacgcaacacttccagcactcctcggttgaattccggcaattcgctattcttaaaatacttgcaccattgttggaactttcttatctttgcgagaggtaaggactattatctgtgctattagattgtattatagatagttagctaatagtcttgattgcaataatattaaatgtaacagatatgagagctgcatttttgattaggtgctcaactaagaagcaagactatgagcgacaggta

SEQ ID NO: 13318 - DNA, 253 bp, Unknown
  Description of Unknown: LeftRegion for integrase B319 sequence
tttccagtttggccaaccgggaaacatagaatgaagggatatgtttcccggattcgctattcttaaaatacttgcaccattgtagaaactttcttatctttgcgagaggtaaagactattatctgtgctattatattgcattatagatagttagctaatagtcttgattgcaataatattaaatgtaacagatatgagagctgcatttttgattaggtgctcaactaagaagcaagactatgagcgacaggta

SEQ ID NO: 13319 - DNA, 260 bp, Unknown
  Description of Unknown: LeftRegion for integrase B320 sequence
aacagaaaaggcagcatatctgataaaaaagttgctttctgatggcgatatgagagcaagagaaatctatatgcggatgaaagatgaaggaatcagccgcagaaccgcagaaaatacgaagaaagaactcggtatccgaagttatcggaagatgcgacagtggtattggagcatccatacgggagaatgaggaaaagcacatgattaccggtgaagtagaagcagtagaccgtaagcaaaaaatcagagaccgctataag

SEQ ID NO: 13320 - DNA, 260 bp, Unknown
  Description of Unknown: LeftRegion for integrase B321 sequence
tgacggtcctccaatggttggcgcaatacttctagcactcctcggttgaattccggtaactcgctattcttaaaatacttgcaccattgtagaaactttcttatctttgcgagaggtaaagactattatctgtgctattatattgcattatagatagttagctaatagtcttgattgcaataatattaaatgtaacagatatgagagctgcatttttgattaggtgctcaactaagaagcaagactatgagcgacaggta

SEQ ID NO: 13321 - DNA, 260 bp, Unknown
  Description of Unknown: LeftRegion for integrase B322 sequence
tggcggtcttccaatggttgacgcaacacttccaacactcctcggttgaattccggcaattcgctattcttaaaatacttgcaccattgttggaactttcttatctttgcgagaggtaaggactattatctgtgctattagattgtattatagatagttagctaatagtcttgattgcaataatattaaatgtaacagatatgagagctgcatttttgattaggtgctcaactaagaagcaagactatgagcgacaggta

SEQ ID NO: 13322 - DNA, 196 bp, Unknown
  Description of Unknown: LeftRegion for integrase B323 sequence
gcggctaacgacgtaaaggcacgtttccacacgctgccggagactctggaggacgccagatcactggctgcatccagattgtattatagatagttagctgatagtcttgattgcaataatattaaatgtaacagatatgagagctgcatttttgattaggtgctcaactaagaagcaagactatgagcgacaggta

SEQ ID NO: 13323 - DNA, 260 bp, Unknown
  Description of Unknown: LeftRegion for integrase B324 sequence
tgacggtcctccaatggttggcgcaatacttctagcactcctcggttgaattccggtaactcgctattcttaaaatacttgcaccattgttggaactttcttatctttgcgagaggtaaggactattatctgtgctattagattgtattatagatagttagctaatagtcttgattgcaataatattaaatgtaacagatatgagagctgcatttttgattaggtgctcaactaagaagcaagactatgagcgacaggta

SEQ ID NO: 13324 - DNA, 260 bp, Unknown
  Description of Unknown: LeftRegion for integrase B325 sequence
tgccggtcttccagtggctggcgcaggacttctaatacccctctgttgaattcgggtaattcgctattattaaaatacttgcaccattgtagaaactttcttatctttgcgagaggtaaagactattatctgtgctattatattgcattatagatagttagctaatagtcttgattgcaataatattaaatgtaacagatatgagagctgcatttttgattaggtgctcaactaagaagcaagactatgagcgacaggta

SEQ ID NO: 13325 - DNA, 260 bp, Unknown
  Description of Unknown: LeftRegion for integrase B326 sequence
tggcggtcttccaatggttgacgcaacacttccagcactcctcggttgaattccggcaattcgctattcttaaaatacttgcaccattgtagaaactttcttatctttgcgagaggtaaagactattatctatgctattatattgcattatagatagttagctaatagtcttgattgcaataatattaaatgtaacagatatgagagctgcatttttgattaggtgctcaactaagaagcaagactatgagcgacaggta

SEQ ID NO: 13326 - DNA, 260 bp, Unknown
  Description of Unknown: LeftRegion for integrase B327 sequence
aaccaaaaaaggttctgagagtttgaattaaggctcaactcttgtaataacgtcttttattaatgtaaccacccaactatacatatgataataatagtcaagtattaattttctcaatacttgactattgtttattgacttacaccatttattgtggtatgctgtatgatacccaataaaataaaaaaggagaacctcatatgagtacaagcaatactgactgcgataatcggaagtacgccatatatgcccgtaaatcg

SEQ ID NO: 13327 - DNA, 260 bp, Unknown
  Description of Unknown: LeftRegion for integrase B328 sequence
tatccccatcctgcagaacgtatttctggatattaagttgttgcacgtcagcatcttcttcttcaacgccggggttgtcggcgaggaactcttcacgagcggcatcaatagcttcttccagcgtactatagaatacatattctttatcggacataatgagttcctcaatgattatgtttatcaaatgtataggtgcatgaatgcgaactgtcaaagcctacatctatagtagggtatcaagcttgcagcaggttgatgct

SEQ ID NO: 13328 - DNA, 260 bp, Unknown
  Description of Unknown: LeftRegion for integrase B329 sequence
tttaaatgttagacttcgtaaaattaactttaaaatgtcaaacaagtgagaggtgtcttttaaaatatctatattttagactacacttttctcatttaagatgccaaacatatgagaagcatatttaaattttttaaaattttagacttaacttttctcatttaagatgccaaacatatgaaaggagatatttaaaaaatatgaataaagaaaataaaatagcaggtatttacattagggtcagtacagaggatcaagct

SEQ ID NO: 13329 - DNA, 260 bp, Unknown
  Description of Unknown: LeftRegion for integrase B330 sequence
tttaaatgttagacttcgtaaaattaactttaaaatgtcaaacaagtgagaggtgtcttttaaaatatctatattttagactacacttttcaagcttaaagtgccaaacatatgagaagtatatttaaattttttaaaattttagacttaacttttctcatttaagatgccaaacatatgaaaggagatatttaaaaaatatgaataaagaaaataaaatagcaggtatttacattagggtcagtacagaggatcaagct

SEQ ID NO: 13330 - DNA, 260 bp, Unknown; identical to SEQ ID NO: 13329
  Description of Unknown: LeftRegion for integrase B331 sequence

SEQ ID NO: 13331 - DNA, 260 bp, Unknown
  Description of Unknown: LeftRegion for integrase B332 sequence
atctgagaaggcggcgtatctgatcaagaagctgctttccgggggtgacatgagatccagagaaatctatatgcggatgagcgatgaaggtatcagccgcaggacagcagaaaatacaaagaaagaactcggcatccggagttatcggaagatgcgacagtggtactggagcatgaagccggaggaatgagaggaagcaaatgataagcagtggagcagaggcggcagaccgcaagcagagaatcagagacagatataaa

SEQ ID NO: 13332 - DNA, 260 bp, Unknown
  Description of Unknown: LeftRegion for integrase B333 sequence
cactataccaatccgcatattcacattatacataacttctcaagactactttctgaaaaacagattaccgtgactattttcatctatataaagttataaagctcttgcaatctgacccaaactatggtatatacattatacgaaacatgattttgaaagaacgaattaccgttcaatgatgttagagtgaggtgcctgccatgaccgccgtgatctatgctcgctattcctcggacaaccagcgcgaagaatccatcgaa

SEQ ID NO: 13333 - DNA, 109 bp, Unknown
  Description of Unknown: LeftRegion for integrase B334 sequence
ccatagatgcccggtcacagaggtatggatacctcggaaaggagattttatgaagagaccggacaacaacaaaataacagcactttacgagagactgtcacgagatgat

SEQ ID NO: 13334 - DNA, 260 bp, Unknown
  Description of Unknown: LeftRegion for integrase B335 sequence
cgccgaaatcgagagcggctgtattgccgtggtcgtggtagacggtacagacgggtttttaaaacaagtcgagttcggtgagaactccacctcgcttcactcgttcaatccgtattatcccgacatggagtttgtagatgccgaccagaaacgtttgcactttgttggtcgcgtccgggaaatgaagcggagattctgatatgcgtaaaaagtttaatatcgacctttctatgctgaccccggaagaacagcagcagttt

SEQ ID NO: 13335 - DNA, 260 bp, Unknown
  Description of Unknown: LeftRegion for integrase B336 sequence
ggctactggctgtaaaatgctggtagccctcattttttagttgtatctagtatataaggggtgtataatagataggaactgaaaacagcctcataaagccctctattttatcgagagtaaagaagtctacacctaatatataaaagtggctgtatgaggcacacaggagctcacaggactattacaggagggtaaacaggatggcatacaggaaaataacggatataagagatactattggtatgagagcggtattttat

SEQ ID NO: 13336 - DNA, 260 bp, Unknown
  Description of Unknown: LeftRegion for integrase B337 sequence
ttgcccggcggattgtgatggagatgctctgcgaacatgatgcgcacagcacggatatcctgaacaagctgaagctgatggggatatccgaacggacgatacattctgccaagaaggagcttggcgttcaatcatacagaagtgacggcgtctggtactggcatctggacgacccgtcgggatcataaaggaggaaagcgatgcaggatgatggccgcagagagcaactgcgtcagatttaccagcgggaggacaccggc

SEQ ID NO: 13337 - DNA, 260 bp, Unknown
  Description of Unknown: LeftRegion for integrase B338 sequence
agattattcctctgttaagagacggaaagttgattgactgaatatgctaattattgagcagtatgtaagaggaataatcttatggtcgaaaatgagaacagaattatattaaaattagcagaattattactgcaggagaaattaataacacctgaagaaaaaagtaaactgtacatattggtaaagaaggaaggcaatatatgatacgagctgttatctattgccggtgtagtacagaagaagaaagccagaaaaacgcc

SEQ ID NO: 13338 - DNA, 260 bp, Unknown
  Description of Unknown: LeftRegion for integrase B339 sequence
ttacaacgtccgcaattcagcgcaaatgtaaatgcggaaacaactgtgcgtatgcagttcttcaaaacctacaggtctacggaatgattcgagagattcggcaattcacatacgaatggacagaaaaagccctcctgctgggcgcagaagggcgtaacgggtaaacagatatgtcgatagatattaaatggcaggtgccaatggcacagccggaggcaaacgaactggccgtcgtatatgctcggtactcaagtcacagt

SEQ ID NO: 13339 - DNA, 260 bp, Unknown
  Description of Unknown: LeftRegion for integrase B340 sequence
tttgagggaggtcaataatgaatgaaattaaggtagataaaaatgtagcggctctgaaactcattgagatacttcttgaaaaaggaatgataaatcaagccacatatacaaatatcgtgaaacacgcaaattcgcacatttcacaggcggcttgataatcagtacaatatattcagaaaaatgaattggaggtatgcttaatgaacacagcagtaaatgaatataattacagatttaagctcacagattattctctgttt

SEQ ID NO: 13340 - DNA, 260 bp, Unknown
  Description of Unknown: LeftRegion for integrase B341 sequence
gccagtatccttatggaaatgctggagaacgggccggagaaagcatccgatatccatgcgatatttaagcaaaagaacataagcgaaagaactgcgaatatagcgaaaaaagcattaggaatacactctgtaaaaagagacggaatatggtactgggaattaccgaaagactaacattgcacataaagaggttatagttgatgtccaattattcgagcagagaagagttacggcaggtatatcagcgtgaggatcaaggc

SEQ ID NO: 13341 - DNA, 260 bp, Unknown
  Description of Unknown: LeftRegion for integrase B342 sequence
aagacaggtcttttgattgtgtgtagtgacccggcgcaaaagaaaatcgacagagcggatgccctgaatattccgatcgtttcggagcagcaatggtttgagctcatgccagaacttgaagccgttggaatgtggaacggaaagcgaatcctgttttcagacgacggcatctaccgtgttgaagtgggcggtgaaagctgatggccagaaaaaagaatattgctgctggcctcgatgccgtcatctatgcccggtactca

SEQ ID NO: 13342 - DNA, 260 bp, Unknown; identical to SEQ ID NO: 13339
  Description of Unknown: LeftRegion for integrase B343 sequence

SEQ ID NO: 13343 - DNA, 260 bp, Unknown; identical to SEQ ID NO: 13339
  Description of Unknown: LeftRegion for integrase B344 sequence

SEQ ID NO: 13344 - DNA, 260 bp, Unknown
  Description of Unknown: LeftRegion for integrase B345 sequence
ttgatggtgaaaacatcaatattcctgaattttgtcagactcttttattcttctttgaaaactgtgatgcacctggtcaactgcgcataatccaattagccatgaatgaatatgaccgaacacaaaaagaaaaaacaaatccaacgaaagactctgctatcggctaagatcatcgacctatctgaatggagaaagacgctatgaaaatcacgaaatttcccattgacctctccatgctgaccgaagaagagatagaccag

SEQ ID NO: 13345 - DNA, 260 bp, Unknown
  Description of Unknown: LeftRegion for integrase B346 sequence
aagaaatatgatccaaattacgttccatctaaaaagaaaattcgtgcaaccgtaccttccaaataattgttcttttcaaggagctccccgccgggtgctccttgttttataaacgcacaaacccctccagctgtttccagccggaggggtctgccccgtcgtcaaaaggtaaggataaaaaaacaagaaggtttctttccatgcgtcgcctgcccttacagcatagcacgctttttggatatgggcaagcaaaagccccg

SEQ ID NO: 13346 - DNA, 260 bp, Unknown
  Description of Unknown: LeftRegion for integrase B347 sequence
gatacacctcccgaatcagatactcttatggttgtcattgttgatgacgaagaaggatttgttaagaaaatcagcattgatgaagatactgtgacccttcgctcttttaacccacactatcctccccgtgtttttggcggtgttgaaattggacgattgcgctttgtcggtagagtcatggagctaaaaaggagatttgcatgaaaaaatttccaatcgacctttcctgtctggcagaggaagaaatctctcaatttcag

SEQ ID NO: 13347 - DNA, 260 bp, Unknown
  Description of Unknown: LeftRegion for integrase B348 sequence
ccatcttctccgcagaaaagacagggcgttttggaacgagttgaacctaaatgtgcaactctacttatataatggctctcagatatgatatttcggaaatgaatttaactttttgactgttgaaagtgtggaaagatttattttccccagaacttgcaacggcttgcaacaaacttaaaactacttgaaaggtggtatttatgcctcgcaaaaagaaactgcaagaggtaggcggactgcggctggtggcatactatcgc

SEQ ID NO: 13348 - DNA, 260 bp, Unknown
  Description of Unknown: LeftRegion for integrase B349 sequence
cgcacggatcattgtagagattctgaatgagcaggacacatacagcgcagatatacttaagaaactaaagtcaatgggcatttcggaaagaacgatacagacagtaaaaaaagaacttggcatcacttcctatcgtaaaaacggtgtgtggctttggcatcttcatgacggtgctgattcatcaagttgggagattaagaatgcataataacagccgtgaaaaactgagagaaatatatcagcgtgaagacaacagtcag

SEQ ID NO: 13349 - DNA, 260 bp, Unknown
  Description of Unknown: LeftRegion for integrase B350 sequence
aaaggagtgcgacatgaacaaagcgttattactggcgttgaacgaacacatataccttcagggactaattagcagggaaatgaaagaaaaaattgatattgagattctttctgaaaattaagccaaactattgagcggagatgagattgaaggtataataatcttatctctgctcttccgactagaagggagaacggggcatgaacgtttatcgcactagagaaatactgaaaacttgcagtattttcgatctgaaatta

SEQ ID NO: 13350 - DNA, 260 bp, Unknown
  Description of Unknown: LeftRegion for integrase B351 sequence
aaggagtgcgacatgaacaaagcgttattactggcgttgaacgaacacatataccttcagggactgatcagcagagaaatgaaagaaaaaattgatatggagattctttctgaaaattaaatcaaaactattgagcggagatgagattgacgttataataaccttatctctgctcttccaactagaagggagaacggggcatgaacgtttatcgcactagagaaatactgaaaacttgcagtattttcgatctgaaatta

SEQ ID NO: 13351 - DNA, 260 bp, Unknown
  Description of Unknown: LeftRegion for integrase B352 sequence
tgcatcgagtgaccccgattgggcgtacgtggacgagtatatgcgagacgtgatggaacgcgcgcaatccgatttgtccactatgcagtcaatcggctaagcgcaagtcaagcccgccgttccatctgggcggcgggcttatatccaaaggagcgaaccatgaaaatctataagcagaaattacagggggtggtaaacctatggcacgcaagaagaaattcgcgccgaacgacaacaacctcgcgatagcgtactatcgc

SEQ ID NO: 13352 - DNA, 260 bp, Unknown
  Description of Unknown: LeftRegion for integrase B353 sequence
tatcttattcttatccgagaaaatcaaatttaataaaagtgccgctgggcaacgtgctcttatgacaagcaagcttcgccagcatattaaagagcgcgatggattcacttgtcagctatgtggcgcttctgttgaacaggaacctcatttactacttgaaatcgaccacataaaaccgatttccaaaggcggtatgaccgttgaagataatttacaaactctttgttggcgctgtaaccgcagtaaaggctctaaatttt

SEQ ID NO: 13353 - DNA, 260 bp, Unknown
  Description of Unknown: LeftRegion for integrase B354 sequence
tgtacaacaagaagcaattatattagctgcttatcagtacataaaagatttatttgaagagggaaaaataacaaaacatgaacttaataaagtgaagaaaaagtacaatatagatattgaataaattgacatattaagttataataaataccatactaaggtacatctagtatggtatttattggtttaagaggtgtatcatgaaaagaaaaattgcaatatatgctagagtttctacggaacatgaagcgcagatatct

SEQ ID NO: 13354 - DNA, 153 bp, Unknown
  Description of Unknown: LeftRegion for integrase B355 sequence
ttaacgggcattgggtccgcttccagcacggtttttgcatgataatcatacaaatgtgttatgcttatacaaacaaaaactagaaggttgccaatgaaaaaagtctttgtgtatcatcgagttagttccgatcagcagctcgacgggtcaggc

SEQ ID NO: 13355 - DNA, 260 bp, Unknown; identical to SEQ ID NO: 13351
  Description of Unknown: LeftRegion for integrase B356 sequence

SEQ ID NO: 13356 - DNA, 260 bp, Unknown
  Description of Unknown: LeftRegion for integrase B357 sequence
gtcgtaaatatcggcggttctgttggcaacggcgtcacaaagaaaaccgactttctcgttgtcggctctacggattattgtgcctctgtaaagggcggcaaaactggcaagctgaaaaaagccgaggatttgcagaaaaagggcgcaaaccttgccattatcgacgagggtgctttttacgatatgttgggcgagtgattatggcacaacaaaaaaaggccgccggggccgagtttgacggtactccgcgggcggtaatt

SEQ ID NO: 13357 - DNA, 260 bp, Unknown
  Description of Unknown: LeftRegion for integrase B358 sequence
agagcagccacagcagtatcgccatctggtggacgagaaaaaatgcgcccagacagagcaccgctatggccccatcacagggaaattcgtcctctaccgtgggaaaagccaagtggtagagggcattcaatatcaaaatgtggaagaatacccgcgcacccttgtgtgacaaggatacgctatcgtaaggggggctgacaatggcaaaaaataaagactgtattgctgtgtattcccgaaagtcaaagtttaccggcaag

SEQ ID NO: 13358 - DNA, 260 bp, Unknown
  Description of Unknown: LeftRegion for integrase B359 sequence
ttttataatatgaaggaggtcaatcatgctagtctatacgatccgcaaaagtgatttgtatgcgcccggcattgaaccaacccgtgaagttctggacattgccagtgaaaatgagaatgtggactttgcccttgtccttgcaaagattctcagggaactgactgcccagaccgggaacataacttaaggagtgaaaacatatgacagtcgttgagcggttaagaagcaggggagtgaccccgagagcggttttgtatgcc

SEQ ID NO: 13359 - DNA, 260 bp, Unknown
  Description of Unknown: LeftRegion for integrase B360 sequence
cgcagaaattgagagcggctgtattgccgtggtcgtggtagacggcacagaaggatttttaaaacaggtcgagttcggtgaaaactccacctcgcttcactccttcaacccttactatcctgatatggagttcgtaggtgccgatcagaaacgcttgcactttatcggccgcgtccgggaaatgaagcggaggttctgatatgcgtaaaaagtttaatatcgacctctccatgctaaccccggaggaacagcagcaattt

SEQ ID NO: 13360 - DNA, 260 bp, Unknown
  Description of Unknown: LeftRegion for integrase B361 sequence
acataacatagaacggcaaagcattttagagtttttaaaaaattatactatattggtttatttgtgttattataagaaaattaaagagatagtaataataaatataaaaactctaaaagtgctaatagctaaaactatgctatgtggcacttttttgttgcctttctattcataaaaatttggaaggaggatatgtaaaaatgaacgaagaaaggaaagtagcaggaatttatattcgtgttagcacagaagatcaagta

SEQ ID NO: 13361 - DNA, 260 bp, Unknown
  Description of Unknown: LeftRegion for integrase B362 sequence
ttatttaacggacacgaatttgcttactacagagatttaaataccaaaattaaactatctgatttaaaagatttcattaaaaaactaaaataatgacaaaatctgtgctataatggttatagaaaatattaaacctattgggtgaagtagtatttatagcctaaatattgcttcacctttttttgttaaggaggattaaaatgtgtgaagaagaaataaagaatgctggtatttacattagggttagtaccgacgatcaa

SEQ ID NO: 13362 - DNA, 260 bp, Unknown
  Description of Unknown: LeftRegion for integrase B363 sequence
caatggtactgaaaaccacgaaaacaaccagcgtgatgacctcttgaataactttcaactggatcaagctgaacggaccaccattgtcgcggaaaccgatacggttggcaggaacctgaaaacaatattcacttaactaaatagacttgcccaagtgaaattttatacctatatttgcttcataatcaatatattacattatgataaaaattataggatacgcacgagtttctactacaaaacaagacttatctcgacaa

SEQ ID NO: 13363 - DNA, 260 bp, Unknown
  Description of Unknown: LeftRegion for integrase B364 sequence
tttaaatgttagacttcgtaaaattaactttaaaatgtcaaacaagtgagaggtgtcttttaaaatatctatattttagactacacttttcaagcttaaagtgccaaacatatgagaagcatatttaaattttttaaaattttagacttaacttttctcatttaagatgccaaacatatgaaaggagatatttaaaaaatatgaataaagaaaataaaatagcaggtatttacattagggtcagtacagaggatcaagct

SEQ ID NO: 13364 - DNA, 260 bp, Unknown; identical to SEQ ID NO: 13018
  Description of Unknown: LeftRegion for integrase B365 sequence

SEQ ID NO: 13365 - DNA, 260 bp, Unknown
  Description of Unknown: LeftRegion for integrase B366 sequence
gaaccgttgtaaacaccgtaaagattatcaaagtgattacttcctgaatcactttgagttgcatcaatgagaacgggcctccattgcctaaaaagcctatccgattggccggaacctgacaagaatactcacttaactaaatagacttgcccaagtgaaattttatacctatatttgcttcataatcaatatattacattatgataaaaattataggatacgcacgagtttctactacaaaacaagacttatctcgacaa

SEQ ID NO: 13366 - DNA, 260 bp, Unknown
  Description of Unknown: LeftRegion for integrase B367 sequence
tatgtttaataaaagaacttggcagggacaaaaacataccggaagaattagttagagcagtggaaataaaatatgataacgaatagttcaaaaagccaaggtgttttgcaccttggctttgtaaatattgaattaaccaggttatgatgctatactatgctaaaatctatatttgataacctggtggataggagtaaattatgaagagaaaagttgcaatatacgccagagtatcaacggagcatgaagcacagattaat

SEQ ID NO: 13367 - DNA, 260 bp, Unknown
  Description of Unknown: LeftRegion for integrase B368 sequence
attggtgttttggttgcgtgcagcaatccaatgcagaagaaaatcgatcaggccaaagctctaaatattccggtcatttcagaacagcagtggtttgagcttatgccagagctggaagcactcggaatgtggaacggaaagccaattccgtttgcagatgataatggaatttaccatattgatgtgggcggtgatggttgatggcccgaaaaaagaatattgctgcgggtcagaatgccgtcatttatgcccgctattcc

SEQ ID NO: 13368 - DNA, 260 bp, Unknown
  Description of Unknown: LeftRegion for integrase B369 sequence
gcgaatgacatgcccggtcgggtgctcatagaccattgcatcatcgacatacatcagaccgtgaatgtggtgttcattcagcatctcaatgagttgcagggctttaataacgggcattgggtccgcttccagcacggtttttgcatgataatcatacaaatgtgttatgattatacaaacaaatataaaattttacgataatgaaaaaagtttttgtatatcatcgtgttagctcagaccaacagttggatggatctggt

SEQ ID NO: 13369 - DNA, 260 bp, Unknown
  Description of Unknown: LeftRegion for integrase B370 sequence
caatcatggagaaaatggtaaacacggccagcgtaatcacttcctgaatcactttcagctgcatgatgtcaaacggtcccccactatctctgaaccccagacggttagccggaacctgcagacagtattcacttaactaaatagacttgcccaagtgaaattttatacctatatttgcttcataatcaatatattacattatgataaaaattataggatacgcacgagtttctactacaaaacaagacttatctcgacaa

SEQ ID NO: 13370 - DNA, 260 bp, Unknown; identical to SEQ ID NO: 13361
  Description of Unknown: LeftRegion for integrase B371 sequence

SEQ ID NO: 13371 - DNA, 260 bp, Unknown
  Description of Unknown: LeftRegion for integrase B372 sequence
acttactgggtcttagtgaagtcagaaaaccagaagtcttagttttgtcagaaaaagagaaaatcctcattgacgcataccgtactgctaatgacatgggacagttgaacataatctatgtctgcatggacgaaatgaaaaaagcaaaaggagaaggcgtacttgtagggtaattgatttcatagaatggaggaagaaccatgtatgaggatataaaaacagcctgcctatacgttagattctcaagccataaccagact

SEQ ID NO: 13372 - DNA, 260 bp, Unknown
  Description of Unknown: LeftRegion for integrase B373 sequence
ccggtctgcatttttattgtagcatgatccccctcagaacacaatccgacaaaaaagaatccccggcagctctgtacgatagagccgccggggccagatggggaatctgtctgtcggagaataatcataggataagaaaacacctgctgagtaatttcattgtaccatgatcctgctcagcgcacaagctgaggaaaaccatgaaaaagaaattttcttctgtacccgatccagatattcaggacgcggtgatctatgca

SEQ ID NO: 13373 - DNA, 260 bp, Unknown
  Description of Unknown: LeftRegion for integrase B374 sequence
aaaatcagagcttttattttggaaatagaaaatagtacctatatagtaataaacgataaactttcggaggaagaaaaaaacaaagcatttcagacacgaaatgttacattataagttaggacatctcaataattatgatgtcaataaaattaaagaatatgaaaaagaagttgataagcttatgaatgaggaggtgtaagatgtatataacagtaactttagatcctaacggaatatatgacgcatatttaagaaaatca

SEQ ID NO: 13374 - DNA, 260 bp, Unknown
  Description of Unknown: LeftRegion for integrase B375 sequence
ggtctgcatttttattgtagcatgatccccctcagaacacaatccgacaaaaaaaaatccccggcagctctgtacgatagagccgccggggccagatggggaatctgtctgtcggagaataatcataggataagaaaacacgcctgctgagcaatttcattgtaccatgatcctgctcagcgcacaagctgaggaaaaccatgaaaaagaaattttcttctgtacccgatccggatattcaggacgcggtgatctatgca

SEQ ID NO: 13375 - DNA, 260 bp, Unknown
  Description of Unknown: LeftRegion for integrase B376 sequence
aaaatttcttcataaaaaatatagccacagctgggcagaccatgttaatataaaaatgtaactgttccaaactgactttgcattatggatttttccctaacgcactttccaaaggtttgattttagtatctgacttttcggagcagttcttataaaataaatatatatggttgagccggttgtgtgaaaggagattttaaatgaaacaatcggacaacacaaaaataacagccctttatgagcggctttcacgtgatgat

SEQ ID NO: 13376 - DNA, 260 bp, Unknown
  Description of Unknown: LeftRegion for integrase B377 sequence
aaaattagagcttttattttggaaatagaaaatagtacctatatagtaataaacgataaactttcggaggaagaaaaaaacaaagcatttcagacacgaaatgttacattataaattaggacatctcgataattatgatgtcaataaaattaaagaatatgaaaaagaagttgataagcttatgaatgaggaggtgtaagatgtatataacagtaactttagatcctaacggaatatatgacgcatatttaagaaaatca

SEQ ID NO: 13377 - DNA, 260 bp, Unknown
  Description of Unknown: LeftRegion for integrase B378 sequence
ttctctcgctttggaagacaataccaccatctacaaagatcccgaatctaaaatagagataccgaacataaaagttgtgtccgtggtggatgaaatccgtggtttgaagcagctgctggatgagggaatcctgacagaagaagaatttgctgcaaagaaaaagcagcttcttgggatttgaaaacggacggtgatggttgatggctcgaaaaaagaatatcgctgcgggtcaggatgccgtcatctatgcccgctactcc

SEQ ID NO: 13378 - DNA, 260 bp, Unknown
  Description of Unknown: LeftRegion for integrase B379 sequence
ttgatacgttatagcattcagcttgcttttttgaagcagctgttagaaagaaagctcataaccgatagagagtattcccttatcaagcagcgcttaatgaaagattatcgtgtggtttccgaactatcctcttgattttgtgttgcattggcgttatgattaacgcaatgaaaggaacacattcaacaaggaggtcaagcatgaaagatgttgaagtcattaaagcgcgaaacacgctctctccacgagcgcgcacaaac

SEQ ID NO: 13379 - DNA, 260 bp, Unknown
  Description of Unknown: LeftRegion for integrase B380 sequence
atttccttatccttggtaatagcgattatctcgcatcttctgaaggtgaaaaaagctcaaagcagaagaaagccgaaaagctcaagttgtctggcattgatattgaaatcattcccgaaaatgtcttttatgatatgcttgaatcctacttcgatagtcaaaacaatcaataacaagaatgtttgagggctctgcacgctatggcaaagagaacatccgttgaaaactcaataatcaccggtgtaatatacgcgcggtat

SEQ ID NO: 13380 - DNA, 260 bp, Unknown
  Description of Unknown: LeftRegion for integrase B381 sequence
ttagagcatttatattagaattagacaataatatctatattgttgttaatgaatcgttaagcgatattgagaaagaaaaagcctttcgaacacgagctgttacattataaattgggacatttaaaaaactatgatatatctaaaattagtgagtttgaaaaagaagtaaataaaattatgagagataaggaggtgtagtaatgcttaatatcattaaactagatccaaatggaatatatgacgcttatttaagaaaatct

SEQ ID NO: 13381 - DNA, 260 bp, Unknown; identical to SEQ ID NO: 13018
  Description of Unknown: LeftRegion for integrase B382 sequence

SEQ ID NO: 13382 - DNA, 260 bp, Unknown
  Description of Unknown: LeftRegion for integrase B383 sequence
cccgatgctcggctcgctcgatcttatcattgctggctttcacgagccggtgtttgcgccgcaggatgaagcggcccataccgaagcgatgatcgccacgatggccagcggctacgcccatatcattagtcatccgggcaacccaaagagaaattctacacattaatataacttattgatttgtatggaatatgtagaatatggctcagaaattatacagttatcagcgttggtcaagtgcggtacaggccgatggtaca

SEQ ID NO: 13383 - DNA, 260 bp, Unknown
  Description of Unknown: LeftRegion for integrase B384 sequence
gagaagtaaaaaggctgtatgaggcaaatagagggcttattcatgtgagagcatgggtaggctcttttttagtgcatgaaaataattatatagcccctgtataattttcccctaaaaaatgaggagggctgtgattatgtttattaaggctaagtagagccacaggataataaacaggatcataaaggaggatatacaggatgatagataattgtgtaagagcggtattctatgccagagtatccacacaggaggaggaa

SEQ ID NO: 13384 - DNA, 154 bp, Unknown
  Description of Unknown: LeftRegion for integrase B385 sequence
agcggcaacgtgcacattatcagccacccgggaaacccgaagagaaattctacacattaagataagctattgatatatatagaaggtgtagggtatggctcagaaactatacagttatcagcgttggtctagtgcggtacaggccgatggtaca

SEQ ID NO: 13385 - DNA, 260 bp, Unknown
  Description of Unknown: LeftRegion for integrase B386 sequence
ttacaatacttgaatacaaagttaatgaaatatcaaataagcctttttatattaaagagcataatcaaaagtataatattaaagaaattgcacaatttttgaaaaaattttaattttagactatacattttgcctatttgtgaggaaacatatgagaagtattttaatatttctcgaattttaatgaaaggaggaaaactatgagatgtggtgtttatgtaagagtatctactgacgaccaaagagataatggttattct

SEQ ID NO: 13386 - DNA, 260 bp, Unknown
  Description of Unknown: LeftRegion for integrase B387 sequence
aagaggtaaaagggctgtatgaggcaaatagagggcttattcatgtgagagcatgggtaggctcttttttagtgcatgaaaataattatatagcccctgtataattttcccctaaaaaatgaggagggctgtgattatgtttattaaggctaagtagagccacaggataataaacaggatcataaaggaggatatacaggatgatagataattgtgtaagagcggtattctatgccagagtatccacacaggaggagcaa

SEQ ID NO: 13387 - DNA, 260 bp, Unknown
  Description of Unknown: LeftRegion for integrase B388 sequence
aagcggtaaaagggctgtatgaggcaaatagagggcttattcatgtgagagcatgggtaggctcttttttagtgcatgaaaataattatatagcccctgtataattttcccctaaaaaatgaggagggctgtgattatgtttattaaggctaagtagagccacaggataataaacaggatcataaaggaggatatacaggatgatagataattgtgtaagagcggtattctatgccagagtatccacacaggaggagcaa

SEQ ID NO: 13388 - DNA, 260 bp, Unknown
  Description of Unknown: LeftRegion for integrase B389 sequence
aaggagtgcgacatgaacaaagcgttattactggcgttgaacgaacacatataccttcagggactgatcagcagagaaatgaaagaaaaaattgatatggagattctttctgaaaattaaatcaaaactattgagcggagatgagattgacgttataataaccttatctctgctcttccaactagaagggagaacggggcatgaacgtttatcgcactagagaaatactgaaaacttgcagtattttcgatatgaaatta

SEQ ID NO: 13389 - DNA, 260 bp, Unknown
  Description of Unknown: LeftRegion for integrase B390 sequence
tacgctcgctgcaacattgggagattggagaccgcaagccggctccgtttctgattttccttattcgcaaggtgtacgacctcgaacaggagaataaatacttgcaagagtgcatcgacacactcgaccgtcaaaacgatgagctgaaagcacttattaagtctcaggcaaatacacagtaataaccgaggtggattttcatgagtacaaataaagaattacgcgagggggtggccgacaaggcaaaaacctgcttcctg

SEQ ID NO: 13390 - DNA, 260 bp, Unknown
  Description of Unknown: LeftRegion for integrase B391 sequence
agggacaattaatggaaaaagctatattgtatgccataaacgaaagaatgttctcacttggtctgatagatgagaaaacaagagataaaattaaagctgaaatcagcattagaaagtaacgacaatgtattgagtggatttatatgaggtgttatactttatatgattccactccctgtttattaagggagaaatgcactatgaatatttattatgtcagagaaaaattaagaaattgctctatttacgacattgaacta

SEQ ID NO: 13391 - DNA, 260 bp, Unknown
  Description of Unknown: LeftRegion for integrase B392 sequence
cagtacgacaaactgaacgcaaacgagggatgctccattctggtggctgtcgttctcggcgttatcctcgcagtgatttggtttttcggtcattaaatgcaaattttgatgatttttgtatctgatttggctttttaagcacaaaatcaaagccttaattgcaaatttgaggctattttcgttaaatagggggtgatagtttgagttcagttgaaacaaccgccgttgtttacgcacggtattcatcccacggccagacc

SEQ ID NO: 13392 - DNA, 260 bp, Unknown
  Description of Unknown: LeftRegion for integrase B393 sequence
gccgccgctgccgagcggtatgccggcctgaacgatccaacgccggcccacaggctggcactgctgcggcagaagctggagctggaaccggagaacgaagaaaccctgtgggaactttttgagtcggcagtaacccatgtgtgcatcggcaaaggcggagagatcagcctatcccaaaaagatcaaaaggagtgtgcctcatgaacatacagaaaaccgcccccacccccaaactggtcactatgattccggctgaccct

SEQ ID NO: 13393 - DNA, 260 bp, Unknown
  Description of Unknown: LeftRegion for integrase B394 sequence
aatatgacatcatcaacacccgatatgtcgtcgagggcagatttgccgaggcgacgctgacagacaaggacaagaccctttccgacgcgatggaggacattatcagcgacgaatttacagatttgaccgcaaagaaggaagagcctaaaatgaaaccgaaacccgtgcgttcgactgccggaaaggagagataatttattatgcagtcggataaaaagcaaaaacaattaaccggaattaccgctctgtattgccgtctc

SEQ ID NO: 13394 - DNA, 260 bp, Unknown
  Description of Unknown: LeftRegion for integrase B395 sequence
aatcaataatatagaaaaatatgaattatcattttttaagatagcaatgcaattaagagcaattaattatttggaagaaaagaatgcattaaatgaaaaaatttgcaaatgtgcaaaagcaaaaattaaagaaaatttacagctttgtactattacaccaaaacctttagaattttacaaagaaaggttaggtggtaaatgtggagataattaaaataccgaaaaaagaaggaataattgatagaacaacaggaaaagtg

SEQ ID NO: 13395 - DNA, 260 bp, Unknown
  Description of Unknown: LeftRegion for integrase B396 sequence
ttgtcagcgtttcggtagatttttccgtttttcagcaaaataaaaacgcccacggtgttaccagcaacgcaggcgtttcagatcagcttactcagagagatggtacagggataaaacctgtccagagcaatagcagacctcgcagatgttattgtaccacctccgggcaggcttgtcaaagtgtacccggaggtatttttatgggcaaaaaacaaaaggcaaccggcggcaatgcggtcatctacgcccgctattcttcc

SEQ ID NO: 13396 - DNA, 260 bp, Unknown
  Description of Unknown: LeftRegion for integrase B397 sequence
ggctactggctgtaaaatgctggtagccctcattttttagttgtatctagtatataaggggtgtataatagataggaactgaaaacagcctcataaagccctatattttatcgagggtaaagaagtctacacctaatatataaaagtggttgtatgaggcacacaggagctcacaggactattacaggagggtaaacaggatggcatataggaaaataacggatataagagatactattggtatgagagcggtattttat

SEQ ID NO: 13397 - DNA, 260 bp, Unknown
  Description of Unknown: LeftRegion for integrase B398 sequence
ggccgatgttaacctcgcttgatctgatcattgccggattccatgagccggtgttcccgccgcaggatcgtgatacccatacgcaggcgatgattgccgcgatggccagcggtaaggtgcatatgattagccatccgggtaatcctaaacgaatttctacacattaaaataagttattgtttttcaaggaaaatgtgtagatgaagcagaaattgtactcctatcagcgttggtctagtgcggttcagtcagacggtact

SEQ ID NO: 13398 - DNA, 260 bp, Unknown
  Description of Unknown: LeftRegion for integrase B399 sequence
caattccgccctctgccgtgccggtgagggcggttcttttactctggttctggtgccggtactgtttatggttatggtgctggttatggtactggttatggttacgagggattttccaccgacctttcgcgtgactgtcacgcattttctgagcggactgtccgctggatggtcgcaaaattattgccggagggtttgatatgccgaagaagagagggagcaacgaggagtttttgaatccgggggcgaggcggttccgg

SEQ ID NO: 13399 - DNA, 260 bp, Unknown
  Description of Unknown: LeftRegion for integrase B400 sequence
agactatacattttgcttatttgtgaggaaacatatagagaaatatattaaatttaacttcgtaaaactcactttaattgagaaaattaataagaaatattaaaaaatttcaatttagtgtctgatattttgtgtttgagtgaggaaacatatgagaagtattttaatatttctcgaaatttaatgaaaggaggaaaaatatgagatgtggtatttatgtaagagtatctactgacgaccaaagagataatggttattct

SEQ ID NO: 13400 - DNA, 260 bp, Unknown
  Description of Unknown: LeftRegion for integrase B401 sequence
ttttagaatccgcgaactcagagcgtgaggaactagtcttagaactccaacggcttctttcgtgctatcaaatggctacagcggatgataagaaggtggtttgggcagtcctcaacaaatacgccccctatatagaaagtatataaatccccttttttacatccaaatttaaggctttttttggcagggaggtctttgctttgcccaagatagcaataaaaaaggttgcgatttatattcgagtttctaccgttcatcag

SEQ ID NO: 13401 - DNA, 260 bp, Unknown
  Description of Unknown: LeftRegion for integrase B402 sequence
tatactatacattttgcttatttgtgaggaaacaaatgagaagtatattaaatttaacttcgtgaaactcactctaattgagaaaattaataagaaatattaaaaattttaaatttggtgtctgatattttgcgtttgagtgaggaaacatatgagaagtattttaatatttctcgaaatttagtgaaaggaggaaaactatgagatgtggtatttatgtaagagtatctactgacgagcaaagagataatggttattct

SEQ ID NO: 13402 - DNA, 260 bp, Unknown
  Description of Unknown: LeftRegion for integrase B403 sequence
gatacacctcccgaaacagatactcttatggttgtcattgttgatgacgaagaaggatttgttaagaaaatcagtattgatgaagatactgtgacccttcgttcttttaacccacactatcctccccgtgtttttggcggtgttgaaattggacgattgcgctttgttggtagagtcatggagctaaaaaggagatttgcatgaaaaaatttccaatcgacctctcctgtctgacagaggaagaaatctctcaatttcag

SEQ ID NO: 13403 - DNA, 260 bp, Unknown
  Description of Unknown: LeftRegion for integrase B404 sequence
ccttgcggtctgcgtcgtgtcgctcccggtcggcttgatcattgtggccattggagcgtaccgggtggcaaaggccggggatatttatgacgctgcggtcgctcggtacgagcagcaaatctcggactatgttgactggctggatgaagtcaacgcaaaataaaaagccgccctcggtgggtggcgggaggttgctctgaatgtgtgcaaaaaagaaaccggccatgcttgagccggatatgcaggatgccgtgatctac

SEQ ID NO: 13404 - DNA, 260 bp, Unknown
  Description of Unknown: LeftRegion for integrase B405 sequence
gatacaccccctgaaacagatactcttatggttgttattgttgatgacgaagaaggatttgttaagaaaatcagcattgatgaagatactgtgacccttcgctcttttaatccacactatcctccccgtgtttttggcggtgttgaaattggacgattgcgctttgtcggtagagtcatggagttaaaaaggagatttgcatgaaaaaatttccaatcgacctctcctgtttaacagaggaagaaatctctcaatttcag

SEQ ID NO: 13405 - DNA, 260 bp, Unknown
  Description of Unknown: LeftRegion for integrase B406 sequence
agaacatgaagaagaacttaaaggacaaatgaatatatatgattttgtgaaatagaggtgggaatatgatgaacaaagcaattatgctgataatcaataaaaaaatgtacgaatccggtctgattacgcaggaagtgtacaataaaattatcatgcagataaataaatgttaaaaatgtgttgagcgagattgtttgaagatgtataatacaaatgatttcgctccttttgaaagggagaatattatgaatatctatcat

SEQ ID NO: 13406 - DNA, 260 bp, Unknown
  Description of Unknown: LeftRegion for integrase B407 sequence
attttagaatccgcgaactcagagcgtgaggaactagtcttagagctccaacggcttctttcgtgctatcaaatggctacagcggatgataagaaggtggtttgggcagtcctcaacaaatacgccccctatatagaaagtatataaatccccttttttacatccaaatttaaggcttttttggcagggaggtctttgctttgcccaagatagcaataaaaaaggttgcgatttatattcgagtttctaccgttcatcag

SEQ ID NO: 13407 - DNA, 260 bp, Unknown
  Description of Unknown: LeftRegion for integrase B408 sequence
attttagaatccgcgaactcagagcgtgaggaactagtcttagagctccaacggcttctttcgtgctatcaaatggctacagcagatgataagaaggtggtttgggcagtcctcaacaaatacgccccctatatagaaagtatataaatccccttttttacatccaaatttaaggcttttttggcagggaggtctttgctttgcccaagatagcaataaaaaaggttgcgatttatattcgagtttctaccgttcatcag

SEQ ID NO: 13408 - DNA, 260 bp, Unknown
  Description of Unknown: LeftRegion for integrase B409 sequence
agaacatgaagaagaacttaaaggacaaatgaatatatatgattttgtgaaatagaggtgggaatatgatgaacaaagcaattatgctgataatcaataaaaaaatgtacgaatccggtctgattacgcaggaagtgtacaataaaattatcatgcagataaataaatgttaaaaatgtgttgagcgagattgtttgaagatgtataatacaaatgatctcgctccttttgaaagggagaatattatgaatatctatcat

SEQ ID NO: 13409 - DNA, 260 bp, Unknown; identical to SEQ ID NO: 13408
  Description of Unknown: LeftRegion for integrase B410 sequence

SEQ ID NO: 13410 - DNA, 260 bp, Unknown; identical to SEQ ID NO: 13406
  Description of Unknown: LeftRegion for integrase B411 sequence

SEQ ID NO: 13411 - DNA, 260 bp, Unknown
  Description of Unknown: LeftRegion for integrase B412 sequence
attttagaatccgcgaactcagagcgtgaggaactagtcttagagctccaacggcttctttcgtgctatcaaatggctacagcggatgataagaaggtgatttgggcagtcctcaacaaatacgccccctatatagaaagtatataaatccccttttttacatccaaatttaaggcttttttggcagggaggtctttgctttgcccaagatagcaataaaaaaggttgcgatttatattcgagtttctaccgttcatcag

SEQ ID NO: 13412 - DNA, 260 bp, Unknown
  Description of Unknown: LeftRegion for integrase B413 sequence
attatctattctgtttatctgattcaccttgcccgaaagtagagatttccctaacggaagaagagcaattactgcttgacgcatttcgttccgctaccccacaaggcagattcaacattattaccacctgtatgtgtgagaagcgaaaaggggacaacgaaagtgtcgggtaattgatttcatagaatggaggaagaaccatgtatgaggatataaaaacagcctgcctatacgttagattctcaagccataaccagact

SEQ ID NO: 13413 - DNA, 260 bp, Unknown
  Description of Unknown: LeftRegion for integrase B414 sequence
caaacgcaacaggaacagttcattatccggcgcatcggcggcaccacctataaggtaagggtcgcattcagcgagacggcagcggagaccatggaggaaaagattctgcggatgatccgcaatgaaggggttacaaatgacggtacttgtggtataatggaggtgccacaaatgagccgtcagtctgaaaggagcgcatcatgagcgtgaaacagactgaggaaaaaatcacggcgttgtatgaacgcctgtcccgtgac

SEQ ID NO: 13414 - DNA, 260 bp, Unknown
  Description of Unknown: LeftRegion for integrase B415 sequence
tattctgtttatctgattcaccttacccgaaagtagagatttccctaactgaaaaagagaaaatccttattgacgcataccgtgctgccgatgacatgggacagttgaacataatctatgtctgcctggatgaaatgaaaaaagcaaaaggagacaacgaaagtgccgtgtgattgattttgtagagtggaggaagaaccatgtatgaggatataaaaacagcctgcctatacgttagattctcaagccataaccagact

SEQ ID NO: 13415 - DNA, 260 bp, Unknown; identical to SEQ ID NO: 13309
  Description of Unknown: LeftRegion for integrase B416 sequence

SEQ ID NO: 13416 - DNA, 260 bp, Unknown
  Description of Unknown: LeftRegion for integrase B417 sequence
ttcttttaggtctaagtgaacttagaaaaccgcagacttgtacactttctgaggaagaacgtcttttattggaagcctaccgttcagccagcacccagggacgtttccatatcattcaggtttgcatgaacgaaaaaacaaccgcacccaaaggggaggtaattgccgggtgattgacttagcagaatggaggaaaaaccatgtttgaggatgtaaaaacagcctgcctttacgtcagattttccagccataatcagacg

SEQ ID NO: 13417 - DNA, 260 bp, Unknown
  Description of Unknown: LeftRegion for integrase B418 sequence
ccgagtacgtgttcttgaacccggtcggtaaggatggacatccgagttgggagcgactgtgcatcttgatggaggcggcgataaagcgcgagtatgcgattgagtttgcgaccaatgcgggatatttcgacgatgcgccgtttaaggtgaggtgacatgggcgtttccgcatgtagagaattacgggagggggtgaacctatggcacgaaaaaatcccaaaacgctagatgccgcccgcctactctcctgcgtcctgtac

SEQ ID NO: 13418 - DNA, 260 bp, Unknown
  Description of Unknown: LeftRegion for integrase B419 sequence
ctcctgatgttttcagcattgatgcaactgcactaaagctgatctccattttatttgacaacaacctgatctctgctgaggtctatcatcaggtccttagcagatattctgcgtaatgtcaaggatgtcgctgacaccggcgacatcctacctattcccttcgcaatcttctatactacgggcaaaggaggtacagcgatatgaacatcacacaaagaatgtactttgggcaattcccattggacaaagaccgtgaccgc

SEQ ID NO: 13419 - DNA, 260 bp, Unknown
  Description of Unknown: LeftRegion for integrase B420 sequence
aacagtgcggcagacttatgcggtatagcatgcagttgattatgttgcaaaaattattgcgttacaagttgttgagcgaaagagagtatatcgctgttaaagaaaggctggtgaaagattacgggattgtttccgactttacagcttagaaaacttgaccgtataaaaatataatggctgcacagcaaaggagtaagaacatggaaatttctggtactaacaaactaatattgcccaaagatattattttggcagacaga

SEQ ID NO: 13420 - DNA, 260 bp, Unknown
  Description of Unknown: LeftRegion for integrase B421 sequence
acaggtcttttgattgtgtgtagtgacccggcgcaaaagaaaattgacagagccgatgccttgaatattccaatcatttcagagcagcaatggtatgaactcatgccagaacttgaagccgttggaacgtggaacggaaagcaaattctgtttgcggacaatgatggcatctaccgtgttgaagtggacggtgaaagctgatggccagaaaaaagaatattgctgctggcctcgatgccgtcatctatgcccggtactca

SEQ ID NO: 13421 - DNA, 260 bp, Unknown
  Description of Unknown: LeftRegion for integrase B422 sequence
attggtgttttggttgcgtgcagcaatccaatgcagaagaaaatcgatcaggccaaagctctaaatattccggtcatttcagaacagcagtggtttgagcttatgccagagctggaagcactcggaatgtggaacggaaagccaattccgtttgcagatgataatggaatttaccatattgatgtgggcggtgatggttgatggcccgaaaaaagaatattgctgctggcctcgatgccgtcatctatgcccggtactcg

SEQ ID NO: 13422 - DNA, 260 bp, Unknown
  Description of Unknown: LeftRegion for integrase B423 sequence
aaacgattatgttaccgggtacgagtcgcggcaggcttccgcatccgctgcacaagcagtcccatctaacacagttgtttcagttgtggatgaaattcgcggcttgaagcagctgttggacgagggtattttgacggaagcagaatttacagcaaagaaaaagcagcttcttggaatttgaaagtgaacggtgatggttgatggccagaaaaaagaatatcgctgctggcctcgatgccgtcatctatgcccggtactcg

SEQ ID NO: 13423 - DNA, 260 bp, Unknown
  Description of Unknown: LeftRegion for integrase B424 sequence
atttctggcgtggactaatcatcttttctctaagggaatgataacagcggataaacaccgccagatgatatcagagattcagcaactcaagaagtaaataaaaaataccacgaagatgtcagtagatttacttgacatcttcgctttggtatggtatcattatcttgttagcaatgcgtcgcaatttcaaggaggcagaaatggatatatataatgtagcgaaccaaatgaagttagagcgtaagactatctttgattta

SEQ ID NO: 13424 - DNA, 260 bp, Unknown
  Description of Unknown: LeftRegion for integrase B425 sequence
tcggaaaatgtcattgaattaaacttcataaaaaaataaaacgccccacggcggcaaccgcgaagcgttttatatagatgttacccgtcaacccgtaggggctgcgctatggtaaaaactaccaagaattattatagcataggcccccacaatttgaaagggcttatttttttacgcccttttttcaaggtggtgtttttatggcttatgccgctatgagaaaagccggactggtaccggaagcggcgcccgatcttcgg

SEQ ID NO: 13425 - DNA, 260 bp, Unknown; identical to SEQ ID NO: 13032
  Description of Unknown: LeftRegion for integrase B426 sequence

SEQ ID NO: 13426 - DNA, 260 bp, Unknown
  Description of Unknown: LeftRegion for integrase B427 sequence
tgatgaatctattaacttatcaatcctatttgatttactaaatttaaacttaataactgaaaaacagttttatatactaaaagaaaaaattaaatgtttttactaaaatatcatgtaaataaattttaaaataagatataatgtttgtagaacgaagcagtagttcaaaatgaaattgaaataaagaaagtgaggtataaatggcacaagttgagattatagctgctaatctcaaagaaaaaaataataatattactatt

SEQ ID NO: 13427 - DNA, 260 bp, Unknown
  Description of Unknown: LeftRegion for integrase B428 sequence
ttctcccttgcaaatcagtagtgatgtcattgccgtgaaactggttgctgttctctaccgtgagggtcttatcaatcacacggtttaccgtcaggtcacagcacaatattccgcacttgtcaagcctgtcaagcaataaaacgacagcctaccatcgtttttcaacttcctatatactgcgaggaaaggaggtaacgcaaatgcagacaacacaacaacagctatatttcgggtctatgaatttagaccgcaaccgtgac

SEQ ID NO: 13428 - DNA, 260 bp, Unknown; identical to SEQ ID NO: 13402
  Description of Unknown: LeftRegion for integrase B429 sequence

SEQ ID NO: 13429 - DNA, 260 bp, Unknown
  Description of Unknown: LeftRegion for integrase B430 sequence
attacaaactcattgagggctattggaacgagctgttcgagcaggccaacagaacgggcttcaaggtcgtggtgcgcgatttcgaaaaagagaacagcatgaaagaggcattgaaagcagaaaggcaacgttggctagacaacgttgagtaggtgacgcgaaatgttgtcacgtagagaattacgggagggggtgaacctatggcacgaaaaaatcccaagacgttagatgccgcccatccactctcctgcgtcctgtac

SEQ ID NO: 13430 - DNA, 260 bp, Unknown
  Description of Unknown: LeftRegion for integrase B431 sequence
tattctgtttatctgattcaccttacccgaaagtagagatttccctaacggaaaaagagaaaatccttattgacgcataccgtactgctgatgacatgggacagttgaacataatctatgtctgcctggatgaaatgaaaaaagcaaaaggaaacaacgaaagtgccgtgtgattgattttgtagagtggaggaagaaccatgtatgaggatataaaaacagcctgcctatacgttagattctcaagccataaccagact

SEQ ID NO: 13431 - DNA, 260 bp, Unknown
  Description of Unknown: LeftRegion for integrase B432 sequence
aagaggtaaaagggctgtaagaggcaaatagagggcttattcatgtgagagcatgggtaggctcttttttagtgcatgaaaataattatatagcccctgtataattttcccctaaaaaatgaggagggctgtgattatgtttattaaggctaagtagagccataggataataaacaggatcataaaggaggatatacaggatgatagataattgtgtaagagcggtattctatgccagagtatccacacaggaggagcaa

SEQ ID NO: 13432 - DNA, 260 bp, Unknown
  Description of Unknown: LeftRegion for integrase B433 sequence
tacgaggaaatggacgaccctgcaaagatgctgcgtgagtatttcaaccgcgtgtacgacggggtgtgcgatgaggagacggaaggttacttgtacaacctggagcaagcagccgaagccgctgggttcgaggtcgtggagaaggactttggagaagcgtaggaggcattgaaggcaatgaatacatataagcagaaattatgggagggggtaagagcttggcacgcaagaagaagttcgagctgaacgacaacaacatc

SEQ ID NO: 13433 - DNA, 260 bp, Unknown
  Description of Unknown: LeftRegion for integrase B434 sequence
cgtgaaaaactttatcaggccaccatgaatgtctttgatggcatgctgaaaaagggcctgatcaccgaggagcaatacgccataattgatacaaaaatgctggaaaaatacaggccattattgggtacattatttcgccaaattgacttgatataattcgcttttagagtgatatatagtagcggaaaggagctgattttatgcgaaaaatcaacaaaatcgagccgttgatgccgaccttgccaagccgcaaaaaggtc

SEQ ID NO: 13434 - DNA, 260 bp, Unknown
  Description of Unknown: LeftRegion for integrase B435 sequence
catttacaaagatgacgaggctgccgtcgatggcagcctagctgagtgcgcaataaagcacggtcttttactgtcacgatatacggggacaaaaatgattttggagttggttgactatctatctccgcaagagcagaagcgattccgcgcagatttgaaaaccatccgaaaagccaagaaagaacaagggggtgcgaatattggcacgaaccgcgaccaaacacccggcaaagccgaagcgcggtaagaaactcgaagcg

SEQ ID NO: 13435 - DNA, 260 bp, Unknown
  Description of Unknown: LeftRegion for integrase B436 sequence
gttatgatattttccgtgacaaagagggcgtattcgttattccatacggagcgcagcaggtaaaacagcccgatgggcaatatgtttatgattttccgaacgatgaagtaaccgatatgctgaataagcatcattgcaatagatgtgctggcggttatgttacaaaggcgcgcgagtaagcccgaaaggagcgtgacggcatgaaaaagcgaatcaacactaattccgcagcccgtgccgtcatctacgctcggtactcc

SEQ ID NO: 13436 - DNA, 260 bp, Unknown
  Description of Unknown: LeftRegion for integrase B437 sequence
aagaggtaaaagggctgtatgaggcaaatagagggcttattcatgtgagagcgtgggtaggctcttttttagtgcgtaaaaataattatatagcccctgtataatttttccctaaaaaatgaggagggctgtgattatgtttattaaggctaagtagagacacaggataataaacaggatcataaaggaggatatacaggatgatagataattgtgcaagagctgtattttatgccagagtatccacacaggaggaggaa

SEQ ID NO: 13437 - DNA, 260 bp, Unknown
  Description of Unknown: LeftRegion for integrase B438 sequence
agtgtaagggtaaagaggtaaaagggctgtatgaggcaaatagagggcttattcatgtgagagcatgggtaggctcttttttagtgcatgaaaataattatatagcccctgtataattttcccctaaaaaatgaggagggctgtgattatgtttattaaggctaagtagagccacaggatcataaaggaggatatacaggatgatagataattgtgtaagagcggtattctatgccagagtatccacacaggaggaggaa

SEQ ID NO: 13438 - DNA, 260 bp, Unknown
  Description of Unknown: LeftRegion for integrase B439 sequence
aaacgaaaagctctatcagaccaccatgcaccttgccaggaagatgctcgaagagggcattatttctgaggaggagtatcgtcagattgatacaattttccttgagaaatataagcctgttttcggcacattattctcggatatatcgttgacttccggggcgtaaagagtgatgtatagtgtcggaaaggagtgatttcatggcaaaaatcacaagggtcgaacaggcagtgccgaccataaaaacgaagaagaaagtc

SEQ ID NO: 13439 - DNA, 260 bp, Unknown
  Description of Unknown: LeftRegion for integrase B440 sequence
attatctattctgtttatctgattcaccttgcccgaaagtagagatttccctaacagaagaagagcaattactgcttgacgcatttcgttccgctaccccacaaggtagattcaacatcattaccacctgtatgtgtgagaagcgaaaaggggacaacgaaagtgtcgggtaattgatttcatagaatggaggaagaaccatgtatgaggatataaaaacagcctgcctatacgttagattctcaagccataaccagact

SEQ ID NO: 13440 - DNA, 260 bp, Unknown
  Description of Unknown: LeftRegion for integrase B441 sequence
accggtcttttaatcgtgtgcagtgacccgatgcaaaagaaaatcgacagagctgccgccctaaacattccaatcatttcagaacagcaatggtttgaacttatgccggaactagaagccctcggaatgtggaatggaaagcctattccgtttgcggatgacaatggcatctaccgttttgatgtgggtggtgttggataatggcaaaaaagaagaagcccgccgggggcaacgccatcatctatgcccgctactcgtcc

SEQ ID NO: 13441 - DNA, 260 bp, Unknown
  Description of Unknown: LeftRegion for integrase B442 sequence
tctggtgatagcgattttgttccagccgcgaaattggctcggagagaaggaatcgattttattctcgatccaatgtgggcagatatcaaggctgatttgtttgaacacatcgacggccttaatagtcaatggaaaaagaaagaaagccaataagggatatttcggtataaggtgccgggttttttaggagggctgaaagagtggaagaacttgatacgcgcccggtagccgatattctggcccggtactcaacagacaat

SEQ ID NO: 13442 - DNA, 260 bp, Unknown
  Description of Unknown: LeftRegion for integrase B443 sequence
gacacacctcctgaaacagatactcttatggttgtcattgttgatgacgaagaaggatttgttaagaaaatcagcattgatgaagatactgtgacccttcgctcttttaatccacactatcctccccgtgtttttggcggtgttgaaattggacgattgcgctttgtcggtagagtcatggagttaaaaaggagatttgcatgaaaaaatttccaatcgacctctcctgtctgacagaggaagaaatctctcaatttcaa

SEQ ID NO: 13443 - DNA, 260 bp, Unknown
  Description of Unknown: LeftRegion for integrase B444 sequence
aactcactatttatgagtacaaagttaatgaaatatctaataagcaattttatataaaagaacataatgaaaaatacacattgcaagaaatatgtaaaattttaaaaaaattataattttagactttactttttgcttataaagtgccaaacaagtgagaggataacttctctcaaatataaaagaatggagatgattttgtgagatgtggagtttatgttagagtttcgactgatgatcaaaaagataatggatattct

SEQ ID NO: 13444 - DNA, 260 bp, Unknown
  Description of Unknown: LeftRegion for integrase B445 sequence
tacttactatttatgaatacaaagttaatgaaatatctaataaacaattttatgtaaaagaacataatgaaaaatatacattgcatgaaatatgtaaagttttaaagaaattataattttacacttaactttttacttaaaaagtgccaaacaagtgagaggataacttctctcaaatataaaagaaaggagatgattttgtgagatgtggagtttatgttagagtttcaactgatgatcaaaaagataatggatattct

SEQ ID NO: 13445 - DNA, 260 bp, Unknown
  Description of Unknown: LeftRegion for integrase B446 sequence
tgcgaacatttcggcataccgatgcgctccctgcagcactgggagattggcgacaggaagcccgcaccgttcgtcatcggcctcatgcgcaaatgctacgagcttgagcgcgagaacgagcgcctgcgcgactgcatcgacacgctcgaccgtcagaacgacgagctgaaggcactcctcaaaggcgagggggtggttcaatgacgagaaaggcaaagacctgtttcatctatgtccgcgtctcaacgaagatgcaggtg

SEQ ID NO: 13446 - DNA, 260 bp, Unknown; identical to SEQ ID NO: 13005
  Description of Unknown: LeftRegion for integrase B447 sequence

SEQ ID NO: 13447 - DNA, 260 bp, Unknown; identical to SEQ ID NO: 13002
  Description of Unknown: LeftRegion for integrase B448 sequence

SEQ ID NO: 13448 - DNA, 260 bp, Unknown
  Description of Unknown: LeftRegion for integrase B449 sequence
cgatatgctctaccatgcagcgatttcaatggcgaaatccatgctcgaaaagggcttgatcaccgatgaggaatacgctgaaattgatacaattctgctcgaaaaataccgaccatatttgggtacattattatccgaaaacgcttgatattcctgtcttttagagtgatatatagacactaccggaaggagggatatcattgaaaacagtagagaaaatcgagcgaaaactgccggttctgaaaacaagaaagcgagtc

SEQ ID NO: 13449 - DNA, 260 bp, Unknown
  Description of Unknown: LeftRegion for integrase B450 sequence
aaataacaggaggtttttatgaacagaaagattactattcaaccacaagcacctctggttccaaaacaggatgcttttgtcctggaacttcaacgtctccttgcctgttaccaattggcagatcagagagacagggaaattgtgtggtctgtactcaacaaatatgtaccacatatcgtttaaaattaaaggacagccccatgcaggggctttctttatgcatttgggagaacattatggcaagaagaaaaaccgcttta

SEQ ID NO: 13450 - DNA, 260 bp, Unknown
  Description of Unknown: LeftRegion for integrase B451 sequence
aagaggtaaaagggcggtatgaggcagatagagggcttattcatgtgagagtgtgggtaggctcttttttattgcgtgaaaataattatatagcccctgtataatttttccctaaaaaatgaggagagctgtgattatgtttattaaggctaagtagagccacaggataataagcaggatcataaaggaggatatacaggatgatagataattgtgcaagagccgtattttatgccagagtatccacacaggaggagcaa

SEQ ID NO: 13451 - DNA, 260 bp, Unknown; identical to SEQ ID NO: 13007
  Description of Unknown: LeftRegion for integrase B452 sequence

SEQ ID NO: 13452 - DNA, 260 bp, Unknown
  Description of Unknown: LeftRegion for integrase B453 sequence
tttgatggagcaaaataatgaacagaaatttgcacattatagtattcaatttgcatgtttgcagaagttaaagaaaaacggtttaattacggtagatgagtacgaagccataaaaaaacggcttatgagtgatttcaatgtcgtttcaaatcttgcggcttaatacttatcagtaaataaaatatcggaggtataatcgtatgaatgatgttcaagtaatcaaagcaaaccgtaacgaaaatcgtattcgtggtagaaag

SEQ ID NO: 13453 - DNA, 260 bp, Unknown
  Description of Unknown: LeftRegion for integrase B454 sequence
atacggattacacagtagcgcaaaagacaggcccgtctctgccagaggatgttaccactatgctttctgggcttgacagcgcggacctcgaaaaagttatgatctacgcccgcggtctgctggacggggacaagtatcagaaacgccgtccgcggtaaagcaggaagtgcttctggcaatgaaatagaaaggggcagacaatgagagtatccgtaaacttaaacgcacaaaagccggataccacgacaaacgccgtcatt

SEQ ID NO: 13454 - DNA, 260 bp, Unknown; identical to SEQ ID NO: 13132
  Description of Unknown: LeftRegion for integrase B455 sequence

SEQ ID NO: 13455 - DNA, 260 bp, Unknown
  Description of Unknown: LeftRegion for integrase B456 sequence
cgatatgctttatcacgcagctatttcaatggcgaaatccatgctcgaaaagggcttgatcaccgaggaggaatacgctgaaattgatacaatcctgctcgaaaaataccgaccatatttgggtacattattatcggaaaacgcttgatattccggccttttagagtgatatatagacactactggaaggaggaatttcattgaaaacagtagagaaaatcgagcgaaaactgccggttctgaaagcaagaaagcgagtc

SEQ ID NO: 13456 - DNA, 260 bp, Unknown; identical to SEQ ID NO: 13353
  Description of Unknown: LeftRegion for integrase B457 sequence

SEQ ID NO: 13457 - DNA, 260 bp, Unknown
  Description of Unknown: LeftRegion for integrase B458 sequence
taatatactgaggttataataaatgcacaaaacaaagccgtttaccggcactatacaagacatagttcctgtttatacagcgaacagcatttaaaaagacctcacatttatgtggggtcttttacgttatatatgttttgttgaagtcaacaagacataataatcgccctgcagctaccaactacagagcgataatatagatgttacctatcaacccgagggctgatatagtaaaaccccagacaagtcttattatatca

SEQ ID NO: 13458 - DNA, 260 bp, Unknown
  Description of Unknown: LeftRegion for integrase B459 sequence
ccgcatgacgagcctgccgagccttccgatgctgaaaaactccgcgccgagaacgcggcccttcgtgcgcagcttgcccagcagcagaagtccctgcgtatgcaccggcttgtgacgctcattctcttgggcattctttcgctgtgtgcccttgtgcttgtggccgacgtgctcatcccatcaatcggctggattcgcacatgaaaattaccgccccggcccgatcagccagagcggtatctttggaggcttttgtggat

SEQ ID NO: 13459 - DNA, 260 bp, Unknown
  Description of Unknown: LeftRegion for integrase B460 sequence
ggtcgtttcagaatgaaacaaccttccaggtgacaatgcatctggcaaggaaaatgatggcggcaaagctcatcacagagaaggagtaccgggatttcgaacaggcgatgattcgccaatatcagccattttcaggggacttatacacttgataattgtatcaaacagagtgatatatagtgttgaaaggagctgatttgatgcggactatccgtaaaatcgaacgaagcataccaaatttaaagaaacgaaagaaagtt

SEQ ID NO: 13460 - DNA, 260 bp, Unknown; identical to SEQ ID NO: 13445
  Description of Unknown: LeftRegion for integrase B461 sequence

SEQ ID NO: 13461 - DNA, 260 bp, Unknown
  Description of Unknown: LeftRegion for integrase B462 sequence
gccaatcgaattcctgttcctgttcgtcgcaccggtgctgtacctcatccacgcggtgctgaccggtctgggctttaccgtgatggcggtgctgggcgtgaccatcggcaacactaaagtaaaatacacctcattaagaattgaggcgtaaaaacagctatacctgtcgccccaatggattaccaaggaggtgatgaccaatgtctgcacatgttacaatcttaagaaatacagtacttccagtgaaattcaataccatg

SEQ ID NO: 13462 - DNA, 260 bp, Unknown
  Description of Unknown: LeftRegion for integrase B463 sequence
gctctttcaggccagcatggcctgcgtgggacggatgcgcagatcgggcttgctcacggatgccgaatatgaaaaatgtcgcgaaatgatgcttgagaagtacaatccgccgctcggtaaaattgtctcaaactgagcaggattctattgactttaggggcgttcagagtgattaatcgtgtctgaaaggagggagtccaatgaccaaaacaatcagaaggatagaagcacaaatccccatcacgacaaagaaaaagcgc

SEQ ID NO: 13463 - DNA, 260 bp, Unknown
  Description of Unknown: LeftRegion for integrase B464 sequence
taaatctggagaaatagtatattgcgatactggatatacagcggataaacaaaatcaaataaaagcagggaaaaccgaaaaagctgaagcaaactgttaccaggaatacgacgatgtaaaagtctatctatcaggaaaagcataaacaaaaacaccgccctcccttactgcaacaggaaagagcggcgcaggaggaacctatgtttttaacgttggaacaatacatagaaagtattcaggccattaacacctctggggaa

SEQ ID NO: 13464 - DNA, 260 bp, Unknown
  Description of Unknown: LeftRegion for integrase B465 sequence
tacaggaatttatgggaggtgcctcgttggaacagacgcgttttcaccataaaatggcagtttgcttaattcacgttttatatgaaaaaggcgagatcccgcgtagcgtctataaggaagccctgcgaatcgcagaggcagatcggcatccttaacaaatctccaagagaagattattctttgcattggaggtgactgatatgaaatcagtattcaagacgctagaccgcagccggccgcgaaaaatggttttctatggg

SEQ ID NO: 13465 - DNA, 260 bp, Unknown
  Description of Unknown: LeftRegion for integrase B466 sequence
attggactggccctctacggtacgattgtggcgagcattctggatgcggagttacacgccgccattcttcccggcatctttatgttgctggcgtttaacgcgcctgacctgatccggctgaaactgggcaagttccgggataacgtgggcgattatctgcggcaataaaaaagcccgcacactggcgggcgggtgatggtatgaaaaaagagaacgaaatccgggcagttgtctacgcccggtactcatcccattcgcaa

SEQ ID NO: 13466 - DNA, 260 bp, Unknown
  Description of Unknown: LeftRegion for integrase B467 sequence
atacaaagatcatttaatagacgaagaaacatacaacaacatgatacatttgatatgattttaaaaaagacgttgggaaaatactcaacgtctcttttttgacaaaatacaacaataaacctatcttttttagttgacagcaaaaattggtatggtatcattgtggtgtaaatttgtattaaaaaaggagagattaaaaaatgaatatctatactttaattgaaaaaatgacattagaacataaaacaatttttgatatg

SEQ ID NO: 13467 - DNA, 260 bp, Unknown
  Description of Unknown: LeftRegion for integrase B468 sequence
agtatatgacaaaaaggcagctccaaatcggagttgcctttctttccatgttcggtgtgccacccagagcctctggtttgctttattttgcgttttgggtggcagatgtaaaaggataaggggaaagctggaaagccttcccggtatctttttgtcaaaaatcaatggtctattttgttcatgttgtataggagatcactatggcaaagaaacgactggcagcggctctggacgagaagaaagccgcgatctacaagcgc

SEQ ID NO: 13468 - DNA, 260 bp, Unknown
  Description of Unknown: LeftRegion for integrase B469 sequence
attatctattctgtttatctgattcaccttgcccgaaagtagagatttccctaacagaagaagagcaattactgcttgacgcatttcgttccgctaccccgcaaggcagattcaacattattaccacctgtatgtgtgagaagcgaaaaggggacaacgaaagtgtcgggtaattgatttcatagaatggaggaagaaccatgtatgaggatataaaaacagcctgcctatacgttagattctcaagccataaccagact

SEQ ID NO: 13469 - DNA, 260 bp, Unknown
  Description of Unknown: LeftRegion for integrase B470 sequence
gcgttcacgattgcttcttgcacatacgctccgggcggagatatttcaaatgcatcagatgttgcggctggtgactactcatcgtttgattacgatgttcacgtcaattctgcttcagatagagatctatataggaaagccggataacacaaaagagcctgtcggcaatcggcaggctcttttaatttaggaggattactgtgacgtcgcaaaaatcatccattgagcgcaagctttcagagcaaagagctgcgctttat

SEQ ID NO: 13470 - DNA, 260 bp, Unknown
  Description of Unknown: LeftRegion for integrase B471 sequence
ggttgcaaagatcgcgctgccgcaaacccaatgcttctggagcagtggagcttcttcgccgttccgacacacgtcattgacgaaaagttcggtacacagagaacggtttctctctccacgctcgagcagctcccggcagtcaaatacacatacgatgaactccgtgacgccatcgacaggatcgtgcaggaggccagcgaatgagccgctccaaggcatcgttggaaagcaaactgtccgagcgaaaagccgcgctttat

SEQ ID NO: 13471 - DNA, 260 bp, Unknown
  Description of Unknown: LeftRegion for integrase B472 sequence
tcgtctggagcgtgctggactcctaccttacgccagaggaaaaaacattcgtatcgcagccaaagcaagacgcgacagccggataaaacggcagcagtctgccttggtgattgacttcgtacaattcaagaaccgcaataccgagaaagccgacctcgctgccagcaaggacggctttcatactatggaggtgaacaaggatggggaagatagctgataagctgaaacagatacgggtagcaatctacgtccgggtgtct

SEQ ID NO: 13472 - DNA, 260 bp, Unknown
  Description of Unknown: LeftRegion for integrase B473 sequence
gctggtaccctctttttttttgttgttgctatttttatataggagctgtataatagatacatactgaaaaattagcctcacagagccgcttatttttcttaccctaagaaatatacctctgtgcggttaaaatcgctctgtggggctcacaagagctcacaggggcattataagcaagaacagtaaaggagaaatgcaggatggcatacaggaaagtaaaatcattggtagacacaatcggattgagggcagtattttat

SEQ ID NO: 13473 - DNA, 260 bp, Unknown; identical to SEQ ID NO: 13469
  Description of Unknown: LeftRegion for integrase B474 sequence

SEQ ID NO: 13474 - DNA, 260 bp, Unknown
  Description of Unknown: LeftRegion for integrase B475 sequence
acccagggcagctatgaatttgatataccaatcagcgagattaaagacgtgcaagaaaagaaacggcttttcagtaaaattctttcggttgctaccgcttccggagaggaatatcaatttgcatttactaaactggtggagtggcaaatcgctttttccaatgccctttctgctggaagataacggagggtactgacactatggcaaagagagaattgatgaaaaccctaatgtcggattctttccggcgagtggcaata

SEQ ID NO: 13475 - DNA, 260 bp, Unknown
  Description of Unknown: LeftRegion for integrase B476 sequence
tcgtctggagcgtgctggactcctaccttacgccagaggaaaaaacattcgtatcgcagccaaagcaagacgcgacagccggatgaagcggcagcaatctgccttggtgattgacttcgtacaattcaagaaccgcaataccgagaaagccgacctcgctgccagcaaggacggctttcatactatggaggtgaacaaggatggggaagatagctgataagctgaaacagattcgagtagcaatctacgtccgagtgtct

SEQ ID NO: 13476 - DNA, 260 bp, Unknown
  Description of Unknown: LeftRegion for integrase B477 sequence
gacacacctcctgaaacagatactcttatggttgtcattgttgatgacgaagaaggatttgttaagaaaatcagtattgatgaagatactgtgacccttcgctcttttaatccacactatcctccccgtgtttttggtggtgttgaaattggacgattgcgctttgtcggtagagtcatggagttaaaaaggagatttgcatgaaaaaatttccaatcgacctctcctgtctgacagaggaagaaatctctcaatttcag

SEQ ID NO: 13477 - DNA, 260 bp, Unknown
  Description of Unknown: LeftRegion for integrase B478 sequence
tcgtgtggagtgttctggactcctatctcacccctgaggaaaaaacattcgtatcgcagccaaagcaagacgtgagcgccggatgaatcgtcggcaatctgctttggtgattgacttcacgcaattcaaaaaccgtagccctgagaaagccgacctcgctgacagcaagggcggctttcctgatgaggaggtgaaagaggatggggaagataactgacaagctcgaccaagtgcgtgtggcaatctacgtccgtgtgtcc

SEQ ID NO: 13478 - DNA, 260 bp, Unknown
  Description of Unknown: LeftRegion for integrase B479 sequence
ctctcaccatgctacaaaagctggagccataccgcgctgactatggcggcatccgagatgccgttatccattcgctggatgtgcagcccccgacaatttgaataattctcagtgttcttttttgtgcataacagaaaagcagccccgcactacgcatggagctgctttttcttcagctattatcttctggaggtttcacaatgggctatgtgacgaagaaggtggcacaacgctttgaggagaagaaagtcgccatatac

SEQ ID NO: 13479 - DNA, 260 bp, Unknown
  Description of Unknown: LeftRegion for integrase B480 sequence
ggctgcaaagatcgcactgccgcaaatccgatgctgctggagcagtggagtttctttgtcgttccgacacacgtcattgacgaaaagctcggcacccagaggacggtttctctctccacgcttgagcagctcccggcagtcaaatgcacatacggcgaactctgcaacgtcatcgacaagatcgtgcggggggtaggcgaatgagccgctccaaggcatcgttggaaaacaaactgtccgagcgaaaagctgcgctttat

SEQ ID NO: 13480 - DNA, 260 bp, Unknown
  Description of Unknown: LeftRegion for integrase B481 sequence
tcgtctggagcgtgttggactcctaccttacgccagaggaaaaaacattcgtattgcagccaaagcaagacgcgacagccggataaaacggcagcagtctgccttggtgattgacttcgtacaattcaagaaccgcaataccgaaaaagccgacctcgctgccagcaaggacggctttcatactatggaggtgaacaaggatggggaagatagctgataagctgaaacagatacgggtagcaatctacgtccgggtgtct

SEQ ID NO: 13481 - DNA, 260 bp, Unknown
  Description of Unknown: LeftRegion for integrase B482 sequence
tggacgcccctttcgaggcggccatataaggatatggaaatcgtctggaggccgacccggaacattttgtcaaaccgggtcctcccggtttgtacaaaatgtcaaggtataggttttggttaaggttacggttttggtactggttacaacggaaaatcaccggattgtcctacggacagtccagattttgaggtgcaaaaatgactgcaaggaaagcgatcagcaaacgaacggcggaaatcctcgatgccctgaacacc

SEQ ID NO: 13482 - DNA, 260 bp, Unknown
  Description of Unknown: LeftRegion for integrase B483 sequence
gaatacacttaatcaggtatatccttgctgatctttgtcgcttcaagtggtcatgtagaacttgacgctggtgactactcatcgtttgattacgatgttcacgtcaattctgcttcagatagagatctatataggaaagccggataacacaaaagagcctgtcggcaatcggcaggctcttttaattgaggaggattactgtgacgtcgcaaaaatcatccattgagcgcaagctgtcagaacaaagagctgcgctttat

SEQ ID NO: 13483 - DNA, 260 bp, Unknown
  Description of Unknown: LeftRegion for integrase B484 sequence
atctctctgagctcgctgctggcgctcggcccggttcgggtcgatttcgacggcatcaaagacgccgttattcattgtattcaaggtgatgaatgtccccccccccgtcatattgcataatttttgtatatccattttgtctataattacgaagcagctccgggaccacggagctgcttcaacgataaagggggactatcatgaaaaaagggattgctctccgcaccgtgaaaaagactgcggaggagctgctcaacacc

SEQ ID NO: 13484 - DNA, 260 bp, Unknown
  Description of Unknown: LeftRegion for integrase B485 sequence
atatccctgaactcgctgcttgcgctcggccctgtccaggccgactacggcggcatcagggatgccgttattcactgtattcaaggggatgaatgtacccccccccgtcatattgcataatttttgaatatccattttgtctataattacgaagcagctccgaggcaccggagctgcttcaacgataaagggggatatccatgaaaagcagtgtaacgctacgcagcttgaagaagactgcggaagaactcgtcaacacc

SEQ ID NO: 13485 - DNA, 260 bp, Unknown
  Description of Unknown: LeftRegion for integrase B486 sequence
gcgttcacgattgcttcctgcacatacgctccgtatggagacatatcaaaggcatcagatgttgcggctggtgactactcatcgtttgattacgatgttcacgtcaattctgcttcagatagagatctatataggaaagccggataacacaaaagagcctgtcggcaatcggcaggctcttttaattgaggaggattactgtgacgtcgcaaaaatcatccattgatcgcaagctttcagaacaaagagctgcgctttat

SEQ ID NO: 13486 - DNA, 260 bp, Unknown
  Description of Unknown: LeftRegion for integrase B487 sequence
accatgctacaaaagctggagccataccgcgctgactatggcggcatccgagatgccgttatccattcgctggatgtgtacccccccccctgacaatttgaataattctcagtgttcttttttgtgcataacagaaaagcagccccgcactacgcacggagctgctttttcttcagctattatcttctggaggtttcacaatgggctatgtgacgaagaaggtggcacaacgctttgaggagaagaaagtcgccatatac

SEQ ID NO: 13487 - DNA, 260 bp, Unknown
  Description of Unknown: LeftRegion for integrase B488 sequence
ctctcaccatgctacaaaagctggagccataccgcgctgactatggcggcatccgagatgccgttatccattcgctggatgtgcagcccccgacaatttgaataattctcagtgttcttttttgtgcataacagaaaagcagccccgcactacgcatggagctgctttttcttcagctattatcttctggaggtttcacaatgggctatgtgacgaagaaggtggcacaacgctttgaggagaagaaagtcgccatatat

SEQ ID NO: 13488 - DNA, 260 bp, Unknown
  Description of Unknown: LeftRegion for integrase B489 sequence
tgaccgtccgccggacaatcctatggacgctatcaaaaagctattttttacagcaatctcattttttatcattatgcgaatgttctaaatccatagtgtaccaacttagctattttcaagtaacaaaacggactttttttcgtgatagtcctatggacagtccaccgggctatccataggactattttcaggagattattatgcctttcaaaaaagcaatagaaactatgccaaattgctgccatcgtgcagctatttat

SEQ ID NO: 13489 - DNA, 260 bp, Unknown
  Description of Unknown: LeftRegion for integrase B490 sequence
gtcgtaaatatcggcggttccgtcggcaacggtgtcacaaagaaaaccgactttctcgttgtcggctctacagattattgcgcctctgtaaagggcggcaaaactggcaagctgaaaaaagccgaggatttgcagaaaaagggcgcaaaccttgccattatcgacgagggcgctttttacgacatgttgggcgagtgattatggcacaacaaaaaaaggccgccgtggccgcgttcgacggaacgccgcgggcggtaatt

SEQ ID NO: 13490 - DNA, 260 bp, Unknown; identical to SEQ ID NO: 13018
  Description of Unknown: LeftRegion for integrase B491 sequence

SEQ ID NO: 13491 - DNA, 260 bp, Unknown
  Description of Unknown: LeftRegion for integrase B492 sequence
tatgtcaacggttttatggttggcaatattcccggcgacgataccgatttcataaaccgggcccgccgccgcggtgtcgaggtcgtcggttttaaggtcgattatttcgagcccgaggacgagcccgagcgcggtcgtgtgtactatgcccgaatcaagctcgagatcgtgcccgttcgtgcggcaaaggcggcgaaataatgccgcgggccgcgcaagccgccggggccgtgttcgacggaacgccgcgggcggtaatt

SEQ ID NO: 13492 - DNA, 260 bp, Unknown
  Description of Unknown: LeftRegion for integrase B493 sequence
ggcctgagctctctcttggcgctcggccctattcaggctgatttcgccggcatcaaagatgccgttattcactgtattcaaggtgatgaatgtaccccccccccccgtcatattgcataatttttgtatatccgttttgtctataattacgaagcggctccgtgacctcggagccgcttcaataataaagggggagcactatgacagccaaaaagctatccagcataaagaaaactgcggaggaacttatcaacaccatc

SEQ ID NO: 13493 - DNA, 260 bp, Unknown
  Description of Unknown: LeftRegion for integrase B494 sequence
gcgaaggttggaatcgatcaggcgtttgacttacgatatcggtatcgttggggtattccgtatagtaaaaaactgatgtgggctgtgggagaagcgatagttaagcaatatgacattgcacactgttattctcctaaatgtgcgataattgactgtgataatgttttgtggggcggagtattatcagaagatattgccgggtgagtacagactcagaggatcagctgaatagctacaaatcgcaggttgagcattatacg

SEQ ID NO: 13494 - DNA, 260 bp, Unknown
  Description of Unknown: LeftRegion for integrase B495 sequence
tgaccgtccgtcggacaatcctatggacgctatcaaaaagctattttttacagcaatctcattttttatcattatgcgaatgttctaaatccatagtgtaccaacttagctattttcaagtaacaaaacggactttttttcgtgatagtcctatggacagtccaccgggctatccataggactattttcaggagattattatgcctttcaaaaaagcaatagaaactatgccaaattgctgccatcgtgcagctatttat

SEQ ID NO: 13495 - DNA, 260 bp, Unknown
  Description of Unknown: LeftRegion for integrase B496 sequence
accgggcttttaatcgtgtgcagtgacccgatgcaaaagaaaatcgacagagctgccgccctaaatattccaaccatttcagagcagcaatggtttgaacttatgccggaactagaagccctcggaatgtggaatggaaagccacttccgtttgcggatgacaatggcatctaccgttttgatgtgggtggtgatggataatggcaaaaaagaagaagcccgccgggggcaatgccatcatctatgcccgctactcatcc

SEQ ID NO: 13496 - DNA, 260 bp, Unknown
  Description of Unknown: LeftRegion for integrase B497 sequence
tactgcgaggattgcggatacagctttgactttaccacacaggatgacctcaatgcccaatataataaactgaacacaaacgagggatgcgccattttggtggcgatcattctcggcgttattcttataacaatttggttttacagccattaaatgcaaatttgaggccgttttcgttaaataagggggggggtgacagtttgagttcagttgacaaaatcgccgttgtttacgcacggtattcttcccacgggcagacc

SEQ ID NO: 13497 - DNA, 260 bp, Unknown
  Description of Unknown: LeftRegion for integrase B498 sequence
gtcgtaaatatcggcggttccgtcggcaacggtgtcacaaagaaaaccgactttctcgttgtcggctctacagattattgcgcctctgtaaagggcggcaaaactggcaagctgaaaaaagccgaggatttgcagaaaaagggcgcaaaccttgccattatcgacgagggcgctttttacgacatgttgggcgagtgattatggcacaacaaaaaaaggccgccggtgccgagtttgacggtacgccgcgggcggtaatt

SEQ ID NO: 13498 - DNA, 260 bp, Unknown
  Description of Unknown: LeftRegion for integrase B499 sequence
gagatacagtatgcagctgtcaatgttgaaacaattacgctcgttaaaacttataagtgaagcagagtatcagctggtagagaaaaagttaaaaaaagattatggtgttatttctaatattaccgcttgactattatagtgttgcgttgtaagattatatcaacactacggtaggaacacaaaaagaaaggggcggtgaaatggaagttgaaatcattaaggcgaagggtgctggtgaggatacttctacgggaagaaag

SEQ ID NO: 13499 - DNA, 260 bp, Unknown
  Description of Unknown: LeftRegion for integrase B500 sequence
aggaggcatacaatgaataaaattgaaatgagcaaaaatccggactattgttttgccgccttaaagctcatagagcagctttataaggacggtaaaataccgaattttatgtaccgaaatatactgaatgaatatgcagacattgttgatgttacggctttcgtcatcggaaattcaaataaaaaggaggatgcgacagcatgatcaattctgattttgtaaaaaagcgagtggtaatttatgctcgtgtttcaaccgag

SEQ ID NO: 13500 - DNA, 260 bp, Unknown
  Description of Unknown: LeftRegion for integrase B501 sequence
gtcgtaaatatcggcggttctgttggcaacggcgtcacaaagaaaaccgactttctcgttgtcggctctacggattattgtgcctctgtaaagggcggcaaaactggcaagctgaaaaaagccgaggatttgcagaaaaagggcgcaaaccttgccattatcgacgagggcgctttttacgatatgttgggcgagtgattatggcacaacaaaaaaaggccgccgggtccgagtttgacggtacgccgcgggcggttatc

SEQ ID NO: 13501 - DNA, 260 bp, Unknown
  Description of Unknown: LeftRegion for integrase B502 sequence
cggacagtccgtaggattatccgccggacagccttaaaaatctttattttacagtgtttctatttttttgctgtcaagtatgatcttataccatgcaatacgccggttccgtaaccattgcaacagcaatcaaaatattttcgtgacagtcctacggactatccaccggattatccgtaggacgattttaggaggttatcatggctttcaagaaaacaatagataccatgccgactctctgccgccgtgtggctatttat

SEQ ID NO: 13502 - DNA, 260 bp, Unknown
  Description of Unknown: LeftRegion for integrase B503 sequence
aagggaaatattatagaactgaaatttgaaaaataaaacgccccacggctgcaaccgtgaagcgctttaaatagattgttacccgtcaaccccgcggggctgcgctatgataacgccctgaacaagtgttattatagcataggcccccaacttttgaaagggcttattttttacgcccatttttaagaaggtgtgattttatggcttatgcagcattgagaaaggccggtcttgtgcctgctgccgcgccggatctgcga

SEQ ID NO: 13503 - DNA, 260 bp, Unknown
  Description of Unknown: LeftRegion for integrase B504 sequence
ccggacagtccgtaggattatccgccggacagccttaaaaatctttattttacagtgtttctattttttgctgtcaagcatgatcttataccacgcaatacgccggttccgtaaccactacaacagcaatcaaaatattttcgtgacagtcctacggactatccaccggattatccgtaggacgattttaggaggttatcatggctttcaagaaaacaatagataccatgccgactctctgccgccgtgtggctatttat

SEQ ID NO: 13504 - DNA, 260 bp, Unknown
  Description of Unknown: LeftRegion for integrase B505 sequence
agggctactggctgtaaaatgctggtagccctcattttttagttgtatctagtatataaggggtgtataatagataggaactgaaaacagcctcataaagccctctattttatcgagggtaaaagtctacacctaatatataaaagtggctgtataaggcacacaggagctcacaggactattacaggagggtaaacaggatggcatacaggaaaataacggatataaaagatactattggtatgagagcggtattttat

SEQ ID NO: 13505 - DNA, 260 bp, Unknown
  Description of Unknown: LeftRegion for integrase B506 sequence
cggactgtccgtaggattatccgccggacagccttaaaattctttgttttacagtgtttctatttttttgctgccaagtatgatcttgtgccatgcaatacgccggttccgtaaccattgcaacagcaagcaaaatattttcgtgacagtcctacggactatccataggattatccgtaggacgattttaggaggttatcatggctttcaagaaaacaatagataccatgccgactctctgccgccgtgtggctatttat

SEQ ID NO: 13506 - DNA, 260 bp, Unknown
  Description of Unknown: LeftRegion for integrase B507 sequence
acaggtcttttgattgtgtgtagtgacccggcgcaaaagaaaattgacagagccgatgccttgaatattccaatcatttcagagcagcaatggtatgaactcatgccagaacttgaagccgttggaatgtggaacggaaagcaaattctgtttgcggacaatgatggcatctaccgtgttgaagtgggcggtgaaagctgatggccagaaaaaagaatattgctgctggccttgatgccgtcatctatgcccggtactca

SEQ ID NO: 13507 - DNA, 260 bp, Unknown
  Description of Unknown: LeftRegion for integrase B508 sequence
tcgaaaattagagtgtagaacattataattaaagcacctacagccatatttggttgtaggtgctttgttttcagcatttggatacacaatttcatttttaagcgtcaaaagtttgctgattttgctattgacttaggactattgtcatggtataatcaataggtaatgatgccttgcaagtaaatctggaggtttaaataatggatatttatgaagctagacgcacaatgcaaacacaaaggaaaaatatatttgactta

SEQ ID NO: 13508 - DNA, 260 bp, Unknown
  Description of Unknown: LeftRegion for integrase B509 sequence
aaagggaatattatagaattaaattttcgaaaataaatgcgccccacggcggcaaccgtgaagcgctttatatagattgttacccgtcaacctatggggctgactatgataaccacccgacaatgattattatagcataagcccccggaattttgaagggcttatttttttacgcccttttttagaaaggtgtgctatttatggcttatgctaaattgcaaaaatctggtcatctcccagatccggcggcaaacatgcag

SEQ ID NO: 13509 - DNA, 260 bp, Unknown; identical to SEQ ID NO: 13501
  Description of Unknown: LeftRegion for integrase B510 sequence

SEQ ID NO: 13510 - DNA, 260 bp, Unknown
  Description of Unknown: LeftRegion for integrase B511 sequence
ttggaaaatgtcattgaattagtaagaaaaaaatgagcgccccacggtgccagccgtgagacgcccagaaagaagttacccgtcaacccgttggggctgcgctatggtaaaatctgccagaaattattatagcacaagccccgaccatttgaaagggcttgtttttttgcgcccttttttaagttaagaaggtgctatttatggcttatgctgccatgagaagggccgggcttgttcctgctgccgcgccggatctgcga

SEQ ID NO: 13511 - DNA, 260 bp, Unknown
  Description of Unknown: LeftRegion for integrase B512 sequence
ccggactgtccgtaggattatccgccggacaaccttaaaattctttattttacagtgtttctatttttttgctgccaagtatgatcttgtgccatgcaatacgccggttccgtaaccattgcaacgcaagcaaaatattttcgtgacagtcctacggactatccgccggattatccgtaggacgattttaggaggttatcatggctttcaagaaaacaatagataccatgccgactctctgccgccgtgtggctatttat

SEQ ID NO: 13512 - DNA, 260 bp, Unknown
  Description of Unknown: LeftRegion for integrase B513 sequence
cggactgtccgtaggattatccgccggacagccttaaaaatctttattttacagcgtttctatttttttgctgtcaagtatgatcttgtgccatgcaatacgccggttccgtaaccattgcaacagcaagcaaaatattttcgtgacagtcctacggactatccataggattatccgcaggacgattttaggaggttatcatggctttcaagaaaacaatagataccatgccgactctctgccgccgtgtggctatttat

SEQ ID NO: 13513 - DNA, 260 bp, Unknown
  Description of Unknown: LeftRegion for integrase B514 sequence
ggcggtgcaactgtcgggtactgcacatacgctccatacggagactttagcagagcttctgaagtaactgctggcgactacactacattcgagttctgcgacatcaagatatattcagaagatgtccgaaacactctacgaggcaaataagcgaaagagcttgtcggaaaacggcaagctctttttcaacggaggcgactatgaaacaaagcaaaaaagtgagcgataagctgtcaaatcagaaatgcgctctttatgtt

SEQ ID NO: 13514 - DNA, 260 bp, Unknown
  Description of Unknown: LeftRegion for integrase B515 sequence
cggacagtccgtaggattatccgccggacagccttaaaattctttattttacagtgtttctatttttttgctgccaagtatgatcttgtgccatgcaatacgccggttccataaccattgcaacagcaagcaaaatattttcgtgacagtcctacggactatccgccggattatccgtaggacgattttaggaggttatcatggctttaaagaaaacaatagataccatgccgactctctgccgccgtgtggctatttat

SEQ ID NO: 13515 - DNA, 170 bp, Unknown
  Description of Unknown: LeftRegion for integrase B516 sequence
ttccccccctttccgcgtaatgtgctggaatgtagaaattttcaacgcatttttatagcgtaacgacattttttcatatctttgtgtaaacttttaaaacacaatggattatgaaagatatagtagcttatttgcgtgtatcaacagaagcgcaagattttgagagacaa

SEQ ID NO: 13516 - DNA, 260 bp, Unknown
  Description of Unknown: LeftRegion for integrase B517 sequence
accggtcttttaatcgtgtgcagtgacccgatgcaaaagaaaatcgacagagctgccgccctaaacattccaatcatttcagaacagcaatggtttgaacttatgccggaactagaagccctcggaatgtggaatggaaagccaattccgtttgcggatgacaatggcatctaccgttttgatgtgggtggtgttggataatggcaaaaaagaagaagcccgccgggggcaacgccatcatctatgcccgctactcgtcc

SEQ ID NO: 13517 - DNA, 260 bp, Unknown
  Description of Unknown: LeftRegion for integrase B518 sequence
ggcggtgcaactgtcgggtactgcacatacgctccatacggagactttagcagagcttctgaggtaactgctggcgactacactacattcgagttctgcgacatcaagatatattcagaagatgtccgaaacactctacgaggcaaataagcgaaagagcttgtcggaaaacggcaagctctttttcaacggaggcgactatgaaacaaagcaaaaatgtgagcgataagctgtcaaatcagaaatgcgctctttatgtt

SEQ ID NO: 13518 - DNA, 260 bp, Unknown
  Description of Unknown: LeftRegion for integrase B519 sequence
tgctttgtagatatggtatctataccgtatctataccgtatccataccgtaccgatacctcgcgtgcgcgcgtgcgtgtgcgcgcgatcgtgcgcgcactgtctctgtacctgtatctgtatctgtatctgtatctgtaatctgtttctgattctgaatatctactactgcaaatctatcgttagaagggggtggcgctgttgccgagaaaacctgcaaagcacccggcgaagccgaagcggggcaagaagctggaaatc

SEQ ID NO: 13519 - DNA, 260 bp, Unknown
  Description of Unknown: LeftRegion for integrase B520 sequence
atccgacagttttttgattttggcaaagatatccgaccattcgctcgtagtcatacggcatggctcctttctcaaatttactgtcggcagcaactgaattatatcaaatatgcacccgcttttcagggattcgtagaattataccgaaaatcggaaaaatattgcgaattttgaagaagataatcgtgaggtgatggttgatggcccgaaaaaagaatattgctgcgggtcagaatgccgtcatttatgcccgctattcc

SEQ ID NO: 13520 - DNA, 260 bp, Unknown
  Description of Unknown: LeftRegion for integrase B521 sequence
caagaaatatgatccaaattacgttccatctaaaaagaaaattcgtgcaaccgtaccttccaaataattgttcttttcaaggagctccccgccgggtgctccttgttttataaacgcacaaacccctccagctgtttccagccggaggggtctgccccgtcgtcaaaaggtaaggataaagaacaagaagatttctttccatgcgttgcctgcccttacagcatagcacgctttttggatatgggcaagcaaaagccccg

SEQ ID NO: 13521 - DNA, 260 bp, Unknown
  Description of Unknown: LeftRegion for integrase B522 sequence
gctactggctgtaaaatgctggtagccctcattttttagttgtatctagtatataaggggtgtataatagatagaaactgaaaaacagcctcataaagccctctattttatcgagggtaaagaagtctacacctaatatataaaagtggctgtatgaggcacacaggagctcacaggactattacaggagggtaaacaggatggcatacaggaaaataacggatataagagatactattggtatgagagcggtattttat

SEQ ID NO: 13522 - DNA, 260 bp, Unknown
  Description of Unknown: LeftRegion for integrase B523 sequence
acggctgggacttctacgtcatgccgaccgctcggctgaacgaagcctgcggcgctcagaagaccatttcgttcccgtcgctgctgaagctcaaccccgtcaaggcggactactccagcatcaaagccgcaatactttccgtggtataagcaaaggcagctcctgcttcggagctgccttcatttcttggagggacatctatgcctatttcaaagcctgccttcgacctcattcagaaggtcgccatctacatccgggtc

SEQ ID NO: 13523 - DNA, 260 bp, Unknown; identical to SEQ ID NO: 13335
  Description of Unknown: LeftRegion for integrase B524 sequence

SEQ ID NO: 13524 - DNA, 260 bp, Unknown
  Description of Unknown: LeftRegion for integrase B525 sequence
gtcgtaaatatcggcggttccgtcggcaacggtgtcacaaagaaaaccgactttctcgttgtcggctctacagattattgcgcctctgtaaagggcggcaaaactggcaagctgaaaaaagccgaggatttgcagaaaaagggcgcaaaccttgccattatcgacgagggcgctttttacgacatgttgggcgagtgattatggcacaacaaaaaaaggccgccggggccgagtttgacggtacgccgcgggcggtaatt

SEQ ID NO: 13525 - DNA, 260 bp, Unknown
  Description of Unknown: LeftRegion for integrase B526 sequence
gctactggctgtaaaatgctggtagccctcattttttagttgtatctagtatataaggggtgtataatagatagaaactgaaaaacagtctcataaagccctctattttatcgagggtaaagaagtctacacctaatatataaaagtggctgtatgaggcacacaggagctcacaggactattacaggagggtaaacaggatggcatacaggaaaataacggatataaaagatactattggtatgagagcggtattttat

SEQ ID NO: 13526 - DNA, 260 bp, Unknown
  Description of Unknown: LeftRegion for integrase B527 sequence
gctactggctgtaaaatgctggtagccctcattttttagttgtatctagtatataaggggtgtataatagataggaactgaaaacagcctcataaagccctctattttatcgagagtaaagaagttctacacctaatatataaaagtggctgtatgaggcacacaggagctcacaggactattacaggagggtaaacaggatggcatacaggaaaataacggatataagagatactattggtatgagagcggtattttat

SEQ ID NO: 13527 - DNA, 260 bp, Unknown
  Description of Unknown: LeftRegion for integrase B528 sequence
ggctactggctgtaaaatgctggtagccctcattttttagttgtatctagtatataaggggtgtataatagataggaactgaaaacagtctcataaagccctctattttatcgaggataaagaagtctacacctaatatataaaagtggctgtatgaggcacacaggagctcacaggactattacaggagggtaaacaggatggcatacaggaaaataacggatataagagatactattggtatgagagcggtattttat

SEQ ID NO: 13528 - DNA, 260 bp, Unknown; identical to SEQ ID NO: 13421
  Description of Unknown: LeftRegion for integrase B529 sequence

SEQ ID NO: 13529 - DNA, 260 bp, Unknown
  Description of Unknown: LeftRegion for integrase B530 sequence
agggctactggctgtaaaatgctggtagccctcattttttagttgtatctagtatataaggggtgtataatagataggaactgaaaacagcctcataaagccctctgttttatcgagggtaaagaagtctacacctaatatataaaagtggctgtacgaggcacacaggagctcacaggactattacaggagggtaaaggatggcatacaggaaaataacggatataaaagatactataggtatgagagcggtattttat

SEQ ID NO: 13530 - DNA, 260 bp, Unknown
  Description of Unknown: LeftRegion for integrase B531 sequence
ggctactggctgtaaaatgctggtagccctcattttttagttgtatctagtatataaggggtgtataatagataggaactgaaaacagcctcataaagccctctgttttatcgagggtaaagaagtctacacctaatatataaaagtggctgtatgaggcacacaggagctcacaggactattacaggagggtaaacaggatggcatacaggaaaataacggatataaaagatactataggtatgagagcggtattttat

SEQ ID NO: 13531 - DNA, 260 bp, Unknown
  Description of Unknown: LeftRegion for integrase B532 sequence
gctttgaataggttggtgaggacaaatggggattgataaaaccatattacttatgataaatgagcggttatacaaaaatggaaagatagataaagacacgaaagaaaaaatagaaaaggagattaataaaaatgattgtaaaacaggaatggatagactaaaataatggtaggttctgtccttccatatggaggattagcatgagtaatatataccagttaagagaactacttagaacacagacaatttatgatttgccg

SEQ ID NO: 13532 - DNA, 260 bp, Unknown; identical to SEQ ID NO: 13335
  Description of Unknown: LeftRegion for integrase B533 sequence

SEQ ID NO: 13533 - DNA, 260 bp, Unknown
  Description of Unknown: LeftRegion for integrase B534 sequence
acggctgggacttctacgtcatgccgaccgctcgactgaacgaagcctgcggcgctcagaagaccatttcgttcccgtcgctgctgaagctcaaccctgtcaaggcggactactccagcatcaaagccgcaatactttccgtggtataagcaaaggcagctcccgcttcggagctgccttcatttcttggagggacatctatgcctatttcaaagcctatcttcgacctcgttcagaaggtcgccatctacatccgggtc

SEQ ID NO: 13534 - DNA, 260 bp, Unknown
  Description of Unknown: LeftRegion for integrase B535 sequence
acaggtcttttgattgtgtgtagtgacccggcgcaaaagaaaattgacagagccgatgccttgaatattccaatcatttcagagcagcaatggtatgaactcatgccagaacttgaagccgttggaatgtggaacggaaagcaaattctgtttgcggacaatgatggcatctaccgtgttgaagtggacggtgaaagctgatggccagaaaaaagaatattgctgctggcctcgatgccgtcatctatgcccggtactca

SEQ ID NO: 13535 - DNA, 260 bp, Unknown
  Description of Unknown: LeftRegion for integrase B536 sequence
ggctactggctgtaaaatgctggtagccctcattttttagttgtatctagtatataaggggtgtataatagataggaactgaaaacagcctcataaagccctctattttatcgagggtaaagaagtctacacctaatatataaaagtgactgtacgaggcacacaggagctcacaggactattacaggagggtaaacaggatggcatacaggaaaataacggatataagagatactattggtatgagagcggtattttat

SEQ ID NO: 13536 - DNA, 260 bp, Unknown
  Description of Unknown: LeftRegion for integrase B537 sequence
ggctactggctgtaaaatgctggtagccctcattttttagttgtatctagtatataaggggtgtataatagataggaactgaaaacagcctcataaagccctctattttatcaagggtaaagaagtctacacctaatatataaaagtggctgtatgaggcacacaggagctcacaggactattacaggagggtaaacaggatggcatacaggaaaataacggatataagagatactattggtatgagagcgatattttat

SEQ ID NO: 13537 - DNA, 260 bp, Unknown; identical to SEQ ID NO: 13421
  Description of Unknown: LeftRegion for integrase B538 sequence

SEQ ID NO: 13538 - DNA, 260 bp, Unknown
  Description of Unknown: LeftRegion for integrase B539 sequence
gctttgaataggttggtgaggacaaatggggattgataaaaccatattacttatgataaatgagcggttatacaaaaatggaaagatagataaatacacgaaagaaaaaatagaaaaggagattaataaaaatgattgtaaaacaggaatggatagactaaaataatggtaggttctgtccttccatatggaggattagcatgagtaatatataccagttaagagaactacttagaacacagacaatttatgatttgccg

SEQ ID NO: 13539 - DNA, 260 bp, Unknown
  Description of Unknown: LeftRegion for integrase B540 sequence
gcgaggtgcagcgcttgatcgaatccgaaaagcgcccgtgatcttctttgcgccatccttggcaaaatagccattaaaaaacgccccgcccatgttactagcatggacgagacgaagtattcaattcacactctttttctttatgcggctcatcaagggattcattcaactgttatcactatttaagggggtgatccaatttgaaagccgtcatatatgcccgcttctccagccacaaccagcgcgaagaatccatcgaa

SEQ ID NO: 13540 - DNA, 260 bp, Unknown
  Description of Unknown: LeftRegion for integrase B541 sequence
gctactggctgtaaaatgctggtagccctcattttttagttgtatctagtatataaggggtgtataatagatagaaactgaaaaatagtctcataaagccctctattttatcgagggtaaagaagtctacacctaatatataaaagtggctgtatgaggcacacaggagctcacaggactattacaggagggtaaacaggatggcatacaggaaaataacggatataaaagatactattggtatgagagcggtattttat

SEQ ID NO: 13541 - DNA, 260 bp, Unknown
  Description of Unknown: LeftRegion for integrase B542 sequence
aagacaggtcttttgattgtgtgtagtgacccggcgcaaaagaaaattgacagagccgatgccatgaatattccgattgtttcggagcagcaatggtttgagctcatgccagaacttgaagccgttggaatgtggaacggaaagcgaatcctgttttcagacgacggcatctaccgtgttgaagtgggcggtgaaagctgatggccagaaaaaagaatattgctgctggcctcgatgccgtcatctatgcccggtactca

SEQ ID NO: 13542 - DNA, 260 bp, Unknown; identical to SEQ ID NO: 13531
  Description of Unknown: LeftRegion for integrase B543 sequence

SEQ ID NO: 13543 - DNA, 260 bp, Unknown
  Description of Unknown: LeftRegion for integrase B544 sequence
gacaaagcagataaattatatataaaaaaggcaacattaaaagcatggacaatgatcttatttaaacaaaagaaaattgacttaacaaaatgcaataaaatgattgcagctattgaaaaaatatccacctaatacgccttgacatatctctattggtatggtatcattaacatataatcattgcataacggagggtaaaaatggatatatacgaaaccgccaatcgaatgaaatatgagcaaaaaacaatctttgattta

SEQ ID NO: 13544 - DNA, 260 bp, Unknown; identical to SEQ ID NO: 13520
  Description of Unknown: LeftRegion for integrase B545 sequence

SEQ ID NO: 13545 - DNA, 260 bp, Unknown
  Description of Unknown: LeftRegion for integrase B546 sequence
gctactggctgtaaaatgctggtagccctcatttttttagttgtatctagtatataaggggtgtataatagataggaactgaaaacagcctcataaagccctctattttatcgagagtaaaggagtctacacctaatatataaaagtggctgtatgaggcacacaggagctcacaggactattacaggagggtaaacaggatggcatacaggaaaataacggatataaaagatactattggtatgagagcggtattttat

SEQ ID NO: 13546 - DNA, 260 bp, Unknown; identical to SEQ ID NO: 13531
  Description of Unknown: LeftRegion for integrase B547 sequence

SEQ ID NO: 13547 - DNA, 260 bp, Unknown
  Description of Unknown: LeftRegion for integrase B548 sequence
gctactggctgtaaaatgctggtagccctcattttttagttgtatctagtatataaggggtgtataatagatagaaactgaaaaacagcctcataaagccctctattttatcgagggtaaagaagtctacacttaatatataaaagtggctgtatgaggcacacaggagctcacaggactattacaggagggtaaacaggatggcatacaggaaaataacggatataagagatactattggtatgagagcggtattttat

SEQ ID NO: 13548 - DNA, 260 bp, Unknown
  Description of Unknown: LeftRegion for integrase B549 sequence
ggctactggctgtaaaatgctggtagccctcattttttagttgtatctagtatataaggggtgtataatagataggaactgaaaacagcctcataaagccctctattttatcgaggataaagaagtctacacctaatatataaaagtggctgtatgaggcacacaggagctcacaggactattacaggagggtaaacaggatggcatacaggaaaataacggatataagagatactattggtatgagagcggtattttat

SEQ ID NO: 13549 - DNA, 260 bp, Unknown
  Description of Unknown: LeftRegion for integrase B550 sequence
cttacgacctctgtgatccaacgtaactgcaagtgcggaatcgaccgcgcgtactcgatactacgcaatcttcaggtctacgggcttattcatgaggccggaaaagacacctatgaatggacagaaaaagccctcctgctgggcgcagaagggcgtaacgggtaacagatatgtcgatagatattaaatggcaagtgccaatggcaaagccggaggtcagcgaactggccgtcgtatatgcccggtattcaagccacagt

SEQ ID NO: 13550 - DNA, 260 bp, Unknown
  Description of Unknown: LeftRegion for integrase B551 sequence
aacgaacagcagcaagaaacttctgcttcctatgtattgaataccagcacgatggtttttcaccatccttactgccgcgatgtgcccaaaatagcaccgcaaaattattctacttcaagccaacctagaaacaatcttatcgaaagtggctaccgtccttgcggtcattgcagcccataatttaagagggggttctttttatgccaagaaaaaacaaatccgccggttccgaccaacgcctggtggcctactaccggtac

SEQ ID NO: 13551 - DNA, 260 bp, Unknown
  Description of Unknown: LeftRegion for integrase B552 sequence
ggaccgtccataggactgtcctacggacggttctggaaagccttgttttatgcagccttctgctttcccggctaaattttcttccgatgatacgatgcgccagcactatctatttcacaacatgaaaaacggattttttttgtgacagtcctacggactgtccataggattatccgtaggacgaaatgcaggagatcaatatggcttttaagaaacttatggatactcacccagataaacgcctccgtgtggcaatttac

SEQ ID NO: 13552 - DNA, 260 bp, Unknown
  Description of Unknown: LeftRegion for integrase B553 sequence
ggctactggctgtaaaatgctggtagccctcattttttagttgtatctagtatataaggggtgtataatagataggaactgaaaacagcctcataaagccctctattttatcgagagtaaagaagtctacacctaatatataaaagtggctgtatgaggcacacaggagctcacaggactattacaggagggtaaacaggatggcatacaggaaaataacggatataaaagatactattggtatgagagcggtattttat

SEQ ID NO: 13553 - DNA, 260 bp, Unknown
  Description of Unknown: LeftRegion for integrase B554 sequence
ttcagaatgaacagaatagaaattgcagcagacgataatcaggacgctttcgctctcgaactacagagacttgtcctctgttaccaggaggcaagccatgacgaccgtaacgttgtctgggctgtccttaataaatacgcaagtaagattgataaattaaaatagccccattttggggctttttccatttggaggtatcaatgaatcgaaaaaccagagtaaaaccaggaaaagccacttccgggctttccaaacggcgc

SEQ ID NO: 13554 - DNA, 260 bp, Unknown
  Description of Unknown: LeftRegion for integrase B555 sequence
gacccgattttcgaaccgccgatagattttctggaagaatgccggaaacgctgggaaaaccgaatgaacccttttacaggtacggtagaacgaaaaatcggaaatacctggtatttgctggagactgtatgtgacggaaatgagccgcttacccacaaggtaaaacggctcattttcttggataaggaggcgctttgttcatgacacagactcaaattcatgctacaatatcatcatgcacaccgattctgtcagctgac

SEQ ID NO: 13555 - DNA, 260 bp, Unknown
  Description of Unknown: LeftRegion for integrase B556 sequence
agatattcaatccatcctctacgaattggaaaaaaagggtcaggttgaacgaaaaaagtccggaagaacatatgtcgttcattacttatagatgaatccacgagacaaataatttgagtgttttatccaaccttacatacaagaatacatgatttttttatccagaacaatcacatacttacacatgcaaggagaacaatttgaatcgtgcagtaatttatgctagatacagcagcgacatgcagcgcgaggaaagtgtg

SEQ ID NO: 13556 - DNA, 260 bp, Unknown
  Description of Unknown: LeftRegion for integrase B557 sequence
accggacttttaatcgtgtgcagtgacccaatgcaaaagaaaatcgacagagctgcagccctgaacattccgattatttcggagcagcaatggtttgaactcatgccggaacttgaggccgctggaatgtggaacggaaagccaatttcattcgcggatgacgatggtatctaccgttttgatgtgggtggtgatggataatggcaaaaaagaagaagcccgccgggggcattgccgtcatctatgcccgctactcgtcc

SEQ ID NO: 13557 - DNA, 260 bp, Unknown
  Description of Unknown: LeftRegion for integrase B558 sequence
aacataccgccagcaaatgaccagcaaattgccgacaaataaaaaaatcccccggtgctaccaacaccgagggacctgcaagaacgtgttaccagcacgctcaattatcaacccccaacaccacatcaagagtcgatataatattataacatattatgcacggctcttacaatcatagctattgaaaggagccgtgtattatggctaaacacgctattactataccccaaaacccaaaagctgctctgtatatccgcgtc

SEQ ID NO: 13558 - DNA, 260 bp, Unknown
  Description of Unknown: LeftRegion for integrase B559 sequence
taatttacgtattttttgccaatatcaatacttttataaataagaaaatcccccggtgttaccagcaccgagggatctgcaagaacgtgttaccatcacgctcaatgtcatcaacccaagcactaccaagagctgatataatattataacatattatacgcggctcttacaatcatagctattgaaaggagccgtgtattatggctaaacacgctattactatactccaaaacccaaaagctgctctgtatatccgcgtc

SEQ ID NO: 13559 - DNA, 260 bp, Unknown
  Description of Unknown: LeftRegion for integrase B560 sequence
aatttacgtattttttaccaatatcaatacttttataaacaaaagaatcccccggtgttaccagcaccgagggacctgcaagaacgtgttaccagcacgctcaattatcaacccctaacaccacatcaagagccgatataatattataacatattatacgcggctcttacaatcttagctattgaaaggagccgtgtattatggctaaacacgctattactataccacaaaacccaaaagctgctctgtatatccgcgtc

SEQ ID NO: 13560 - DNA, 260 bp, Unknown
  Description of Unknown: LeftRegion for integrase B561 sequence
taaaaccgccaatctcttattttctcgctcaatcttactaatacaaaaaatcccccggtgctaccaacaccgagggacctgcaagaacgtgctaccgacacgctcaagtatcaacccccataccaataagagtcgatataatattataacatattatgcacggctcttacaatcttagctattgaaaggagccgtgtattatggctaaacacgctatttctataccccaaaacccaaaagctgctctgtatatccgcgtc

SEQ ID NO: 13561 - DNA, 260 bp, Unknown
  Description of Unknown: LeftRegion for integrase B562 sequence
atttacgtatttttttgccaatatcaatacttttataaataagaaaatcccccggtgttaccagcaccgagggacctgcaagaacgtgctaccaacacgctcaattatcaacccctaacaccacatcaagagccgatataatattataacatataatacgcggctcttacaatcttagctattgaaaggagccgtgtattatggctaaacacactatttctataccccaaaccaccaaagctgctctgtatatccgcgta

SEQ ID NO: 13562 - DNA, 260 bp, Unknown
  Description of Unknown: LeftRegion for integrase B563 sequence
aagtaatttacgtattttttgccaatgtcaatacttttataaataaaaaatcccccggtgttaccagcaccgagggacctgcaagaacgtgttaccagcacgctcaattatcaacccccgaacaaccaagagctgatataatattataacatattatacgcggctcttacaatcatagctattgaaaggagccgtgtattatggctaaacacgctattactataccccaaaacccaaaagctgctctgtatatccgcgtc

SEQ ID NO: 13563 - DNA, 260 bp, Unknown
  Description of Unknown: LeftRegion for integrase B564 sequence
ggttctttttgctcgctattcatccgacacgctggcaaaaataaattgggataacttcatctccgacaaaatcgacaacatcgccgatacttttgagatagattcacaactcaagcaatatatccagtaacgggtcttcatactacaagataaagcgcgaagaaaaattcttcgcgcttcattaactcagagggttacaaatgaatcaagacaaattaaccgataaactatcatctcaaaaatgtgctctttatattcgt

SEQ ID NO: 13564 - DNA, 260 bp, Unknown
  Description of Unknown: LeftRegion for integrase B565 sequence
aagtaatttacgtattttttccaatatcaatacttttataaacaaaagaatcccccggtgttaccagcaccgagggacctgcaagaacgtgttaccagcacgctcaattatcaacccccgaacaaccaagagctgatataatattataacatattatacgcggctcttacaatcatagctattgaaaggagccgtgtattatggctaaacacgctattactataccacaaaacccaaaagctgctctgtatatccgcgtc

SEQ ID NO: 13565 - DNA, 260 bp, Unknown; identical to SEQ ID NO: 13224
  Description of Unknown: LeftRegion for integrase B566 sequence

SEQ ID NO: 13566 - DNA, 260 bp, Unknown
  Description of Unknown: LeftRegion for integrase B567 sequence
taacataccgccagcaaatgaccagcaaattgccgacaaataaaaaatcccccggtgctaccaacaccgagggacctgcaagaacgtgctaccaacacgctcaattatcaacccccaacaccacatcaagagctgatataatattataacatattatacacggctcttacaacgacaacccttgaaaggagccgtgtattatggctaaatacgctatttctataccccaaacccaaaaagctgctctgtatatccgcgta

SEQ ID NO: 13567 - DNA, 260 bp, Unknown; identical to SEQ ID NO: 13562
  Description of Unknown: LeftRegion for integrase B568 sequence

SEQ ID NO: 13568 - DNA, 260 bp, Unknown
  Description of Unknown: LeftRegion for integrase B569 sequence
gttctttttgctcgctattcatccgaaacactggcaaaaataaattgggacaacttcatctccgacaaaatcgacaacatcgccgatacttttgagatagattcacaactcaagcaatatatccagtaacgggtcttcatactacaagataaagcgcgaagaaaaaaatcttcgcgcttcattaactcagagggttacaaatgaatcaagacaaattaaccgataaactatcatctcaaaaatgtgctctttatattcgt

SEQ ID NO: 13569 - DNA, 260 bp, Unknown
  Description of Unknown: LeftRegion for integrase B570 sequence
aagtaatttacgtattttttgccaatatcaatacttttataaataagaaaatcccccggtgttaccagcaccgagggacctgcaagaacgtgttaccagcacgctcaattatcaaccccataccaataagagctgatataatattataacatattatacgcggctcttacaatcatagctattgaaaggagccgtgtattatggctaaacacgctattactataccccaaaacccaaaagctgctctgtatatccgcgtc

SEQ ID NO: 13570 - DNA, 260 bp, Unknown; identical to SEQ ID NO: 13557
  Description of Unknown: LeftRegion for integrase B571 sequence

SEQ ID NO: 13571 - DNA, 260 bp, Unknown
  Description of Unknown: LeftRegion for integrase B572 sequence
ctcaaatataacagcttcttccctgctttgtcagcgtttcggtagatttttccgtttttcagcaaaataaaaacgcccacggcgttaccagcaccgcaggcgttccagatcagcttaccttatatggtaaatagccaacctcacaagagttattgtaccatatcaagggaagcatatcaagttttaccttggaggatttcatggcaaaaaagaagaagccagccgggggtgttgccatcatctatgcccgctactcatcc

SEQ ID NO: 13572 - DNA, 260 bp, Unknown
  Description of Unknown: LeftRegion for integrase B573 sequence
aattctattctgatgatttaatagacagttgtgcatttttaaatcaactacctttttcttatttttctatcgatacatttaaacttatagtaaatgatttaatagaaaatgatgagataaatctgaatgattataaaaaatatattaatgaacctaaataaaactctcacggaaatattttagtctaaggagatgataaattgaacaccattgctatttatactcgtaaatctaaattcactggaaaaggtgaatctatt

SEQ ID NO: 13573 - DNA, 260 bp, Unknown
  Description of Unknown: LeftRegion for integrase B574 sequence
taagtaatttacgtattttttgccaatgtcaatacttttataaataaaaaatcccccggtgctaccaacaccgagggacctgcaagaacgtgttaccagcacgctcaattatcaaccccataccaataagagctgatataatattataacatattatacgcggctcttacaatcatagctattgaaaggagccgtgtattatggctaaacacgctattactataccccaaaacccaaaagctgctctgtatatccgcgtc

SEQ ID NO: 13574 - DNA, 260 bp, Unknown
  Description of Unknown: LeftRegion for integrase B575 sequence
aagcatttcatcagtaaatgacaggcaaattgccggcaaatgaaaagcgcccggtgttaccagcaccgagcgcaacgcggaacgtgttaccagcacgcaaccgcaaatcatcaaccccagtaccaccaagagctgatataatattataacatattatacgcggctcttacaatcatagctattgaaaggagccgtgtattatggctaaacatgctattactataccccaaaaccccaaagctgctctgtatatccgcgtt

SEQ ID NO: 13575 - DNA, 260 bp, Unknown; identical to SEQ ID NO: 13559
  Description of Unknown: LeftRegion for integrase B576 sequence

SEQ ID NO: 13576 - DNA, 260 bp, Unknown; identical to SEQ ID NO: 13569
  Description of Unknown: LeftRegion for integrase B577 sequence

SEQ ID NO: 13577 - DNA, 260 bp, Unknown
  Description of Unknown: LeftRegion for integrase B578 sequence
aatggatattaatataaacttctcttatggagaagaaagtgtccataatctagcctttatcaatgctttgtttataaaatttaacatagaaaaattaaatattagttataggagaaaagaagaattaaggaaaaaaatcctgaaagagcttgaactaagagggaaacagagttaaaatcacaacaaaaaaggagttttttatggaaaaagtaaaaattgcaatatattctagaaaatctaaatattcagataagggtgat

SEQ ID NO: 13578 - DNA, 260 bp, Unknown; identical to SEQ ID NO: 13568
  Description of Unknown: LeftRegion for integrase B579 sequence

SEQ ID NO: 13579 - DNA, 260 bp, Unknown
  Description of Unknown: LeftRegion for integrase B580 sequence
gctgtctaaagcccagcgcttggcgttctgggatgtgatgcaaaaaatcattggttcctctgcgcaatccggaagcgcagaggcctctccgcctggttccggggtagcggctgccgaggccgcctacgaaaagaactttggtactgcatccggcaccccagatgccgaagctacgagtatgcacgaagacaccgggtaaaatgaaaaaagaccacgccccggttggggtgtggtctttggtggtaaaacaaaaaagcgct

SEQ ID NO: 13580 - DNA, 260 bp, Unknown
  Description of Unknown: LeftRegion for integrase B581 sequence
gtaagtaatttacgtattttttgtcaatatcaatacttttataaaaaaaatcccccggtgttaccagcaccgagggacctgcaagaacgtgttaccagcacgctcaattatcaacccccataccaataagagtcgatataatattataacatattatacgcggctcttacaatcttagctattgaaaggagccgtgtattatggctaaacacgctattactataccccaaaacccaaaagctgctctgtatatccgcgtc

SEQ ID NO: 13581 - DNA, 260 bp, Unknown
  Description of Unknown: LeftRegion for integrase B582 sequence
taacaatatagtcagtttgaatgaccgccagcaaattgccggcaaaaaaatcccccggtgttaccagcaccgagggaccttcaagaacgtgctaccaacacgctcaattatcaacccccataccaataagagtcgatataatattataacatattatacacggctcttacaacgacaacccttgaaaggagccgtgtattatggctaaacatgctattactatacccaaaactcccaaagctgctctgtatatccgcgta

SEQ ID NO: 13582 - DNA, 260 bp, Unknown; identical to SEQ ID NO: 13421
  Description of Unknown: LeftRegion for integrase B583 sequence

SEQ ID NO: 13583 - DNA, 260 bp, Unknown
  Description of Unknown: LeftRegion for integrase B584 sequence
aagaggtaaaagggctgtatgaggcaaatagagggcttattcatgtgagagcatgggtaggctcttttttagtgcgtaaaaataattatatagcccctgtataatttccccctaaaaaatgaggagggctgtgattatgtttattaaggctaagtagagccacaggataataagcaggatcataaaggaggatatacaggatgatagataattgtgtaagagcggtattctatgccagagtatccacacaggaggaggaa

SEQ ID NO: 13584 - DNA, 260 bp, Unknown
  Description of Unknown: LeftRegion for integrase B585 sequence
ccatattccgataccctatggatagggtatctataccgtatccataccgtaccgatacctcgcgtgcgcgcgtgcgtgtgcgcgcgatcgtgcgcgcactgtctctgtatctgtatctgtatctgagactgtatctgtaatctgtttctgattctgaatatctactactgcaaatctatcgttagaagggggtggcgctgttgccgagaaaacctgcaaagcacccggcgaagccgaagcggggcaagaagctggaagtc

SEQ ID NO: 13585 - DNA, 260 bp, Unknown; identical to SEQ ID NO: 13562
  Description of Unknown: LeftRegion for integrase B586 sequence

SEQ ID NO: 13586 - DNA, 260 bp, Unknown
  Description of Unknown: LeftRegion for integrase B587 sequence
ttctttttgctcgctattcatccgacacgctggcaaaaataaattgggataacttcatctccgacaaaatcgacaacatcgccgatacttttgagatagattcacaactcaagcaatatatccagtaacgggtcttcatactacaagataaagcgcgaagaaaaaaattcttcgcgcttcattaactcagagggttacaaatgaatcaagacaaattaaccgataaactatcatctcaaaaatgtgctctttatattcgt

SEQ ID NO: 13587 - DNA, 260 bp, Unknown; identical to SEQ ID NO: 13573
  Description of Unknown: LeftRegion for integrase B588 sequence

SEQ ID NO: 13588 - DNA, 260 bp, Unknown
  Description of Unknown: LeftRegion for integrase B589 sequence
cccgcatcctgctacaaacagaatgcgggacagcgccggcggtattaccagtaccggtccggcaataatcattacccacccaaggggctgactatgctttatattataacatgttggcccctttcttcactatatataatgaagaatatttctgcttaaaagtcaggaatatttttccgtgaaaaaaggaggctttttttatgtttgtaagacacaagaaaaatatgaaatatgcattatatggtcgtgtttcttctatc

SEQ ID NO: 13589 - DNA, 260 bp, Unknown
  Description of Unknown: LeftRegion for integrase B590 sequence
taacataccgccagcaaatgaccagcaaattgccgacaaataaaaaatcccccggtgctaccaacaccgagggacctgcaagaacgtgctaccaacacgctcaattatcaacccccaacaccacatcaagagctgatataatattataacatattatacacggctcttacaacgacaacccttgaaaggagccgtgtattatgactaaatacgctatttctataccccaaacccaaaaagctgctctgtatatccgcgta

SEQ ID NO: 13590 - DNA, 260 bp, Unknown
  Description of Unknown: LeftRegion for integrase B591 sequence
agtaatttacgtattttttgccaatatcaatacttttataaataaaaaaatcccccggtgctaccaacaccgagggatctgcaagaacgtgctaccaacacgctcaattatcaacccccataccaataagagccgatataatattataacatattatgcacggctcttacaatcttagctattgaaaggagccgtgtattatggctaaacacactattactataccccaaaacacaaaagctgctctgtatatccgcgtc

SEQ ID NO: 13591 - DNA, 260 bp, Unknown; identical to SEQ ID NO: 13580
  Description of Unknown: LeftRegion for integrase B592 sequence

SEQ ID NO: 13592 - DNA, 260 bp, Unknown
  Description of Unknown: LeftRegion for integrase B593 sequence
gttctttttgctcgctattcatccgaaacactggcaaaaataaattgggataacttcatctccgacaaaatcgacaacatcgccgatacttttgagatagattcacaactcaagcaatatatccagtaacgggtcttcatactacaagataaagcgcgaagaaaaaaatcttcgcgcttcattaactcagagggttacaaatgaatcaagacaaattaaccgataaactatcatctcaaaaatgtgctctttatattcgt

SEQ ID NO: 13593 - DNA, 260 bp, Unknown
  Description of Unknown: LeftRegion for integrase B594 sequence
ccgtatatgccgctttttcaaaaagaacttgatatatcctccgaatggttggaaaactcatacacatacacgccaaggccgtataagccttcaaagcgcgcactccaaatggaggcggacatcaaagaaaccgctcacaagtacataacaaacgaaaaagccctcctgctgggcgcagaagggcgtaacgggtaacagatatgtcagtagatattaaatggcaggtgccaaaggcacagccggaggccagcgaactggcc

SEQ ID NO: 13594 - DNA, 260 bp, Unknown; identical to SEQ ID NO: 13569
  Description of Unknown: LeftRegion for integrase B595 sequence

SEQ ID NO: 13595 - DNA, 260 bp, Unknown; identical to SEQ ID NO: 13007
  Description of Unknown: LeftRegion for integrase B596 sequence

SEQ ID NO: 13596 - DNA, 260 bp, Unknown
  Description of Unknown: LeftRegion for integrase B597 sequence
taacataccgccagcaaatgaccagcaaattgccgacaaataaaaaatcccccggtgctaccaacaccgagggacctgcaagaacgtgctaccaacacgctcaattatcaacccccaacaccacatcaagagtcgatataatattataacatattatgcacggctcttacaatcttagctattgaaaggagccgtgtattatggctaaacacgctatttctataccccaaaacccaaaagctgctctgtatatccgcgtc

SEQ ID NO: 13597 - DNA, 260 bp, Unknown
  Description of Unknown: LeftRegion for integrase B598 sequence
tcgccgcatcttaaaacagtatgcaaaaataaaacgcccacggcggcaaccgtgaacgttttaatagattgttacctgtcgacagaaaaggccggctgtagtaactccctagcaagtgttattatagcataggcctttttcttttgaaagggcttattttttatacccttttttagaaaaatagaaaggttgtgtatattatggcttatgctacgaaagtacctgctgccagtgcagacgatcggatcgttgcgatctat

SEQ ID NO: 13598 - DNA, 260 bp, Unknown
  Description of Unknown: LeftRegion for integrase B599 sequence
tccgatacgcttgttttgtccgcaaacggagagaccaacggtctgcaaaatctgtttgaagatatccgctttgggcaaatcgatggcgtcataattgaagatacaatcttttttggcgaaaattctacccgcttgacgcagattatagacttttttgccgctcatcaaacccgcatccaagttgtcagggagaccgtatcatgtccgaaaaaataatcaattgcgccatttatacccgtaaatctaccgaagaaggactg

SEQ ID NO: 13599 - DNA, 260 bp, Unknown
  Description of Unknown: LeftRegion for integrase B600 sequence
caataagcccgtaatagagctgctgctgaaaagagacgaggatccggaaacctttgtctttgaattgcaacgtctcctgatgtgctaccaggtagccagccgggaagatagaaatgtggtatgggcggctctaaacaaatatgctgctcaggtagataagattagccccgaataggggctttttctgttggagggaatatatgagtaggacaacgaacaaaagacctggaaaagccaaatccggactttccagaaaacaa

SEQ ID NO: 13600 - DNA, 260 bp, Unknown
  Description of Unknown: LeftRegion for integrase B601 sequence
ttacaaattagaaactgaataaagaaaataaaaccgctcccggcggcaaccggaaacggctttatatagattgttacccgtcaaccgtgggctgactatgataactccctagcaagtgttattatagcataggcccacaatctttgaaagggcttatttttatacccttttttagaaaaaatagaaaggttgtgtatattatggcttatgctatgaaagtacctgctgccagtgccgacgatcggatcgttgcgatctat

SEQ ID NO: 13601 - DNA, 260 bp, Unknown
  Description of Unknown: LeftRegion for integrase B602 sequence
ttacaaattagaaactgaataaagaaaataaaaccgctcccggcggcaaccggaaacggctttatatagattgttacccgtcaaccgtgggctgactataataactccctagcaagtgttattatagcataggcccacaatctttgaaagggcttatttttatacccttttttagaaaaaatagaaaggttgtgtatgttatggcttatgctatgaaagtgcctgctgccagtgccgacgatcgggccgttgcgatctat

SEQ ID NO: 13602 - DNA, 260 bp, Unknown
  Description of Unknown: LeftRegion for integrase B603 sequence
agttgtaactcttgttatcaatttaatgcataaaaaatagcgcccctgctctggtaaagtaaggcgctattttttagttactactctatccggcggtcaggtgtgcactgaccaacggttctcttgttaagtacattatatctattcatatactttttgtcaaacagatattacatatatttcaacaaaggagcatccatatggcacgaaagagaactaatctaatcggcaacactccgtctgtacgcgaaacaaaagtc

SEQ ID NO: 13603 - DNA, 260 bp, Unknown
  Description of Unknown: LeftRegion for integrase B604 sequence
gccgcactttaaaacagtatacaaaaaataaaacgcccacggcggcaaccgtgaacgttttaatagattgttacctgtcgacagaaaaggccggctgtagtaactccctcgcaagtgttattatagcataggcctttttcttttgaaagggcttattttttatacccttttttagaaaaattagaaaggttgtgtatattatggcttatgctatgaaagtacctgctgccagtgccgacgatcggatcgttgcgatctat

SEQ ID NO: 13604 - DNA, 260 bp, Unknown
  Description of Unknown: LeftRegion for integrase B605 sequence
agttgtaactcttgttatcaatttaatgcataaaaaatagcgcccctgctctggtaaagtaaggcgctattttttagttactactctatccggcggtcaggtgtacactgaccaacggttctcttgttaagtacattatatctattcatatactttttgtcaaacagatattacatatattccaacaaaggagcatccatatggcacgaaagagaactaatctaatcggcaacactccgtctgtacgcgaaacaaaagtc

SEQ ID NO: 13605 - DNA, 260 bp, Unknown
  Description of Unknown: LeftRegion for integrase B606 sequence
agttgtaactcttgttatcaatttaatgcataaaaaatagcgcccctgctctggtaaagtaaggcgctattttttagttactactctatccggcggtcaggtgtgcactgaccaacggttctcttgttaagtacattatatctattcatatactttttgtcaaacagatattacatatattctaacaaaggagcatccatatggcacgaaagagaactaatctaatcggcaacactccgtctgtacgcgaaacaaaagtc

SEQ ID NO: 13606 - DNA, 260 bp, Unknown
  Description of Unknown: LeftRegion for integrase B607 sequence
gcagtcataactcttgttgttaatattatgcataaaaaatagcgcccctgctctggaaaagtaaggcgctattttcagtgattgctttgccggcggtcaggtgtacactggccaacggttctcttgttaagtacattatatctattcatatactttttgtcaaacagatattacatatattctaacaaaggagtatccatatggcacgaaagagaactaatctaatcggcaacacgccgtctgtacgtgaaacaaaagtc

SEQ ID NO: 13607 - DNA, 260 bp, Unknown
  Description of Unknown: LeftRegion for integrase B608 sequence
caataagcccgtaatagagctgctgctgaaaagagacgaggatccggaaacctttgtctttgaattgcaacgtctcctgatgtgctaccaggtagcaagtcgggaagatagaaatgtggtatgggcggctctaaacaaatatgctgctcaggtagataagattagccccgaataggggctttttctgttggagggaatatatgagtaggacaacgaacaaaagacctggaaatgccaaatccggcctttccaggaaacaa

SEQ ID NO: 13608 - DNA, 260 bp, Unknown; identical to SEQ ID NO: 13602
  Description of Unknown: LeftRegion for integrase B609 sequence

SEQ ID NO: 13609 - DNA, 260 bp, Unknown
  Description of Unknown: LeftRegion for integrase B610 sequence
tacaaattagaaactgaataaagaaaataaaaccgctcccggcggcaaccggaaacggctttatatagattgttacctgtcgacagaaaagaccggctgtagtaactcccttgcaagtgttattatagcataggcctttttcttttgaaagggcttatttttatacccttttttagaattttagaaaggttgtgtatattatggcttatgctatgaaaatatctgctgccagtgccgacgatcggatcgttgcgatctat

SEQ ID NO: 13610 - DNA, 260 bp, Unknown
  Description of Unknown: LeftRegion for integrase B611 sequence
agttgtaactcttgttatcaatttaatgcataaaaaatagcgcccctgctctggtaaagtaaggcgctattttttagttactactctatccggcggtcaggtgtgcactgaccaacggttctcttgttaagtacattatatctattcatatactttttgtcaaacagatattacatatattccaacaaaggagcatccatatggcacgaaagagaactaatctaatcggcaacacgccgtctgtacgcgaaacaaaagtc

SEQ ID NO: 13611 - DNA, 260 bp, Unknown
  Description of Unknown: LeftRegion for integrase B612 sequence
caataagcccgtaatagagctgctgttgaaaagagacgaggatccggaaacctttgtctttgaattgcaacgtctcctgatgtgctaccaggtagccagccgggaagatagaaatgtggtatgggcggctctaaacaaatatgctgctcaggtagataagattagccccgaataggggctttttctgttggagggaatatatgagtaggacaacgaacaaaagacctggaaatgccaaatccggcctttccaggaaacaa

SEQ ID NO: 13612 - DNA, 260 bp, Unknown
  Description of Unknown: LeftRegion for integrase B613 sequence
caataagcccgtaatagagctgctgctgaaaagagacgaggatccggaaacctttgtctttgaattgcaacgtctcctgatgtgctaccaggtagccagtcgggaagatagaaatgtggtatgggcagctctaaacaaatatgctgctcaggtagataagattagccccgtataggggctttttctgttggagggaatatatgagtaggacaacgaacaaaagacctggaaaagccaaatccggactttccaggaaacaa

SEQ ID NO: 13613 - DNA, 260 bp, Unknown
  Description of Unknown: LeftRegion for integrase B614 sequence
agttgtaactcttgttatcaatttaatgcataaaaaatagcgcccctgctctggtaaagtaaggcgctattttttagttactactctatccggcggtcaggtgtgcactgaccaacggttctcttgttaagtacattatatctattcatatactttttgtcaaacagatattacatatattccaacaaaggagcatccatatggcacgaaagagaactaatctaatcggcaacactccgtctgtacgcgaaacaaaagtc

SEQ ID NO: 13614 - DNA, 260 bp, Unknown
  Description of Unknown: LeftRegion for integrase B615 sequence
caataagcccgtaatagagctgctattgaaaagagacgaggatccggaaacctttgtctttgaattgcaacgtctcctgatgtgctaccaagtagccagtcgggaagatagaaatgtggtatgggcggctctaaacaaatatgctgctcaggtagataagattagccccgaataggggctttttctgttggagggaatatatgagtaggacaacgaacaaaagacctggaaaagccaaatccggactttccagaaagcaa

SEQ ID NO: 13615 - DNA, 260 bp, Unknown
  Description of Unknown: LeftRegion for integrase B616 sequence
actggcgcatcgtctattttcgataagtgcgccgaaaaaatactgtggctaacgtattttaataataaaatgctaagcgaaggacagatcacgaaagaagaacatagaaagatacaacagaagatttccaagattgacgcttcgtgaatatcgtagtaaaataataatgactataatgacggaagcggtgtgatttcaaaatggaagatttctataaaatcaaagaagctctcaagattatgccgattactcaaataccc

SEQ ID NO: 13616 - DNA, 260 bp, Unknown; identical to SEQ ID NO: 13613
  Description of Unknown: LeftRegion for integrase B617 sequence

SEQ ID NO: 13617 - DNA, 260 bp, Unknown
  Description of Unknown: LeftRegion for integrase B618 sequence
tacaaattagaaactgaataaagaaaataaaaccgctcccggcggcaaccggaaacggctttatatagattgttacccgtcaaccgtgggctgactataataactccctagcaagtgttattatagcataggcccacaatctttgaaagggcttatttttatacccttttttagaaaaaaatagaaaggttgtgtatattatggcttatgctatgaaagtacctgctgccagtgccgacgatcggattgttgcgatctat

SEQ ID NO: 13618 - DNA, 260 bp, Unknown
  Description of Unknown: LeftRegion for integrase B619 sequence
caataagcccgtaatagagctgctgttgaaaagagacgaggatccggaaacctttgtctttgaattgcaacgtctcctgatgtgctaccaggtagccagccgggaagatagaaatgtggtatgggcggctctaaacaaatatgctgctcaggtagataagattagccccgtataggggctttttctgttggagggaatatatgagtaggacaacgaacaaaagacctggaaaagccaaatccggactttccaggaaacaa

SEQ ID NO: 13619 - DNA, 260 bp, Unknown; identical to SEQ ID NO: 13600
  Description of Unknown: LeftRegion for integrase B620 sequence

SEQ ID NO: 13620 - DNA, 260 bp, Unknown
  Description of Unknown: LeftRegion for integrase B621 sequence
caataagcccgtaatagagctgctgctgaaaagagacgaggatccggaaacctttgtctttgaattgcaacgtctcctgatgtgctaccaggtagccagccgggaagatagaaatgtggtatgggcggctctaaacaaatatgctgctcaggtagataagattagccccgaataggggctttttctgttggagggaatatatgagtaggacaacgaacaaaagacctgtaaaagccaaatccggactttccagaaaacaa

SEQ ID NO: 13621 - DNA, 260 bp, Unknown
  Description of Unknown: LeftRegion for integrase B622 sequence
aaatattatagaattgcgttttcaaaaataaaaacgcccacggcggcaaccgtgaacgttttaatagattgttacctgtcgacagaaagggccggctgtagtaactccctaccaagtgttattatagcatgggcctttttcttttgaaagggcttatttttatacccttttttagaaaaaatagaaaggttgtgtatgttatggcttgtgctatgaaagtacctgctaccagtgtcgacgatcggatcgttgcgatctat

SEQ ID NO: 13622 - DNA, 260 bp, Unknown; identical to SEQ ID NO: 13612
  Description of Unknown: LeftRegion for integrase B623 sequence

SEQ ID NO: 13623 - DNA, 260 bp, Unknown; identical to SEQ ID NO: 13602
  Description of Unknown: LeftRegion for integrase B624 sequence

SEQ ID NO: 13624 - DNA, 260 bp, Unknown
  Description of Unknown: LeftRegion for integrase B625 sequence
aatttagttgtgccattgcttctgaagatgaacaagatattattctgaagttccgcaagatgtcaaaaagaggaaagcgtctctttttggccatgatggaggaactggaagaaaaataaaaacagcgcccctgctctggaaaagtaaggcgctattttgtcaaacagatattacatatattccaacaaaggagcatccatatggcacgaaagagaactaatctaatcggcaacacgccgtctgtacgtgaaacaaaagtc

SEQ ID NO: 13625 - DNA, 260 bp, Unknown; identical to SEQ ID NO: 13559
  Description of Unknown: LeftRegion for integrase B626 sequence

SEQ ID NO: 13626 - DNA, 260 bp, Unknown
  Description of Unknown: LeftRegion for integrase B627 sequence
ggctcatgtgaagctggatttttttatcgcaggattggtgggacagtttacaaaatcagggtattaacgagtgaaaacagtacagataccttttcggacaagatttcccacattatttcaagagaggcgctgacagagaaagcggattatgataagatagagctaccacaaatgagtcagttgccggaagggagttcggcatgaacagaaccagacagacaactgacaaatcgaaaaacagaataactgctctttatgag

SEQ ID NO: 13627 - DNA, 260 bp, Unknown; identical to SEQ ID NO: 13614
  Description of Unknown: LeftRegion for integrase B628 sequence

SEQ ID NO: 13628 - DNA, 260 bp, Unknown; identical to SEQ ID NO: 13612
  Description of Unknown: LeftRegion for integrase B629 sequence

SEQ ID NO: 13629 - DNA, 260 bp, Unknown; identical to SEQ ID NO: 13612
  Description of Unknown: LeftRegion for integrase B630 sequence

SEQ ID NO: 13630 - DNA, 260 bp, Unknown; identical to SEQ ID NO: 13602
  Description of Unknown: LeftRegion for integrase B631 sequence

SEQ ID NO: 13631 - DNA, 260 bp, Unknown; identical to SEQ ID NO: 13614
  Description of Unknown: LeftRegion for integrase B632 sequence

SEQ ID NO: 13632 - DNA, 260 bp, Unknown
  Description of Unknown: LeftRegion for integrase B633 sequence
acaaattagaaactgaataaagaaaataaaaccgctcccggcggcaaccggaaacggctttatatagattgttacccgtcaaccgtgggctgactataataactccctagcaagtgttattatagcataggcccacaatctttgaaagggcttatttttatacccttttttaggaaaaaaatagaaaggttgtgtatgttatggcttatgctatgaaagtacctgctgccagtgccgacgatcggatcgttgcgatctat

SEQ ID NO: 13633 - DNA, 260 bp, Unknown
  Description of Unknown: LeftRegion for integrase B634 sequence
ttacaaattagaaactgaataaagaaaataaaaccgctcccggcggcaaccggaaacggctttatatagattgttacccgtcaaccgtgggctgactataataactccctagcaagtgttattatagcataggcccacaatctttgaaagggcttatttttatacccttttttagaaaaaatagaaaggttgtgtatattatggcttatgctatgaaagtacctgctgccagtgccgacgatcggattgttgcgatctat

SEQ ID NO: 13634 - DNA, 260 bp, Unknown
  Description of Unknown: LeftRegion for integrase B635 sequence
accggtgcgtcgtctattttcgataagtgcgccgaaaaaatactgtggctaacgtattttaataacaaaatgctaagcgaaggacagatcacgaaagaagaacatagaaagatacaacagaagatttccaagattgacgcttcgcgaatatcgtagtaaaataataatgactataatgacggaagcggtgtgatttcaaaatggaagatttctataaaatcaaagaagctctcaagattatgccgattactcaaataccc

SEQ ID NO: 13635 - DNA, 260 bp, Unknown
  Description of Unknown: LeftRegion for integrase B636 sequence
agttgtaactcttgttatcaatttaatgcataaaaaatagcgcccctgctctggtaaagtaaggcgctattttttagttactactctatccggcggtcaggtgtgcactgaccaacggttctcttgttaagtacattatatctattcatatactttttgtcaaacagatattacatatatttcaacaaaggagcatccatatggcgcgaaagagaactaatctaatcggcaacactccgtctgtacgcgaaacaaaagtc

SEQ ID NO: 13636 - DNA, 260 bp, Unknown; identical to SEQ ID NO: 13597
  Description of Unknown: LeftRegion for integrase B637 sequence

SEQ ID NO: 13637 - DNA, 260 bp, Unknown
  Description of Unknown: LeftRegion for integrase B638 sequence
accggcgcgtcgtctattttcgataagtgcgcagaaaaaatactgtggctaacgtattttaataacaaaatgctaagcgaaggacagatcacgaaagaagaacatagaaagatacaacagaagatttccaagattgacgcttcatgaatatcgtagtaaaataataatgactataatgacggaagcggtgtgatttcaaaatggaagatttctataaaatcaaagaagctctcaagattatgccgattactcaaataccc

SEQ ID NO: 13638 - DNA, 260 bp, Unknown
  Description of Unknown: LeftRegion for integrase B639 sequence
cggattacgattcgccgcaccttaaaacagtatacaaaaataaaacgcccacggcggcaaccgtgaacgttttatagattgttacccgtcaacccgtgggctgactataataactctctcgcaaagattattatagcataagcccacaatgtttgaaagggcttatttttgtacccttttttagaaaggttgtgtgtattatggcttatgcttcgcaaaatactgctgccagattcgatgatcggatcgtcgcgatctat

SEQ ID NO: 13639 - DNA, 260 bp, Unknown
  Description of Unknown: LeftRegion for integrase B640 sequence
cgccgcaccttaaaacggtatacaaaataaaaacgcccacggcggcaaccgtgaacgttttagcagtttgttacctgtcgacagaaaaggccggctgtagtaactccccaacagtgttattatagcataggcctttttcttttgaaagggcttatttttatacccttttttagaaaaaaaatagaaaggttgtgtatattatggcttatgctatgaaagtacccgctgccagtgccgacgatcggatcgttgcgatttat

SEQ ID NO: 13640 - DNA, 260 bp, Unknown
  Description of Unknown: LeftRegion for integrase B641 sequence
aaatattatagaattgcgttttcaaaaataaaaacgcccacggcggcaaccgtgaacgttttaatagattgttacctgtcgacagaaagggccggctgtagtaactccctaccaagtgttattatagcatgggcctttttcttttgaaagggcttatttttatacccttttttagaaaaaatagaaaggttgtgtgtattatggcttatgctatgaaagtacctgctgccagtgccgacgatcggatcgttgcgatctat

SEQ ID NO: 13641 - DNA, 260 bp, Unknown; identical to SEQ ID NO: 13612
  Description of Unknown: LeftRegion for integrase B642 sequence

SEQ ID NO: 13642 - DNA, 260 bp, Unknown
  Description of Unknown: LeftRegion for integrase B643 sequence
caataagcccgtaatagagctgctgctgaaaagagacgaggatctggaaacctttgtctttgaattgcaacgtctcctgatgtgctaccaggtagccagccgggaagatagaaatgtggtatgggcggctctaaacaaatatgctgctcaggtagataagattagccccgaataggggctttttctgttggagggaatatatgagtaggacaacgaacaaaagacctggaaaagccaaatccggactttccagaaaacaa

SEQ ID NO: 13643 - DNA, 260 bp, Unknown
  Description of Unknown: LeftRegion for integrase B644 sequence
ttcgccgcactttaaaacagtatacaaaaataaaacgcccgcggcggcaaccgtgaacgttttaatagattgttacctgtcgacagaaaaggccggctgtagtaactccctagcaagtgttattatagcataggcctttttcttttgaaagggcttattttttataccctttttagaaaaatagaaaggttgtgtatattatggcttatgctatgaaagtacccactgccagtgccgacgatcggatcgttgcgatctat

SEQ ID NO: 13644 - DNA, 260 bp, Unknown
  Description of Unknown: LeftRegion for integrase B645 sequence
caataagcccgtaatagagctgctgctgaaaagagacgaggatccggaaacctttgtctttgaattgcaacgtctcctgatgtgctaccaggtagcaagtcgggaagatagaaatgtggtatgggcagctctaaacaaatatgctgctcaggtagataagattagccccgtataggggctttttctgttggagggaatatatgagtaggacaacgaacaaaagacctggaaaagccaaatccggactttccaggaaacaa

SEQ ID NO: 13645 - DNA, 260 bp, Unknown; identical to SEQ ID NO: 13612
  Description of Unknown: LeftRegion for integrase B646 sequence

SEQ ID NO: 13646 - DNA, 260 bp, Unknown
  Description of Unknown: LeftRegion for integrase B647 sequence
ttcgccgcatcttgaaacagtatacaaaaataaaacgcccacggcggcaaccgtgaacgttttaatagattgttacctgtcgacagaaaaggccggctgtagtaactccctaccaagtgttattatagcatgggcctttttcttttgaaagggcttatttttatacccttttttagaaaaacagaaaggttgtgtatattatggcttatgctatgaaagtgcctgctgccagtgccgacgatcggatcgttgcgatctat

SEQ ID NO: 13647 - DNA, 260 bp, Unknown
  Description of Unknown: LeftRegion for integrase B648 sequence
tctctttttggccatgatggaggaactggaagaaaaataaaaacagcgcccctgctctggaaaagtaaggcgctattttcagtgattgctttgccggcggtcaggtgtacactggccaacggttctcttgttaagcacaatctattcatatactttttgtcaaacagatattacatatattccaacaaaggagcatccatatggcacgaaagagaactaatctaatcggcaacacgccgtctgtacgcgaaacaaaagtc

SEQ ID NO: 13648 - DNA, 260 bp, Unknown; identical to SEQ ID NO: 13610
  Description of Unknown: LeftRegion for integrase B649 sequence

SEQ ID NO: 13649 - DNA, 260 bp, Unknown
  Description of Unknown: LeftRegion for integrase B650 sequence
gtttcgatgcgcactgtcggatcgtgggagcgcggagactcttttccgaatgccgaacagctctggaacgctgcggtcgctctaaagtgcacaccaaacgatatcctgatgtggaatccgctgccagatgccgcaccggcatgcgccatgacagacaccgaacgcgatgtgctccaagatttccgccagagctcgcccgcatggcaatcgaacatcgcggtgacggcaaagctcgccgcgaacgagtcaaaggaaaactg

SEQ ID NO: 13650 - DNA, 260 bp, Unknown
  Description of Unknown: LeftRegion for integrase B651 sequence
actaattttagagtttgaacaagattgtaattaatattaaaaaccgtccttgctgcgaacaaggacggttatcggatataccgttgacaggaaatcctgtgatacgatacgacccagacaaccgtattgtatcacaagaacctgaaaaaatcaaagggtcctttttttgtacccttttttaagaaaggattgtgattaatatggcttacagaagcaccattactaccccatctgctgcttcacgcaaggtgaaggcagct

SEQ ID NO: 13651 - DNA, 260 bp, Unknown
  Description of Unknown: LeftRegion for integrase B652 sequence
gcgttgcaacggctcagccctatccgagccgactactccggcattgaatatgcagttatacagagtatacaagtctacccccccccccggcgttttgcataatttttgcatatccgttttgtgcatattaacatggcggtcccgcacagacggggccgcctttccttctacccttatcattcttttttggaggtccgatcatggcaaaactggctaagcgtatatccgaggttctaagtgagctaaaggctgccatatac

SEQ ID NO: 13652 - DNA, 260 bp, Unknown; identical to SEQ ID NO: 13614
  Description of Unknown: LeftRegion for integrase B653 sequence

SEQ ID NO: 13653 - DNA, 260 bp, Unknown
  Description of Unknown: LeftRegion for integrase B654 sequence
ttcgccgcaccttaaaacagtatacaaaaataaaacgcccacggcggcaaccgtgaacgttttaatagattgttacctgtcgacagaaagggccggctgtagtaactccctaccaagtgttattatagcatgggcctttttcttttgaaagggcttatttttataccctttttagaaaaaatagaaaggttgtgtatgttatggcttatgctatgaaagcacctgctaccagtgccgacgatcggatcgttgcgatctat

SEQ ID NO: 13654 - DNA, 260 bp, Unknown
  Description of Unknown: LeftRegion for integrase B655 sequence
aatttagttgtgccattgcttctgaagatgaacaagatattattctgaagttccgcaagatgtcaaaaagaggaaagcgtctctttttggccatgatggaggaactggaagaaaaataaaaacagcgcccctgctctggaaaagtaaggcgctattttgtcaaacagattttacatatattccaacaaaggagcatccatatggcacgaaagagaactaatctaatcggcaacacgccgtctgtacgcgaaacaaaagtc

SEQ ID NO: 13655 - DNA, 260 bp, Unknown
  Description of Unknown: LeftRegion for integrase B656 sequence
tcgccgcatcttaaaacagtatacaaaaataaaaacgcccacggcggcaaccgtgaacgttttaatagattgttacctgtcgacagaaaaggccggctgtagtaactccctaccaagtgttattatagcatgggcctttttcttttgaaagggcttattttttacgcccttttttaaaaaacagaaaggttgtgtatattatggcttatgctatgaaagtacctgctgccagtgccgacgatcggatcgttgcgatctat

SEQ ID NO: 13656 - DNA, 260 bp, Unknown; identical to SEQ ID NO: 13599
  Description of Unknown: LeftRegion for integrase B657 sequence

SEQ ID NO: 13657 - DNA, 260 bp, Unknown
  Description of Unknown: LeftRegion for integrase B658 sequence
tcgccgcaccttaaaacagtatacaaaaataaaacgcccacggcggcaaccgtgaacgttttaatagattgttacctgtcgacagaaaaggccggctgtagtaactccctagcaagtgttattatagcataggcctttttcttttgaaagggcttattttttatacccttttttagaaaaatagaaaggttgtgtatattatggcttatgctgcgaaaacacttgctgccagtgcagacgatcggatcgttgcgatctat

SEQ ID NO: 13658 - DNA, 260 bp, Unknown
  Description of Unknown: LeftRegion for integrase B659 sequence
ttcgccgcaccttaaaacggtatacaaaataaaaacgcccacggcggcaaccgtgaacgttttaatagattgttacctgtcgacgaaaaggccggctgtagtaactccctagcaagtgttattatagcataggcctttttcttttgaaagggcttattttttatacccttttttagaataatagaaaggttgtgtatattatggcttatgctatgaaagtacctgctgccagtgccgacgatcggatcgttgcgatctat

SEQ ID NO: 13659 - DNA, 260 bp, Unknown
  Description of Unknown: LeftRegion for integrase B660 sequence
aggctgcgtaattctgaaatttaactaaataacaaaaaccgccccggtattggcgtaccgaagcggaattgctaagattgtaacctacgaacctcgaaggatcgcgtggcataatctccctgaacaagagcattataccacacatccttccaatttgcatagggtgtattttttataccctttttcaggaaggtgttattatggcatatcgtttttcacagcaaactgctgcccctgataccagaaccgttgccctgtac

SEQ ID NO: 13660 - DNA, 260 bp, Unknown
  Description of Unknown: LeftRegion for integrase B661 sequence
ttacaaatcagaaactgaataaagaaaataaaaccgctcccggcggcaaccggaaacggctttatatagattgttacccgtcaaccgtgggctgactataataactccctagcaagtgttattatagcataggcccacaatctttgaaagggcttattttttatacccttttttagaaaaatagaaaggttgtgtatattatggcttatgctatgaaagtacccgctgccagtgccgatgatcggatcgttgcgatctat

SEQ ID NO: 13661 - DNA, 260 bp, Unknown; identical to SEQ ID NO: 13601
  Description of Unknown: LeftRegion for integrase B662 sequence

SEQ ID NO: 13662 - DNA, 260 bp, Unknown
  Description of Unknown: LeftRegion for integrase B663 sequence
cgccgaaatcgagagcggctgtattgccgtggtcgtggtggacggtacagacgggtttttaaaacaagtcgagttcggtgagaactccacctcgcttcactcgttcaatccgtattatcccgacatggagtttgtagatgccgaccagaaacgtttgcactttgtcggtcgcgtccgggaaatgaagcggaggttctgatatgcgccagaagtttaataccgacctctccatgttaaccccggaggaacagcagcagttt

SEQ ID NO: 13663 - DNA, 260 bp, Unknown
  Description of Unknown: LeftRegion for integrase B664 sequence
cttacaaatcagaaactgaataaagaaaataaaaccgctcccggcggcaaccggaaacggctttatatagattgttacccgtcaaccgtgggctgactataataactccctagcaagtgttattatagcataggcccacaatctttgaaagggcttatttttatacccttttttagaaaaatagaaaggttgtgtatgttatggcttatgctatgaaagtacccgctgccagtgccgacgatcggatcgttgcgatctat

SEQ ID NO: 13664 - DNA, 260 bp, Unknown
  Description of Unknown: LeftRegion for integrase B665 sequence
aatattatagaattgcattttcaaaaataaaaacgcccacggcggcaaccgtgaacgttttaatagattgttacctgtcgacagaaaaggccggctgtagtaactccctagcaagtgttattatagcataggcctttttcttttgaaagggcttattttttataccctttttttagaaaaatagaaaggttgtgtatattatggcttatgctatgaaagtacctgctgccagtgccgacgatcggatcgttgcgatctat

SEQ ID NO: 13665 - DNA, 260 bp, Unknown; identical to SEQ ID NO: 13612
  Description of Unknown: LeftRegion for integrase B666 sequence

SEQ ID NO: 13666 - DNA, 260 bp, Unknown; identical to SEQ ID NO: 13613
  Description of Unknown: LeftRegion for integrase B667 sequence

SEQ ID NO: 13667 - DNA, 260 bp, Unknown
  Description of Unknown: LeftRegion for integrase B668 sequence
cgcagaaattgagagcggctgtattgccgtggtcgtggtagacggtacagacgggtttttaaaacaagtcgagtttggtgagaactccacctcgcttcactcgtttaatccgtattatcccgacatggagtttgtagatgccgatcaaaaacgtttgcactttgtcggtcgcgtccgggaaatgaagcggaggttttaatatgcgtcagaagtttaaaatcgacctctccatgttaaccccggaagaacagcagcagttt

SEQ ID NO: 13668 - DNA, 260 bp, Unknown; identical to SEQ ID NO: 13602
  Description of Unknown: LeftRegion for integrase B669 sequence

SEQ ID NO: 13669 - DNA, 260 bp, Unknown
  Description of Unknown: LeftRegion for integrase B670 sequence
aaatattatagaattgcgttttcaaaaataaaaacgcccacggcggcaaccgtgaacgtttttaatagattgttacctgtcgacagaaaaggccggctgtagtaactccctaccaagtgttattatagcatgggcctttttcttttgaaagggcttatttttatacccttttttagaaaaatagaaaggttgtgtatattatggcttatgctatgaaagtacctgctgccagtgccgacgatctgatcgttgcgatctat

SEQ ID NO: 13670 - DNA, 260 bp, Unknown; identical to SEQ ID NO: 13602
  Description of Unknown: LeftRegion for integrase B671 sequence

SEQ ID NO: 13671 - DNA, 260 bp, Unknown
  Description of Unknown: LeftRegion for integrase B672 sequence
aaatattatagaattgcattttcaaaaataaaaacgcccacggcggcaaccgtgaacgttttaatagattgttacctgtcgacagaaaaggccggctgtagtaactccctagcaagtgttattatagcataggcctttttcttttgaaagggcttattttttatacccttttttagaaaaatagaaaggttgtgtatattatggcttatgctatgaaagtgcctgctgccagtgccgacgatcggatcgttgcgatctat

SEQ ID NO: 13672 - DNA, 260 bp, Unknown
  Description of Unknown: LeftRegion for integrase B673 sequence
acaggtcttttgattgtgtgcagtgacccggcgcaaaagaaaattgacagagccgatgccttgaatattccaatcatttcagagcagcaatggtatgaactcatgccagaacttgaagccgttggaatgtggaacggaaagcaaattctgtttgcggacaatgatggcatctaccgtgttgaagtggacggtgaaagctgatggccagaaaaaagaatattgctgctggcctcgatgccgtcatctatgcccggtactca

SEQ ID NO: 13673 - DNA, 260 bp, Unknown; identical to SEQ ID NO: 13612
  Description of Unknown: LeftRegion for integrase B674 sequence

SEQ ID NO: 13674 - DNA, 260 bp, Unknown; identical to SEQ ID NO: 13605
  Description of Unknown: LeftRegion for integrase B675 sequence

SEQ ID NO: 13675 - DNA, 260 bp, Unknown
  Description of Unknown: LeftRegion for integrase B676 sequence
aagggtaaagtggtaaaagggctgtatgaggcagatagagggcttattcatgtgagagcatgggtaggctcttttttagtgcgtgaaaataattatatagcccctgtataatttccccctaaaaaatgaggagggctgtgattatgtttattaaggctaagtagagccacaggataataagcataacaggaggtagcaggatgagtacaggagcagggcttagagctgtattttacgccagagtatccacagaagaagaa

SEQ ID NO: 13676 - DNA, 260 bp, Unknown
  Description of Unknown: LeftRegion for integrase B677 sequence
aaatattatagaattgcgttttcaaaaataaaaacacccacggcggcaaccgtggacgttttaatagattgttacctgtcgacagaaaaggccggctgtagtaactcccttgcaagtgttattatagcataggcctttttcttttgaaagggcttattttttatacccttttttagaaaaatagaaaggttgtgtatattatggcttatgctacgaaaacacttgctgccagtgccgatgatcggatcgttgcgatctat

SEQ ID NO: 13677 - DNA, 260 bp, Unknown; identical to SEQ ID NO: 13663
  Description of Unknown: LeftRegion for integrase B678 sequence

SEQ ID NO: 13678 - DNA, 260 bp, Unknown
  Description of Unknown: LeftRegion for integrase B679 sequence
tacaaattagaaactgaataaagaaaataaaaccgctcccggcggcaaccggaaacggctttatatagattgttacccgtcaaccgtgggctgactataataactccctagcaagtgttattatagcataggcccacaatctttgaaagggcttatttttatacccttttttagaaaaaaatagaaaggttgtgtgtgttatggcttatgctatgaaagtgcctgctgccagtgccgacgatcgggccgttgcgatctat

SEQ ID NO: 13679 - DNA, 260 bp, Unknown
  Description of Unknown: LeftRegion for integrase B680 sequence
tttttggccatgatggaggaactggaagaaaaataaaaacagcgcccctgctctggaaaagtaaggcgctattttcagtgattgctttgccggcggtcaggtgtacactgaccaacggttctcttgttaagcacattatatctattcatatactttttgtcaaacagatattacatatattccaacaaaggagcatccatatggcacgaaagaaaactaatctaatcggcaacacgccgtctgtacgcgaaacaaaagtc

SEQ ID NO: 13680 - DNA, 260 bp, Unknown
  Description of Unknown: LeftRegion for integrase B681 sequence
tccgatacgcttgttttgtccgcaaacggagagaccaacggtctgcaaaatctgtttgaagatatccgcttcgggcaaatagatggcgtcataattgaagatacaatcttttttggcgaaaattctacccgcttgacgcagattatagacttttttgccgctcatcaaacccgcatccaagtcgtcagggagaccgtgccatgcccgaaaaaataatcaattgtgccatttatacccgtaaatctactgaagaaggcttg

SEQ ID NO: 13681 - DNA, 260 bp, Unknown; identical to SEQ ID NO: 13606
  Description of Unknown: LeftRegion for integrase B682 sequence

SEQ ID NO: 13682 - DNA, 260 bp, Unknown
  Description of Unknown: LeftRegion for integrase B683 sequence
ggacgaactgcacgacgccgtcgcaaacggccacaccgagctgtgggaactggcagacgtttttgacgttacgatagatctcgttcgcaaagcggtgagctggtacaaatacggaaatttatattccgtttgaaactggttcgatttaagaaagaaaagctctccgaaataatcgaagagccaaataggtgatatgtaatatgtctgtagatattaaatgggccatcccacaaaccggatcgcaagtgacaacagagggc

SEQ ID NO: 13683 - DNA, 260 bp, Unknown
  Description of Unknown: LeftRegion for integrase B684 sequence
attcacccccaaaaaccacttgtcccagaaagagatgcctttgttctggaacttcagcggctccttgcctgttatcaactggcagatcaaagagatagggaaattgtatggtccgtactcaataaatatgtaccaaatatcatttagtaataaggacagccccaggcaggggctttctttatgtgcttgggagaaatatcatggcgagaagaaaaacgacttcaaggggcgtatctacgtccattcgagaaactaaagtt

SEQ ID NO: 13684 - DNA, 260 bp, Unknown; identical to SEQ ID NO: 13682
  Description of Unknown: LeftRegion for integrase B685 sequence

SEQ ID NO: 13685 - DNA, 260 bp, Unknown
  Description of Unknown: LeftRegion for integrase B686 sequence
ttcagccacaagcaccacttgttccagaaaaagacgcttttgtcctggagctccaacgtctcctcgcctgctatcaactggcagatcaaagagacagggaaattgtgtggtctgtgctcaacaaatatgtaccacatattgtttaaaatcaaaggatagccccatgcaggggctttctttatgcacttgggagaaatattatggtaagaagaaaaaccgctttaaggggcgtatctgcgtccactcgcataactaaagta

SEQ ID NO: 13686 - DNA, 260 bp, Unknown
  Description of Unknown: LeftRegion for integrase B687 sequence
tcttcaggaagtaagtggaaatattatgtgttgaaatcctcttccataccgcttgccgttcaaaggcttgggtatatctcatacgatgggcttcttactttgaagccacggcaatgccgccgaaaaagattggataaaacaatattggaagtgatggccgcttgatctcaggcggctttcattttacgaaaggagcattgatggaattttcaaaattgacaagagtagcgatatacattcgtgtttccacaactatgcag

SEQ ID NO: 13687 - DNA, 260 bp, Unknown
  Description of Unknown: LeftRegion for integrase B688 sequence
tcttcaggaagtaagtggaaatattatgtgttgaaatcctcttccataccgcttaccgttcaaaggcttgggtatatctcatacgatgggcttcttgctttgaagcctcggcaatgccgccgaaaaagattggataaaacaatattagaagtgatggccgcttgatctcaggcggctttcattttacgaaaggagcattgatggaattttcaaaattgacaagagtagcgatatacattcgtgtttccaccactatgcag

SEQ ID NO: 13688 - DNA, 260 bp, Unknown
  Description of Unknown: LeftRegion for integrase B689 sequence
gattgatatgctctacaagaagggccttgtcaacgaggcaacctatctgaatgtcaagcaaacctatccgcaaaagtgaacacttttccggcaagttgtcaaggatatcaggccagcgtccgtatcattgctgattctgttgttttcgggtattctcgccttgtcagaacaaatcagaagccataaaggaggaagatgctatgtacaatatgtctccgtactcattgtcccgttctttccgggacaaaccctgccgagca

SEQ ID NO: 13689 - DNA, 260 bp, Unknown
  Description of Unknown: LeftRegion for integrase B690 sequence
ttcagccacaagcaccacttgttccagaaaaagacgcttttgtcttggagcttcaacgcctcctcgcctgctatcaactggcagatcaaagagacagggaaattgtgtggtctgtgctcaacaaatatgtaccacatattgtttaaaatcaaaggatagccccatgcaggggctttcttcatgcacttgggagaaatattatggtaagaagaaaaaccgctttaaggggcgtatctgcgtccactcgcataactaaagta

SEQ ID NO: 13690 - DNA, 260 bp, Unknown
  Description of Unknown: LeftRegion for integrase B691 sequence
ctgattgatatgctctacaagaagggacttatcaacgaagcaacctattttaatgtgaaacgaacctatcagaacaagtagttttttgcgctgggttgtcaaggatgtcagcccagtgtccatatcattgcagattaaagattttttgagtattctcgttttgtcagaagaaatcaggaacactaaaggaggaagatgctatgtacaatatgtctccgtactcattatctcgatcttttcgggacaaaccctgtcgggca

SEQ ID NO: 13691 - DNA, 260 bp, Unknown; identical to SEQ ID NO: 13680
  Description of Unknown: LeftRegion for integrase B692 sequence

SEQ ID NO: 13692 - DNA, 260 bp, Unknown
  Description of Unknown: LeftRegion for integrase B693 sequence
ccatattccgataccctatggatagggtatctataccgtatccataccgtaccgatacctcgcgtgcgcgcgtgcgtgtgcgcgcgatcgtgcgcgcactgtctctgtacctgtatctgtatctgaggctgtatctgtaatctgtttctgattctgaatatctactactgcaaatctatcgttagaagggggtggcgctgttgccgagaaaacctgcaaagcacccggcgaagccgaagcggggcaagaagctggaaatc

SEQ ID NO: 13693 - DNA, 260 bp, Unknown
  Description of Unknown: LeftRegion for integrase B694 sequence
tccgatacgcttgctttgtccgcaaacggagagaccaacggtctgcaaaatctgtttgaagatatccgctttgggcagatcgatggcgtcataattgaagatacaaccttttttggcgaaaattctactcgtttaatacagattatggactttttcgccgctcaccaaacccgcatccaagttgtcagggagaccgtatcatgtccgaaaaaataatcaattgcgccatttatacccgtaaatctaccgaagaaggcctg

SEQ ID NO: 13694 - DNA, 260 bp, Unknown
  Description of Unknown: LeftRegion for integrase B695 sequence
ttcagccacaagcaccacttgttccagaaaaagacgcttttgtcctggagctccaacgcctcctcgcctgctatcaactggcagatcaaagagacagggaaattgtgtggtctgtgctcaacaaatatgtaccacatattgtttaaaatcaaagaatagccccatgcaggggctttctttatgcacttgggagaaatattatggcaagaagaaaaaccgctttaaggggcgtatctgcgtccactcgcataactaaagta

SEQ ID NO: 13695 - DNA, 220 bp, Unknown
  Description of Unknown: LeftRegion for integrase B696 sequence
ccggtcgatcacctcgtttatcttcttctcgacctcagccatggcctctgggctaggctcctccgccaatagataatcgcatttagacttcttataattaaatactattgtaaatttcaataagagttgtatatttgtactacacttaaagcaacaagatatgaagaaagctgcaatatatttaagggtttcaacttctgatcagaattatgacaggcaa

SEQ ID NO: 13696 - DNA, 260 bp, Unknown
  Description of Unknown: LeftRegion for integrase B697 sequence
ttcagccacaagcaccacttgttccagaaaaagacgcttttgtcttggaacttcaacgcctcctcgcctgctatcaactggcagatcaaagagacagggaaattgtgtggtctgtgctcaacaaatatgtaccacatattgtttaaaatcaaaggatagccccatgcaggggctttctttatgcacttgggagaaatattatggtaagaagaaaaaccgctttaaggggcgtatctgcgtccactcgcataactaaagta

SEQ ID NO: 13697 - DNA, 260 bp, Unknown
  Description of Unknown: LeftRegion for integrase B698 sequence
accctcagaaaaccttgatttttaggcattttccgtgctctcgctattttgtagattttttctctttcaaaaatgcaatttctaaaaatcagagcattttttattttttctacttcagatggacgttttatacgaaaaaattttgtgactgtccgagagaatgtccaaggacaatccctgaataaataaggaggaatcctatgccaaactatatagacaaactaaataagcaaaaggttgctatatacatcagagtttct

SEQ ID NO: 13698 - DNA, 260 bp, Unknown
  Description of Unknown: LeftRegion for integrase B699 sequence
attcaaccacaacatccattagttccagaaaaagacgcttttgttctggaacttcaacggctcctcgcctgttaccagctggccgaccaaagagacagggaaattgtgtggtctgtactcaataaatatgtaccacatatcatttaaaacaaaggacagccccgtgcaggggctttctttgtgtatttgggagaaacattatggcaagaaggaaaaccgccctaaggggcatatctgcgtctgtgcgtgaaaccaaagta

SEQ ID NO: 13699 - DNA, 260 bp, Unknown
  Description of Unknown: LeftRegion for integrase B700 sequence
ttcaaccacaaacacctttggttcccaaaaaagaggcttttgtcttggaacttcaaaggctccttgcctgctaccagttggcagatcaaagagacagggaaattgtgtggtctgtgctcaacaaatatgtgccacatatcatttaaaatcaaaggacagccccatgcaggggctttctttatgcacttgggagaaatattatggcaagaagaaaaaccgctttaaggggcgtatctgcgcccgctcgcataactaaagta

SEQ ID NO: 13700 - DNA, 260 bp, Unknown
  Description of Unknown: LeftRegion for integrase B701 sequence
ttccatcgctccgcaagctcgaccccatccgggccgactactccggtataacagatgcaattatacagagcatacaagtctacccccccccgttttgcataattattgcatatccgttttgtgcattataacagagcagccccgcacagacgggactgctcttccttttctgtatctcgttttcttttggaggtctgagcatggcgaaactggttagccgcatatccgaggctctttcggagatgaaagtcgcaatctat

SEQ ID NO: 13701 - DNA, 260 bp, Unknown
  Description of Unknown: LeftRegion for integrase B702 sequence
gtcattatgcaagaatgcggaaaagagacagctccagaaaaagaggagttgatcgaagaattgcaacgtcttctggcgtgctatcaaatcgcaagccgggacgacaagcaggtggtttgggcggcgttgaataaatatatgccgcagataaagcaagtatagccccgtgtaggggctatttctttttacggagggaaattatggcttataaggctaaagcgcccgattcaggcgcagaaaaggatatcagagtagcaatc

SEQ ID NO: 13702 - DNA, 260 bp, Unknown
  Description of Unknown: LeftRegion for integrase B703 sequence
atgaatttgtgggatttttatgtgcttccaaccaagaccatcgacagagaaaagcctaggcagaaaacaattactttgccatcattactaacattggatccgatcaaatgcacatacatagaattaaaagaaactgttgataaaattttagccgtctgagaaatcaggcggttttttaaagaacttaggaggacttgctaatgaataatactttatctgcacttaatataacaccctctccgccccggatgtgccgagta

SEQ ID NO: 13703 - DNA, 260 bp, Unknown
  Description of Unknown: LeftRegion for integrase B704 sequence
aataaaaaaagcagcccttagctgggctgcatattttaaacacatgttgcgcaaacatacgttttatttttagtattttatatgcaaacacttgatttagaacgaatcaaatattttatacttctgcttcaaagtttcaaaaatcttatactttttgaaaaattatcgataaaaccattaattaacgaaaggagttctttatgcctaacctaccatattccaacgaatttgcaaaattaattatagcgatttattgccgt

SEQ ID NO: 13704 - DNA, 260 bp, Unknown
  Description of Unknown: LeftRegion for integrase B705 sequence
cagatgaacttcgaaactggtgaaaaaatacaataataaaaaaccgcccttgctgcgaacaaggacggcttatcggatataccgttgacaggaaatcctgtgatacgatacgacccagacaaccgtattgtatcacagaatcctataaaaatcaaagggttctttttttgtacccttttttcagaaaggatgatattaatatggcttacaagaagaacattaccactccccctgctgccccgacgcgcaagttgaaggca

SEQ ID NO: 13705 - DNA, 260 bp, Unknown
  Description of Unknown: LeftRegion for integrase B706 sequence
aataaaaaaagcagcccttaaccgggctgcatattttaaccgcaagtttggcaaacatacgtttcttttttagctttttatatgcaaacacttgatttggactgaatcaaatattttatacttctgcttaaaagttttaaaaatcttatactttttgaaaaattatcgataaaaccattaattaacaaaaggagttctttatgccgaacctaccctattccaacgaatttacaaaattaattatagcgatttattgccgt

SEQ ID NO: 13706 - DNA, 260 bp, Unknown
  Description of Unknown: LeftRegion for integrase B707 sequence
ctgtatgagccatcatccaaaggcaatgacagcgagcgtgatgcttacgttcaggaactccaacgtttgctcgcttgctatcagcttgccagttcagatgataaaaatgtcgtttgggcagtgctgaacaaatatgcaccgcatatcgacacgatatagccccaggcattgggcttttcttgttgtatgggaaaatcattatgagaaataaatcattggcaggaagagccaataaccgggcagaacgccctcgtaaggtt

SEQ ID NO: 13707 - DNA, 260 bp, Unknown
  Description of Unknown: LeftRegion for integrase B708 sequence
acataaaatcgactaaatttaacataaaataacacgaatttgacacgatattgtaatgacttttacaaacaaagtatgatactatagtatcctaggttataattctaggtattgcatttaaggcaatataagtttttattctaaataaacacaaaggaaattcattcttttgtgtttttttgtaaaggggatgataataaatgaatgaaaacaaaaaagtaatcgtaggactttatcctcgtgtttcaactgaagatcaa

SEQ ID NO: 13708 - DNA, 260 bp, Unknown
  Description of Unknown: LeftRegion for integrase B709 sequence
ctgtatgagccatcatccaaaggcaatgacagcgagcgtgatgcttacgttcaggaactccaacgtttgctcgcttgctatcagcttgccagttcagatgataaaaatgtcgtttgggcagtgctgaacaaatatgcaccgcatatcaacacgatatagccccaggcatggggcttttcttgttgtatgggaaaattattatgagaaataaatcattggcaagaagagccaataaccgggcagaacgccctcgtaaggtt

SEQ ID NO: 13709 - DNA, 260 bp, Unknown
  Description of Unknown: LeftRegion for integrase B710 sequence
atatcgccaactggtcggccgctcaaggtgcagctaccgcaccgcagcccgttcagcaggtagtggagcagaaaccgtctcccgccgatgaaatccgcaaatacaagggcctgctggatgacggtatcatcacgcaggaagaatttgaagctaagaaaaagcaactgctgggcctgtaaatttgaaaggagcgtgacggcatgagaaaaaagtccaacctcaatgcggctactcgtgccgtcatctatgccaggtattcc

SEQ ID NO: 13710 - DNA, 260 bp, Unknown; identical to SEQ ID NO: 13662
  Description of Unknown: LeftRegion for integrase B711 sequence

SEQ ID NO: 13711 - DNA, 260 bp, Unknown
  Description of Unknown: LeftRegion for integrase B712 sequence
ctccgcaatctatcgactatgaagccaggacgggtgttttcaaggggtccggcaaaaagccgtatgaggtcaccgaaaccacctgcacctgccgagattattttgtccgcaagctgccgtgcaagcatatctaccggctgcgcatggagcttgccaaggctgacggcgaatagttttcaccagaaaaggagcatgacggcatgagaaaaaagtccaacctcaatgcggctactcgtgccgtcatctatgccaggtattcc

SEQ ID NO: 13712 - DNA, 260 bp, Unknown
  Description of Unknown: LeftRegion for integrase B713 sequence
gtcattatgcaagaatgtgaaaaagagacagctccagaaaaagaggagttgatcgaagaattgcaacgtcttctggcgtgctatcaaatcgcaagccgggacgacaagcaggtggtttgggcggcgttgaataaatatatgccgcagataaagcaagtatagccccgtgtaggggctatttctttttacggagggaaattatggcttataaggctaaagcgcccgattcaggcgcagaaaaggatatcagagtagcaatc

SEQ ID NO: 13713 - DNA, 260 bp, Unknown
  Description of Unknown: LeftRegion for integrase B714 sequence
atgaatttgtgggatttttatgtgcttccaaccaagaccatcgacagagaaaagcctaggcagaaaacaattactttgccatcattactaacattggatccgatcaaatgcacatacatagaattaaaagaaactgttgataaaattttagccgtctgagaaatcaggcggttttttaaagaacttaggaggacttgctaatgaataatactttatctgcacttaatataacgccctctccgccccggatgtgccgagta

SEQ ID NO: 13714 - DNA, 260 bp, Unknown
  Description of Unknown: LeftRegion for integrase B715 sequence
atgaatttatgggatttttatgtgcttccagctaaaaccattgacagagaaaaacaaaggcagaaaataattactttgccgtcgttgttaacattaaatccgatcaaatgtacttatttagaattaaaagaaactgttgataaaattttagccgtctgagaaatcaggcggctttttaaagaacttaggaggacttgctaatgaataatactttatctgcacttaatataacgccctctccgccccggatgtgtcgagtg

SEQ ID NO: 13715 - DNA, 260 bp, Unknown
  Description of Unknown: LeftRegion for integrase B716 sequence
ctatatgagccatcatctaagggcaatgatagtgaacgcgatgcttatgtgcaggaactccagcgattattggcttgctatcagcttgccagttcagatgataagaatgtcgtttgggctgtgctgaataaatacgcaccgcatatcgacacgatatagccccaggcatggggcttttcttgttatatgggaaaatcatcatgagaaataaatcattggcaggaagagccaataaccgggcagaacgccctcgtaaggtt

SEQ ID NO: 13716 - DNA, 260 bp, Unknown; identical to SEQ ID NO: 13714
  Description of Unknown: LeftRegion for integrase B717 sequence

SEQ ID NO: 13717 - DNA, 260 bp, Unknown
  Description of Unknown: LeftRegion for integrase B718 sequence
gttatgatattttccgtgacaaagagggcgtattcgttattccatacggagcgcagcaggtaaaacagccagatgggcaatatgtttatgattttccgaacgatgaagtaaccgatatgctgaataagcatcattgcaatagatgtgctggcggttatgttacaaaggcgcgcgagtaagcccgaaaggagcgtgacggcatgaaaaagcgaatcaacactaattccgcagcccgtgccgtcatctacgcacgttattcc

SEQ ID NO: 13718 - DNA, 260 bp, Unknown
  Description of Unknown: LeftRegion for integrase B719 sequence
atgaatttgtgggatttttatgtgcttccgaccaagaccatcgacagagaaaagccgaggcagaaaacaattactttgccatcattactaacattggatccgatcaaatgcacatacatagaattaaaagaaactgttgataaaattttagccgtctgagaaatcaggcggttttttaaagaacttaggagaacttgctaatgaataatactttatctgcacttaatataacaccctctcctccccggatgtgccgagta

SEQ ID NO: 13719 - DNA, 260 bp, Unknown
  Description of Unknown: LeftRegion for integrase B720 sequence
atgaatttatgggatttttatgtgcttccagctaaaaccattgacagagaaaaacaaaggcagaaaataattactttgccatcgttgttaacattaaatccgatcaaatgtacatacatagaattaaaagaaactgttgataaaattttagccgtctgagaaatcaggcggttttttaaagaacttaggagaacttgctaatgaataatactttatctgcacttaatataacgccctctcctccccggatgtgccgagta

SEQ ID NO: 13720 - DNA, 260 bp, Unknown; identical to SEQ ID NO: 13714
  Description of Unknown: LeftRegion for integrase B721 sequence

SEQ ID NO: 13721 - DNA, 260 bp, Unknown
  Description of Unknown: LeftRegion for integrase B722 sequence
caataaaaaagcagcccttaaccgggctgcatattttaaacacaagccacacgaacatacgtttcgtttttggctttttatatgcaaacacttgatttggactgaatcaaatattttatacttctgcttcaaagtttcaaaaatcttatactttttgaaaaattatcgataaaaccattaattaacgaaaggagttctttatgcctaacctaccctattccaacgaatttgcaaaattaattatagcgatttattgccgt

SEQ ID NO: 13722 - DNA, 260 bp, Unknown
  Description of Unknown: LeftRegion for integrase B723 sequence
gtcattatgcaagaatttgaaaaagagacagctccagaaaaagaggagttgatcgaagaattgcaacgtcttctggcgtgctatcaaatcgcaagccgggacgacaagcaggtggtttgggcggcgttgaataaatatatgccgcagataaagcaagtatagccccgtgtaggggctatttctttttacggagggaaattatggcttataaggctaaagcgccagattcaggcgcagaaaaggatatcagagtagcaatc

SEQ ID NO: 13723 - DNA, 260 bp, Unknown
  Description of Unknown: LeftRegion for integrase B724 sequence
aataaaaaaagcagcccttagctgggctgcatattttaaacacatgttgcacaaacatacgttttatttttagtattttatatgcaaacacttgatttagaacgaatcaaatattttatacttctgcttcaaagtttcaaaaatcttatactttttgaaaaattatcgataaaaccattaattaacgaaaggaattctttatgcctaacctaccctattccaacgaatttgcaaaattaattatagcaatttattgccgt

SEQ ID NO: 13724 - DNA, 260 bp, Unknown
  Description of Unknown: LeftRegion for integrase B725 sequence
gagatacagtatgcagctgtcaatgttgaaacaattacgctcgttaaaacttataagtgaagcagagtatcagctggtagagaaaaaattaaaaaaagattatggtgttatttctaatattaccgcttgactattatagtgttgcgttgtaaaattatatcaacactacggtaggaacacaaaaagaaaggagcggtcaaatggaagttgaaatcattaaggcgaagggtgctggtgaggatacttctacgggaagaaag

SEQ ID NO: 13725 - DNA, 260 bp, Unknown
  Description of Unknown: LeftRegion for integrase B726 sequence
acaataaaaagcagcccttagctgggctgcatattttaaacacaagttgtacaaacatacgttttatttttggtgttttatatacaaacacttgatttagaacgaatcaaatattttatacttctgcttcaaagtttcaaaaatcttatactttttgaaaaattatcgataaaaccattaattaacgaaaggagttctttatgcctaacctaccctattccaacgaatttgcaaaattaattatagcgatttattgccgt

SEQ ID NO: 13726 - DNA, 260 bp, Unknown; identical to SEQ ID NO: 13712
  Description of Unknown: LeftRegion for integrase B727 sequence

SEQ ID NO: 13727 - DNA, 260 bp, Unknown; identical to SEQ ID NO: 13714
  Description of Unknown: LeftRegion for integrase B728 sequence

SEQ ID NO: 13728 - DNA, 260 bp, Unknown
  Description of Unknown: LeftRegion for integrase B729 sequence
catatacgaaagagcaaagccagaagacaaatacgttgtctgggctttgctccaaagatacttaaagaatgatatagaagtagaggcgttcaggagcctcttagagacgcttgaaaaatagtatagtaattatattaagaggcacaaggaaacgcattagaacgtccttgtgcctcgtttaatctgtgtgaggtgatatgatgataaacattgatgaaaagctatcaaagaaaaaggctgctggctatatcagagtatca

SEQ ID NO: 13729 - DNA, 260 bp, Unknown
  Description of Unknown: LeftRegion for integrase B730 sequence
caccatgctacaaaagttggacccgtatttcgcagactatgatggcatccgtgatgccgttgtccgttcgctggatgtgtactcccctcgcaattcgcataattcttagtgttcttttttgtgcataacaaaaaagcagccccgcactacgcacggagctgctttttcttcagccatcattatcttctggaggtttcgcaatgggctatgtgacgaagaaagcggcacaacgctttgaggaaaagaaagccgccatatac

SEQ ID NO: 13730 - DNA, 260 bp, Unknown
  Description of Unknown: LeftRegion for integrase B731 sequence
tatgctgcaaaagctggacccataccttgtagactatggcagcatccgtgatgccgttgtcgattccttgaatgtgtaccccccccccgacattttgcatagtttctatcattcctttttgtgcataacagaaaagcagccccgcactacgcacggagctgctttttcttcagctatcattatcttctggaggttccgcaatgggctatgtggtgaagaaggcggcacaacgctttgaggaaaagaaagccgccatatac

SEQ ID NO: 13731 - DNA, 260 bp, Unknown
  Description of Unknown: LeftRegion for integrase B732 sequence
tatattatagcaaatatgctttgaatgtcaattgaaaaaccgcccctgcagcaacagagacggttcaggaatatatccgaagatgatactccaaacatgcaaaaatattgtatcatcttcggaacagcttcgcaagcggaacacccgttccccgctggctgttatttttatacccatttttagaagaaaggtgatacattatggcttatccaacgaaaaacactgctgccgacaatcgaatcatcgcaatctatgtgcgt

SEQ ID NO: 13732 - DNA, 260 bp, Unknown
  Description of Unknown: LeftRegion for integrase B733 sequence
actatgctgcaaaagctggacccataccttgtagactatggcagcatccgtgatgccgttgtcgattccttgaatgtgtaccccccccgacattttgcatagtttctatcattcctttttgtgcataacagaaaagcagccccgcactacgcacggagctgctttttcttcagctatcattatcttctggaggttccgcaatgggctatgtggtgaagaaggcggcacaacgctttgaggaaaagaaagccgccatatac

SEQ ID NO: 13733 - DNA, 260 bp, Unknown
  Description of Unknown: LeftRegion for integrase B734 sequence
atgctgcaaaagctggacccataccttgcagactatggcagcatccgtgatgccgttgttcattcgctggatgtgtacccccctccccgacattttgcataatttctttcattcctttttgtgcataacagaaaagcagccccgcactacgcacggagctgctttttcttcagctatcattatcttctggaggtttcgcaatgggctatgtgacgaagaaggcggcacaacgctttgaggaaaagaaagccgccatatac

SEQ ID NO: 13734 - DNA, 260 bp, Unknown
  Description of Unknown: LeftRegion for integrase B735 sequence
atcgtaatattcttttgtattaatgtcaatattaaaaccggctcctgttggtgcaggaaccggcaatagaatatatccgaagataataccctaaacacacaaaatattgtatcatcttcggaacagcttcgcaagcggaacacccgttccccgctggctgttatttttatactcattttttagaagaaaggtgatgcatgatggcttatccaatgaaaaacactgctgccgacaatcgaatcatcgcaatctatgtgcgt

SEQ ID NO: 13735 - DNA, 260 bp, Unknown
  Description of Unknown: LeftRegion for integrase B736 sequence
ctatgctgcaaaagctggacccataccttgtagactatggcagcatccgtgatgccgttgtcgattccttgaatgtgtaccccccccccacattttgcatagtttctatcattcctttttgtgcataacagaaaagcagccccgcactacgcacggagctgctttttcttcagctatcattatcttctggaggttccgcaatgggctatgtggtgaagaaggcggcacaacgctttgaggaaaagaaagccgccatatac

SEQ ID NO: 13736 - DNA, 260 bp, Unknown
  Description of Unknown: LeftRegion for integrase B737 sequence
gcaaaagctggacccataccttgtagactatggcagcatccgtgatgccgttgtcgattccttgaatgtgtaccccctccccccccccgacattttacatagtttctatcattcctttttgtgcataacagaaaagcagccccgcactacgcacggagctgctttttcttcagctatcattatcttctggaggttccgcaatgggctatgtggtgaagaaggcggcacaacgctttgaggaaaagaaagccgccatatac

SEQ ID NO: 13737 - DNA, 260 bp, Unknown
  Description of Unknown: LeftRegion for integrase B738 sequence
ctgctaccaacaggaaccggcaaacgccctgtccgtacaacagacaactacctaggacgattttactataacacctccggagatgctacagcttcagaccaaaaatattgtatcatcttcgggcagcctatgcaagcggaacacctgttccccgctggctgttatttttatactcattttttgaagaaaggtgatgcatgatggcttatccaacaaaaaacactgctgccgacaaccggattatcgcaatctatgtgcgt

SEQ ID NO: 13738 - DNA, 260 bp, Unknown
  Description of Unknown: LeftRegion for integrase B739 sequence
ccctctcgacatgaatttgtgggatttttatgtgctttcgaccaagaccatcgacagagaaaagccgaggcagaaaacaattactttgccatcattactaacattggatccgatcaaatgcacatacatagaattaaaagaaactattgataagattttagccgcctgattttcagacggttttttaggagggatagcctatgaatactttatctgcacttaatataacgccctctcctccccggatgtgccgagtagca

SEQ ID NO: 13739 - DNA, 260 bp, Unknown
  Description of Unknown: LeftRegion for integrase B740 sequence
ccctctcgacatgaatttgtgggatttttatgtgcttccgaccaagaccatcgacagagaaaagcctaggcagaaaacaattactttgtcatcattactaacattggatccgatcaaatgcacatacatagaattaaaagaaactattgataagattttagccgcctgattttcagacggttttttaggagggatagcctatgaatactttatcttcacttaatataacgccctctccgccccggatgtgccgagtagca

SEQ ID NO: 13740 - DNA, 260 bp, Unknown
  Description of Unknown: LeftRegion for integrase B741 sequence
tatgctgcaaaagctggacccataccttgcagactatggcagcatccgtgatgccgttgttcattcgctggatgtgtacccccctccccgacattttgcataatttctttcattccttttgtgcataacagaaaagcagccccgcactacgcacggagctgctttttcttcagctatcattatcttctggaggtttcgcaatgggctatgtgacgaagaaggcggcacaacgctttgaggaaaagaaagccgccatatac

SEQ ID NO: 13741 - DNA, 260 bp, Unknown
  Description of Unknown: LeftRegion for integrase B742 sequence
tatgctgcaaaagctggacccataccttgcagactatggcagcatccgtgatgccgttgtcgattccctgaatgtgtaccccccccccgacattttgcatagtttctatcattcctttttgtgcataacagaaaagcagccccgcactacgcacggagctgctttttcttcagctatcattatcttctggaggtttcgcaatgggctatgtgacgaagaaggcggcgcaacgctttgaggaaaagaaagccgccatatac

SEQ ID NO: 13742 - DNA, 260 bp, Unknown
  Description of Unknown: LeftRegion for integrase B743 sequence
atgctgcaaaagctggacccataccttgcagactatggcagcatccgtgatgccgttgtcgattccttgaatgtgtacccccccccccgacattttgcatagtttctatcattcctttttgtgcataacagaaaagcagccccgcactacgcacggagctgctttttcttcagctatcattatcttctggaggtttcgcaatgggctatgtgacgaagaaggcggcacaacgctttgaggaaaagaaagccgccatatac

SEQ ID NO: 13743 - DNA, 260 bp, Unknown
  Description of Unknown: LeftRegion for integrase B744 sequence
tgctgcaaaagctggacccataccttgcagactatggcggcatccgtgatgccgttatccattcgctggatgtgtatcccccccccccgacaatttgcataattcttagcgttcttttttgtgcataacagaaaggcagccccgcactacgcacggagctgctttttcttcagctatcattatcttctggaggtttcgcaatgggctatgtgacgaagaaggcggcacaacgctttgaggaaaagaaagccgccatatac

SEQ ID NO: 13744 - DNA, 260 bp, Unknown
  Description of Unknown: LeftRegion for integrase B745 sequence
atacttttgatccgtcgtccgacgcttatctgactgccgaaaaggacggcaccgttatcatggaaggctttggctcattccctgcttatgctcacaaaggcatggttcttatgcagaccgacaaccttccccaggaagtgattgacctgttcgatgccatgtaaagctccacattgtctttctgcaaaggtggtgtccctatgaagaaacaaccaaccggcggcaagcggcttgttgcctactaccgctacagcggcggc

SEQ ID NO: 13745 - DNA, 260 bp, Unknown
  Description of Unknown: LeftRegion for integrase B746 sequence
tatgctgcaaaagctggacccataccttgcagactatggcggcatccgtgatgccgttatccattcgctggatgtgtatcccccccccgacaatttgcataattcttagcgttcttttttgtgcataacagaaaggcagccccgcactacgcacggagctgctttttcttcagctatcattatcttctggaggtttcgcaatgggctatgtgacgaagaaggcggcacaacgctttgaggaaaagaaagccgccatatac

SEQ ID NO: 13746 - DNA, 260 bp, Unknown
  Description of Unknown: LeftRegion for integrase B747 sequence
atgctgcaaaagctggacccataccttgcagactatggcagcatccgtgatgccgttgtcgattccttgaatgtgtacccccccccccgacattttgcatagtttctatcattcctttttgtgcataacagaaaagcagccccgcactacgcacggagctgctttttcttcagctatcattatcttctggaggtttcgcaatgggctatgtgacgaggaaggcggcacaacgctttgaggaaaagaaagccgccatatac

SEQ ID NO: 13747 - DNA, 260 bp, Unknown
  Description of Unknown: LeftRegion for integrase B748 sequence
acaaaagttggagccataccgcgctgactatggcggcatccgagatgccgttatccattcgctggatgtgtacccccctcccactcccgacaatttgcataattcttagcgttcttttttgtgcataacagaaaagcagccccgcactacgcacggagctgctttttcttcagttatcattatcttctggaggtttcgcaatgggctatgtgacgaagaaggcggcacaacgctttgaggaaaagaaagccgccatatac

SEQ ID NO: 13748 - DNA, 260 bp, Unknown
  Description of Unknown: LeftRegion for integrase B749 sequence
aagctggacccataccttgcagactatggcagcatccgtgatgccgttgtcgattccctgaatgtgtacccccccccccccaccccccgacattttgcatagtttctatcattcctttttgtgcataacagaaaagcagccccgcactacgcacggagctgctttttcttcagctatcattatcttctggaggtttcgcaatgggctatgtgacgaagaaggcggcgcaacgctttgaggaaaagaaagccgccatatac

SEQ ID NO: 13749 - DNA, 260 bp, Unknown
  Description of Unknown: LeftRegion for integrase B750 sequence
tatgctgcaaaagctggacccataccttgcagactatggcagcatccgtgatgccgttgtcgattccttgaatgtgtaccccccccccgacattttgcatagtttctatcattcctttttgtgcataacagaaaagcagccccgcactacgcacggagctgctttttcttcagctatcattatcttctggaggttccgcaatgggctatgtggtgaagaaggcggcacaacgctttgaggaaaagaaagccgccatatac

SEQ ID NO: 13750 - DNA, 260 bp, Unknown; identical to SEQ ID NO: 13730
  Description of Unknown: LeftRegion for integrase B751 sequence

SEQ ID NO: 13751 - DNA, 260 bp, Unknown
  Description of Unknown: LeftRegion for integrase B752 sequence
ctatgctgcaaaagctggacccataccttgcagactatggcagcatccgtgatgccgttgtcgattccttgaatgtgtacccccccccgacattttgcatagtttctatcattcctttttgtgcataacagaaaagcagccccgcactacgcacggagctgctttttcttcagctatcattatcttctggaggtttcgcaatgggctatgtgacgaagaaggcggcacaacgctttgaggaaaagaaagccgccatatac

SEQ ID NO: 13752 - DNA, 260 bp, Unknown
  Description of Unknown: LeftRegion for integrase B753 sequence
accatgctgcaaaagctggacccataccttgcagactatggcagcatccgtgatgccgttgtcgattccttgaatgtgtaccccccccgacattttgcatagtttctatcattcctttttgtgcataacagaaaagcagccccacactacgcacggagctgctttttcttcagctatcattatcttctggaggtttcgcaatgggctatgtgacgaagaaggcggcacagcgctttgaggaaaagaaagccgccatatac

SEQ ID NO: 13753 - DNA, 260 bp, Unknown
  Description of Unknown: LeftRegion for integrase B754 sequence
ccctctcgacatgaatttgtgggatttttatgtgcttccgaccaagaccatcgacagagaaaagcctagtcagaaaacaattactttgccatcattactaacattggatccgatcaaatgcacatacatagaattaaaagaaactattgataagattttagccgtctgaaaatcaggcggttttttaggagggatagcctatgaatactttatctgcacttaatataacgccctctccaccaagaatgtgtcgagtagca

SEQ ID NO: 13754 - DNA, 260 bp, Unknown
  Description of Unknown: LeftRegion for integrase B755 sequence
caaaagttggagccataccgcgctgactatggcggcatccgagatgccgttatccattcgctggatgtgtacccccctcccccctcccgacaatttgaataattctcagtgttcttttttgtgcataacggaaaagcagccccgcactacgcacggagctgctttttcttcagctatcgttatcttctggaggtttcacaatgggctatgtgacgaagaaggcggcacaacgctttgaggagaagaaagccgccatatac

SEQ ID NO: 13755 - DNA, 260 bp, Unknown
  Description of Unknown: LeftRegion for integrase B756 sequence
actatgctgcaaaagctggacccataccttgcagactatggcagcatccgtgatgccgtcgtcgattccttgaatgtgtaccccccccgacattttgcatagtttctatcattcctttttgtgcataacagaaaagcagccccgcactacgcacggagctgctttttcttcagctatcattatcttccggaggttccgcaatgggctatgtggtgaagaaggcggcacaacgctttgaggaaaagaaagccgccatatac

SEQ ID NO: 13756 - DNA, 260 bp, Unknown; identical to SEQ ID NO: 13402
  Description of Unknown: LeftRegion for integrase B757 sequence

SEQ ID NO: 13757 - DNA, 260 bp, Unknown
  Description of Unknown: LeftRegion for integrase B758 sequence
atgctgcaaaagctggacccataccttgtagactatggcagcatccgtgatgccgttgtcgattccttgaatgtgtacccccccccccgacattttgcatagtttctatcattcctttttgtgcataacagaaaagcagccccgcactacgcacggagctgctttttcttcagctatcattatcttctggaggttccgcaatgggctatgtggtgaagaaggcggcacaacgctttgaggaaaagaaagccgccatatac

SEQ ID NO: 13758 - DNA, 260 bp, Unknown
  Description of Unknown: LeftRegion for integrase B759 sequence
tatgctgcaaaagctggacccgtacctcgcaaactatggcggcatccgggatgccgtcgttcattctctggatgtgtaccccccccccaacattttgcataatttctatcattcctttttgtgcataacagaaaagcagccccgcactacgcacggagctgctttttcttcagctatcattatcttctggaggtttcgcaatgggctatgtgacgaagaaggcggcacaacgctttgaggaaaagaaagccgccatatac

SEQ ID NO: 13759 - DNA, 260 bp, Unknown; identical to SEQ ID NO: 13745
  Description of Unknown: LeftRegion for integrase B760 sequence

SEQ ID NO: 13760 - DNA, 260 bp, Unknown
  Description of Unknown: LeftRegion for integrase B761 sequence
ctatgctgcaaaagctggacccataccttgcagactatggcagcatccgtgatgccgttgtcgattccttgaatgtgtacccccccccgacattttgcatagtttctatcattcctttttgtgcataacagaaaagcagccccgcactacgcacggagctgctttttcttcagctatcattatcttctggaggttccgcaatgggctatgtggtgaagaaggcggcacaacgctttgaggaaaagaaagccgccatatac

SEQ ID NO: 13761 - DNA, 260 bp, Unknown; identical to SEQ ID NO: 13757
  Description of Unknown: LeftRegion for integrase B762 sequence

SEQ ID NO: 13762 - DNA, 260 bp, Unknown
  Description of Unknown: LeftRegion for integrase B763 sequence
atgctgcaaaagctggacccataccttgcagactatggcagcatccgtgatgccgttgtcgattccctgaatgtgtacccccccccccgacattttgcatagtttctatcattcctttttgtgcataacagaaaagcagccccgcactacgcacggagctgctttttcttcagctatcattatcttctggaggttccgcaatgggctatgtggtgaagaaggcggcacaacgctttgaggaaaagaaagccgccatatac

SEQ ID NO: 13763 - DNA, 260 bp, Unknown
  Description of Unknown: LeftRegion for integrase B764 sequence
tatgctgcaaaagctggacccataccttgtagactatggcagcatccgtgatgccgttgtcgattctttgaatgtgtaccccccccccgacattttgcatagtttctatcattcctttttgtgcataacagaaaagcagccccgcactacgcacggagctgctttttcttcagctatcattatcttctggaggttccgcaatgggctatgtggtgaagaaggcggcacaacgctttgaggaaaagaaagccgccatatac

SEQ ID NO: 13764 - DNA, 260 bp, Unknown; identical to SEQ ID NO: 13757
  Description of Unknown: LeftRegion for integrase B765 sequence

SEQ ID NO: 13765 - DNA, 260 bp, Unknown
  Description of Unknown: LeftRegion for integrase B766 sequence
tatgctgcaaaagctggacccatatcttgcagactatggcagcatccgtgatgccgttgtcgattccttgaatgtgtaccccccccccgacattttgcatagtttctatcattcctttttgtgcataacagaaaagcagccccgcactacgcacggagctgctttttcttcagctatcattatcttctggaggtttcgcaatgggctatgtgacgaagaaggcggcacaacgctttgaggaaaagaaagccgccatatac

SEQ ID NO: 13766 - DNA, 260 bp, Unknown
  Description of Unknown: LeftRegion for integrase B767 sequence
acaaaagttggagccataccgcgctgactatggcggcatccgagatgccgttatccattcgctggatgtgtacccccctcccactcccgacaatttgcataattcttagcgttcttttttgtgcataacagaaaagcagccccgcactacgcacggagctgctttttcttcagctatcattatcttctggaggtttcgcaatgggctatgtgacgaagaaggcggcacaacgctttgaggaaaagaaagccgccatatac

SEQ ID NO: 13767 - DNA, 260 bp, Unknown
  Description of Unknown: LeftRegion for integrase B768 sequence
atgctgcaaaagctggatccataccttgcagactatggcagcatccgtgatgccgttgttcattcgctggatgtgtacccccctccccgacattttgcataatttctttcattcctttttgtgcataacaaaaaagcagccccgcactacgcacggagctgctttttcttcagctatcattatcttctggaggtttcgcaatgggctatgtaacgaagaaggcggcacaacgctttgaggaaaagaaagccgccatatac

SEQ ID NO: 13768 - DNA, 260 bp, Unknown
  Description of Unknown: LeftRegion for integrase B769 sequence
atgctgcaaaagctggacccatacattgcagactatggcagcattcgtgatgccgttgttcattcgctggatgtgtaccccccttcccgacattttgcataatttctttcattcctttttgtgcataacagaaaagcagccccgcactacgcacggagctgctttttcttcagctatcattatcttctggaggtttcgcaatgggctatgtgacgaagaaggcggcacaacgctttgaggaaaagaaagccgccatatac

SEQ ID NO: 13769 - DNA, 260 bp, Unknown
  Description of Unknown: LeftRegion for integrase B770 sequence
atgctgcaaaagctggacccatacattgcagactatggcagcattcgtgatgccgttgttcattcgctggatgtgtaccccccttcccgacattttgcatagtttctatcattcctttttgtgcataacagaaaagcagccccgcactacgcacggagctgctttttcttcagctatcattatcttctggaggttccgcaatgggctatgtggtgaagaaggcggcacaacgctttgaggaaaagaaagccgccatatac

SEQ ID NO: 13770 - DNA, 260 bp, Unknown
  Description of Unknown: LeftRegion for integrase B771 sequence
atgctgcaaaagctggacccgtacctcgcaaactatggcggcatccgggatgccgtcgttcattctctggatgtgtacccccccccccaatattttgcataatttctatcattcctttttgtgcataacaaaaaagcagccccgcactacgcacggagctgctttttcttcagctatcattatcttctggaggtttcgcaatgggctatgtgacgaagaaggcggcacaacgctttgaggaaaagaaagccgccatatac

SEQ ID NO: 13771 - DNA, 260 bp, Unknown
  Description of Unknown: LeftRegion for integrase B772 sequence
gctacaaaagctggagccataccgcgctgactatggcggcatccgagatgccgttatccattcgctggatgtgtaccctccccctcccgacaatttgcataattcttagcgttcttttttgtgcataacagaaaagcagccccgcactacgcacggagctgctttttcttcagctatcattatcttctggaggtttcgcaatgggctatgtgacaaagaaggcggcacaacgctttgaggaaaagaaagccgccatatac

SEQ ID NO: 13772 - DNA, 260 bp, Unknown
  Description of Unknown: LeftRegion for integrase B773 sequence
tcaaaaacctgctattcctcaacaagatgctctaatattggagttaaacagactcttagcttgctatcaacttgcatctcaggaggacagggaaatcgtctggtctgtattaaacaaatatgtagacaaaatcatttaaaaacaacaacgtgtagccccgtacaggggctttatttatttagttagttggaggaattattatgccaagaagaagaacgtctgcaaaggattgtgtgccccagcaaaaagaaattaaagtg

SEQ ID NO: 13773 - DNA, 260 bp, Unknown
  Description of Unknown: LeftRegion for integrase B774 sequence
atgctgcaaaagctggacccataccttgcagactatggcagcatccgtgatgccgttgttcattcgctggatgtgtacccccctccccgacattttgcataatttctttcattcctttttgtgcataacagaaaagcagccccgcactacgcacggagctgctttttcttcagctatcattatcttctggaggtttcgcaatgggctatgtgacgaagaaggtggcgcaacgctttgaggaaaagaaagccgccatatac

SEQ ID NO: 13774 - DNA, 260 bp, Unknown
  Description of Unknown: LeftRegion for integrase B775 sequence
cgaccatgacaatccagcccaccttcataacagatgccaatcgaacgagcgttatagccgcgcgcatgagctccgatacgttctatttcacgggtagacttgatgtcgccattttttcggatataaacgtatatatataaattaggtacattaaaactttatctttatatttgcatcataatcttaaaaatcaacgagttatggcaaaatgtatattattggtaagagtttcaacagaatctaaaaagcaggaaatatca

SEQ ID NO: 13775 - DNA, 260 bp, Unknown
  Description of Unknown: LeftRegion for integrase B776 sequence
gctgcaaaagctggacccataccttgtagactatggcagcatccgtgatgccgttgtcgattccttgaatgtgtacccccccccccccgacattttgcatagtttctatcatttctttttgtgcataacagaaaagcagccccgcactacgcacggagctgctttttcttcagctatcattatcttctggaggttccgcaatgggctatgtggtgaagaaggcggcacaacgctttgaggaaaagaaagccgccatatac

SEQ ID NO: 13776 - DNA, 260 bp, Unknown
  Description of Unknown: LeftRegion for integrase B777 sequence
tgctgcaaaagctggacccataccttgtagactatggcagcatccgtgatgccgttgtcgattccttgaatgtgtaccccccccccccgacattttgcatagtttctatcattcctttttgtgcataacagaaaagcagccccgcactacgcacggagctgctttttcttcagctatcattatcttctggaggttccgcaatgggctatgtggtgaagaaggcggcacaacgctttgaggaaaagaaagctgccatatac

SEQ ID NO: 13777 - DNA, 260 bp, Unknown
  Description of Unknown: LeftRegion for integrase B778 sequence
caccatgctacaaaagttggacccgtatttcgcagactatgatggcatccgtgatgccgttgtccgttcgctggatgtgtactcccctcgcaattcgcataattcttagtgttcttttttgtgcataacaaaaaagcagccctgcactacgcacggagctgctttttcttcagccatcattatcttctggaggtttctcaatgggctatgtgacgaagaaggcggcacaacgctttgaggaaaagaaagccgccatatac

SEQ ID NO: 13778 - DNA, 260 bp, Unknown
  Description of Unknown: LeftRegion for integrase B779 sequence
atgctgcaaaagctggacccataccttgtagactatggcagcatccgtgatgccgttgtcgattccttgaatgtgtacccccccccccgacattttgcatagtttctatcattcctttttgtgcataacagaaaagcagccccgcactacgcacggagctgctttttcttcagctatcattatcttctggaggttccgcaatgggctatgtggtgaagaaggcggcacaacgctttgagaaaaagaaagccgccatatac

SEQ ID NO: 13779 - DNA, 260 bp, Unknown
  Description of Unknown: LeftRegion for integrase B780 sequence
atctgaaatcgctcctttgacaactggtaaactaagtcgtttcatgccatcaactaagtcaaaacaccccaagaactaaatgataacatataacaaagtatctgttagtagttactacttattacctatacgtagtagataaaatatttgcagatatatttagtataattatctttgcctcaaagaaaaatgacaaagttatgaaaggtgcaatttatagtagagtatctacagaacaacaagattatagtaaacaaacg

SEQ ID NO: 13780 - DNA, 260 bp, Unknown
  Description of Unknown: LeftRegion for integrase B781 sequence
atgctgcaaaagctggacccataccttgcagactatggcagcatccgtgatgccgttgtcgattccctgaatgtgtacccccccccccgacattttgcatagtttctatcattcctttttgtgcataacagaaaagcagccccgcactacgcacggagctgctttttcttcagctatcattatcttctggaggtttcgcaatgggctatgtgacgaagaaggcggcgcaacgctttgaggaaaagaaagccgccatatac

SEQ ID NO: 13781 - DNA, 260 bp, Unknown
  Description of Unknown: LeftRegion for integrase B782 sequence
tatcgtaatattcttttgtattaatgtcaatattaaaaccggctcctgttggtgcaggaaccggcaatagaatatatccgaagataataccctaaacacacaaaatattgtatcatcttcggaacagcttcgcaagcggaacacccgttccccgctggctgttatttttatacccatttttagaagaaaggtgatgcatgatggcttatccaatgaaaaaccagactgccgacaaccggatcatcgcgatctatgtacgt

SEQ ID NO: 13782 - DNA, 260 bp, Unknown
  Description of Unknown: LeftRegion for integrase B783 sequence
atgctgaaaaaacttgacccgtacctcgtccagtatgacagcctccgtgatgccgttgtcgattccctgaatgtgtacccccccccccgacattttgcataatttctatcgttcctttttgtgcataacagaaaagcagccccgcactacgcacggagctgctttttcttcagctatcattatcttctggaggttccgcaatgggctatgtggtgaagaaggcggcacaacgctttgaggaaaagaaagccgccatatac

SEQ ID NO: 13783 - DNA, 260 bp, Unknown
  Description of Unknown: LeftRegion for integrase B784 sequence
ccctctcgacatgaatttgtgggatttttatgtgcttccgaccaagaccatcgacagagaaaagcccagtcagaaaacaattactttgccatcattactaacattggatccgatcaaatgcacatacatagaattaaaagaaactattgataagattttagccgtctgaaaatcaggcggttttttaggagggatagcctatgaatactttatctgcacttaatataacgccctctccaccaagaatgtgtcgagtagca

SEQ ID NO: 13784 - DNA, 260 bp, Unknown; identical to SEQ ID NO: 13767
  Description of Unknown: LeftRegion for integrase B785 sequence

SEQ ID NO: 13785 - DNA, 260 bp, Unknown; identical to SEQ ID NO: 13733
  Description of Unknown: LeftRegion for integrase B786 sequence

SEQ ID NO: 13786 - DNA, 260 bp, Unknown
  Description of Unknown: LeftRegion for integrase B787 sequence
atgctgcaaaagctggacccatatcttgcagactatggcagcatccgtgatgccgttgtcgattccttgaatgtgtacccccccccccgacattttgcatagtttctatcattcctttttgtgcataacagaaaagcagccccgcactacgcacggagctgctttttcttcagctatcattatcttctggaggtttcgcaatgggctatgtgacgaagaaggcggcacaacgctttgaggaaaagaaagccgccatatac

SEQ ID NO: 13787 - DNA, 260 bp, Unknown; identical to SEQ ID NO: 13732
  Description of Unknown: LeftRegion for integrase B788 sequence

SEQ ID NO: 13788 - DNA, 260 bp, Unknown
  Description of Unknown: LeftRegion for integrase B789 sequence
acaaaagttggagccataccgcgctgactatggcggcatccgagattccgttatccattcgctggatgtgtacccccctccccatcccgacaatttgcataattcttagcgttcttttttgtgcataacagaaaagcagccccgcactacgcacggagctgctttttcttcagctatcattatcttctggaggtttcgcaatgggctatgtgacgaagaaggcggcacaacgctttgaggaaaagaaagccgccatatac

SEQ ID NO: 13789 - DNA, 260 bp, Unknown
  Description of Unknown: LeftRegion for integrase B790 sequence
atattatagcaaatatgctttgaatgtcaattgaaaaaccgcccctgcagcaacagagacggttcaggaatatatccgaagatgatactccaaacatgcaaaaatattgtatcatcttcggaacagcttcgcaagcggaacacccgttccccgctggctgttatttttatactcattttttagaagaaaggtgatgcatgatggcttatccaatgaaaaacactgctgccgacaatcgaatcatcgcaatctatgtgcgt

SEQ ID NO: 13790 - DNA, 260 bp, Unknown
  Description of Unknown: LeftRegion for integrase B791 sequence
tatgctgcaaaagctggacccataccttgcagactatggcagcatccgtgatgccgttgtcgattccctgaatgtgtagccccccccgacattttgcattgtttgtttaattcagttttgtgcataacagaaaaagcagccccgcactacgcacggagctgctttttcttcagctatcattatcttctggaggtttcgcaatgggctatgtgacgaagaaggcggcacaacgctttgaggaaaagaaagccgccatatac

SEQ ID NO: 13791 - DNA, 260 bp, Unknown
  Description of Unknown: LeftRegion for integrase B792 sequence
tcaaaaacctgctattcctcaacaagatgctctaatattggagttaaacagactcttagcttgctatcaacttgcatctcaggaggacagggaaatcgtctggtctgtattaaacaaatatgtagacaaaatcatttaaaagcaacaacgtgtagccccgtacaggggctttatttatttagttagttggaggaattattatgccaagaagaagaacgtctgcaaaggattgtgtgccccagcaaaaagaaattaaagtg

SEQ ID NO: 13792 - DNA, 260 bp, Unknown
  Description of Unknown: LeftRegion for integrase B793 sequence
gcggcgataaggtcacccaggagaccaacctgctggtacttggcaataacgactattgcaaagctataaaaggcggcaaaagcaataaacaaaaaaaggcggaagaatacaagctgaagggattggatattgacataattcccgagagcgttttccgcgacatgataaatatctgaggataaccccgaaaggatcccgaaatgagccttgcgtcaaagaccgtcaccgtgccgcgtgaaaatcagctgaacgccgtgata

SEQ ID NO: 13793 - DNA, 260 bp, Unknown
  Description of Unknown: LeftRegion for integrase B794 sequence
atgctacaaaagctggagccataccgcgctgactatggcggcatccgagatgccgttatccattcgctggatgtgtacccccctccccgacaatttgaataattctcagtgttcttttttgtgcataacggaaaagcagccccgcactacgcacggagctgctttttcttcagctatcgttatcttctggaggtttcacaatgggctatgtgacgaagaaggcggcacaacgctttgaggagaagaaagccgccatatac

SEQ ID NO: 13794 - DNA, 260 bp, Unknown; identical to SEQ ID NO: 13757
  Description of Unknown: LeftRegion for integrase B795 sequence

SEQ ID NO: 13795 - DNA, 260 bp, Unknown; identical to SEQ ID NO: 13731
  Description of Unknown: LeftRegion for integrase B796 sequence

SEQ ID NO: 13796 - DNA, 260 bp, Unknown
  Description of Unknown: LeftRegion for integrase B797 sequence
ctatgttgcaaagtgcatcttctaagaggacaatttctttgtcatctcgcttcgctcgaatcttatagctaaagcattttctactccaccagcggagctggtggttgtcgttcgctcaagctacccaacagaaaagcagccccgcactacgcacggagctgctttttcttcagctatcattatcttctggaggtttcgcaatgggctatgtgacgaagaaggcggcacaacgctttgaggaaaagaaagccgccatatac

SEQ ID NO: 13797 - DNA, 260 bp, Unknown
  Description of Unknown: LeftRegion for integrase B798 sequence
atgcttgagaagctgaatccatacaagaccgactacgacggcatcaaaatggctattatacagagtctccaagtgtacccccccccccgacaatttgaataattctcagtgttcttttttgtgcataacagaaaagcagccccgcactatgcacggagctgctttttcttcagccatcattatcttctggaggttccgcaatgggctatgtggtgaagaaggcggcgcaacgctttgaggagaagaaagccgctatatac

SEQ ID NO: 13798 - DNA, 260 bp, Unknown
  Description of Unknown: LeftRegion for integrase B799 sequence
atgctgcaaaagctggacccgtacctcgcaaactatggcggcatccgggatgccgtcgttcattctctggatgtgtacccccccccccaacattttgcataatttctatcattcctttttgtgcataacagaaaagcagccccgcactacgcacggagctgctttttcttcagctatcattatcttctggaggtttcgcaatgggctatgtgacgaagaaggcggcacaacgctttgaggaaaagaaagccgccatatac

SEQ ID NO: 13799 - DNA, 260 bp, Unknown
  Description of Unknown: LeftRegion for integrase B800 sequence
gctgcaaaagctggacccataccttgcagactatggcggcatccgtgatgccgttgttcattcgctggatgtgtacccccccccctccgacattttgcataatttctttcattcctttttgtacataacagaaaagcagccccgcactacgcacggagctgctttttcttcagctatcattatcttctggaggtttcgcaatgggctatgtgacgaagaaggcggcacaacgctttgaggaaaagaaagccgccatatac

SEQ ID NO: 13800 - DNA, 260 bp, Unknown
  Description of Unknown: LeftRegion for integrase B801 sequence
tatattatagcaaatatgctttgaatgtcaattgaaaaaccgcccctgcggcaacagagacggttcaggaatatatccgaagatgatactccaaatatgcaaaaatattgtatcatcttcggaacagcttcgcaagcggaacacccgttccccgctggctgttatttttatacccatttttagaagaaaggtgatgcatgatggcttatccaatgaaaaacactgctgccgacaatcgaatcatcgcaatctatgtgcgt

SEQ ID NO: 13801 - DNA, 260 bp, Unknown
  Description of Unknown: LeftRegion for integrase B802 sequence
acaaaagttggagccataccgcgctgactatggcggcatccgagatgccgttatccattcgctggatgtgtacccccctccccatcccgacaatttgcataattcttagcgttcttttttgtgcataacagaaaagcagccccgcactacgcacggagctgctttttcttcagctatcattatcttctggaggtttcgcaatgggctatgtgacgaagaaggcggcacaacgctttgaggaaaagaaagccgccatatac

SEQ ID NO: 13802 - DNA, 260 bp, Unknown
  Description of Unknown: LeftRegion for integrase B803 sequence
ctgcaaaagctggacccataccttgtagactatggcagcatccgtgatgccgttgtcgagtccttgaatgtgtacccccccaccccccgacattttgcatagtttctatcattcctttttgtgcataacagaaaagcagccccgcactacgcacggagctgctttttcttcagctatcattatcttctggaggttccgcaatgggctatgtggtgaagaaggcggcacaacgctttgaggaaaagaaagccgccatatac

SEQ ID NO: 13803 - DNA, 260 bp, Unknown
  Description of Unknown: LeftRegion for integrase B804 sequence
caaaagctggacccataccttgcagactatggcagcatccgtgatgccgttgtcgattccctgaatgtgtaccccccccctcccccccgacattttgcatagtttctatcattcctttttgtgcataacagaaaagcagccccgcactacgcacggagttgctttttcttcagctatcattatcttctggaggtttcgcaatgggctatgtgacgaagaaggcggcgcaacgctttgaggaaaagaaagccgccatatac

SEQ ID NO: 13804 - DNA, 260 bp, Unknown
  Description of Unknown: LeftRegion for integrase B805 sequence
actatgctgaaaaaacttgacccgtacctcgtccagtatgacagcctccgtgatgccgttgtcgattccttgaatgtgtaccccccccgacattttgcatagtttctatcattcctttttgtgcataacagaaaagcagccccgcactacgcacggagctgctttttcttcagctatcattatcttctggaggttccgcaatgggctatgtggtgaagaaggcggcacaacgctttgaggaaaagaaagccgccatatac

SEQ ID NO: 13805 - DNA, 260 bp, Unknown
  Description of Unknown: LeftRegion for integrase B806 sequence
tgcaccgtatgtaacccgccgcaataataaaagccgtccctgctgtcacaggaacgaccttaccgaactatacatccgaagataatacaattctgatgcgtattatattgtatcatcttcgagcagctctcgcaagcggaacacccgttccttgctggctgtattttttatactcatttttagaagaaaggtgatacactatggcttatccaacgaaaaacactgctgccgacaaccggatcattgcgatctatgtacgt

SEQ ID NO: 13806 - DNA, 260 bp, Unknown
  Description of Unknown: LeftRegion for integrase B807 sequence
atgctgcaaaagctggacccataccttgcagactatggcagcatccgtgatgccgttgttcattcgctggatgtgtacccccctcccagacattttgcataatttctttcattcctttttgtgcgtaacagaaaagcagccccgcactacgcacggagctgctttttcttcagctatcattatcttctggaggtttcgcaatgggctatgtgacgaagaaggcggcacaacgctttgaggaaaagaaagccgccatatac

SEQ ID NO: 13807 - DNA, 260 bp, Unknown
  Description of Unknown: LeftRegion for integrase B808 sequence
tatgctgaaaaaacttgacccgtacctcgtccagtatgacagcctccgtgatgccgttgtcgattccctgaatgtgtaccccccccccgacattttgcataatttctatcattcctttttgtgcataacagaaaagcagccccgcactacgcacggagctgctttttcttcagctatcattatcttctggaggttccgcaatgggctatgtggtgaagaaggcggcacaacgctttgaggaaaagaaagccgccatatac

SEQ ID NO: 13808 - DNA, 260 bp, Unknown
  Description of Unknown: LeftRegion for integrase B809 sequence
attataacaaatatgctttaaatgtcaatttaaaaaccggctcctgttggcgcaggaaccggcaaggaataacatccgaaaatgatactccaacttagcaaaaaatattgtatcatcttcggaacagcttcgcaagcggaacacccgttccccgctggctgtattttttatacctatttttagaagaaaggtgatacattatggcttatccaacaaaaaacactgctgccgacaaccggatcatcgcaatctatgtgcgt

SEQ ID NO: 13809 - DNA, 260 bp, Unknown
  Description of Unknown: LeftRegion for integrase B810 sequence
caaaagttggagccataccgcgctgactatggcggcatccgagatgccgttatccattcgctggatgtgtacccccctcccccctcccgacaatttgaataattctcagtgttcttttttgtgcataacggaaaagcagccccgcactacgcacggagctgctttttcttcagctatcattatcttctggaggtttcgcaatgggctatgtgacgaagaaggcggcacaacgctttgaggaaaagaaagccgccatatac

SEQ ID NO: 13810 - DNA, 260 bp, Unknown
  Description of Unknown: LeftRegion for integrase B811 sequence
atgctgcaaaagctggacccataccttgtagactatggcagcatccgtgatgccgttgtcgattccttgaatgtgtacccccccccccgacattttgcatagtttctatcattcctttttgtgcataacagaaaagcagccccgcactacgcacggagctgctttttcttcagctatcattatcttctggaggtttcgcaatgggctatgtgacgaagaaggcggcacaacgctttgaggaaaagaaagccgccatatac

SEQ ID NO: 13811 - DNA, 260 bp, Unknown
  Description of Unknown: LeftRegion for integrase B812 sequence
acaaaagttggagccataccgcgctgactatggcggcatccgagatgccgttatccattcgctggatgtgtacccccctccccctcccgacaattcgcataattcttagcgttcttttttgtgcataacagaaaagcagccccgcactacgcacggagctgctttttcttcagctatcattatcttctggaggtttcgcaatgggctatgtgacgaagaaggcggcacaacgctttgaggaaaagaaagccgccatatac

SEQ ID NO: 13812 - DNA, 260 bp, Unknown
  Description of Unknown: LeftRegion for integrase B813 sequence
tatgctgcaaaagctggacccataccttgtagactatggcagcatccgtgatgccgttgtcgattccttgaatgtgtaccccccccccggcattttgcatagtttctatcattcctttttgtgcataacagaaaagcagccccgcactacgcacggagctgctttttcttcagctatcattatcttctggaggttccgcaatgggctatgtggtgaagaaggcggcacaacgctttgaggaaaagaaagccgccatatac

SEQ ID NO: 13813 - DNA, 260 bp, Unknown
  Description of Unknown: LeftRegion for integrase B814 sequence
ctatgctgaaaaaacttgacccgtacctcgtccagtatgacagcctccgtgatgccgttgtcgattccctgaatgtgtacccccccccgacattttgcataatttctatcattcctttttgtgcataacagaaaagcagccccgcactacgcacggagctgctttttcttcagctatcattatcttctggaggttccgcaatgggctatgtggtgaagaaggcggcacaacgctttgaggaaaagaaagccgccatatac

SEQ ID NO: 13814 - DNA, 260 bp, Unknown
  Description of Unknown: LeftRegion for integrase B815 sequence
atgctgaaaaaacttgacccgtacctcgtccagtatgacagcctccgtgatgccgttgtcgattccctgaatgtgtacccccccccccgacattttgcataatttctatcattcctttttgtgcataacagaaaagcagccccgcactacgcacggagctgctttttcttcagctatcattatcttccggaggttccgcaatgggctatgtggtgaagaaggcggcacaacgctttgaggaaaagaaagccgccatatac

SEQ ID NO: 13815 - DNA, 260 bp, Unknown; identical to SEQ ID NO: 13767
  Description of Unknown: LeftRegion for integrase B816 sequence

SEQ ID NO: 13816 - DNA, 260 bp, Unknown
  Description of Unknown: LeftRegion for integrase B817 sequence
atgctgcaaaagctggacccataccttgcagactatggcagcatccgtgatgccgttgttcattcgctgaatgtgtacccccccccccgacaatttgcataatttctttcattcctttttgtacataacagaaaagcagccccgcactacgcacggagctgctttttcttcagctatcattatcttctggaggtttcgcaatgggctatgtgacgaagaaggcggcacaacgctttgaggaaaagaaagccgccatatac

SEQ ID NO: 13817 - DNA, 260 bp, Unknown; identical to SEQ ID NO: 13741
  Description of Unknown: LeftRegion for integrase B818 sequence

SEQ ID NO: 13818 - DNA, 260 bp, Unknown; identical to SEQ ID NO: 13811
  Description of Unknown: LeftRegion for integrase B819 sequence

SEQ ID NO: 13819 - DNA, 260 bp, Unknown
  Description of Unknown: LeftRegion for integrase B820 sequence
ctatgctgcaaaagctggacccataccttgcagactatggcagcatccgcgatgccgttgtcgattccctgaatgtgtacccccccccgacattttgcataatttctatcattcctttttgtgcataacagaaaagcagccccgcactacgcacggagctgctttttcttcagctatcattatcttctggaggttccgcaatgggctatgtggtgaagaaggcggcacaacgctttgaggaaaagaaagccgccatatac

SEQ ID NO: 13820 - DNA, 260 bp, Unknown
  Description of Unknown: LeftRegion for integrase B821 sequence
atattatagcaaatatgctttgaatgtcaattgaaaaaccgcccctgcggcaacagagacggttcaggaatatatccgaagatgatactccaaatatgcaaaaatattgtatcatcttcggaacagcttcgcaagcggaacacccgttccccgctggctgttatttttatactcattttttagaagaaaggtgatgcatgatggcttatccaatgaaaaacactgccgcagacaaccggatcatcgcgatctatgtacgt

SEQ ID NO: 13821 - DNA, 260 bp, Unknown
  Description of Unknown: LeftRegion for integrase B822 sequence
acaggtcttttgattgtgtgcagcgactcaatgcaaaagaaaatcgacagagcggatgccctgaatattccaatcgtttcggagcagcaatggtttgaactcatgccggaacttgaggccgctggaatgtggaacggaaagccaatttcattcgcggatgacgatggtatctaccgttttgatgtgggtggtgatggataatggcaaaaaagaagaagcccgccgggggcattgccgtcatctatgcccgctactcgtcc

SEQ ID NO: 13822 - DNA, 260 bp, Unknown
  Description of Unknown: LeftRegion for integrase B823 sequence
gctgcaaaagctggacccataccttgcagactatggcagcatccgtgatgccgttgtcgattccctgaatgtgtacccccccccctccgacattttgcatagtttctatcattcctttttgtgcataacagaaaagcagccccgcactacgcacggagctgctttttcttcagctatcattatcttctggaggtttcgcaatgggctatgtgacgaagaaggcggcgcaacgctttgaggaaaagaaagccgccatatac

SEQ ID NO: 13823 - DNA, 260 bp, Unknown
  Description of Unknown: LeftRegion for integrase B824 sequence
aaacagcgtaattgcaggggtttagaagtggttagaccgtgataagtttctataatatttctatttttataaaattacaaaaacacaataacatgataacgcaaatctttcaagcgtagtttctcttttgtggttgttttctacttttcgatttgttacaataaagaacatgatacaacgaactggttcggaggcataccatggacattcacgacatccgccaacagctgcggacaaagagcatatacgacatctccctg

SEQ ID NO: 13824 - DNA, 260 bp, Unknown; identical to SEQ ID NO: 13742
  Description of Unknown: LeftRegion for integrase B825 sequence

SEQ ID NO: 13825 - DNA, 260 bp, Unknown
  Description of Unknown: LeftRegion for integrase B826 sequence
atgctgcaaaagctggacccgtacctcgcaaactatggcggtgtccgggatgccgttgttcattcgctggatgtgtacccccccccccgacaatttgaataattctcagtgtccttttttgtgcataacagaaaagcagccccgcactatgcacggagctgctttttcttcagccatcattatcttctggaggttccgcaatgggctatgtggtgaagaaggcggcgcaacgctttgaggagaagaaagccgctatatac

SEQ ID NO: 13826 - DNA, 260 bp, Unknown
  Description of Unknown: LeftRegion for integrase B827 sequence
acaaaagttggagccataccgcgctgactatggcggcatccgagatgccgttatccattcgctggatgtgtacccccctccctctcccgacaatttgcataattcttagcgttcttttttgtgcataacagaaaagcagccccgcactacgcacggagctgctttttcttcagctatcattatcttctggaggtttcgcaatgggctatgtgacgaagaaggcggcacaacgctttgaggaaaagaaagccgccatatac

SEQ ID NO: 13827 - DNA, 260 bp, Unknown
  Description of Unknown: LeftRegion for integrase B828 sequence
actatgctgcaaaagctggacccataccttgcagactatggcagcatccgtgatgccgttgttcattcgctggatgtgtaccccccccgacattttgcataatttctttcatttctttttgtgcataatagaaaagcagccccgcactacgcacggagctgctttttcttcagctatcattatcttctggaggtttcgcaatgggctatgtgacgaagaaggtggcacaacgctttgaggaaaagaaagccgccatatac

SEQ ID NO: 13828 - DNA, 260 bp, Unknown; identical to SEQ ID NO: 13556
  Description of Unknown: LeftRegion for integrase B829 sequence

SEQ ID NO: 13829 - DNA, 260 bp, Unknown; identical to SEQ ID NO: 13741
  Description of Unknown: LeftRegion for integrase B830 sequence

SEQ ID NO: 13830 - DNA, 260 bp, Unknown
  Description of Unknown: LeftRegion for integrase B831 sequence
ctatgctgcaaaagctggacccataccttgcagactatggcagcatccgtgatgccgttgtcgattccctgaatgtgtacccccccccgacattttgcatagtttctatcattcctttttgtgcataacagaaaagcagccccgcactacgcacggagctgctttttcttcagctatcattatcttctggaggtttcgcaatgggctatgtgacgaagaaggcggcgcaacgctttgaggaaaagaaagccgccatatac

SEQ ID NO: 13831 - DNA, 260 bp, Unknown
  Description of Unknown: LeftRegion for integrase B832 sequence
ctatgctgcaaaagctggacccataccttgtagactatggcagcatccgtgatgccgttgtcgattccttgaatgtgtacccccccccgacattttgcatagtttctatcattcctttttgtgcataacagaaaagcagccccgcactacgcacggagctgctttttcttcagctatcattatcttctggaggttccgcaatgggctatgtggtgaagaaggcggcacaacgctttgaggaaaagaaagccgccatatac

SEQ ID NO: 13832 - DNA, 260 bp, Unknown; identical to SEQ ID NO: 13811
  Description of Unknown: LeftRegion for integrase B833 sequence

SEQ ID NO: 13833 - DNA, 260 bp, Unknown; identical to SEQ ID NO: 13782
  Description of Unknown: LeftRegion for integrase B834 sequence

SEQ ID NO: 13834 - DNA, 260 bp, Unknown
  Description of Unknown: LeftRegion for integrase B835 sequence
tatgctgcaaaagctggacccataccttgcagactatggcagcatccgtgatgccgttgttcattcgctggatgtgtaccccccccctgacattttgcataatttctttcatttctttttgtgcataatagaaaagcagccccgcactacgcacggagctgctttttcttcagctatcattatcttctggaggtttcgcaatgggctatgtgacgaagaaggtggcacaacgctttgaggaaaagaaagccgccatatac

SEQ ID NO: 13835 - DNA, 260 bp, Unknown; identical to SEQ ID NO: 13801
  Description of Unknown: LeftRegion for integrase B836 sequence

SEQ ID NO: 13836 - DNA, 260 bp, Unknown; identical to SEQ ID NO: 13767
  Description of Unknown: LeftRegion for integrase B837 sequence

SEQ ID NO: 13837 - DNA, 260 bp, Unknown
  Description of Unknown: LeftRegion for integrase B838 sequence
gctacaaaagctggagccataccgcgctgactatggcggcatccgagatgccgttatccattcgctggatgtgtaccctctccctcccgacaatttgcataattcttagcgttcttttttgtgcataacagaaaagcagccccgcactacgcacggagctgctttttcttcagctatcattatcttctggaggtttcgcaatgggctatgtgacgaagaaggcggcacaacgctttgaggaaaagaaagccgccatatac

SEQ ID NO: 13838 - DNA, 260 bp, Unknown
  Description of Unknown: LeftRegion for integrase B839 sequence
caaaagttggagccataccgcgctgactatggcggcatccgagatgccgttatccattcgctggatgtgtactctcctcccccatcccgacaatttgcataattcttagcgttcttttttgtgcataacagaaaagcagccccgcactacgcacggagctgctttttcttcagctatcattatcttctggaggtttcgcaatgggctatgtgacgaagaaggcggcacaacgctttgaggaaaagaaagccgccatatac

SEQ ID NO: 13839 - DNA, 260 bp, Unknown
  Description of Unknown: LeftRegion for integrase B840 sequence
ttttattttacatttttgtaaacaaaatgttaacaaccggctcctgcgccaacaggaaccggcaaggaataacatccgaaaatgatactcccaaatagcaaaaatattgtatcatcttcggaacagcttcgcaagcggaacacccgttccccgctggctgttatttttatactcattttttagaagaaaggtgatgcatgatggcttatccaatgaaaaacactgctgccgacaatcgaatcatcgcaatctatgtgcgt

SEQ ID NO: 13840 - DNA, 260 bp, Unknown
  Description of Unknown: LeftRegion for integrase B841 sequence
ccggcatcgtattgtttttcgtcaatctgatttcatctctgctctgcatcggtatcgcggcttgtcttggctggtcagggtattccacccttgcggcctatgttcgtgacgtaaatattcgcctgcaggcagaacggtcggcgcgtgaggcgatggaaaccgaagaagacaattctgacgaaatcgaggaggactgatttatggacgttgtaggctattgtcgcttttcttccgaagcgcaaagggatggctattctatc

SEQ ID NO: 13841 - DNA, 260 bp, Unknown
  Description of Unknown: LeftRegion for integrase B842 sequence
acaaaagttggagccataccgcgctgactatggcggcatccgagataccgttatccattcgctggatgtgtacccccctccccctcccgacaattcgcataattcttagcgttcttttttgtgcataacagaaaagcagccccgcactacgcacggagctgctttttcttcagctatcattatcttctggaggtttcgcaatgggctatgtgacgaagaaggcggcacaacgctttgaggaaaagaaagccgccatatac

SEQ ID NO: 13842 - DNA, 260 bp, Unknown; identical to SEQ ID NO: 13783
  Description of Unknown: LeftRegion for integrase B843 sequence

SEQ ID NO: 13843 - DNA, 260 bp, Unknown
  Description of Unknown: LeftRegion for integrase B844 sequence
acaaaagttggagccataccgcgctgactatggcggcatccgagatgccgttatccattcgctggatgtgtacccccctccccctcccgacaatttgcataattcttagtgttcttttttgtgcataacagaaaagcagccccgcactacgcacggagctgctttttcttcagctatcattatcttctggaggtttcgcaatgggctatgtgacgaagaaggcggcacaacgctttgaggaaaagaaagccgccatatac

SEQ ID NO: 13844 - DNA, 260 bp, Unknown
  Description of Unknown: LeftRegion for integrase B845 sequence
ctatgtgttgcctacctatgtgctcaacgagcaaaagcccaaccagaaaaatatttctcttaattcgctgaaagctctaaaaccttacataacggattttgccggattaagggatgtaatattgaattgcccgactaaaagggcgtagaaatgaacatgcgccgttctgtaatgggacggcgtatttttggaggaaaaatatgatttcaaacagtgctgccactcacgcaaaagtggctatctacatacgagtctctaca

SEQ ID NO: 13845 - DNA, 260 bp, Unknown
  Description of Unknown: LeftRegion for integrase B846 sequence
ttatgggaactgaaaatatccgctgtgaaaacagcaatggaaaagaggacttcgtaaaggagctggagcgattgctcgcttgctatcagattgcttctttcgatgaccggaaagtagtttgggcggttctgaacaaatatgccgcctatataagctgaaattgccccataaaggggctttttcttttttgaggtggaataatgagcataaacagaaataatacaagtgagactcccaaaaaggctgctctttacgtgaga

SEQ ID NO: 13846 - DNA, 260 bp, Unknown
  Description of Unknown: LeftRegion for integrase B847 sequence
ctacgtgctgcctacctatgtgctcaatgagcaaaagcccaaccagaaaaatatttctcttaattcactgaaagctctaaaaccttacataacagattttgccggattaagggatgtgatattgaattgcccgactaaaagggcgtagaaatgaacatgcgccgttctgtaatgggacggcgtatttttggaggaaaaatatgatttcaaacagtgctgccactcacgcaaaagtggctatctacatacgagtctctaca

SEQ ID NO: 13847 - DNA, 260 bp, Unknown
  Description of Unknown: LeftRegion for integrase B848 sequence
ctatgtgttgcctacctatgtgctcaacgagcaaaagcccaaccagaaaaatatttctcttaattcactgaaagctctaaaaccttacataacggattttgccggattaagggatgtgatattgaattgcccgattaaaagggcgtagaaatgaacatgcgccgttctgtaatgggacggcgtatttttggaggaaaaatatgatttcaaacagtgctgccactcacgcaaaagtggctatctacatacgagtctctacc

SEQ ID NO: 13848 - DNA, 260 bp, Unknown; identical to SEQ ID NO: 13844
  Description of Unknown: LeftRegion for integrase B849 sequence

SEQ ID NO: 13849 - DNA, 260 bp, Unknown
  Description of Unknown: LeftRegion for integrase B850 sequence
ttatgggaactgaaaacatccgctgtgaaaacagcaatggaaaagaggacttcgtgaaggagctggagcgattgctcgcttgctatcagattgcttctttcgatgaccggaaagtagtttgggcggttctgaacaaatatgccgcctatataagctgaaattgccccataaaggggctttttcttttttgaggtggaataatgagcataaacagaaataatacaagtgagactcccaaaaaggctgctctttacgtgaga

SEQ ID NO: 13850 - DNA, 260 bp, Unknown
  Description of Unknown: LeftRegion for integrase B851 sequence
ctatgtgttgcctacctatgtgctcaacgagcaaaagcccaaccagaaaaatatttctcttaattcgctgaaagctctaaaaccttacataacggattttgccggattaagggatgtaatattgaattgcccgactaaaagggcgtagaaatgaacatgcgccgttctgtaatgggacggcgtatttttggaggaaaaatatgatttcaaacagtgctgccgctcacgcaaaagtggctatctacatacgagtctctaca

SEQ ID NO: 13851 - DNA, 260 bp, Unknown; identical to SEQ ID NO: 13844
  Description of Unknown: LeftRegion for integrase B852 sequence

SEQ ID NO: 13852 - DNA, 260 bp, Unknown
  Description of Unknown: LeftRegion for integrase B853 sequence
ccaaaaggcgaataagcgaccacggcattatgtggtgtaagtctttgggtaaatgtataacataaacgacttagacaatgatttgataaatgaattcaagactttaggaatcagtgatgaaaatgatatgataatcatactgaacggacttgatggcttggctgaaataggatacacaatttacaaaaagggaagaaacggtgattaagaaaacaaggaaacttagccacgatgaaaagatagtggagaaaaggaaacaa

SEQ ID NO: 13853 - DNA, 260 bp, Unknown
  Description of Unknown: LeftRegion for integrase B854 sequence
atgaagaaatcatggctcgatgcatcttaagagcaattaacaataggatgcttcgaagcggaattattgatgaggatactaagaaacggatagaaaatcgcattcagaggttgaaaattgtcagtaattgattgaaaaacaattatgcaggggatataatcaaattgattttgcccctgcattttttgcaggaggacattatggatatatataaggtaaggcagcttttaaaagggcaaagtatctttgacatcccgcta

SEQ ID NO: 13854 - DNA, 260 bp, Unknown
  Description of Unknown: LeftRegion for integrase B855 sequence
atgaagaaatcatggctcgatgcatcttaagagcaattaacaataggatgcttcgaagcggaattattgatgaggatactaagaaacggatagaaaatcgcattcagaggttgaaaattgtcagtaattgattgaaaaacaattatgcaggggatataatcaaattgattttgcccctgcattttttgcaggaggacattatggatatatataaggtaaggcagctcttaaaagggcaaagtatttttgacatcccgttg

SEQ ID NO: 13855 - DNA, 260 bp, Unknown
  Description of Unknown: LeftRegion for integrase B856 sequence
ttatgggaactgaaaacaatggttgcaggaattgcaacgaaaaagacgactttgtgaaggagctagagcgcttaattgcttgctatcaactagcttccttcgatgaccagaaagtagtttgggcagttcttaacaaatatgctgcccgtataaactgaaattgccccataaaggggctttttctattttgaggtgtaataatgaacattaacaaaaatattccgaataaacatcataaaaaggctgctctttatgtgcgt

SEQ ID NO: 13856 - DNA, 260 bp, Unknown; identical to SEQ ID NO: 13847
  Description of Unknown: LeftRegion for integrase B857 sequence

SEQ ID NO: 13857 - DNA, 260 bp, Unknown
  Description of Unknown: LeftRegion for integrase B858 sequence
atgaagaaatcatggctcgatgcatcttaagagcaattaacaataggatgcttcgaagcggaattattgatgaggatactaagaaacggatagaaaatcgcattcagaggttgaaaattgtcagtaattgattgaaaaacaattatgcaggggatataatcaaattgattttgcccctgcattttttgcaggaggacattatggatatatataaggtaaggcagcttttaaaagggcaaagtatctttgacatcccacta

SEQ ID NO: 13858 - DNA, 260 bp, Unknown
  Description of Unknown: LeftRegion for integrase B859 sequence
ctacgtgctacccacctacgtgctcaacgagcaaaagcccaaccagaaaaatatttctcttaattcgctgaaagctctaaaaccttacataactgattttgccggattaagggatgtaatattgaattgcccgactaaaagggcgtagaaatgaacatgcgccgttctgtaatgggacggcgtatttttggaggaaaaatatgatttcaaacagtgctgccactcacgcaaaagtggctatctacatacgagtctctaca

SEQ ID NO: 13859 - DNA, 260 bp, Unknown; identical to SEQ ID NO: 13847
  Description of Unknown: LeftRegion for integrase B860 sequence

SEQ ID NO: 13860 - DNA, 260 bp, Unknown
  Description of Unknown: LeftRegion for integrase B861 sequence
ctacgtgctacccacctacgtgctcaacgagcaaaagcccaaccagaaaaatatttctcttaattcgctgaaagctctaaaaccttacataacggattttgccggattaagggatgtaatattgaattgcccgactaaaagggcgtagaaatgaacatgcgccgttctgtaatgggacggcgtatttttggaggaaaaatatgatttcaaacagtgctgccactcacgcaaaagtggctatctacatacgagtctctaca

SEQ ID NO: 13861 - DNA, 260 bp, Unknown
  Description of Unknown: LeftRegion for integrase B862 sequence
tccagcttcagcctattaagacagactttgacggcataaaggacgctgtaacaaaatctattcccggccatttatacccccccccccccccgacaacttgcataatatttattccaccatttcgtgtaacatgacgaagcagccccgctgtgacggagctgctttttcttcagtcgtgattattttctggaggtctacgcatggcacttccgaagaagacgattccccaaattgagcaaaaacgtgccgccatctatgtc

SEQ ID NO: 13862 - DNA, 260 bp, Unknown
  Description of Unknown: LeftRegion for integrase B863 sequence
ttatgggaactgaaaacatccgctgtgaaaacagcaatgaaaaagaggacttcgtgaaggagctggagcgattgctcgcttgctatcagattgcttctttcgatgaccggaaagtagtttgggcggttctgaacaaatatgccgcctatataagctgaaattgccccataaaggggctttttcttttttgaggtggaataatgagcataaacagaaataatacaagtgagactcccaaaaaggctgctctttacgtgaga

SEQ ID NO: 13863 - DNA, 260 bp, Unknown
  Description of Unknown: LeftRegion for integrase B864 sequence
tgtataactaaccttgtaatttaattaaataacaaaaccgccccggtattggcgtaccgaagcggaattgctaagattgtaacctacgaaccttgaaggatcgtgtggcataatctccctagacaagagcattataccacacatccttccaatttgcatagggtgtattttttataccctttttcaggaaggtgttatttatggcatatcgtttttcacagcaaactgctgcccctgataccagaaccgttgccctgtac

SEQ ID NO: 13864 - DNA, 260 bp, Unknown
  Description of Unknown: LeftRegion for integrase B865 sequence
ccctgctccagcttcagcctattaagacagactttgacggcataaaggacgctgtaacaaaatctattcccggccatttatacccccccccgacaacttgcataatatttattccaccatttcgtgtaacatgacgaagcagccccgctgtgacggagctgctttttcttcagtcgtgattattttctggaggtctacgcatggcacttccgaagaagacgattccccaaattgagcaaaaacgtgccgccatctatgtc

SEQ ID NO: 13865 - DNA, 260 bp, Unknown
  Description of Unknown: LeftRegion for integrase B866 sequence
ctatgtgttgcctacctatgtgctcaacgagcaaaagcccaatcagaaaaatatttctcttaattcactgaaagctctaaaaccttacataacggattttgccggattaagggatgtgatattgaattgcccgattaaaagggcgtagaaatgaacatgcgccgttctgtaatgggacggcgtatttttggaggaaaaatatgatttcaaacagtgctgccactcacgcaaaagtggctatctacatacgagtctctaca

SEQ ID NO: 13866 - DNA, 260 bp, Unknown
  Description of Unknown: LeftRegion for integrase B867 sequence
ctatgtgttgcctacctatgtgctcaacgagcaaaagcccaatcagaaaaatatttctcttaattcactgaaagctctaaaaccttacataacggattttgccggattaagggatgtgatattgaattgcccgattaaaagggcgtagaaatgaacatgcgccgttctgtaatgggacggcgtatttttggaggaaaaatatgatttcaaacagtgctgccactcacgcaaaagtggctatctacatacgagtctctacc

SEQ ID NO: 13867 - DNA, 260 bp, Unknown
  Description of Unknown: LeftRegion for integrase B868 sequence
atgaagaaatcatggctcgatgcatcttaagagcaattaacaataggatgcttcgaagcggaattattgatgaggatactaagaaacggatagaaaatcgcattcagaggtcgaaatttgtcagtaattgattgaaaaacaattatgcaggggatataatcaaattgattttgcccctgcattttttgcaggaggacattatggatatatataaggtaaggcagcttttaaaagagcaaagtatttttgacatcccgcta

SEQ ID NO: 13868 - DNA, 260 bp, Unknown
  Description of Unknown: LeftRegion for integrase B869 sequence
ttatgggaactgaaaacatccgctgcgaaaacagcaatggaaaagaggacttcgtgaaggagctggagcgattgctcgcttgctatcagattgcttctttcgatgatcggaaagtagtttgggcggttctgaacaaatatgccgcctatataagctgaaattgccccataaaggggctttttcttttttgaggtggaataatgagcataaacagaaataatacaagtgagactcccaaaaaggctgctctttacgtgaga

SEQ ID NO: 13869 - DNA, 260 bp, Unknown; identical to SEQ ID NO: 13866
  Description of Unknown: LeftRegion for integrase B870 sequence

SEQ ID NO: 13870 - DNA, 260 bp, Unknown; identical to SEQ ID NO: 13865
  Description of Unknown: LeftRegion for integrase B871 sequence

SEQ ID NO: 13871 - DNA, 260 bp, Unknown
  Description of Unknown: LeftRegion for integrase B872 sequence
atgaagatatcatggcacgatgcatcttaagagcaatcaataaccggatgcttcggagcggaattattgatgaggagactaagaagcaaatagaaaatcgcattcagaggtcgaaatttgtcagtaattgattgaaaaacaattatgcaggggatataatcaaattgattttgcccctgcattttttgcaggaggacattatggatatatataaggtaaggcagcttttaaaagagcaaagtatttttgacatcccgctg

SEQ ID NO: 13872 - DNA, 260 bp, Unknown
  Description of Unknown: LeftRegion for integrase B873 sequence
ctacgtgctgccttcctatgtgctcaacgaacaaaagcccaaccagaaaaatatttctcttaattcactgaaagctctaaaaccttacataacggattttgccggattaagagatgtgatattgaattgcccgactaaaagggcgtagaaatgaacatgcgccgttctgtaatgggacggcgtatttttggagaaaaaaaatgatttcaaacagttccgccactcacgcaaaagtggctatatacatacgagtctctacg

SEQ ID NO: 13873 - DNA, 260 bp, Unknown
  Description of Unknown: LeftRegion for integrase B874 sequence
ctatgtgttgcctacctatgtgctcaacgagcaaaagcccaaccagaaaaatatttctcttaattcactgaaagctctaaaaccttacataacggatttttccggattaagggatgtgatattgaattgcccgattaaaagggcgtagaaatgaacatgcgccgttctgtaatgggacggcgtatttttggaggaaaaatatgatttcaaacagtgctgccactcacgcaaaagtggctatctacatacgagtctctacc

SEQ ID NO: 13874 - DNA, 260 bp, Unknown
  Description of Unknown: LeftRegion for integrase B875 sequence
ctacgttctgcctacctatgtgcttgatgagcaaaagcccaaccagaaaaatatttctcttaattctctgaaagctctaaaaccttacataacggattttgccggattaagggaagtaatattgaattgcccgactaaaagggcgtagaaatgaacatgcgccgttctgtaatgggacggcgtatttttggaggaaaaatatgatttcaaacagtgctgccactcatgcaaaagtggctatatacatacgagtctctacc

SEQ ID NO: 13875 - DNA, 260 bp, Unknown
  Description of Unknown: LeftRegion for integrase B876 sequence
ctatgtgttgcctacctatgtgctcaacgagcaaaagcccaatcagaaaaatatttctcttaattcactgaaagctctaaaaccttacataacggattttgccggattaagggatgtgatattgaattgcccgattaaaagggcgtagaaatgaacatgcgccgttctgtaatgggacggcgtatttttggaggaaaaatatgatttcaaatagtgctgccactcacgcaaaagtggctatctacatacgagtctctacc

SEQ ID NO: 13876 - DNA, 260 bp, Unknown; identical to SEQ ID NO: 13865
  Description of Unknown: LeftRegion for integrase B877 sequence

SEQ ID NO: 13877 - DNA, 260 bp, Unknown
  Description of Unknown: LeftRegion for integrase B878 sequence
tttgtattttggatgggcgtactagccgcacttttcgagggtgctggtagcgaaaaacttatttctttatgggtattgtttttgctggcctgtttcaacgtacctgacctgatccggctgaaactgggcaagtttcgggataacgtgggcggttatctgcggcaataaaaaagcccgcacactggcgggcgggtgatggtatgaaaaaagagaacgaaatccgggcagttgtctatgcccggtactcatcccattcgcaa

SEQ ID NO: 13878 - DNA, 260 bp, Unknown; identical to SEQ ID NO: 13866
  Description of Unknown: LeftRegion for integrase B879 sequence

SEQ ID NO: 13879 - DNA, 260 bp, Unknown; identical to SEQ ID NO: 13863
  Description of Unknown: LeftRegion for integrase B880 sequence

SEQ ID NO: 13880 - DNA, 260 bp, Unknown
  Description of Unknown: LeftRegion for integrase B881 sequence
ctatgtgttgcctacctatgtgctcaacgagcaaaagcccaatcagaaaaatatttctcttaattcactgaaagctctaaaaccttacataacggattttgccggattaagggatgtgatattgaattgcccgattaaaagggcgtagaaatgaacatgcgccgttctgtaatgggacggcgtatttttggagggaaaatatgatttcaaacagtgctgccactcacgcaaaagtggctatctacatacgagtctctacc

SEQ ID NO: 13881 - DNA, 260 bp, Unknown; identical to SEQ ID NO: 13880
  Description of Unknown: LeftRegion for integrase B882 sequence

SEQ ID NO: 13882 - DNA, 260 bp, Unknown
  Description of Unknown: LeftRegion for integrase B883 sequence
atgaagaaatcatggctcgatgcatcttaagagcaattaacaataggatgcttcgaagcggaattattgatgaggatactaagaaacggatagaaaatcgcattcagaggttgaaaattgtcagtaattgattgaaaaacaattatgcaggggatataatcaaattgattttgcccctgcattttttgcaggaggacattatggatatatataaggtaaggcagcttttaaaagggcaaagcatctttgacatcccgcta

SEQ ID NO: 13883 - DNA, 260 bp, Unknown; identical to SEQ ID NO: 13860
  Description of Unknown: LeftRegion for integrase B884 sequence

SEQ ID NO: 13884 - DNA, 260 bp, Unknown; identical to SEQ ID NO: 13844
  Description of Unknown: LeftRegion for integrase B885 sequence

SEQ ID NO: 13885 - DNA, 260 bp, Unknown
  Description of Unknown: LeftRegion for integrase B886 sequence
gtgaattaggagggatgtcatgtgaccgataagacagttatgctgattataaataagcgattatatgatgaaggtataataagtcgagaagtatatacaaaaatcatcacgcaaataaataaatgttaaaaagcattgagcgaaatcattgtatggagtataatataaatggtttcgctcctttttgaaggagaatcgaaatgaacatataccatacaagagaaagactaagaacccgttctatttatgatttgaattta

SEQ ID NO: 13886 - DNA, 260 bp, Unknown; identical to SEQ ID NO: 13866
  Description of Unknown: LeftRegion for integrase B887 sequence

SEQ ID NO: 13887 - DNA, 260 bp, Unknown
  Description of Unknown: LeftRegion for integrase B888 sequence
ttatgggaactgaaaacatccgctatgaaaacagcaatggaaaagaggacttcgtgaaggagctggagcgattgctcgcttgctatcagattgcttctttcgatgaccggaaagtagtttgggcggttctgaacaaatatgccgcctatataagctgaaattgccccataaaggggctttttcttttttgaggtggaataatgagcataaacagaaataatacaagcgagactcctaaaaaggctgctctttacgtgaga

SEQ ID NO: 13888 - DNA, 260 bp, Unknown
  Description of Unknown: LeftRegion for integrase B889 sequence
gtgaattaggagggatgtcatgtgaccgataagatagtcatgctgattataaataagcgattatatgatgaaggtataataagtcgagaagtatatacaaaaatcatcacgcaaataaataaatgttaaaaagcattgagcgaaatcattgtatggagtataatataaatggtttcgctcctttttgaaggagaatcgaaatgaacatataccatacaagagaaaggctaagaacccgttctatttatgatttgaattta

SEQ ID NO: 13889 - DNA, 260 bp, Unknown
  Description of Unknown: LeftRegion for integrase B890 sequence
gtgaattaggagggatgtcatgtgaccgataagatagtcatgctgattataaataagagattatatgatgaaggtataataagtcgagaagtatatacaaaaatcatcacgcaaataaataaatgttaaaaagcattgagcgaaatcattgtatggagtataatataaatggtttcgctcctttttgaaggagaatcgaaatgaacatataccatacaagagaaaggctaagaacccgttctatttatgatttgaattta

SEQ ID NO: 13890 - DNA, 260 bp, Unknown; identical to SEQ ID NO: 13873
  Description of Unknown: LeftRegion for integrase B891 sequence

SEQ ID NO: 13891 - DNA, 260 bp, Unknown
  Description of Unknown: LeftRegion for integrase B892 sequence
ctacgtgctacctacctacgtgctcaacgagcaaaagcccaaccagaaaaatatttctcttaattcgctgaaagctctaaaaccttacataacggattttgccggattaagggatgtaatattgaattgcccgactaaaagggcgtagaaatggacatacgccgttctgtaatgggacggcgtatttttggaggaaaaatatgatttcaaacagtactgccactcatgcaaaagtggctatctacatacgagtctctacc

SEQ ID NO: 13892 - DNA, 260 bp, Unknown
  Description of Unknown: LeftRegion for integrase B893 sequence
ctacgtgctacctacctacgtgctcaacgagcaaaagcccaaccagaaaaatatttctcttaattcgctgaaagctctaaaaccttacataacggattttgccggattaagggatgtaatattgaattgcccgactaaaagggcgtagaaatggacatacgccgttctgtaatgggacggcgtatttttggaggaaaaatatgatttcaaacagttccgccactcacgcaaaagtggctatatacatacgagtctctacg

SEQ ID NO: 13893 - DNA, 260 bp, Unknown; identical to SEQ ID NO: 13874
  Description of Unknown: LeftRegion for integrase B894 sequence

SEQ ID NO: 13894 - DNA, 260 bp, Unknown
  Description of Unknown: LeftRegion for integrase B895 sequence
cgcagaaatcgagagcggctgtattgccgtggtcgtggtagacggtgtagaaggatttttgaaacaggtcgagttcggtgagaactctacctcgcttcactctttcaacccttactatcctgatatggagttcgtaggtgccgaccagaaacgcttgcactttatcggtcgtgtccgggaaatgaagcggaggttctgatatgcgtcagaagtttaagatcgacctctctatgctgaccccggaagaacagcagcagttt

SEQ ID NO: 13895 - DNA, 260 bp, Unknown; identical to SEQ ID NO: 13005
  Description of Unknown: LeftRegion for integrase B896 sequence

SEQ ID NO: 13896 - DNA, 260 bp, Unknown; identical to SEQ ID NO: 13866
  Description of Unknown: LeftRegion for integrase B897 sequence

SEQ ID NO: 13897 - DNA, 260 bp, Unknown
  Description of Unknown: LeftRegion for integrase B898 sequence
ttctatggaagagcagacaaatacccaggaagaaaaagaaagacaggaatatatgcaggaactggaacggctgttagcctgttatcagattgcaagcagggatgataagaatgtcgtatggtcggcattgaacaagtacattccatttctgaactaagtatagccccgtgtaggggctacttttaatgtatggaggaattatgaaccaaaactatgaaatgcctgaatcaggcacagaaaagcgtgtcagggtggcaatc

SEQ ID NO: 13898 - DNA, 260 bp, Unknown; identical to SEQ ID NO: 13867
  Description of Unknown: LeftRegion for integrase B899 sequence

SEQ ID NO: 13899 - DNA, 260 bp, Unknown
  Description of Unknown: LeftRegion for integrase B900 sequence
ctatgtgttgcctacctatgtgctcaacgagcaaaagcccaatcagaaaaatatttctcttaattcactgaaagctctaaaaccttacataacggattttgccggattaagggatgtgatattgaattgcccgattaaaagggcgtagaaatgaacatgcgccgttctgtaatgggacggcgtatttttggaggaaaaatatgatttcaaacagtgctgccactcacacaaaagtggctatctacatacgagtctctaca

SEQ ID NO: 13900 - DNA, 260 bp, Unknown
  Description of Unknown: LeftRegion for integrase B901 sequence
atttctggcgtggactaatcatcttttctctaagggaatgataacagcggataaacaccgacagatgatatcagagattcagcagctcaagaagtaaataaaaaataccacgaagatgtcagtagttttacttgacatcttcgctttggtatggtatcattatcttgttagaaaacagcacaattccaaggaggcagaaaatggatatatataacgtagcgaaccaaatgaagttagagcgtaagactatctttgattta

SEQ ID NO: 13901 - DNA, 260 bp, Unknown; identical to SEQ ID NO: 13880
  Description of Unknown: LeftRegion for integrase B902 sequence

SEQ ID NO: 13902 - DNA, 260 bp, Unknown; identical to SEQ ID NO: 13847
  Description of Unknown: LeftRegion for integrase B903 sequence

SEQ ID NO: 13903 - DNA, 260 bp, Unknown
  Description of Unknown: LeftRegion for integrase B904 sequence
ttatgggaactgaaaacatccgttgcgagaacagcaacgaaaaagaggacttcgtgaaggagctggaacgattgctcgcttgctatcagattgcttctttcgatgaccggaaagtagtttgggcggttctgaacaaatatgccgcctatataagctgaaattgccccataaaggggctttttcttttttgaggtggaataatgagcataaacagaaataatacgaatgagactcccaaaaaagcagctctttacgtgaga

SEQ ID NO: 13904 - DNA, 260 bp, Unknown; identical to SEQ ID NO: 13857
  Description of Unknown: LeftRegion for integrase B905 sequence

SEQ ID NO: 13905 - DNA, 260 bp, Unknown; identical to SEQ ID NO: 13844
  Description of Unknown: LeftRegion for integrase B906 sequence

SEQ ID NO: 13906 - DNA, 260 bp, Unknown; identical to SEQ ID NO: 13860
  Description of Unknown: LeftRegion for integrase B907 sequence

SEQ ID NO: 13907 - DNA, 260 bp, Unknown
  Description of Unknown: LeftRegion for integrase B908 sequence
ttatgggaactgaaaacatccgctgtgaaaacagcaatgaaaaagaggacttcgtgaaggagctggagcgattgcttgcttgctatcagattgcttctttcgatgaccggaaagtagtttgggcggttctgaacaaatatgccgcctatataagctgaaattgccccataaaggggctttttcttttttgaggtggaataatgagcataaacagaaataatacaagtgagactcccaaaaaggctgctctttacgtgaga

SEQ ID NO: 13908 - DNA, 260 bp, Unknown
  Description of Unknown: LeftRegion for integrase B909 sequence
tccctgctccagcttcagcctattaagacagactttgacggcataaaggacgctgtaacaaaatctattcccggccatttataccccccccgacaacttgcataatatttattccaccatttcgtgtaacatgacgaagcagccccgctgtgacggagctgctttttcttcagtcgtgattattttctggaggtctacgcatggcacttccgaagaagacgattccccaaattgagcaaaaacgtgccgccatctatgtc

SEQ ID NO: 13909 - DNA, 260 bp, Unknown; identical to SEQ ID NO: 13847
  Description of Unknown: LeftRegion for integrase B910 sequence

SEQ ID NO: 13910 - DNA, 260 bp, Unknown; identical to SEQ ID NO: 13847
  Description of Unknown: LeftRegion for integrase B911 sequence

SEQ ID NO: 13911 - DNA, 260 bp, Unknown
  Description of Unknown: LeftRegion for integrase B912 sequence
ttatggaaactgaaaacatccgttgcgagaacagcaacgaaaaagaggacttcgtgaaggagctagagcgattgctcgcttgctatcagattgcttctttcgatgaccggaaagtagtttgggcggttctgaacaagtatgccgcttatataagctgaaattgccccataaaggggctttttcttttttgaggtggaataatgagcataaacagaaataatacgaatgagactcccaaaaaggcagctctttacgtgaga

SEQ ID NO: 13912 - DNA, 260 bp, Unknown; identical to SEQ ID NO: 13867
  Description of Unknown: LeftRegion for integrase B913 sequence

SEQ ID NO: 13913 - DNA, 260 bp, Unknown; identical to SEQ ID NO: 13866
  Description of Unknown: LeftRegion for integrase B914 sequence

SEQ ID NO: 13914 - DNA, 260 bp, Unknown
  Description of Unknown: LeftRegion for integrase B915 sequence
gggcactacaatgatcgacaagttttctcaggtcgcaggaaatcttcctgcgactgacagtgatgctaaccggcaatatctggtaatcaatggctatcctgttgttttcagtttttccaaagaacccaacccggaagcatttgaacgcattcggaacatcctgcttgccaccagctatacgaagaaggtaggttgacatcatggacgaatgcagaatcaaacgctatactgagtgcggtaacgggcgatattacaaaccg

SEQ ID NO: 13915 - DNA, 260 bp, Unknown
  Description of Unknown: LeftRegion for integrase B916 sequence
gtgaattaggagggatgtcatgtgaccgataagatagtcatgctgattataaataagagattatatgatgaaggtataataagtcgagaagtatatacaaaaatcatcacgcaaataaagaaatgttaaaaagcattgagcgaaatcattgtatggagtataatataaatggtttcgctcctttttgaaggagaatcgaaatgaacatataccatacaagagaaagactaagaacccgttctatttatgatttgaattta

SEQ ID NO: 13916 - DNA, 260 bp, Unknown; identical to SEQ ID NO: 13844
  Description of Unknown: LeftRegion for integrase B917 sequence

SEQ ID NO: 13917 - DNA, 260 bp, Unknown
  Description of Unknown: LeftRegion for integrase B918 sequence
ctatgtgttgcctacctatgtgctcaacgagcaaaagcccaatcagaaaaatatttctcttaattcgctgaaagctctaaaaccttacataacggattttgccggattaagggatgtaatattgaattgcccgactaaaagggcgtagaaatgaacatgcgccgttctgtaatgggacggcgtatttttggaggaaaaatatgatttcaaacagtgctgccgctcacgcaaaagtggctatctacatacgagtctctaca

SEQ ID NO: 13918 - DNA, 260 bp, Unknown; identical to SEQ ID NO: 13847
  Description of Unknown: LeftRegion for integrase B919 sequence

SEQ ID NO: 13919 - DNA, 260 bp, Unknown
  Description of Unknown: LeftRegion for integrase B920 sequence
ctacgtgctacctacctacgtgctcaacgagcaaaagcccaaccagaaaaatatttctcttaattcgctgaaagctctaaaaccttacataacggattttgccggattaagggatgtaatattgaattgcccgactaaaagggcgtagaaatggacatacgccgttctgtaatgggacggcgtatttttggaggaaaaatatgatttcaaacagcgctgccactcacgcaaaagtggctatctacatacgagtctctacc

SEQ ID NO: 13920 - DNA, 260 bp, Unknown
  Description of Unknown: LeftRegion for integrase B921 sequence
agatggtgacagtatggaggttcttcagaaactgattcatgataccctctgcgaagaagccaagaattatagttgaatcgacatccttgcaacaaggatagcccagcactaaaataatggtacagttgatgcagcaaccaattcaaccaaacgagtgtgcgcacagtatcgttgttttagtttatataggagtgacaacgatgaaaaaacgtgtatataccttataccgtgtttcgaccattggacaggtcgaaaaggat

SEQ ID NO: 13921 - DNA, 260 bp, Unknown; identical to SEQ ID NO: 13873
  Description of Unknown: LeftRegion for integrase B922 sequence

SEQ ID NO: 13922 - DNA, 260 bp, Unknown; identical to SEQ ID NO: 13874
  Description of Unknown: LeftRegion for integrase B923 sequence

SEQ ID NO: 13923 - DNA, 260 bp, Unknown
  Description of Unknown: LeftRegion for integrase B924 sequence
atgaagatatcatggcacgatgcatcttaagagcaatcaacaaccggatgcttcagagcggaattattgatgatgagactaagaagcgaatagaaaatcgcattcagaggtcgaaatttgtcagtaattgattgaaaaacaattatgcaggggatataatcaaattgattttgcccctgcattttttgcaggaggacattatggatatatataaggtaaggcagcttttaaaagagcaaagtatttttgacatcccgcta

SEQ ID NO: 13924 - DNA, 260 bp, Unknown; identical to SEQ ID NO: 13873
  Description of Unknown: LeftRegion for integrase B925 sequence

SEQ ID NO: 13925 - DNA, 260 bp, Unknown
  Description of Unknown: LeftRegion for integrase B926 sequence
gtgaattaggagggatgtcatgtgaccgataagatagtcatgctgattataaataagcgattatatgatgaaggtataataagtcgagaagtatatacaaaaatcatcacgcaaataaataaatgttaaaaagcattgagcgaaatcattgtatggagtataatataaatggtttcgctcctttttgaaggagaattgaaatgaatatataccatacaagagaaagactaagaacccgttctatttatgatttgaattta

SEQ ID NO: 13926 - DNA, 260 bp, Unknown; identical to SEQ ID NO: 13860
  Description of Unknown: LeftRegion for integrase B927 sequence

SEQ ID NO: 13927 - DNA, 260 bp, Unknown
  Description of Unknown: LeftRegion for integrase B928 sequence
ggtaacattatgggaactgaagacatctgtagcattcattgcaatgaaaaaaatgatttcgtaaaggaacttgagcggctgattgcttgctatcaaatagcttctttcgataagtgatttgggcggtcttaaacaaatatgccgcctatataaactgaaattgccccatataggggctttttcttttttgaggtgaaataatgagcgtaaacagaaatattgcaaaagaaaagcccaaaaaggctgctttgtatgtgcgt

SEQ ID NO: 13928 - DNA, 260 bp, Unknown
  Description of Unknown: LeftRegion for integrase B929 sequence
ctacgtgctgcctacctatgtgctcaatgagcaaaagcccaaccagaaaaatatttctcttaattcactgaaagctctaaaaccttacataacagattttgccggattaagggatgtgatattgaattgcccgactaaaagggcgtagaaatgaacatgcgccgttctgtaatgggacggcgtatttttggaggaaaaatatgatttcaaacagtgctgccactcacgcaaaagtggctatatacatacgagtctctacc

SEQ ID NO: 13929 - DNA, 260 bp, Unknown
  Description of Unknown: LeftRegion for integrase B930 sequence
ctggatcattgacatggttatgatctgttgcaacaaattcaccgacagcaccggcgcggtggttggtctgaaggttgctgagtataccagacagccggatcctgatcttgcagaggcttctctgggggaggagagggaggcagcggcctagactgccagagcttacggctataccgtaatagagtcaggcgctcaggataatgccgacaagtaaaaacacggctcgaaaatatgccgcaggaggtggctcggataattcc

SEQ ID NO: 13930 - DNA, 260 bp, Unknown
  Description of Unknown: LeftRegion for integrase B931 sequence
gtgaattaggagggatgtcatgtgaccgataagatagtcatgctgattataaataagagattatatgatgaaggtataataagtcgagaagtatatacaaaaattatcacgcaaataaataaatgttaaaaagcattgagcgaaatcattgtatggagtataatataaatggtttcgctcctttttgaaggagaatcgaaatgaacatataccatacaagagaaaggctaagaacccgttctatttatgatttgaattta

SEQ ID NO: 13931 - DNA, 260 bp, Unknown; identical to SEQ ID NO: 13900
  Description of Unknown: LeftRegion for integrase B932 sequence

SEQ ID NO: 13932 - DNA, 260 bp, Unknown; identical to SEQ ID NO: 13866
  Description of Unknown: LeftRegion for integrase B933 sequence

SEQ ID NO: 13933 - DNA, 260 bp, Unknown
  Description of Unknown: LeftRegion for integrase B934 sequence
ctgctccagcttcagcctattaagacagactttgacggcataaaggacgctgtaacaaaatctattcccggccatttatacccccccccccgacaacttgcataatatttattccaccatttcgtgtaacatgacgaagcagccccgctgtgacggagctgctttttcttcagtcgtgattattttctggaggtctacgcatggcacttccgaagaagacgattccccaaattgagcaaaaacgtgccgccatctatgtc

SEQ ID NO: 13934 - DNA, 260 bp, Unknown; identical to SEQ ID NO: 13854
  Description of Unknown: LeftRegion for integrase B935 sequence

SEQ ID NO: 13935 - DNA, 260 bp, Unknown
  Description of Unknown: LeftRegion for integrase B936 sequence
gtctgatggaagctctctttgcagcaggggtaatcaacctgcctacctatcagaacttccttcggatgaagcgtgagcaggaggaagaaccgcctgcaaaggcttcgtaaacaacagagaaaggctctggtggaggggattctgccagagcctttctttttgccgcagaaaagagtcagagacagtggaggttaaattttatgagagtagccgtgtacgctcgtgtttcaaccgaacatgaagcgcaaatcaatgccctg

SEQ ID NO: 13936 - DNA, 260 bp, Unknown; identical to SEQ ID NO: 13889
  Description of Unknown: LeftRegion for integrase B937 sequence

SEQ ID NO: 13937 - DNA, 260 bp, Unknown; identical to SEQ ID NO: 13866
  Description of Unknown: LeftRegion for integrase B938 sequence

SEQ ID NO: 13938 - DNA, 260 bp, Unknown; identical to SEQ ID NO: 13866
  Description of Unknown: LeftRegion for integrase B939 sequence

SEQ ID NO: 13939 - DNA, 260 bp, Unknown; identical to SEQ ID NO: 13892
  Description of Unknown: LeftRegion for integrase B940 sequence

SEQ ID NO: 13940 - DNA, 260 bp, Unknown
  Description of Unknown: LeftRegion for integrase B941 sequence
ccctgctccagcttcagcctattaagacagactttgacggcataaaggacgctgtaacaaaatctattcccggctatttatacccccccccgacaacttgcataatatttattccaccatttcgtgtaacatgacgaagcagccccgctgtgacggagctgctttttcttcaatcgtgattattttctggaggtctacgcatggcacttccgaagaagacgattccccaaattaagcaaaaacgtgccgccatctatgtc

SEQ ID NO: 13941 - DNA, 260 bp, Unknown; identical to SEQ ID NO: 13907
  Description of Unknown: LeftRegion for integrase B942 sequence

SEQ ID NO: 13942 - DNA, 260 bp, Unknown
  Description of Unknown: LeftRegion for integrase B943 sequence
gtgaattaggagggatgtcatgtgaccgataagatagtcatgctgattataaataagcgattatatgatgaaggtataataagtcgagaagtatatacaaaaatcatcacgcaaataaataaatgttaaaaagcattgagcgaaatcattgtatggagtataatataaatggtttcgctcctttttgaaggagaatcgaaatgaacatataccatacaagagaaagactaagaacccgttctatttatgatttgaattta

SEQ ID NO: 13943 - DNA, 260 bp, Unknown
  Description of Unknown: LeftRegion for integrase B944 sequence
aatagtatcctgtaatttaatcaaataacgcaaaaaccgccccggtattggcgtaccgaagcggagttgcaaagattgtaacctacaaatcccgaaggactgcgtgatataatcttccttaagcaagagcattataccacacatccttccaatttgcatagggtgtattttttataccctttttcaggaaggtgttatttatggcatatcgtttttcacagcaaactgctgcccctgataccagaaccgttgccctgtac

SEQ ID NO: 13944 - DNA, 260 bp, Unknown
  Description of Unknown: LeftRegion for integrase B945 sequence
ctacgtgctacctacctacgtgctcaacgagcaaaagcccaaccagaaaaatatttctcttaattcgttgaaagctctaaaaccttacataacggattttgccggattaagggatgtaatattgaattgcccgactaaaagggcgtagaaatgaacatacgccgttctgtaatgggacggcgtatgtttggaggaaaaatatgatttcaaacagttccgccactcactcaaaagtggctatatacatacgagtctctacg

SEQ ID NO: 13945 - DNA, 260 bp, Unknown
  Description of Unknown: LeftRegion for integrase B946 sequence
gtgaattaggagggatgtcatgtgaccgataagatagtcatgctgattataaataagagattatatgatgaaggtataataagtcgagaagtatatacaaaaatcatcacgcaaataaataaatgttaaaaagcattgagcgaaatcattgtatggagtataatataaatggtttcgctcctttttgaaggagaatcgaaatgaacatataccatacaagagaaagactaagaacccgttctatttatgatttgaattta

SEQ ID NO: 13946 - DNA, 260 bp, Unknown; identical to SEQ ID NO: 13423
  Description of Unknown: LeftRegion for integrase B947 sequence

SEQ ID NO: 13947 - DNA, 260 bp, Unknown; identical to SEQ ID NO: 13892
  Description of Unknown: LeftRegion for integrase B948 sequence

SEQ ID NO: 13948 - DNA, 260 bp, Unknown
  Description of Unknown: LeftRegion for integrase B949 sequence
tgctccagcttcagcctattaaaacagactttgacggcataaaggacgctgtaacaaaatctattcccggctatttataccccccccccccgacaacttgcataatatttattccaccatttcgtgtaacatgacgaagcagccccgctgtgacggagctgctttttcttcagtcgtgattattttctggaggtctacgcatggcacttccgaagaagacgattccccaaattgagcaaaaacgtgccgccatctatgtc

SEQ ID NO: 13949 - DNA, 260 bp, Unknown
  Description of Unknown: LeftRegion for integrase B950 sequence
ctatgtgttgcctacctatgtgctcaacgagcaaaagcccaatcagaaaaatatttctcttaattcactgaaagctctaaaaccttacataacggattttgccggattaatggatgtgatattgaattgcccgattaaaagggcgtagaaatgaacatgcgccgttctgtaatgggacggcgtatttttggaggaaaaatatgatttcaaacagtgctgccactcacgcaaaagtggctatctacatacgagtctctacc

SEQ ID NO: 13950 - DNA, 260 bp, Unknown; identical to SEQ ID NO: 13860
  Description of Unknown: LeftRegion for integrase B951 sequence

SEQ ID NO: 13951 - DNA, 260 bp, Unknown; identical to SEQ ID NO: 13847
  Description of Unknown: LeftRegion for integrase B952 sequence

SEQ ID NO: 13952 - DNA, 260 bp, Unknown
  Description of Unknown: LeftRegion for integrase B953 sequence
gtgaattaggaggggtgtcatgtgatcgataaaatagtcatgctgattataaataagcgattatatgatgaaggtataataagtcgagaagtatatacaaaaatcatcacgcaaataaataaatgttaaaaagcattgagcgaaatcattgtatggagtataatataaatggtttcgctcctttttgaaggagaatcgaaatgaacatataccatacaagagaaagactaagaacccgttctatttatgatttgaattta

SEQ ID NO: 13953 - DNA, 260 bp, Unknown
  Description of Unknown: LeftRegion for integrase B954 sequence
gtgaattaggagggatgtcatgtgaccgataagatagtcatgctgattataaataagcgattatatgatgaaggtataataagtcgagaagtatatacaaaaatcatcacgcaaataaataaatgttaaaaagcattgagcgaaatcattgtatggagtataatataaatggtttcgctcctttttgaaggagaatcgaaatgaatatataccatacaagagaaagactaagaacccgttctatttatgatttgaattta

SEQ ID NO: 13954 - DNA, 260 bp, Unknown
  Description of Unknown: LeftRegion for integrase B955 sequence
acctcacaccggaggaaaaaacattcgtatcgcaagggaagcaagaagaagagaactccaacgccggataaaacagaagggcaacctcctgttcattaactccgactactggaaacgacaaccgaatacagcaagagcctcctccgacgcttcacccgcgaaggagagaggcttgactcttatcaaggaggacaacgaagatgagtaaactcaccgacaagttgaactccataagggttgctatctatgtgcgagtatct

SEQ ID NO: 13955 - DNA, 260 bp, Unknown; identical to SEQ ID NO: 13844
  Description of Unknown: LeftRegion for integrase B956 sequence

SEQ ID NO: 13956 - DNA, 260 bp, Unknown; identical to SEQ ID NO: 13880
  Description of Unknown: LeftRegion for integrase B957 sequence

SEQ ID NO: 13957 - DNA, 260 bp, Unknown; identical to SEQ ID NO: 13476
  Description of Unknown: LeftRegion for integrase B958 sequence

SEQ ID NO: 13958 - DNA, 260 bp, Unknown
  Description of Unknown: LeftRegion for integrase B959 sequence
tgtacttatgagcagcactgaaactcaggaagaaaaagaacgccaggagcaagttcaggaattgcaacggctactggcttgttaccaggtcgcaagccgtgatgacaaaaatgtagtatgggcggcactgaataaatacatgccgtatgtgaactaagtatagccccgtggaggggctatttctttttgatggaggaattatgaagaataactttaagatgcccggatcgggctcagaaacgcatatccgggtggcgatt

SEQ ID NO: 13959 - DNA, 260 bp, Unknown
  Description of Unknown: LeftRegion for integrase B960 sequence
tgtacttatgagcagcactgaaactcaggaagaaaaagaacgccaggagcaagttcaggaattgcaacggctactggcttgttaccaggtcgcaagccgtgatgacaaaaatgtagtatgggcggcactgaataaatacatgccgtatgtgaactaagtatagccccgtggaggggctatttctttttgatggaggaattatgaagaaaaactttaagatgcccggatcgggctcagaaacgcctatccgggtggcgatt

SEQ ID NO: 13960 - DNA, 260 bp, Unknown
  Description of Unknown: LeftRegion for integrase B961 sequence
tgtacttatgagcagcactgaaactcaggaagaaaaagaacgccaggagcaagtccaggaattgcaacggctactggcttgttatcaggtcgcaagccgtgatgacaaaaatgtagtatgggcggcactgaataaatacatgccgtatgtgaactaagtatagccccgtggaggggctatttctttttgatggaggaattatgaagaaaaactttaagatgcccggatcgggctcagaaacgcctatccgggtggcgatt

SEQ ID NO: 13961 - DNA, 260 bp, Unknown
  Description of Unknown: LeftRegion for integrase B962 sequence
aagcaatgagtgtattgatccagaagatcaggcaagacgtgaaatggttgacgaactggagcgtctgattacatgctatcaggttgccagtcgtgacgataaaaacgtcgtatgggctgcacttaacaagtacatacctaccctgaacatgtaaaagccctatagagggcttttctttttttgtatggaggaattattagatgctacgaggaaatactgagaatggctcaaatcagcgcatcagagtggcaatatacgtt

SEQ ID NO: 13962 - DNA, 260 bp, Unknown; identical to SEQ ID NO: 13960
  Description of Unknown: LeftRegion for integrase B963 sequence

SEQ ID NO: 13963 - DNA, 260 bp, Unknown
  Description of Unknown: LeftRegion for integrase B964 sequence
tatgtcacgtttcatggcgtctctgttttagatggtacatcctgcaaattcctcgatttggttcaatcttgcggcaaggttctccatgtcttggttgagcttctctttggttatcttcgcgtatatctgcgttgtcttgataacacatttgcaggtacaactattattgttatctttgcaccaacttaataatcaagaatatgagaggtgcaatttattcacgtgtttctaccatagaccaagactacaacaggcagacc

SEQ ID NO: 13964 - DNA, 260 bp, Unknown
  Description of Unknown: LeftRegion for integrase B965 sequence
ccgcatgacgagcctgccgagtcttccgatgccgaaaaactccgcgccgagaacgcggcccttcgcgcgcagcttgcccagcagcagaaatccctgcgtatgcaccggcttgtgacgctcatcctcttgggcattctttcgctgtgtgcccttgcgcttgtggccgacgtgctcatcccatcaatcggctggattcgcacatgaaaattaccgccccggcccgatcagccagagcggtatctttggaggcttttgtggat

SEQ ID NO: 13965 - DNA, 260 bp, Unknown
  Description of Unknown: LeftRegion for integrase B966 sequence
gtcgtaaatatcggcggttccgtcggcaacggtgtcacaaagaaaaccgactttctcgttgtcggctctacagattattgcgcctctgtaaagggcggcaaaactggcaagctgaaaaaagccgaggatttgcagaaaaagggcgcaaaccttgccattatcgacgagggcgctttttacgacatgttgggcgagtgattatggcacaacaaaaaaaggccgtcggggccgtgttcgacggaacgccgcgggcggtaatt

SEQ ID NO: 13966 - DNA, 260 bp, Unknown
  Description of Unknown: LeftRegion for integrase B967 sequence
tgtacttatgagcagcactgaaactcaggaagaaaaagaacgccaggaacaagtccaggaattgcaacggctactggcttgttatcaggtcgcaagccgtgatgacaaaaatgtagtatgggcggcactgaataaatacatgccgtatgtgaactaagtatagccccgtggaggggctatttctttttgatggaggaattatgaagaaaaactttaagatgcccggatcgggctcagaaacgcctatccgggtggcgatt

SEQ ID NO: 13967 - DNA, 260 bp, Unknown
  Description of Unknown: LeftRegion for integrase B968 sequence
ccgatgaccgggaaactgtaacaatccctattcaggaatctattcagctttctgaggaagaacgtattttgatttccgcatttaggagtgcttctatagaaggacgcatgagaattatccaagtctgtatgaacgaaaaggattcaaaaggggaaactatcattgcaggataataagcattgaggaatggaggaagaaccatgtacgaagagattaagactgcttgtctatatctacgatattcaagtagcaaccaaact

SEQ ID NO: 13968 - DNA, 260 bp, Unknown
  Description of Unknown: LeftRegion for integrase B969 sequence
tatgtcaacggttttatggttggcaatattcccggcgacgataccgatttcataaaccgggcccgccgccgcggcgtcgaggtcgtcggttttaaggtcgattattttgagcccgaggacgagcctgagcgcggccgtgtgtactatgcccgaatcaaactcgcaatcgtgcctatccgcgcggcaaaggcggcgaaataatgccgcgggccgcgcaagccgccggggccgagtttgacggtacgccgcgggcggtaatt

SEQ ID NO: 13969 - DNA, 260 bp, Unknown; identical to SEQ ID NO: 13458
  Description of Unknown: LeftRegion for integrase B970 sequence

SEQ ID NO: 13970 - DNA, 260 bp, Unknown
  Description of Unknown: LeftRegion for integrase B971 sequence
tgtacttatgagcagcactgaaactcagggagaaaaagaacgccaggagcaagtccaggaattgcaacggctactggcttgttatcaggtcgcaagccgtgatgacaaaaatgtagtatgggcggcgctgaataaatacatgccgtatgtgaactaagtatagccccgtggaggggctatttctttttgatggaggaattatgaagaaaaactttaagatgctcgaatcaggctcagagacgtctatccgggtggcaatc

SEQ ID NO: 13971 - DNA, 260 bp, Unknown; identical to SEQ ID NO: 13960
  Description of Unknown: LeftRegion for integrase B972 sequence

SEQ ID NO: 13972 - DNA, 260 bp, Unknown
  Description of Unknown: LeftRegion for integrase B973 sequence
tgtacttatgagcagcactgaaactcaggaagaaaaagaacgccaggagcaagtccaggaattgcaacggctactggcttgttatcaggtcgcaagccgtgacgacaaaaatgtagtatgggcggcactgaataaatacatgccgtatgtgaactaagtatagccccgtggaggggctatttctttttgatggaggaattatgaagaaaaactttaagatgcccggatcgggctcagaaacgcctatccgggtggcgatt

SEQ ID NO: 13973 - DNA, 260 bp, Unknown
  Description of Unknown: LeftRegion for integrase B974 sequence
tgtacttatgagcagcactgaaactcaggaagaaaaagaacgccaggagcaagtccaggaattgcaacggctactggcttgttaccaggtcgcaagccgtgatgacaaaaatgtagtatgggcggcactgaataaatacatgccgtatgtgaactaagtatagccccgtggaggggctatttctttttgatggaggaattatgaagaaaaactttaagatgcccggatcgggctcagaaacgcctatccgggtggcgatt

SEQ ID NO: 13974 - DNA, 260 bp, Unknown; identical to SEQ ID NO: 13960
  Description of Unknown: LeftRegion for integrase B975 sequence

SEQ ID NO: 13975 - DNA, 260 bp, Unknown
  Description of Unknown: LeftRegion for integrase B976 sequence
cagagaagaatgctgtagatgccgaagatcaagcaaggcgcgagcaggtagatgagctccagcgccttataacatgttatcaggtggcaagcagggacgataaaaacgtcgtatgggctgcacttaacaagtacatacctaccctgaacatgtaaaagccctctatagggcttttcttttttgtatggaggaattattagatgatacgagaaaatactgagaatggctcaaatcggcgcatcagggtggcaatatacgtt

SEQ ID NO: 13976 - DNA, 260 bp, Unknown; identical to SEQ ID NO: 13959
  Description of Unknown: LeftRegion for integrase B977 sequence

SEQ ID NO: 13977 - DNA, 260 bp, Unknown
  Description of Unknown: LeftRegion for integrase B978 sequence
tgtacttatgagcagcactgaaactcaggaagaaaaagaacgccaggagcaagtccaggaattgcaacgactactggcttgttaccaggtcgcaagccgtgatgacaaaaatgtagtatgggcggcactgaataaatacatgccgtatgtgaactaagtatagccccgtggaggggctatttctttttgatggaggaattatgaagaaaaactttaagatgcccggatcgggctcagaaacgcctatccgggtggcaatc

SEQ ID NO: 13978 - DNA, 260 bp, Unknown
  Description of Unknown: LeftRegion for integrase B979 sequence
aaggaaatataaaagttatcattgaaattccaacagaaaataacattaattacgagaaacaaaaaaatgaaataaaaaaaataatgaacgatgaattattattgaaaataaaaagataaatagatataatcaaagtgtatacaaagatttttgtaatatttgtatacactattttttatgctttagaggagaatagttaaatgaaaaagagagtaagaatacttttgagagtaagttcaaatcaacagttagaagcagat

SEQ ID NO: 13979 - DNA, 260 bp, Unknown
  Description of Unknown: LeftRegion for integrase B980 sequence
cagagaagaatgctgtagatgccgaagatcaagcaaggcgcgagcaggtagatgagctccagcgccttataacatgttatcaggtggcaagcagggacgataaaaacgtcgtatgggctgcacttaacaagtacatacctaccttgaacatgtaaaagccctctatagggcttttcttttttgtatggaggaattattagatgatacgagaaaatactgagaatggctcaaatcagcgcatcagggtggcaatatacgtt

SEQ ID NO: 13980 - DNA, 260 bp, Unknown
  Description of Unknown: LeftRegion for integrase B981 sequence
tgataaatcaattaacctatctattttgtttgatttaaagaaattaaacttaattacagaaaaacaattttatgtattaaaagaaaaaatacaatgtttttactaaaatactatgtcagttatgacaaaattaagatataatgtttttagaacgaagcagtaagttcaaaatgaatttaaaaaaagaaagtgaggtataaatggcacaagttgagattatagctgctaatctcaaagataaaaataataatattactatt

SEQ ID NO: 13981 - DNA, 260 bp, Unknown
  Description of Unknown: LeftRegion for integrase B982 sequence
tgtacttatgagcagcactgaaactcaggaagaaaaagaacgccaggagcaagttcaggaattgcaacggctactggcttgttaccaggtcgcaagccgtgatgacaaaaatgtagtatgggcggcactgaataaatacatgccgtatgtgaactaagtatagccccgtggaggggctatttctttttgatggaggaattatggggaaaaactttaagatgcccggatcgggctcagaaacgcctatccgggtggcgatt

SEQ ID NO: 13982 - DNA, 260 bp, Unknown
  Description of Unknown: LeftRegion for integrase B983 sequence
ccgtatatgccgctttttcaaaaagaacttgatatatcctccgaatggttggaaaactcatacacatacacgccaaggccgtataagccttcaaagcgcgcactccaaatggaggcggacatcaaagaaaccgctcacaagtacataacaaacgaaaaagcccttctgctgggcgcagaagggcgtaacgggtaacagacatgtcagtagatattaaatggcaggtgccaaaggcacagccggaggccagcgaactggcc

SEQ ID NO: 13983 - DNA, 260 bp, Unknown
  Description of Unknown: LeftRegion for integrase B984 sequence
aaggaaatataaaagttatcattgaaattccaacagaaaataacattaattacgagaaacaaaaaaatgaaataaaaaaaataatgaacgatgaattattattgaaaataaaaagataaatagatataatcaaagtgtatacaaagatttttgtaatatttgtatacactattttttatgccttagaggagaatagttaaatgaaaaagagagtaagaatacttttgagagtaagttcaaatcaacagttagaagcagat

SEQ ID NO: 13984 - DNA, 260 bp, Unknown
  Description of Unknown: LeftRegion for integrase B985 sequence
tctccaactggacggcaaaggcacccgcgccggcagttgcaccgcagcctgcgccacaggttattgaacaaaaaccgtctgcagctgatgaaatccgcaagtacaagggcctgcttgacgatggaatcatttcgcaggaagaatttgaggcaaagaagaagcagttgcttggcctgtaaaaccgaaaggagcgtgacggcatgaaaaagcgaatcaacactaattccgcagcccgtgccgtcatctacgctcgttattcc

SEQ ID NO: 13985 - DNA, 260 bp, Unknown; identical to SEQ ID NO: 13979
  Description of Unknown: LeftRegion for integrase B986 sequence

SEQ ID NO: 13986 - DNA, 260 bp, Unknown; identical to SEQ ID NO: 13960
  Description of Unknown: LeftRegion for integrase B987 sequence

SEQ ID NO: 13987 - DNA, 260 bp, Unknown; identical to SEQ ID NO: 13960
  Description of Unknown: LeftRegion for integrase B988 sequence

SEQ ID NO: 13988 - DNA, 260 bp, Unknown; identical to SEQ ID NO: 13960
  Description of Unknown: LeftRegion for integrase B989 sequence

SEQ ID NO: 13989 - DNA, 260 bp, Unknown
  Description of Unknown: LeftRegion for integrase B990 sequence
tgtacttatgagcagcactgaaactcaggaagaaaaagaacgccaggagcaagtccaggaattgcaacggctactggcttgttatcaggtcgcaagccgtgatgacaaaaatgtagtatgggcggcactgaataaatacatgccgtatgtgaactaagtatagccccatggaggggctatttctttttgatggaggaattatgaagaaaaactttaagatgcccggatcaagctcagaaacgcctatccgggtggcaatc

SEQ ID NO: 13990 - DNA, 260 bp, Unknown; identical to SEQ ID NO: 13960
  Description of Unknown: LeftRegion for integrase B991 sequence

SEQ ID NO: 13991 - DNA, 260 bp, Unknown
  Description of Unknown: LeftRegion for integrase B992 sequence
cagagaagaacgttgtagatgccgaagatcaggcaagacgcgagcaggtagatgagctccagcgcctcataacatgttatcaggtggcaagcagggacgataaaaacgtcgtttgggctgcacttaacaagtacatacctaccctgaacatgtaaaagccctattgagggcttttcttttttgtatggaggaattattagatgctacgagaaaatactgagaatggctcaaatcagcgcatcagggtggcaatatacgtt

SEQ ID NO: 13992 - DNA, 260 bp, Unknown; identical to SEQ ID NO: 13960
  Description of Unknown: LeftRegion for integrase B993 sequence

SEQ ID NO: 13993 - DNA, 260 bp, Unknown
  Description of Unknown: LeftRegion for integrase B994 sequence
tgtacttatgagtagcactgaaactcaggaagaaaaagaacgccaggagcaagtccaggaattgcaacggctactggcttgttatcaggtcgcaagccgtgatgacaaaaatgtagtatgggcggcactgaataaatacatgccgtatgtgaactaagtatagccccgtggaggggctatttctttttgatggaggaattatgaagaaaaactttaagatgcccggatcaggctcagagacgtctatccgggtggcaatc

SEQ ID NO: 13994 - DNA, 260 bp, Unknown; identical to SEQ ID NO: 13344
  Description of Unknown: LeftRegion for integrase B995 sequence

SEQ ID NO: 13995 - DNA, 260 bp, Unknown; identical to SEQ ID NO: 13821
  Description of Unknown: LeftRegion for integrase B996 sequence

SEQ ID NO: 13996 - DNA, 260 bp, Unknown
  Description of Unknown: LeftRegion for integrase B997 sequence
cgaaagatttgaggggctttttgccgaccacatagtggacgccctcgatgtagccccagcgcttccaggcggccaacagcccgggaagcgtgttcgtcaggccgtgtttaatgggtcaaacacagatataactttattgctgaaatatttggatatgtgggatttaggtggtaactttgcagcggaaaatctaaaatcagatgaagaaagctgtaatatattcccgtgtttctactctagagcaggattatacttcgcag

SEQ ID NO: 13997 - DNA, 260 bp, Unknown; identical to SEQ ID NO: 13979
  Description of Unknown: LeftRegion for integrase B998 sequence

SEQ ID NO: 13998 - DNA, 260 bp, Unknown
  Description of Unknown: LeftRegion for integrase B999 sequence
tcgcaccctcggcattctgctgattgcgcttggcgttctcctgctggtgcttgggcttctatcatgggtgtgggcggtccttggtgtgctgagtgccgtcggcggggtgctcctgcttaaaaatgcaaaatcgatttcggaacgcgggaacgctgctgctttggctgcggctcgaaacgtggccgaggcaaggatggaagatgaagaagaagccgattgaacctgaaatgcaggatgccgtgatctacactcggtactcg

SEQ ID NO: 13999 - DNA, 148 bp, Unknown
  Description of Unknown: LeftRegion for integrase B1000 sequence
tcaggagattactttgacgccagtcgaaaaagcatatcttgaaagcattaaagaggtttccaaggaagtaaaaaggagataacatctgatgaaaaaacagcagaaatgttacatatatacaagagtttccacttccatgcaggtagat

SEQ ID NO: 14000 - DNA, 260 bp, Unknown
  Description of Unknown: LeftRegion for integrase B1001 sequence
ttatgaaagtgagaagattattatggatatgaataagatagtggaagtgcaaattcaaattattattaatacaaacctttataaaaaaaatattattgatgagaatactttttcgaaggcaaatgaaaagttacttaagatgcttaaagcattaagggcagcataatatatgtaaactaaagtagcaaaggaggaagattatgtcctatgatgaaatagtatctgcagtaattcgtggggaaaaccttcgtaatcttcct

SEQ ID NO: 14001 - DNA, 260 bp, Unknown
  Description of Unknown: LeftRegion for integrase B1002 sequence
tgtttttatggaaccagtaacgaaacaggaagaaaaagaacgtgaagagcaagtccaggaactacagagactgcttgcttgttatcaggttgcaagccatgatgacaagaacgtcgtatgggcggcactgaacaaatacatgccgtacgtgaactaggtatagccccgtggaggggctatttctatttgatggaggaattatgaaaagaaactataaaatgcctaattcaggctcagaaacgcatatcagagtggcaatc

SEQ ID NO: 14002 - DNA, 260 bp, Unknown; identical to SEQ ID NO: 13983
  Description of Unknown: LeftRegion for integrase B1003 sequence

SEQ ID NO: 14003 - DNA, 260 bp, Unknown; identical to SEQ ID NO: 13960
  Description of Unknown: LeftRegion for integrase B1004 sequence

SEQ ID NO: 14004 - DNA, 260 bp, Unknown; identical to SEQ ID NO: 13979
  Description of Unknown: LeftRegion for integrase B1005 sequence

SEQ ID NO: 14005 - DNA, 260 bp, Unknown
  Description of Unknown: LeftRegion for integrase B1006 sequence
ttatgggaactgaaaacatccgctgtgaaaacagcaatggaaaagaggacttcgtaaaggagctggagcgattgctcgcttgctatcagatcgcttctttcgatgaccggaaagtagtttgggcggttctgaacaaatatgccgcctatataagctgaaattgccccataaaggggctttttcttttttgaggtggaataatgagcataaacagaaataatacaagtgagactcccaaaaaggctgctctttacgtgaga

SEQ ID NO: 14006 - DNA, 260 bp, Unknown; identical to SEQ ID NO: 13960
  Description of Unknown: LeftRegion for integrase B1007 sequence

SEQ ID NO: 14007 - DNA, 260 bp, Unknown; identical to SEQ ID NO: 13960
  Description of Unknown: LeftRegion for integrase B1008 sequence

SEQ ID NO: 14008 - DNA, 260 bp, Unknown; identical to SEQ ID NO: 13983
  Description of Unknown: LeftRegion for integrase B1009 sequence

SEQ ID NO: 14009 - DNA, 260 bp, Unknown
  Description of Unknown: LeftRegion for integrase B1010 sequence
ttgtcggtgtaacaaatgtcgaaactcctaatccaaactttccggaagatatacttctccttgttcaagcatacactcgtgcttcagatgctgataaaacagttttatgggcgttatttgacaaatatttgtctccgcttgataaagatgtgcttaatgaggttttatcgaataatgatacaaattaagggttttacgatatgaataaaataattgatacactaaatacacaaaaagcagctatctatattagagtatct

SEQ ID NO: 14010 - DNA, 260 bp, Unknown
  Description of Unknown: LeftRegion for integrase B1011 sequence
tttttccgctttacggtaaactatccctaaattttcagcaaaataaaaacgcccacggtgttaccagcaccgcaggcgttccagatcagcttactcagagatggtgcaggataaaacctgcccagagcaataacagacctcgcagatgttattgtaccacctccgggcaggcttgtcaaagtgtacccggaggtatttttatgggcaaaaaacaaaagacaaacggcggcgatgcggtcatctacgcccgctattcttcc

SEQ ID NO: 14011 - DNA, 260 bp, Unknown
  Description of Unknown: LeftRegion for integrase B1012 sequence
cctttgaacatggactttagggatttctatatccttccaacgaaggtgctgaatgaaaaaatgcctattcgaaaaaccataacagttcaatcgctcatgcagctggagccgatgtggtgtgactactacggaataggcaatgcaatacaagaggttatgaccgcctgagaaatcaggcgtttttctattagaggtgaactatggcatacaacaaactttcactacctggacatatacgggtagcaatctacgtccgggtg

SEQ ID NO: 14012 - DNA, 260 bp, Unknown
  Description of Unknown: LeftRegion for integrase B1013 sequence
ttgtcggtgtaacaaatgtcgaaactcctaatcctaactttccggaagatatacttctccttgttcaagcatacactcgtgcttcagatgctgataaaacagttttatgggcgttatttgacaaatatttgtctccgcttgataaagatgtgcttaatgaggttttatcgaataatgatacaaattaagggttttacgatatgaataaaataattgatacactaaatacacaaaaagcagctatctatattagagtatct

SEQ ID NO: 14013 - DNA, 260 bp, Unknown
  Description of Unknown: LeftRegion for integrase B1014 sequence
cctttgaacatggacttttgggatttctatatccttccaacgaaggtgctgaatgaaaaaatgcctattcgaaaaaccataacagttcaatcgctcatgcagctggagccgatgtggtgtgactactacggaataggcaatgcaatacaagaggttatgaccgcctgagaaatcaggcgtttttctattagaggtgaactatggcatacaacaaactttcactacctggacatatacgggtagcaatctacgtccgggtg

SEQ ID NO: 14014 - DNA, 260 bp, Unknown
  Description of Unknown: LeftRegion for integrase B1015 sequence
ttgtcggtgtaacaaatgtcgaaactcctaatccaaactttccggaagatatacttctccttgttcaagcatacactcgtgcttcagatgctgataaagcagttttatgggcgttatttgacaaatatttgtctccgcttgataaagatgtgcttaatgaggttttatcgaataatgatacaaattaagggttttacgatatgaataaaataattgatacactaaacacacaaaaagcggctatctatattagagtatct

SEQ ID NO: 14015 - DNA, 177 bp, Unknown
  Description of Unknown: LeftRegion for integrase B1016 sequence
cgtctgttccgccgtgaagccgtgcttggcgttggcttctttctggagcgtggtaaataaacatttgcaggtacgtgtaataagttctatctttgcaaagaacttaatattagacacatgagaggagttatatattcaagagtttctaccatagaccaagattatagtaagcagacc

SEQ ID NO: 14016 - DNA, 260 bp, Unknown
  Description of Unknown: LeftRegion for integrase B1017 sequence
ttgtgtcacgtttcatggcttttctttttagatggtgcaacctgcaaattcctcgacgccgttcaatcttgcggcaaggttctccatgtcctgattgagcttctctttggttatctttgcgtaaatctgcgtcgtcttgataacacatttgcaggtacaactattattactatctttgcaccaacttaataatcaagaatatgagaggtgcaatttattcacgtgtttctaccttagaccaagattacaacaggcagacc

SEQ ID NO: 14017 - DNA, 260 bp, Unknown
  Description of Unknown: LeftRegion for integrase B1018 sequence
gatccgatttttgagccgcctattgattttctggaagaatgccgcaagcgttgggaagcggcacagtcctctttctgcaaaaccattgagtgcaagatcggaaacacatggtatgtgattgaaacggagtgtgatggaaatgagccacttaccgacaaggtaaaacggctcattttttctgacaagggggtgatttgttaatgactgcgacacaaaagcatgatataattccaatatgcacaacggtactgtcggctgac

SEQ ID NO: 14018 - DNA, 260 bp, Unknown
  Description of Unknown: LeftRegion for integrase B1019 sequence
gacccgatttttgagccgcccattgattttttggaagaatgccgcaagcattgggaaacagcgcagtcttctttccgcaaaaccattgagcgtaagatcgggaacacatggtatgtgattgaaacagaatgtgacgggaatgagccgcttgccgacaaggtaaaacggctcattttttctgacaagggggtgatttgttaatgactgcgacacaaaagcatgatataattccagtatgcacaacggtactgtcggctgac

SEQ ID NO: 14019 - DNA, 177 bp, Unknown
  Description of Unknown: LeftRegion for integrase B1020 sequence
ggtcttgtccaccggaaggtcgtaatgaatgttacagtccttctggagggctgtaaataaacatttgcaggtacgtgtaataagttctatctttgcaaagaacttaatattaggcacatgagaggagttatatattcaagagtttctaccatagaccaagattatagtaagcagacc

SEQ ID NO: 14020 - DNA, 260 bp, Unknown
  Description of Unknown: LeftRegion for integrase B1021 sequence
agtctgcacttttattgtagcatgatccccctcagaacacaatccgacaaaaaagaatccccggcagttctgtacgatagagccgccggggccagatggggaatctgtctgtcggagaataatcataggataagaaaacacgcctgctgagcaagttcattgtaccatgatcctgctcagcgcacaagctgaggaaccccatgaaaaagaaattttcttctgtacccgaaccggatattcaggacgcggtgatctatgca

SEQ ID NO: 14021 - DNA, 260 bp, Unknown
  Description of Unknown: LeftRegion for integrase B1022 sequence
cggtctgcacttttattgtagcatgatccccctcagaacacaatccgacaaaaaagaatccccggcagctctgtacgatagagccgccggggccagatggggaatctgtctgtcggagaataatcataggaaagaaaacacgcctgctgagcaatttcattgtaccatgatcctgctcagcgcacaagctgaggaaaaccatgaaaaagaaattttcttctgtacccgatccagatattcaggacgcggtgatctatgca

SEQ ID NO: 14022 - DNA, 260 bp, Unknown
  Description of Unknown: LeftRegion for integrase B1023 sequence
gatccgatttttgagccgcctattgattttctggaagaatgccgcaagcgttgggaagcggcacagtcctctttctgcaaaaccattgagtgcaagatcggaaacacatggtatgtgattgaaacggagtgtgacggaaatgagccacttaccgacaaggtaaaacggctcattttttctgacaagggggtgatttgttaatgactgcgacacaaaagcatgatataattccaatatgcacaacggtactgtcggctgac

SEQ ID NO: 14023 - DNA, 260 bp, Unknown
  Description of Unknown: LeftRegion for integrase B1024 sequence
aaattgataaaaaagaatataataaaatattcgccgcattgaaattaatagaagcattgtttattgatggaaaaataaaatatcatgtatttaggaatatcctagatgactataaagatgttgttgatttatctgagtttaaatgctatacttgatacatctattaacaaacatcgtattattatgaggaataaaaataaatgtatgatatttacaatcaaaaaccaaccagccgaaaagttgtaatttatgcgcgcgtt

SEQ ID NO: 14024 - DNA, 260 bp, Unknown
  Description of Unknown: LeftRegion for integrase B1025 sequence
ggctactggctgtaaaatgctggtagccctcattttttagttgtatctagtatataaggggtgtataatagataggaactgaaaacagcctcataaagccctctattttatctggggtaaagaagtatacacctaatatataaaagtggctgtatgaggcacacaggagctcacaggactattacaggagggtaaacaggatggcatacaggaaaataacggatataaaagatactattggtatgagagcggtattttat

SEQ ID NO: 14025 - DNA, 153 bp, Unknown
  Description of Unknown: LeftRegion for integrase B1026 sequence
tgccgatatgccggagattgactatctggtaaacaaacatttgcaggtacgggtaataagttctatctttgcaaagaacttaatattaggcacatgagaggagttatatattcaagggtttctaccatagaccaagattacagtaagcagacc

SEQ ID NO: 14026 - DNA, 260 bp, Unknown
  Description of Unknown: LeftRegion for integrase B1027 sequence
atattatagcatgcatcgctcattccatcaatcattttctcgatgcacatgagtgatgcgctccgaactggcacgatcagcgcgcgaaaacccctgcctcccgcagaaattttcagattcttcccttgggtaccttttcaaatggattccaatccgttataatatatctaccaacctaacgaataacgcgaggtgccgctatgaaaacgaaagacaagccgcaggcgaagcaatacgttatctactcccgcaagtccaaa

SEQ ID NO: 14027 - DNA, 260 bp, Unknown
  Description of Unknown: LeftRegion for integrase B1028 sequence
attttgaggggcttgtacccctttttttgtttttctgttgctatttttatatagctggtgtataatagatacagactgaaaataaagccacttagagagcctcaagagttaggggtaggcagttatacccctgagcgattaaaacggctctgagaggctctcaggggctcaggatatgattttataaaggagtgtacaggatggcttacaggagagcacaggatactaaaggattaagggcggttttctatgctagggta

SEQ ID NO: 14028 - DNA, 260 bp, Unknown; identical to SEQ ID NO: 13892
  Description of Unknown: LeftRegion for integrase B1029 sequence

SEQ ID NO: 14029 - DNA, 123 bp, Unknown
  Description of Unknown: LeftRegion for integrase B1030 sequence
cgataacacatttgcaggtacaactattattattatctttgcaccaacttaatagtcaagaatatgagaggtgcaatctattcacgtgtttctaccttagaccaagattacaacaggcagacc

SEQ ID NO: 14030 - DNA, 123 bp, Unknown
  Description of Unknown: LeftRegion for integrase B1031 sequence
taataacacatttgcaggtacaattattattgctatctttgcaccaacttaataatcaagaatatgagaggtgcaatttattcacgtgtttctaccttagaccaagattacaacaggcagacc

SEQ ID NO: 14031 - DNA, 260 bp, Unknown; identical to SEQ ID NO: 13552
  Description of Unknown: LeftRegion for integrase B1032 sequence

SEQ ID NO: 14032 - DNA, 260 bp, Unknown
  Description of Unknown: LeftRegion for integrase B1033 sequence
aaggagtgcgacatgaacaaagcgttattactggcgttgaacgaacacatataccttcagggactaatcagcaaagaaatgaaagaaaaaattgatattgagattctttctgggaattaattcaaaactattgagcggagatgagatagaagttataataatcttatctctgctcttccaaacagaagggagaacggggcatgaacgtttatcgaactagagaaatactgaaaacttgcagcatttttgatttaaaatta

SEQ ID NO: 14033 - DNA, 260 bp, Unknown
  Description of Unknown: LeftRegion for integrase B1034 sequence
ttgtcagcgtttcggtagatttttccgtttttcagcaaaataaaaacgcccacggtgttaccagcaacgcaggcgtttcagatcagcttactcagagagatggtacagggataaaacctgtccagagcaatagcagacctcgcagatgttattgtaccacctccgggcaggcttgtcaaagtgtacccggaggtatttttatgggcaaaaaacaaaaggcaaacggcggcgatgcggtcatctacgcccgctattcttcc

SEQ ID NO: 14034 - DNA, 260 bp, Unknown
  Description of Unknown: LeftRegion for integrase B1035 sequence
cctttggacctggacttgtgggacttctacattctccccacaaaggtactgaatgaaaaaatgcctattcagaaaaccatcacacttcctggcctcatgcggctggagccgatgtggtgcgactactatggaatgggcggtgcaatacagaaaattatgaccgcctgagaaatcgggcggttttctattggaggaaaactatggcatacaacaagctttcgctcccggggcatatccgggtagcaatctacgtccgggtg

SEQ ID NO: 14035 - DNA, 260 bp, Unknown
  Description of Unknown: LeftRegion for integrase B1036 sequence
ccacgttgcggtcgtcactgatcctgccgtggatgccgaaaagaaagagtaaaatataagaggtgtgctatggtttcgcaggaagaattcattcaggagcttcaaacgctgcttgctgcatatcaggcggccagcgtagaagatcgtgaaaaggtcatgcggattttggcaaaatacgttccgaaagataaggcccagcaatgagaaagaagaaaatcgacgcgccaaaagaaaagccgcagagggcggccatatacctg

SEQ ID NO: 14036 - DNA, 260 bp, Unknown
  Description of Unknown: LeftRegion for integrase B1037 sequence
aaggagtgcgacatgaacaaagcgttattactggcgttgaacgaacacatataccttcagggactaatcagcagagaaatgaaagaaaaaattgatattgagattctttctgggaattaattcaaaactattgagcggagatgagattgaaggtataataatcttatctctgctcttccaactagaagggagaacggggcatgaacgtttatcgtactagagaaatactgaaaacttgcagcatttttgacttgaaatta

SEQ ID NO: 14037 - DNA, 260 bp, Unknown
  Description of Unknown: LeftRegion for integrase B1038 sequence
aaaggagtgcgacatgaataaagcgttattactggcattgaacgaacacatataccttcagggactgatcagcagagaaatgaaagagaaaattgacattgaaattctctctgaaaattagcttaaactattgagcggagatgagatagaagttataataatcttatctctgctcttccaaacagaagggagaacggggcatgaacgtttatcgtactagagaaatactgaaaacttgcagtattttcgatctgaaatta

SEQ ID NO: 14038 - DNA, 260 bp, Unknown
  Description of Unknown: LeftRegion for integrase B1039 sequence
gaaggggtgtaacatgaacaaagcgttactgttggcattgaacgaacacatatacctccagggactaatcagcaaagaaatgaaagagaaaattgacatagaaattctctctgaaaattagcttaaactattgagcggagatgagattgacgttataataatcttatctctgctcttccaaacagaagggagaacggggcatgaacgtttatcgcactagagaaatactgaaaacttgcagtattttcgatctgaaatta

SEQ ID NO: 14039 - DNA, 260 bp, Unknown
  Description of Unknown: LeftRegion for integrase B1040 sequence
aaggagcgtagcatgaacaaagcgttattactggcattgaacgaacacatataccttcagggactaatcagcaaagaaatgaaagaaaaaattgatattgagattctttctgaaaattaattcaaaactattgagcggagatgagatagaagttataataatcttatctctgctcttccaaacagaagggagaacggggcatgaacgtttatcgtactagagaaatactgaagacttgcagtattttcgatctaaaatta

SEQ ID NO: 14040 - DNA, 260 bp, Unknown
  Description of Unknown: LeftRegion for integrase B1041 sequence
aaggagtgtgacatgaacaaagcgttattactggcgttgaacgaacacatataccttcagggactaatcagcaaagaaatgaaagaaaaaattgatattgagattctttctgggaattaattcaaaactattgagcggagatgagatagaagttataataatcttatctctgctcttccaaacagaagggagaacggggcatgaacgtttatcgaactagagaaatactgaaaacttgcagcatttttgatttaaaatta

SEQ ID NO: 14041 - DNA, 260 bp, Unknown
  Description of Unknown: LeftRegion for integrase B1042 sequence
gaaggagcgtagaatgaacaaagcgttactgttggcattgaacgaacacatatacctccagggactaatcagtaaagaaatgaaagagaaaattgacattgaaattctttctgaaaattagcttaaactattgagcggagataagattgaagttataataatcttatctctgctcttccaagcagaagggagaacggggcatgaacgtttatcacactagagaaatactgaaaacttgcagtattttcgatctgaaatta

SEQ ID NO: 14042 - DNA, 260 bp, Unknown
  Description of Unknown: LeftRegion for integrase B1043 sequence
aagacaggtcttttgattgtgtgtagtgacccggcgcaaaagaaaattgacagagccgatgccctgaatattccgattgtttcggagcagcaatggtttgagctcatgccagaacttgaagccgttggaatgtggaacggaaagcgaatcctgttttcagacgacggcatctaccgtgttgaagtgggcggtgaaagctgatggccagaaaaaagaatattgctgctggcctcgatgccgtcatctatgcccggtactca

SEQ ID NO: 14043 - DNA, 260 bp, Unknown; identical to SEQ ID NO: 13018
  Description of Unknown: LeftRegion for integrase B1044 sequence

SEQ ID NO: 14044 - DNA, 260 bp, Unknown; identical to SEQ ID NO: 14035
  Description of Unknown: LeftRegion for integrase B1045 sequence

SEQ ID NO: 14045 - DNA, 260 bp, Unknown
  Description of Unknown: LeftRegion for integrase B1046 sequence
atccgacagttttttgactttggcaaagatatccgaccattcgctcgtagtcatacggcatggctcctttctcaaatttactgtcggcagcaactgaattatatcaaatacgcacccgcttttcatggaatcgtggaattataccgaaaatcggaaaaatattgcgaattttgaagaagataatcgtgaggtgatggttgatggcccgaaaaaagaatatcgctgcgggtcagaatgccgtcatttatgcccgctactcc

SEQ ID NO: 14046 - DNA, 260 bp, Unknown
  Description of Unknown: LeftRegion for integrase B1047 sequence
ggctactggctgtaaaatgctggtagccctcattttttagttgtatctagtatataaggggtgtataatagataggaactgaaaacagcctcataaagccctctattttatagagggtaaagaagtctacacctaatatataaaagtggctgtatgaggcacacaggagctcacaggactattacaggagggtaaacaggatggcatacaggaaaataacggatataagagatactattggtatgagagcggtattttat

SEQ ID NO: 14047 - DNA, 260 bp, Unknown; identical to SEQ ID NO: 13018
  Description of Unknown: LeftRegion for integrase B1048 sequence

SEQ ID NO: 14048 - DNA, 260 bp, Unknown
  Description of Unknown: LeftRegion for integrase B1049 sequence
ccacgttgcggctgtcgctgatcctgccgtggatgccgaaaagaaagagtaaaatataagaggtgtgctatggtttcgcaggaagaattcattcaggaacttcaaacgctgcttgctgcatatcaggcggccagcgtagaagatcgtgaaaaggtcatgcagattttggcaaaatacgttccgaaagataaggcccagcaatgagaaagaagaaaatcgacgcgccaaaagaaaagccgcagcgggcggccatatacctg

SEQ ID NO: 14049 - DNA, 260 bp, Unknown
  Description of Unknown: LeftRegion for integrase B1050 sequence
aaaggagcgtaacatgaataaagcgttattactggcattgaacgaacacgtataccttcagggactaatcagtaaagaaatgaaagaaaaaattgatatcaaaattctctctgaaaattaaaccaaactattgagcggagatgagattaaaggtataataatcttatctctgctcttccaaccagaagggagaacggggcatgaacgtttatcgaactagagaagtgctgaaaacttgcagcatttttgacttaaaatta

SEQ ID NO: 14050 - DNA, 260 bp, Unknown; identical to SEQ ID NO: 14035
  Description of Unknown: LeftRegion for integrase B1051 sequence

SEQ ID NO: 14051 - DNA, 260 bp, Unknown
  Description of Unknown: LeftRegion for integrase B1052 sequence
attattttgatgaaacccttgtcaggcgcaagcctgaattgtatttggtttaacaagtcttgttttttgcgcgcggcacttccttcccgtgcgccatccgcacacctgattccagcgggcttccaccgctgtacctgcatccgccgcaagactttctccacaggctatccgtatatgatgctcctgaaaggagaatgcacatgaacgctgtcatttacgcgcgctattcaagccacaatcagacagagcagtccatcgag

SEQ ID NO: 14052 - DNA, 168 bp, Unknown
  Description of Unknown: LeftRegion for integrase B1053 sequence
tgatattgagattctttctgggaattaattcaaaactattgagcggagatgagatagaagttataataatcttatctctgctcttccaaacagaagggagaacggggcatgaacgtttatcgaactagagaaatactgaaaacttgcagcatttttgatttaaaatta

SEQ ID NO: 14053 - DNA, 260 bp, Unknown; identical to SEQ ID NO: 14048
  Description of Unknown: LeftRegion for integrase B1054 sequence

SEQ ID NO: 14054 - DNA, 260 bp, Unknown
  Description of Unknown: LeftRegion for integrase B1055 sequence
catctcgtgcccgacgtgcaggccgatgcacaggaagaaagcaaagaataaatatataagaggtgcgctatggtttcgcatgatgaatttataaaagagctgcaagacctgcttgccgcatatcaggcggccagcgcagatgaccgtgaaaaagttatgcagattttgaaaaaatatattccgaaagataagggccagcaatgaggaaagcaaaagagaatctgcaaaaagaaaagccgcagcgggcggccatatatttg

SEQ ID NO: 14055 - DNA, 260 bp, Unknown
  Description of Unknown: LeftRegion for integrase B1056 sequence
aaaggagtgcgacatgaacaaagcgttattactggcgttgaacgaacacatataccttcagggactgatcagcagagaaatgaaagaaaaaattgatattgagattctttccgaaaattaaaccaaactattgagcggagatgagattgaaggtataataatcttatctctgctcttccgactagaagggagaacggggcatgaacgtttatcgtactagagaaatactgaaaacttgcagcatttttgatttgaaatta

SEQ ID NO: 14056 - DNA, 260 bp, Unknown
  Description of Unknown: LeftRegion for integrase B1057 sequence
aaaggagtgcgacatgaacaaagcgttattactggcgttgaacgaacacatataccttcagggactaattagcagggaaatgaaagaaaaaattgatattgagattctttctgaaaattaagccaaactattgagcggagatgagattgaatgtataataatcttatctctgctcttccaaccagaagggagaacggggcatgaacgtttatcgtactagagaaatactgaaaacttgcagcatttttgacttgaaatta

SEQ ID NO: 14057 - DNA, 260 bp, Unknown
  Description of Unknown: LeftRegion for integrase B1058 sequence
aggagtttgggcatgaacaaagcgttattactggcattgaacgaacacatataccttcagggactaatcagcaaagaaatgaaagaaaaaattgatattgagattctgtctgaaaattaattcaaaactattgagcggagatgagatagaagttataataatcttatctctgctcttccaaccagaagggagaacggggcatgaacgtttatcgcactagagaaatactgaagacttgcagtattttcgatttgaaatta

SEQ ID NO: 14058 - DNA, 260 bp, Unknown
  Description of Unknown: LeftRegion for integrase B1059 sequence
ccacgttgcggctgtcgctgatcctgccgtggatgccgaaaagaaagagtaaaatataagaggtgtgctatggtttcgcaggaagaattcattcaggaacttcaaacgctgcttgctgcatatcaggcggccagcgtagaagatcgtgaaaaagtcatgcagattttggcaaaatacgttccgaaagataaggcccagcaatgagaaagaagaaaatcgacgcgccaaaagaaaagccgcagcgggcggccatatacctg

SEQ ID NO: 14059 - DNA, 260 bp, Unknown
  Description of Unknown: LeftRegion for integrase B1060 sequence
aaaggagtgcgacatgaacaaagcgttattactggcattgaacgaacacgtataccttcagggactaatcagtaaagaaatgaaagaaaaaattgatattgaaattctctctgaaaattaaaccaaactattgagcggagatgagattgaaggtataataatcttatctctgctcttccgactagaagggagaacgggacatgaacgtttatcgcactagagaaatactgaaaacttgcagtattttcgatctgaaatta

SEQ ID NO: 14060 - DNA, 260 bp, Unknown; identical to SEQ ID NO: 13341
  Description of Unknown: LeftRegion for integrase B1061 sequence

SEQ ID NO: 14061 - DNA, 260 bp, Unknown
  Description of Unknown: LeftRegion for integrase B1062 sequence
gaaggagcgtagcatgaacaaagcgttattgttggcattgaacgagcacatataccttcagggattaatcagtaaagaaacgaaagagaaaattgatatggagattctttctgaaaattagcttaaactattgagcagagatgagattgacgttataatgatcttatctctgctcttccaactagaagggagaacggggcatgaacgtttatcgaactagagaagtgctgagaacttgcagcatttttgacttgaaatta

SEQ ID NO: 14062 - DNA, 260 bp, Unknown
  Description of Unknown: LeftRegion for integrase B1063 sequence
aaaggagtgcgacatgaataaagcgttattactggcattgaacgaacacatataccttcagggactgatcaacagagaaatgaaagagaaaattgacattgaaattctctctgaaaattagcttaaactattgagcggagatgagatagaagttataataatcttatctctgctcttccaaacagaagggagaacggggcatgaacgtttatcgtactagagaaatactgaaaacttgcagtattttcgatctgaaatta

SEQ ID NO: 14063 - DNA, 260 bp, Unknown
  Description of Unknown: LeftRegion for integrase B1064 sequence
gaaggagcgtagcatgaacaaagcgttattgttggcattgaacgagcacatataccttcagggattaatcagtaaagaaacgaaagagaaaattgatatggagattctttctgaaaattaaaccaaactattgagtggagatgagattaaaggtataataatcttatctctgctcttccgactagaagggagaacggggcatgaacgtttatcgcactagagaaatactgaaaacttgcagtattttcgatctgaaatta

SEQ ID NO: 14064 - DNA, 260 bp, Unknown
  Description of Unknown: LeftRegion for integrase B1065 sequence
aaggagtttggcatgaacaaagcgttattactggcattaaacgaacacatataccttcagggactaatcagcaaagaaatgaaagaaaaaattgatattgagattctttctgggaattaattcaaaactattgagcggagatgagattgaaggtataataatcttatctctgctcttccgactagaagggagaacggggcatgaacgtttatcgtactagagaaatactgaaaacttgcagcatttttgatttaaaatta

SEQ ID NO: 14065 - DNA, 260 bp, Unknown
  Description of Unknown: LeftRegion for integrase B1066 sequence
ggagcgtagaatgtgaacaaagcattattactggcattgaacgaacacatataccttcagggattaatcagtaaagaaacgaaagagaaaattgatatggagattctttctgaaaattaaatcaaaactattgagcggagatgagatagaagttataataatcttatctctgctcttccaaacagaagggagaacggggcatgaacgtttatcgtactagagaaatactgaaaacttgcagtattttcgatctgaaatta

SEQ ID NO: 14066 - DNA, 260 bp, Unknown
  Description of Unknown: LeftRegion for integrase B1067 sequence
aggctggtaccctctttttttttgttgttgctatttttatatgggtggtatataatagatacatactgaaaatacgcctcacagagcctctattttttcttaccctaagaaatatacctctaagcggtttaagccgccctgtgaggcacacaggagctcacaggggcattataacaagaatggtaaaggagaaatgtaggatggcatacaggaaagtaatctcattattagatacgataggattaagggcggtattttat

SEQ ID NO: 14067 - DNA, 260 bp, Unknown
  Description of Unknown: LeftRegion for integrase B1068 sequence
cctttggacctggacttgtgggacttctacattcttcccacaaaggtactgaatgaaaaaatgcctattcagaaaaccatcacacttcctaacctcatgcggctggagccgatgtggtgcgactactatggaatgggcgatgcaatacagaaaattatgaccgcctgagaaatcgggcggttttctattggaggaaaactatggcatacaacaaactatctctcccggggcatatccgggtggcaatctatgtccgggta

SEQ ID NO: 14068 - DNA, 260 bp, Unknown
  Description of Unknown: LeftRegion for integrase B1069 sequence
aaaggagtgcgacatgaacaaagcgttattactggcattgaacgaacacgtataccttcagggactaatcagtaaagaaatgaaagaaaaaattgatattaaaattctctctgaaaattaaaccaaactattgagcggagatgagattgaaggtataataattttatctctgctcttccaaccagaagggagaacggggcatgaacgtttatcgtaccagagaaatactgaaaacttgcagcatttttgacttgaaatta

SEQ ID NO: 14069 - DNA, 260 bp, Unknown
  Description of Unknown: LeftRegion for integrase B1070 sequence
aagacaggtcttttgattgtgtgcagtgacccggcgcaaaagaaaattgacagagccgatgccctgaatattccgattgtttcggagcagcaatggtttgagctcatgccagaacttgaagccgttggaatgtggaacggaaagcgaatcctgttttcagacgacggcatctaccgtgttgaagtgggcggtgaaagctgatggccagaaaaaagaatattgctgctggcctcgatgccgtcatctatgcccggtactca

SEQ ID NO: 14070 - DNA, 260 bp, Unknown
  Description of Unknown: LeftRegion for integrase B1071 sequence
gtgcgtcgcttttacgttttagcggtgatggcggtgcaggcaaagatgctttgactggaacgatggttgatacgagatctggggaaactgtttcaacaaagatcgaaagcctagaagatctttgcaaactgtttcctgcggtgaagttatacgtggcaggataatattcgtatttgtgaacagaaagagggcgggcagcattgtcgaagcgcgaatcgaaaagcggccagaagtgtttggcagcggagcagatcggcgtg

SEQ ID NO: 14071 - DNA, 260 bp, Unknown
  Description of Unknown: LeftRegion for integrase B1072 sequence
aaaggagtgcgacatgaacaaagcattattactggcattgaacgagcacatataccttcagggattaatcagtaaagaaatgaaagagaaaattgacattgaaattctctctgaaaattagcttaaactattgagcggagatgagatagaagttataataatcttatctctgctcttccaaacagaagggagaacggggcatgaacgtttatcgtactagagaaatactgaaaacttgcagtattttcgatctgaaatta

SEQ ID NO: 14072 - DNA, 260 bp, Unknown
  Description of Unknown: LeftRegion for integrase B1073 sequence
aaggagtgcgacatgaacaaagcgttattactggcgttgaacgaacacatataccttcagggactaatcagcaaagaaatgaaagaaaaaattgatattgagattctttctgggaattaattcaaaactattgagcggagatgagattgaatgtataataatcttatctctgctcttccgactagaagggagaacggggcatgaacgtttatcgaactagagaagtgctgaaaacttgcagcatttttgacttaaaatta

SEQ ID NO: 14073 - DNA, 260 bp, Unknown
  Description of Unknown: LeftRegion for integrase B1074 sequence
aaggagtgcgacatgaataaagcgttattactggcattgaacgaacatgtataccttcagggactaatcagcagagaaatgaaagagaaaattgatattgagattctttctgaaaattaaatcaaaactattgagcggagatgagatagaagttataataatcttatctctgctcttccgactagaagggagaacggggcatgaacgtttatcgcactagagaaatactgaaaacttgcagcatttttgacttaaaatta

SEQ ID NO: 14074 - DNA, 260 bp, Unknown
  Description of Unknown: LeftRegion for integrase B1075 sequence
aagggggtgtaacatgaacaaagcgttactgttggcattgaacgaacacatatacctccagggactaatcagcaaagaaatgaaagagaaaattgacatagaaattctctctgaaaattagcttaaactattgagcggagatgagattaaagttataataatcttatctctgctcttccaaacagaagggagaacggggcatgaacgtttatcgtactagagaaatactgaaaacttgcagcatttttgacttgaaatta

SEQ ID NO: 14075 - DNA, 260 bp, Unknown
  Description of Unknown: LeftRegion for integrase B1076 sequence
aaggagtgcgacatgaataaagcgttattgctggcattgaacgagcacgtataccttcagggactaatcagtaaagaaatgaaagaaaaaattgatattcacattctttctgaaaattaaatcaaaactattgagcggagatgagattgaagatataataatcttatctctgctcttccaactagaagggagaacggggcatgaacgtttatcgaactagagaagtgctgaaaacttgcagcatttttgacttaaaatta

SEQ ID NO: 14076 - DNA, 260 bp, Unknown; identical to SEQ ID NO: 13350
  Description of Unknown: LeftRegion for integrase B1077 sequence

SEQ ID NO: 14077 - DNA, 260 bp, Unknown
  Description of Unknown: LeftRegion for integrase B1078 sequence
tgtacaacaagaagcaattatattagctgcttatcagtacataaaagatttatttgaagagggaaaaataacaaaacatgaacttaataaagtgaagaaaaagtacaatatagatattgaataaattgacatattaagttataataaataccatactaaggtacatctagtatggtatttattggtttaagaggtgtatcatgaaaaagaaaattgcaatatatgctagagtttctacggaacatgaagcacagatatct

SEQ ID NO: 14078 - DNA, 260 bp, Unknown; identical to SEQ ID NO: 14058
  Description of Unknown: LeftRegion for integrase B1079 sequence

SEQ ID NO: 14079 - DNA, 260 bp, Unknown
  Description of Unknown: LeftRegion for integrase B1080 sequence
gaaggagcgtagaatgaacaaagcgttactgttggcattgaacgaacacatatacctccagggactaatcagtaaagaaatgaaagagaaaattgacattgaaattctttctgaaaattagcttaaactattgagcggagatgagattgaagttataataatcttatctctgctcttctgactagaagggagaacggggcatgaacgtttatcgcactagagaaatactgaaaacttgcagcatttttgacttaaaatta

SEQ ID NO: 14080 - DNA, 260 bp, Unknown
  Description of Unknown: LeftRegion for integrase B1081 sequence
catctcgtgcccgacgtgcaggccgatgcacaggaagaaagcaaagaataaatatataagaggtgcgctatggtttcgcatgatgaatttataaaagagttgcaagacctgcttgccgcatatcaggcggccagcgcagatgaccgtgaaaaagttatgcagattttgaaaaaatatattccgaaagataagggtcagcaatgaggaaagcaaaagagaatccgcaaaaagaaaagccgcagcgggcggccatatatttg

SEQ ID NO: 14081 - DNA, 260 bp, Unknown
  Description of Unknown: LeftRegion for integrase B1082 sequence
ccacgttgcggctgtcgccgatcctgccgtggatgccgaaaagaaagagtaaaatataagaggtgtgctatggtttcgcaggaagaattcattcaggagcttcaaacgatgcttgctgcatatcaagcggccatcgttgaagatcgtgaaaaggtcatgcagattttggcaaaatacgttccgaaagataaggcccagcaatgagaaagaagaaaatcgatgcgccaaaagaaaagccgcagcgggcggccatatacctg

SEQ ID NO: 14082 - DNA, 260 bp, Unknown; identical to SEQ ID NO: 14035
  Description of Unknown: LeftRegion for integrase B1083 sequence

SEQ ID NO: 14083 - DNA, 260 bp, Unknown
  Description of Unknown: LeftRegion for integrase B1084 sequence
aaaggagtgcgacatgaacaaagcattattactggcattgaacgaacacgtataccttcagggactaatcagcagagaaatgaaagaaaaaattgatattgagattctttctgaaaattaaaccaaactattgagcggagatgagattgaaggtataataatcttatctctgctcttccgactagaagggagaacggggcatgaacgtttatcgtactagagaaatactgaaaacttgcagcatttttgacttgaaatta

SEQ ID NO: 14084 - DNA, 260 bp, Unknown; identical to SEQ ID NO: 14035
  Description of Unknown: LeftRegion for integrase B1085 sequence

SEQ ID NO: 14085 - DNA, 260 bp, Unknown
  Description of Unknown: LeftRegion for integrase B1086 sequence
aaaggagtgcgacatgaacaaagcgttattactggcgttgaacgaacacatataccttcagggactgatcagcagagaaatgaaagaaaaaattgatattgagattctttccgaaaattaaaccaaactattgagcggagatgagattgaaggtataataatcttatctctgctcttccgactagaagggagaacggggcatgaacgtttatcgtactagagaaatactgaaaacttgcagtattttcgatctgaaatta

SEQ ID NO: 14086 - DNA, 260 bp, Unknown
  Description of Unknown: LeftRegion for integrase B1087 sequence
aaaggagtgcgacatgaacaaagcgttattactggcattgaacgaacacgtataccttcagggactaatcagtaaagaaatgaaagaaaaaattgatattaaaattctctctgaaaattaaaccaaactattgagcggagatgagattaaaggtataataatcttatctctgctcttccaaccagaagggagaacggggcatgaacgtttatcgtaccagagaaatactgaaaacttgcagcatttttgacttgaaatta

SEQ ID NO: 14087 - DNA, 260 bp, Unknown; identical to SEQ ID NO: 13350
  Description of Unknown: LeftRegion for integrase B1088 sequence

SEQ ID NO: 14088 - DNA, 260 bp, Unknown
  Description of Unknown: LeftRegion for integrase B1089 sequence
catctcgtgcccgacgtgcaggccgatgcacaggaagaaagcaaagaataaatatataagaggtgcgctatggtttcgcatgatgaatttataaaagagttgcaagacctgcttgccgcatatcaggcggccagcgcagatgaccgtgaaaaagttatgcagattttgaaaaaatatattccgaaagataagggccagcaatgaggaaagcaaaagagaatctgcaaaaagaaaagccgcagcgggcggccatatatttg

SEQ ID NO: 14089 - DNA, 260 bp, Unknown
  Description of Unknown: LeftRegion for integrase B1090 sequence
catctcgtgcccgacgtgcaggccgatgcacaggaagaaagcaaagaataaatatataagaggtgcgctatggtttcgcatgatgaatttataaaagagttgcaaaacctgcttgccgcatatcaggcggccagcgcagatgaccgtgaaaaagttatgcagattttgaaaaaatatattccgaaagataagggccagcaatgaggaaagcaaaagagaatctgcaaaaagaaaagccgcagcgggcggccatatatttg

SEQ ID NO: 14090 - DNA, 260 bp, Unknown
  Description of Unknown: LeftRegion for integrase B1091 sequence
aaggagttcgacatgaacaaagcgttattgttggcattgaacgaacacatataccttcagggactgatcagcagagaaatgaaagaaaaaattgatattgagattctttctgggaattaattcaaaactattgagcggagatgagattgaaggtataataatcttatctctgctcttccaactagaagggagaacggggcatgaacgtttatcgtactagagaaatactgaaaacttgcagcatttttgacttgaaatta

SEQ ID NO: 14091 - DNA, 260 bp, Unknown
  Description of Unknown: LeftRegion for integrase B1092 sequence
aaaggagtgcaacatgaacaaagcgttattgttggcattgaacgagcacatataccttcagggactaatcagcaaagaaacgaaagaaaaaattgatattgagattctttctgaaaattaaaccaaactattgagcggagatgagattgaaggtataataatcttatctctgctcttccgactagaagggagaacggggcatgaacgtttatcgtactagagaaatactgaaaacttgcagtattttcgatctgaaatta

SEQ ID NO: 14092 - DNA, 260 bp, Unknown
  Description of Unknown: LeftRegion for integrase B1093 sequence
aaaggagtgcgacatgaacaaagcgttattactggcattgaacgaacacgtataccttcagggactaatcagtaaagaaatgaaagaaaaaattgatattgaaattctctctgaaaattaaaccaaactattgagcggagatgagattgaaggtataataatcttatctctgctcttccgaccagaagggagaacgggacatgaacgtttatcgaacaagagaagtgctgaaaacttgcagcatttttgacttgaaatta

SEQ ID NO: 14093 - DNA, 260 bp, Unknown
  Description of Unknown: LeftRegion for integrase B1094 sequence
ccatgttgcggctgttgctgatcctgccgtggatgccgaaaagaaagagtaaaatataagaggtgtgctatggtttcgcaggaagaattcattcaagagcttcaaacgctgcttgctgcatatcaggcggccagcgtagaagatcgtgaaaaggtcatgcagattttggcaaaatacgttccgaaagataaggcccagcaatgagaaagaagaaaatcgacgcgccaaaagaaaagccgcagcgggcggccatatacctg

SEQ ID NO: 14094 - DNA, 260 bp, Unknown
  Description of Unknown: LeftRegion for integrase B1095 sequence
gctttgtcagcgtttcggtagatttttccgtttttcagcaaaataaaaacgcccacggtgttaccagcaccgcaggcgttccagatcagcttgctcagagatggtacaggataaaacctgtccagagcaataacagacctcgcagatgttattgtaccacctccgggcaggcttgtcaaagtgtacccggaggtatttttatgggcaaaaaacaaaagacaaacggcggcgatgcggtcatctacgcccgctattcttcc

SEQ ID NO: 14095 - DNA, 260 bp, Unknown
  Description of Unknown: LeftRegion for integrase B1096 sequence
aaaggagtgcgacatgaacaaagcgttattgttggcattgaacgaacacatataccttcagggcctgatcagcagagaaatgaaagaaaaaattgatattgagattctttctgaaaattaaaccaaactattgagcggagatgagattgaaggtataataatcttatctctgctcttccgactagaagggagaacggggcatgaacgtttatcgtactagagaaatactgaaaacttgcagcatttttgatttgaaatta

SEQ ID NO: 14096 - DNA, 260 bp, Unknown
  Description of Unknown: LeftRegion for integrase B1097 sequence
ctttgtcagcgtttcggtagatttttccgtttttcagcaaaataaaaacgcccacggtgttaccagcaccgcaggcgttccagatcagcttactcagagatggtacagggataaaacctgtccagagcaataacagacctcgcagatgttattgtaccacctccggacaggcttgtcaaagtgtacccggaggtatttttatgggcaaaaagcaaaagacaaacggcggcgatgcggtgatctacgcccgctattcttcc

SEQ ID NO: 14097 - DNA, 260 bp, Unknown; identical to SEQ ID NO: 13294
  Description of Unknown: LeftRegion for integrase B1098 sequence

SEQ ID NO: 14098 - DNA, 260 bp, Unknown
  Description of Unknown: LeftRegion for integrase B1099 sequence
accagtatcacatttttacagtcaaagagtgtcaggaactcttatcacttgcaaagaacggacacattagggaaatcaactcacgaatacagctcgctacggctcgtttccttgcggataattcccctaacaataaaaatattgctgtttaagaaaaagcccctgcatggggcttttcgctttatatggaggtatatatcatggcgtataacgcacaaaacaaaaccggtgcaaaggtggctatctatgtcagggtgtct

SEQ ID NO: 14099 - DNA, 260 bp, Unknown
  Description of Unknown: LeftRegion for integrase B1100 sequence
ctgtatacgaaaatggccgcctgacaaaatcagacggtcatttttgtatggagaatttgaattttccagtgggtcagtcatatccgcgcgagagagctgcattgagggcgttttggctcaagatgtgggaaagtttgttgaatcggttgaagacggccttagagggccttattttagctttagatggagagtgacatagcatggcaaaggtaaagctgccagataagccccgcgtggcaatatacacccgcgtatcgacc

SEQ ID NO: 14100 - DNA, 260 bp, Unknown
  Description of Unknown: LeftRegion for integrase B1101 sequence
cacttgacctcgatctgtgggatttttacgttcttcctacgaaaattcttaatgcagaaaaacccacgcagaaaactatcactttgccatccttgttagctcttaatcctacaaagtgtgattacttagagttaaaagatacagttaataatattgttgccgtctgaatcatcagacagctttttaggagactttaaaatatggtacttaataatattaaaccagctatgaaaattcgagtagcgatctatatacgagtt

SEQ ID NO: 14101 - DNA, 260 bp, Unknown
  Description of Unknown: LeftRegion for integrase B1102 sequence
ggtgcccgttttgtgaaaagccgctggcctttgtgtacggacattcgcgtgtatatcatacgacaacatggtgttccgattctggagccgagccgctgcagatgtttgaggaagatgcaaaggcaaggggcttgcggaagtgtaagagctgccaaaaacgtgacggggatttaccggcagatagttaaggaggaatcaggatggccaagcgttcagcgaagaaaaatgaataccaatcggctgaacagatcggcgtgatc

SEQ ID NO: 14102 - DNA, 260 bp, Unknown
  Description of Unknown: LeftRegion for integrase B1103 sequence
gcatactgcgaggattgcggatacagctttgactttaccacacaggatgacctcaatgcccaatataataaactgaacacaaacgagggatgcgccattttggtggcgatcattctcggcgttattcttataacaatttggttttacagccattaaatgcaaatttgaggccgttttcgttaaataaggggggtgacagtttgagttcagttgacaaaatcgccgttgtttacgcacggtattcttcccacgggcagacc

SEQ ID NO: 14103 - DNA, 260 bp, Unknown
  Description of Unknown: LeftRegion for integrase B1104 sequence
gttccatcaaaaattattgaaatagaaacaagtattaaattacttgaatatttaaaaagaaataatactattgatgatggaatgtataatttttgtattaataaattgttacataaaatagaatttgaaaagcaaaaacaagatgataaatatataaatgatttaaacaattataaactattaacttaggaggtgtgattatggacttatatacagttaggaataatattatgaaaggtgttccactacaagaattaaat

SEQ ID NO: 14104 - DNA, 260 bp, Unknown
  Description of Unknown: LeftRegion for integrase B1105 sequence
accagtatcacatcttcacaatcaaagagtgtcaggaactcttgttactcgcaaagaacggacaaataggagaaatcaacaaccgcatacaacacgctacggctcgtttccttgcggataattcccctgacaataaaaatattgctgtttgagataaagcccctgcatggggcttttcgctttatatggaggtatatattatggcgtacaacgcacaaaacaagaccggtgcaagggtggctatctatgtcagggtatcg

SEQ ID NO: 14105 - DNA, 260 bp, Unknown; identical to SEQ ID NO: 13309
  Description of Unknown: LeftRegion for integrase B1106 sequence

SEQ ID NO: 14106 - DNA, 260 bp, Unknown
  Description of Unknown: LeftRegion for integrase B1107 sequence
cctgtatgcgaaaatggccgcctgacaaaatcagacggtcatttttgtgtggggaatttgaattttccagcgggtcagtcatatccgcgcgagagagctgcattgagagcgttttagctccagatgtgggaaagttgttgaatcggttgaagacggccttagagggccttattttagttttagatggagagtgacatagcatggcaaaggtaaagctgccagataagccccgcgtggcaatatacacccgcgtatcgacc

SEQ ID NO: 14107 - DNA, 260 bp, Unknown
  Description of Unknown: LeftRegion for integrase B1108 sequence
accagtatcacatcttcacaatcaaagagtgtcaggaactcttgttactcgcaaagaacggacaaataggagaaatcaacaaccgcatacaacacgctacggctcgtttccttgcggataattcccctgacaataaaaatattgctgtttgagataaagcccctgcatggggcttttcgctttatatggaggtatatattatggcgtacaacacacaaaacaagaccggtgcaagggtggctatctatgtcagggtatcg

SEQ ID NO: 14108 - DNA, 260 bp, Unknown
  Description of Unknown: LeftRegion for integrase B1109 sequence
accagtatcacatctttacaatcaaagagtgtcaggaactcttgctacttgcaaagaacggacatataggagaaatcaacaaccgcatacagcacgctacggctcgtttccttgcggataattcccctgacaataaaaatattgctgtttgagataaagcccctgcatggggcttttcgctttatatggaggtatatattatggcgtacaacgcacaaaacaagaccggtgcaagggtggctatctatgtcagggtatcg

SEQ ID NO: 14109 - DNA, 260 bp, Unknown
  Description of Unknown: LeftRegion for integrase B1110 sequence
tttgacgcgctgtatgccaagtacccccgcgcagccgcatacctcaaagccgacggcatggctcttgctgagcatgatgtcaaagctgccgctgggcgtaaggcgcgcgagcgcattatcaacggtgaggacggcaccgaggcgttggccgatgccgaggctgagtgggcagcgtattgcgccgagcatatatgggactaatgccgcatccggctgtagcccttgacaaaaaacctgtttgcggttactatagccgcaaa

SEQ ID NO: 14110 - DNA, 260 bp, Unknown
  Description of Unknown: LeftRegion for integrase B1111 sequence
accagtatcacatcttcacaatcaaagagtgtcaggaactcttgctacttgcaaagaacggacatataggagaaatcaacaaccgcatacagcacgctacggctcgtttccttgcggataattcccctgacaataaaaatattgctgtttgagataaagcccctgcatggggcttttcgttttatatggaggtatatattatggcgtacaacgcacaaaacaagaccggtgcaagggtggctatctatgtcagggtatcg

SEQ ID NO: 14111 - DNA, 260 bp, Unknown
  Description of Unknown: LeftRegion for integrase B1112 sequence
accagtatcacatcttcacaatcaaagagtgtcaggaactcttgctacttgcaaagaacggacatataggagaaatcaacaaccgcatacagcacgctacggctcgtttccttgcggataattcccctgacaataaaaatattgctgtttgagataaagcccctgcatggggcttttcgctttatatggaggtatatattatggcgtacaacgcacaaaacaagaccggtgcaagggtggctatctatgtcagggtatcg

SEQ ID NO: 14112 - DNA, 260 bp, Unknown
  Description of Unknown: LeftRegion for integrase B1113 sequence
accagtatcacatcttcacaatcaaagagtgtcaggaactcttgttactcgcaaagaacggacaaataggagaaatcaacaaccgcatacaacacgctacggctcgtttccttgcggataattcccctgacaataaaaatattgctgtttgagataaagcccctgcatggggcttttcgctttatatggaggtatatattatggcgtacaacgcacaaagcaagaccggtgcaagggtggctatctatgtcagggtatcg

SEQ ID NO: 14113 - DNA, 260 bp, Unknown
  Description of Unknown: LeftRegion for integrase B1114 sequence
tctgtatacgaaaatggccgcctgacaaaatcagacggtcatttttgtatggagaatttgaattttcaagcgggttagtcgtatccgcgcgagagagccgcattgagggcgttttggctccagatgtgggaaagttgttgaatcggttgaagacggccttagaggtccttattttagctttagatggagagtgacatagcatggcaaaggtaaagctgccagataagccccgcgtggcaatatacacccgcgtatcgacc

SEQ ID NO: 14114 - DNA, 260 bp, Unknown
  Description of Unknown: LeftRegion for integrase B1115 sequence
tctgtatacgaaaatggccgcctgacaaaatcagacggtcatttttgtatggagaatttgaattttccagcgggtcagtcatatccgcgcgagagagccgcattgagggcgttttgggtcctgatgtgggaaagttgttgaatcggttgaagacggccttagagagccttattttagctttagatggagagtgacatagcatggcaaaggtaaagctgccagataagccccgcgtggcaatatacacccgcgtatcgacc

SEQ ID NO: 14115 - DNA, 260 bp, Unknown
  Description of Unknown: LeftRegion for integrase B1116 sequence
ggtgcccgttttgtgaaaagccgctggcctttgtgtacggacattcgcgtgtatatcatacgacaacatggtgttccgattctggagccgagccgctgcagatgtttgaggaagatgcaaaggcaaggggcttgcggaagtgtaagagttgccaaaaacgtgacggggatttaccggcagatagttaaggaggaatcaggatggccaagcgttcagcgaagaaaaatgaataccaatcggctgaacaggtcggcgtgatc

SEQ ID NO: 14116 - DNA, 260 bp, Unknown
  Description of Unknown: LeftRegion for integrase B1117 sequence
aatagtgattttattaaagcacttaatgattgtatatataatatttataatatgagtgaatactttgatattacagaagaattaataaaatataaagttaaatcaataactcttgatgaaaacttgtatatggatataaaaagcaagtttaaattaaatgaagtaccttatatgtgttgtaatatttaaggaggggtaggatgaaggcagttatttatagtagaaaaagtaaatttaaagaagagggtgaatctattgaa

SEQ ID NO: 14117 - DNA, 260 bp, Unknown
  Description of Unknown: LeftRegion for integrase B1118 sequence
aaattgataaaaatgaatataataaaatattcgccgcattgaaactaatagaagcattgtttattgatgggaaaataaaatatcatgtatttaggaatatcctagatgactataaagatgttgttgatttatctgagtttaaatgctatacttgatacatctattaacaaacatcgtattattatgaggaataaaaataaatgtatgatatttacaatcaaaaaccaaccagccgaaaagttgtaatttatgcgcgcgtt

SEQ ID NO: 14118 - DNA, 260 bp, Unknown
  Description of Unknown: LeftRegion for integrase B1119 sequence
catgtatacgaaaatggccgcctgacaaaatcagacggtcatttttgtatggggaatttgaattttccagcgggtcagtcatatccgcgcgagagagctgcattgagggcgttttggctccagatgtgggaaagttgttgaatcggttgaagacggccttagagggccttattttagctttagatggagagtgacatagcatggcaaaggtaaagctgccagataagcctcgcgtggcaatatacacccgcgtatcgacc

SEQ ID NO: 14119 - DNA, 260 bp, Unknown
  Description of Unknown: LeftRegion for integrase B1120 sequence
gagaatgtgcaatcactgttgaacatgtggaaaataatacttctgttagagatatgcttggacaaagaggaattaaaccagaagatttaccagcatcggaagacattaagaaactggaacgtagagtgaagagagaagagaaaaagcttgcagagcaatctggaaagttgacaaatgaataatacaggagtgtgagattattgaagaagaaaacaagatgttacatatatactcgtgtatctacggctattcaggttgat

SEQ ID NO: 14120 - DNA, 260 bp, Unknown; identical to SEQ ID NO: 14111
  Description of Unknown: LeftRegion for integrase B1121 sequence

SEQ ID NO: 14121 - DNA, 260 bp, Unknown; identical to SEQ ID NO: 13300
  Description of Unknown: LeftRegion for integrase B1122 sequence

SEQ ID NO: 14122 - DNA, 260 bp, Unknown
  Description of Unknown: LeftRegion for integrase B1123 sequence
aaatccggcgaccccgaggaaatcattctgctgaacgcattctccaaggtgagcgacgatgaccgtgccgtcctgtgggcgctgctgcggaaatatatgactccgcacgaccgcgccctgctggaagcccttaaccaagacaacgaatccggcgccgtataatttacctgccgtattcggactaaggggagggcttcatcatgcaaaagaaccagacgaaaaaagccgctctctatatccgagtttctacccactaccaa

SEQ ID NO: 14123 - DNA, 260 bp, Unknown
  Description of Unknown: LeftRegion for integrase B1124 sequence
caaatgcaacaacaagaaattaatatccaataattaaaaagccccgatgctaccaacaccggagccaattggcactatctggaagataataccaaatcccgcaaatttagtttatcatcttccgggcagtcacgcaagcggaacgaatgttctttgctggctgttatttttatactcatttttaaggaggaatgatgtttatggcagaacaaaatgagaaaatcgtagcactctacgtccgtgtatcaactggataccaa

SEQ ID NO: 14124 - DNA, 260 bp, Unknown
  Description of Unknown: LeftRegion for integrase B1125 sequence
cgtacaattcgccgggtccttatgacctgatccagctcacacgatacgggcatcgcgcaggcggtgcccgtatgttttatgttacggtttggttaggtaaggttacggttacggtaacggttacggttagtgtcggatagtccgcggaatttcgtgcggacgttccgtgtgatattccgattttataggaggtttcgcccatgccaatcagcatttccgagaagttggccgcaaagaaggcggcgatctatattcgtgtt

SEQ ID NO: 14125 - DNA, 260 bp, Unknown
  Description of Unknown: LeftRegion for integrase B1126 sequence
tctgtatacgaaaatggccgcctgacaaaatcagacggtcatttttgtatggagaatttgaattttccagcgggtcagccatatccgcgcgagagagctgcattgagagcgttttggctccagatgtgggaaagttgttgaatcggttgaagacggccttagagagccttattttagctttagatggagagtgacatagcatggcaaaggtaaaactgccagataagccccgcgtggcaatatacacccgcgtatcgacc

SEQ ID NO: 14126 - DNA, 260 bp, Unknown
  Description of Unknown: LeftRegion for integrase B1127 sequence
taggggctgttgactttctccgtggaaatctccaaggaaatctccgtggaaaaagtctatttttatcaatattcaaaacataaaacgggaattttctaaaaagcaatcaaaaaggggtttctccgcggagatttccacggagatctccgtggagatttccgtggagaattttcttacgctatgagagaatggagggtacaatgtcagaacggctaaagagggcagctttgtatgtccgagtgtctaccgcctatcaaatc

SEQ ID NO: 14127 - DNA, 260 bp, Unknown; identical to SEQ ID NO: 14100
  Description of Unknown: LeftRegion for integrase B1128 sequence

SEQ ID NO: 14128 - DNA, 260 bp, Unknown; identical to SEQ ID NO: 13521
  Description of Unknown: LeftRegion for integrase B1129 sequence

SEQ ID NO: 14129 - DNA, 260 bp, Unknown; identical to SEQ ID NO: 14122
  Description of Unknown: LeftRegion for integrase B1130 sequence

SEQ ID NO: 14130 - DNA, 260 bp, Unknown
  Description of Unknown: LeftRegion for integrase B1131 sequence
tctgtatacgaaaatggccgcctgacaaaatcagacggtcatttttgtatggggaatttgaattttccagctggtcagccatatccgcgcgagagagttgcattgaaggcgttttggctcaagatgtgggaaagttgttgaatcggttgaagacggccttagagggccttattttagctttagatggagagtgacatagcatggcaaaggtaaagctgccagataagccccgcgtggcaatatacacccgcgtatcgacc

SEQ ID NO: 14131 - DNA, 260 bp, Unknown
  Description of Unknown: LeftRegion for integrase B1132 sequence
ggctactggctgtaaaatgctggtagccctcattttttagttgtatctagtatataaggggtgtataatagataggaactgaaaacagcctcataaagccctctattttatcgagggtaaagaagtctacacctaatatataaaagtggctgtatgaggcacacaggagctcacaggactattacaggagggtaaacaggatggcatacaggagaataacggatataagagatactattggtatgagagcggtattttat

SEQ ID NO: 14132 - DNA, 260 bp, Unknown
  Description of Unknown: LeftRegion for integrase B1133 sequence
caaatgcaacaacaagaaattaatatccaataataaaaaagccccgatgctaccaacaccggagccaattggcactatctggaagataataccaaatcccgcaaatttagtttatcatcttccaggcggtcacgcaagcggaacgaatgttctttgctggctgttatttttatacccatttttaaggaggaatgatatttatggcagaacaaaatgagaaaatcgtagcactttacgtccgtgtatcaactggataccaa

SEQ ID NO: 14133 - DNA, 260 bp, Unknown; identical to SEQ ID NO: 14122
  Description of Unknown: LeftRegion for integrase B1134 sequence

SEQ ID NO: 14134 - DNA, 260 bp, Unknown
  Description of Unknown: LeftRegion for integrase B1135 sequence
cctgtatacgaaaatggccgcctgacaaaatcagacggtcatttttgtatggggaatttgaattttccagcgggtcagtcatatccgcgcgagagagctgcactgagagcgttttagctccagatgtgggaaagttgttgaatcggttgaagacggccttagagggccttattttagctttagatggagagtgacatagcatggcaaaggtaaagctgccagataagccccgcgtggcaatatacacccgcgtatcgacc

SEQ ID NO: 14135 - DNA, 260 bp, Unknown
  Description of Unknown: LeftRegion for integrase B1136 sequence
ggaagaagaaatgggagaagaatacattgaaaacgagtgtaattggtacctcaacgatgacccttttactggagggtcttgggaggaaggcgcagaagacttcatttgtggagaaatcgaagccgagctgaagaagtagtaacaaacaacaacaacaacacaacaacaaggagaacaagaacaaggagagcaactaattaatgccaacaatgaacaccaaaacattctgcgtcatctacgcccgccagtcattcggactg

SEQ ID NO: 14136 - DNA, 260 bp, Unknown
  Description of Unknown: LeftRegion for integrase B1137 sequence
aaattgataaaaaagaatacaataaaatattcgccgcattgaaactaatagaagcattgtttattgatggaaaaataaaatatcatgtatttaggaatatcctagatgactataaagatgttgttgatttatctgagtttaaatgctatacttgatatatctattaacaaacatcgtattattatgaggaataaaaataaatgtatgatatttacaatcaaaaaccaaccagccgaaaagttgtaatttatgcacgcgtt

SEQ ID NO: 14137 - DNA, 260 bp, Unknown
  Description of Unknown: LeftRegion for integrase B1138 sequence
ttactgggtcttagtgaagtcagaaaaccagaagtcttagttttgtcagaaaaagagaaaattctcattgacgcataccgtactgctgatgacatgggacagttgaacataatctatgtctgcctggatgaaatgaaaaaaaagcaaaagtggacagcgaaagtgccgtgtgattgattttgtagagtggaggaagaaccatgtatgaggatataaaaacagcctgcctatatgttagattctcaagccataaccagact

SEQ ID NO: 14138 - DNA, 260 bp, Unknown; identical to SEQ ID NO: 14104
  Description of Unknown: LeftRegion for integrase B1139 sequence

SEQ ID NO: 14139 - DNA, 260 bp, Unknown
  Description of Unknown: LeftRegion for integrase B1140 sequence
actcaattttcaaggtccttgtgacctgctccgactcacacggtacgggcatcgcgcaggcggtgcccgtacgtgtgtatatacgttacggttatgtaaggttacggttacggtaacggttacggttagtgtcggattgtccgcggatttttgtgcggacgttctgcgtgaccgtccgattttataggaggttttcccacatgcccatcaatatttccgagaagctcgcggccaaaaaggccgcaatatatatccgcgtg

SEQ ID NO: 14140 - DNA, 260 bp, Unknown; identical to SEQ ID NO: 14114
  Description of Unknown: LeftRegion for integrase B1141 sequence

SEQ ID NO: 14141 - DNA, 260 bp, Unknown
  Description of Unknown: LeftRegion for integrase B1142 sequence
accagtatcacatcttcacaatcaaagagtgtcaggaactcttgttactcgcaaagaacggacaaataggagaaatcaataaccgcatacaacacgctacggctcgtttccttgtggataattcccctgacaataaaaatattgctgtttgagataaagcccctgcatggggcttttcgctttatatggaggtatatattatggcgtacaacgcacaaaacaagaccggtgcaagggtggctatctatgtcagggtatcg

SEQ ID NO: 14142 - DNA, 260 bp, Unknown
  Description of Unknown: LeftRegion for integrase B1143 sequence
cagaggctatattgacgattcgcggtgtaaacttccaccctatgagtatgtcgggaactactatgctcgtgtccctgatttgctgcaacacgctcaggaattgatatatgctatcaagcaattccttgaagttcttgcttaggtgcaaaaaatgggcatcgcataagcggtgcccaaattgtgttataaagaggtaaaccatggcaattatagagcaaatccgaaagcaaaaggctgctatctacgtgcgcgtttcaacc

SEQ ID NO: 14143 - DNA, 260 bp, Unknown; identical to SEQ ID NO: 14104
  Description of Unknown: LeftRegion for integrase B1144 sequence

SEQ ID NO: 14144 - DNA, 260 bp, Unknown
  Description of Unknown: LeftRegion for integrase B1145 sequence
cctgtatacgaaaatggccgcctgacaaaatcagacggtcatttttgtatggggaatttgaattttcaagcgggtcagtcatatccgtgcgagagagctgcattgagagcgttttagctccagatgtgggaaagttgttgaatcggttgaagacggccttagagggccttattttagctttagatggagagtgacatagcatggcaaaggtaaagctgccagataagcccagcgtggcaatatacacccgcgtatcgacc

SEQ ID NO: 14145 - DNA, 260 bp, Unknown
  Description of Unknown: LeftRegion for integrase B1146 sequence
tgtatacgaaaatggccgcctgacaaaatcagacggtcatttttgtatggggaatttgaattttccagcgggtcagtcatatccgcgcgagagagctgcattgagagcgttttagctccagatgtgggaaagtgttgttgaatcggttgaagacggccttagagggccttattttagctttagatggagagtgacatagcatggcaaaggtaaagctgccagataagccccgcgtggcaatatacacccgcgtatcgacc

SEQ ID NO: 14146 - DNA, 260 bp, Unknown; identical to SEQ ID NO: 14100
  Description of Unknown: LeftRegion for integrase B1147 sequence

SEQ ID NO: 14147 - DNA, 260 bp, Unknown
  Description of Unknown: LeftRegion for integrase B1148 sequence
accagtatcacatcttcacaatcaaagagtgtcaggaactcttgctactcgcaaagaacggacaaataggagaaatcaacaaccgcatacaacacgctacggctcgtttccttgcggataattcccctgacaataaaaatattgctgtttgagataaagcccctgcatggggctttttgctttatatggaggtatatattatggcgtacaacgcacaaaacaagaccggtgcaagggtggctatctatgtcagggtatcg

SEQ ID NO: 14148 - DNA, 260 bp, Unknown
  Description of Unknown: LeftRegion for integrase B1149 sequence
accagtatcacatttttacagtcaaagagtgtcaggaactcttattgcttgcaaagaacggacatattggggaaatcaactcacgaatacagctcgctacggctcgtttccttgcggataattcccataacaataaaaatattgctgtttaagaaaaagcccctgcatggggcttttcgctttatatggaggtatatatcatggcgtacaacgcacaaaacaaaaccggtgcaagggtagctatctatgtcagggtatct

SEQ ID NO: 14149 - DNA, 260 bp, Unknown
  Description of Unknown: LeftRegion for integrase B1150 sequence
accagtatcacatcttcacaatcaaagagtgtcaggaactcttgctgcttgcaaagaacggacatataggagaaatcaacaaccgcatacagcacgctacggctcgttttcttgcggataattcccctgacaataaaaatattgctgtttgagataaagcccctgcatggggcttttcgctttatatggaggtatatattatggcgtacaacgcacaaaacaagactggtgcaagagtggctatctatgtcagggtatcg

SEQ ID NO: 14150 - DNA, 260 bp, Unknown
  Description of Unknown: LeftRegion for integrase B1151 sequence
accagtatcatatcttcacaatcaaagagtgtcaggaactcttgttactcgcaaagaacggacaaataggagaaatcaacaaccgcatacagcacgctacggctcgtttccttgcggataattcccctgacaataaaaatattgctgtttgagataaagcccctgcatggggcttttcgctttatatggaggtatatattatggcgtacaacgcacaaaacaagaccggtgcaagggtggctatctatgtcagggtatcg

SEQ ID NO: 14151 - DNA, 260 bp, Unknown
  Description of Unknown: LeftRegion for integrase B1152 sequence
tctgtatacgaaaatggccgcctgacaaaatcagacggtcatttttgtatggagaatttgaattttccagcgattcagtcatatccgcgcgagagagctgcatcgagggcgttttggctccagatgtgggaaagttgttgaatcggttgaagacggccttagagggccttattttagctttagatggagagtgacatagcatggcaaaggtaaagctgccagataagccccgcgtggcaatatacacccgcgtatcgacc

SEQ ID NO: 14152 - DNA, 260 bp, Unknown
  Description of Unknown: LeftRegion for integrase B1153 sequence
tctgtatacgaaaatggccgcctgacaaaatcagacggtcatttttgtatgaagaatttgaattttccagcgggtcagtcatatccgcgtgagagagccgcattgagggcgttttgggtcctgatgtgggaaagttgttgaatcggttgaagacggccttagagagccttattttagctttagatggagagtgacatagcatggcaaagataaagctgccagataagccccgcgtggcaatatacacccgcgtatcgacc

SEQ ID NO: 14153 - DNA, 260 bp, Unknown
  Description of Unknown: LeftRegion for integrase B1154 sequence
taaaaagacaaaaataattattcaatagtaaaatagaaaagccccggcgctaccaacaccggagctaattggcactatctggaagataataccaaatcccgcaaatttagtttatcatcttccaggcagtcacgcaagcggaatgaatgttctttgctggctgttatttttatactcatttttaaggaggaatgatatttatgacagaacaaaatgagaaaatcgtagcactctacgtccgtgtatcaacaggataccaa

SEQ ID NO: 14154 - DNA, 260 bp, Unknown
  Description of Unknown: LeftRegion for integrase B1155 sequence
gctatgagattgtaaccgaaaacaaaagaaaggaagaatttaagctcgaactgcaaagacttcttgcctgctatcagctcgcatcacatgatgatcgtcgcgtagtatgggctgtgcttaataagtatgcagtcgatgtagactgaaattgcccctatttggggctttttctgtttgagtgataaattgtaggcatatctatgaataaaaaccaagaaagaccaaagaaagcagctttatatgttcgagtgtccaccaac

SEQ ID NO: 14155 - DNA, 260 bp, Unknown
  Description of Unknown: LeftRegion for integrase B1156 sequence
ggtgcccgttttgtgaaaagccgctggcctttgtgtacggacattcgcgtgtatatcatacgacaacatggtgttccgattctggagccgagccgctgcagatgtttgaggaagatgcaaaggcaaggggcttgcggaagtgtaagagttgccaaaaacgtgacggggatttaccggcagatagttaaggaggaatcaggatggccaagcgttcagcgaagaaaaatgaatactcatctgctgaacagatcggcgtgatc

SEQ ID NO: 14156 - DNA, 260 bp, Unknown
  Description of Unknown: LeftRegion for integrase B1157 sequence
tctgtatacgaaaatggccgcctgacaaaatcagacggtcatttttgtatggagaatttgaattttccagcgggtcagtcatatccgcgcgagagagctgcattgagggcgttttggctcaagatgtgggaaagttgttgaatcggttgaagatggccttagagggccttattttagctttagatggagagtgacatagcatggcaaaggtaaagctgccagataagccccgcgtggcaatatacacccgcgtatcgacc

SEQ ID NO: 14157 - DNA, 260 bp, Unknown; identical to SEQ ID NO: 14100
  Description of Unknown: LeftRegion for integrase B1158 sequence

SEQ ID NO: 14158 - DNA, 260 bp, Unknown
  Description of Unknown: LeftRegion for integrase B1159 sequence
tttagctggtagccttattttttttttgcgtttcctattgtattttttatataggtggtgtataatagataggaactgaaaatatagcctttttaagctctttgtttttgaggtagggtaaatctacctttgagagctaaaagaggctgtatgaggctcacaggagcccacagaggcaaaatataaaggagagttacaggatggcttacaggaaagtaaaggatctgtttgaaacaataggattaagggcggtattttat

SEQ ID NO: 14159 - DNA, 260 bp, Unknown; identical to SEQ ID NO: 14111
  Description of Unknown: LeftRegion for integrase B1160 sequence

SEQ ID NO: 14160 - DNA, 260 bp, Unknown; identical to SEQ ID NO: 14117
  Description of Unknown: LeftRegion for integrase B1161 sequence

SEQ ID NO: 14161 - DNA, 260 bp, Unknown
  Description of Unknown: LeftRegion for integrase B1162 sequence
accagtatcacatcttcacaatcaaagagtgtcaggaactcttgttactcgcaaagaacgggcaaataggagaaatcaataaccgcatacaacacgctacggctcgtttccttgcggataattcccctgacaataaaaatattgctgtttgagataaagcccctgcatggggcttttcgctttatatggaggtatatattatggcgtacaacgcacaaaacaagaccggtgcaagggtggctatctatgtcagggtatcg

SEQ ID NO: 14162 - DNA, 260 bp, Unknown
  Description of Unknown: LeftRegion for integrase B1163 sequence
tttgactcgctgtatgccaagtacccccgcgcagccgcatacctcaaagccgacggcatggctcttgctgagcatgatgtcaaagctgccgctgggcgtaaggcgcgcgagcgcattatcaacggtgaggacggcgccgaggcgttggccgatgccgaggctgagtgggcagcgtattgcgccgagcatatatgggactaatgccgcatccggctgtagcccttgacaaaaaacccgtttgcggttactatagccgcaaa

SEQ ID NO: 14163 - DNA, 260 bp, Unknown; identical to SEQ ID NO: 14154
  Description of Unknown: LeftRegion for integrase B1164 sequence

SEQ ID NO: 14164 - DNA, 260 bp, Unknown
  Description of Unknown: LeftRegion for integrase B1165 sequence
accagtatcatatcttcacaatcaaagagtgtcaggaactcttgttactcgcaaagaacggacaaataggagaaatcaacaaccgcatacagcacgctacggctcgtttccttgcggataattcccctgacaataaaaatattgctgtttgagataaagcccctgcatggggcttttcgctttatatggaggtatatattatggcgtacaatgcacaaaacaagaccggtgcaagggtggctatctatgtcagggtatcg

SEQ ID NO: 14165 - DNA, 260 bp, Unknown
  Description of Unknown: LeftRegion for integrase B1166 sequence
cttcatggaggccattgaagacctaattacgtccgtttccgactcggatgaataaagtagtttccttcggcacgttccacgaaatacgaggctgtaggaagttgagacacagcatattcttccaaggactattataaacgcaagaagcgggcagaatctcctctgtccgcttctattctaaaaaggaaggaatgaacaccatggctgttactccatcaatatccaaaaaaataacagctccgaaggctgcaatctacatc

SEQ ID NO: 14166 - DNA, 260 bp, Unknown
  Description of Unknown: LeftRegion for integrase B1167 sequence
tctgtatacgaaaatggccgcctgacaaaatcagacggtcatttttgtatggagaatttgaattttccagcgggttagtcgtatccgcgcgagagagctgcattgagggcgttttggctcaagatgtgggaaagttgttgaatcggttgaagacggccttagagggccttattttagctttagatggagagtgacatagcatggcaaaggtaaagctgccagataagccccgcgtggcaatatacacccgcgtatcgacc

SEQ ID NO: 14167 - DNA, 260 bp, Unknown
  Description of Unknown: LeftRegion for integrase B1168 sequence
aaatccggcgaccccgaggaaatcattctgctgaacgcattctccaaggtgagcgaagatgaccgtgccgtcctgtgggcgctgctgcggaaatatatgactccgcacgaccgcgccctgctggaagcccttaaccaagacaacgaatccggcgccgtataatttacctgccgtattcggactaaggggagggcttcatcatgcaaaagaaccagacgaaaaaagccgctctctatatccgagtttctacccactaccaa

SEQ ID NO: 14168 - DNA, 260 bp, Unknown
  Description of Unknown: LeftRegion for integrase B1169 sequence
aaatccggcgaccccgaggaaatcattctgctgaacgcattctccaaggtgagcgacgatgaccgtgccgtcctgtgggcgctgttgcggaaatatatgactccgcacgaccgtgccctgctggaagcccttaaccaagacaacgaatccggcgccgtataatttacctgccgtattcggactaaggggagggcttcatcatgcaaaagaaccagacgaaaaaagccgctctctatatccgagtttctacccactaccaa

SEQ ID NO: 14169 - DNA, 260 bp, Unknown
  Description of Unknown: LeftRegion for integrase B1170 sequence
ataactatttaatgttcaaggcaaaaaataaataataaaagccccgatgctaccaacaccggagccaattggcactatctggaagataataccaaatcccgcaaatttagtttatcatcttccaggcagtcacgcaagcggaacgaatgttctttgctggctgttatttttatactcatttttaaggaggaatgatatttatgacagaacaaaatgagaaaatcgtagcactctacgtccgtgtatcaactggatatcaa

SEQ ID NO: 14170 - DNA, 260 bp, Unknown
  Description of Unknown: LeftRegion for integrase B1171 sequence
aaattgataaaaaagaatacaataaaatattcgccgcattgaaactaatagaagcattgtttattgatggaaaaataaaatatcatgtatttaggaatatcctagatgactataaagatgttgttgatttatctgagtttaaatgctatacttgatacatctattaacaaacatcgtattattatgaggaataaaaataaatgtatgatatttacaatcaaaaaccaaccagccgaaaagttgtaatttatgcgcgtgtt

SEQ ID NO: 14171 - DNA, 260 bp, Unknown
  Description of Unknown: LeftRegion for integrase B1172 sequence
ctcttttaaattgctctgtcatccctcacttagttcagaatggcagagccaaacattatttttcagacaacagtccatttcatcggtttctcttcagaaaaatacggtctgtaatagtgcccggcaactcatcacaataaacaattgtaatactaaaatataattactatctttgcaacattagaactagaatatttattatgacaaaaaaagctgctatatatctacgtgtctctagtatcgaccagaattatgaacga

SEQ ID NO: 14172 - DNA, 260 bp, Unknown
  Description of Unknown: LeftRegion for integrase B1173 sequence
tgaagccttttggcggtttgcgtcctacaacatagtggatgccgttgatgtagccccagcgtttccatgcggcaaacagtccgggcaacgtgtttgtcaaaccgtgtttaatgggtcaaacacagatataactttattgctgaaatatttggatatgtgggatttaggtggtaactttgcagcggaaaatctaaaatcagatgaagaaagctgtaatatattcccgtgtttctactctagagcaggattatacttcgcag

SEQ ID NO: 14173 - DNA, 260 bp, Unknown; identical to SEQ ID NO: 14154
  Description of Unknown: LeftRegion for integrase B1174 sequence

SEQ ID NO: 14174 - DNA, 260 bp, Unknown
  Description of Unknown: LeftRegion for integrase B1175 sequence
accgggcttttaatcgtgtgcagtgacccgatgcaaaagaaaatcgacagagctgccgccctaaacattccaatcatttcagaacagcaatggtttgaacttatgccggaactagaagccctcggaatgtggaatggaaagccaattccgtttgcggatgacaatggcatctaccgttttgatgtgggtggtgttggataatggcaaaaaagaagaagcccgccgggggcaacgccatcatctatgcccgctactcgtcc

SEQ ID NO: 14175 - DNA, 260 bp, Unknown
  Description of Unknown: LeftRegion for integrase B1176 sequence
ggtgcccgttttgtgaaaagccgctggcctttgtgtacggacattcgcgtgtatatcacacgacaacacggtgttccgattctggagccgagccgctgcagatgtttgaggaagatgcaaaggcaatgggcttgcggaagtgtaagagttgccaaaaacgtgacggggatttaccggcagatagttaaggaggaatcaggatggccaagcgttcagcgaagaaaaatgaataccaatcggctgaacagatcggcgtgatc

SEQ ID NO: 14176 - DNA, 260 bp, Unknown
  Description of Unknown: LeftRegion for integrase B1177 sequence
aaatccggcgaccccgaggaaatcattctgctgaacgcattctctaaggtgagcgacgatgaccgtgccgtcctgtgggcgctgctgcggaaatatatgactccgcacgaccgcgccctgctggaagcccttaaccaagacaacgaatccggcgccgtataatttacctgccgtattcggactaaggggagggcttcatcatgcaaaagaaccagacgaaaaaagccgctctctatatccgagtttctacccactaccaa

SEQ ID NO: 14177 - DNA, 260 bp, Unknown; identical to SEQ ID NO: 14122
  Description of Unknown: LeftRegion for integrase B1178 sequence

SEQ ID NO: 14178 - DNA, 260 bp, Unknown
  Description of Unknown: LeftRegion for integrase B1179 sequence
tcctaattacaaattttattgtacctgccgtacttccagaaaagttttcggaaaagatctgcccaatcatcaattgcatacggtagcagaacggtgcggatataatttagagaatcaccaccacgcacttgctgacgcaaagtttccaaatgtgctctgatttcattatcttcgcacccactaaccagcgaagaagcattatgagaaaaagaattgtaggttatgcgagagtatctacagagaaacaagacctagaaaga

SEQ ID NO: 14179 - DNA, 260 bp, Unknown
  Description of Unknown: LeftRegion for integrase B1180 sequence
ggctactggctgtaaaatgctggtagccctcattttttagttgtatctagtatataaggggtgtataatagatagaaactgaaaacagcctcataaagccctctattttatcgagagtaaagaagtctacacctaatatataaaagtggctgtatgaggcacacaggagctcacaggactattgcaggagggtaaacaggatggcatacaggaaaataacggatataagagatactattggtatgagagcggtattttat

SEQ ID NO: 14180 - DNA, 260 bp, Unknown
  Description of Unknown: LeftRegion for integrase B1181 sequence
ccagaggcttcgcaaaagcagtctcgcaataaaaacacatacggggcatcgcagcagcggtgccccaaaactatatctaacggttacgttacgtttacggtataggttacggttacggtatggttacggttatactcggaacgtccgtggatttttggtcggacgttcctatggaatatcccgaaaaaggaggacttcgtatggcttctcgcatcgccgagaaactggccgcgaagaaggcggccatctatattcgcgtc

SEQ ID NO: 14181 - DNA, 260 bp, Unknown
  Description of Unknown: LeftRegion for integrase B1182 sequence
ccagaggcttcgcaaaagcagtctcgcaataaaaacacatacggggcatcgcagcagcggtgccccaaaactatatctaacggttatgttacgtttacggtataggttacggttacggtatggttacggttatacacggaacgtccgtggatttttggtcggacgttcctatggaatatcccgaaaaaggaggacttcgtatggcttctcgcatcgccgagaaactggccgcgaagaaggcggccatctatattcgcgtc

SEQ ID NO: 14182 - DNA, 260 bp, Unknown
  Description of Unknown: LeftRegion for integrase B1183 sequence
ccagaggcttcgcaaaagcagtctcgcaataaaaacacatacggggcatcgcagcagcggtgccccaaaactatatctaacggttacgttacgtttacggtataggttacggttacggtatggttacggttatacacggaacgtccgtggatttttggtcggacgttcctatggaatatcccgaaaaaggaggacttcgtatggcttctcgcatcgccgagaaactggccgcgaagaaggcggccatctatattcgcgtc

SEQ ID NO: 14183 - DNA, 260 bp, Unknown; identical to SEQ ID NO: 14182
  Description of Unknown: LeftRegion for integrase B1184 sequence

SEQ ID NO: 14184 - DNA, 260 bp, Unknown; identical to SEQ ID NO: 13552
  Description of Unknown: LeftRegion for integrase B1185 sequence

SEQ ID NO: 14185 - DNA, 260 bp, Unknown; identical to SEQ ID NO: 13291
  Description of Unknown: LeftRegion for integrase B1186 sequence

SEQ ID NO: 14186 - DNA, 260 bp, Unknown
  Description of Unknown: LeftRegion for integrase B1187 sequence
gctactggctataaaatgctggtagccctcattttttagttgtatctagtatataaggggtgtataatagatagaaactgaaaaacagcctcataaagccctctattttatcgagagtaaagaagtctacacctaatatataaaagtggctgtatgaggcacacaggagctcacaggactattacaggagggtaaacaggatggcatacaggaaaataacggatataaaagatactattggtatgagagcggtattttat

SEQ ID NO: 14187 - DNA, 260 bp, Unknown; identical to SEQ ID NO: 13521
  Description of Unknown: LeftRegion for integrase B1188 sequence

SEQ ID NO: 14188 - DNA, 260 bp, Unknown
  Description of Unknown: LeftRegion for integrase B1189 sequence
tgaaaagaaaaagggcggcgcggcttcgatcgccttgattgtgatcggcgtcctgttcctgatcggcggcgtgaatggcttttctattgccgtttcaaacggaattatcggacttctgatcggcggcgtctgcctgtatttcggaatcaggaaacggcgcaacccgaaacaataatatttttttgaaaaggaatcaaaccatgaatgaacagaaaatagttgcattatatacccgcgtttcgaccgggtatcagatcgac

SEQ ID NO: 14189 - DNA, 260 bp, Unknown
  Description of Unknown: LeftRegion for integrase B1190 sequence
gccagaggcttcgcaaaaacagtctcgcaataaaaacacatacggggcatcgcggtagcggtgccccaaaactatatctaacggttacgttacgtttacggtataggttacggttacggtatggttacggttatactcggaacgtccgtggatttttggtcggacgttcctatggaatatcccaaaaaggaggacttcgtatggcttctcgcatcgccgagaaactggccgcgaagaaggcggccatctatattcgcgtc

SEQ ID NO: 14190 - DNA, 260 bp, Unknown
  Description of Unknown: LeftRegion for integrase B1191 sequence
tcctaattacaagttttattgtacctgccgtacttcaaggaaagtgttcggaaaggatctgcccaatcatcagttgcatacagtagcagaacgatgcggatataacttggagaatcaccaccacgcacttgctgacgcaaagtttccaaatgtgctctgatttcattatcttcgcacccactaaccagcgaagaagcattatgagaaaaagaattgtaggttatgcgagagtatctacagagaagcaagacctagaaaga

SEQ ID NO: 14191 - DNA, 260 bp, Unknown; identical to SEQ ID NO: 13521
  Description of Unknown: LeftRegion for integrase B1192 sequence

SEQ ID NO: 14192 - DNA, 260 bp, Unknown
  Description of Unknown: LeftRegion for integrase B1193 sequence
agggctactggctgtaaaatgctggtagccctcattttttagttgtatctagtatataaggggtgtataatagataggaactgaaaacaacctcataaagccctctattttatcgagggtaaaagtctacacctaatatataaaagtggctgtatgaggcacacaggagctcacaggactattgcaggagggtaaacaggatggcatacaggaaaataacggatataaaagatactattggtatgagagcggtattttat

SEQ ID NO: 14193 - DNA, 260 bp, Unknown
  Description of Unknown: LeftRegion for integrase B1194 sequence
ccagaggcttcgcaaaagcagtctcgcaataaaaacacatacggggcatcgcagcagcggtgccccaaaactatatctaacggttacgttacgtttacggtataggttacggttacggtatggttacggttatacacggaacgtccgtggatttttagtcggacgttcctatggaatatcccgaaaaaggaggacttcgtatggcttctcgcatcgccgagaaactggccgcgaagaaggcggccatctatattcgcgtc

SEQ ID NO: 14194 - DNA, 260 bp, Unknown; identical to SEQ ID NO: 14046
  Description of Unknown: LeftRegion for integrase B1195 sequence

SEQ ID NO: 14195 - DNA, 260 bp, Unknown
  Description of Unknown: LeftRegion for integrase B1196 sequence
gctactggctgtaaaatgctggtagccctcattttttagttgtatctagtatataaggggtgtataatagatagaaactgaaaaacagcctcataaagccctctattttatcaagggtaaagaagtctacacctaatatataaaagtggctgtatgaggcacacaggagctcacaggactattacaggagggtaaacaggatggcatacaggaaaataacggatataagagatactattggtatgagagcggtattttat

SEQ ID NO: 14196 - DNA, 260 bp, Unknown
  Description of Unknown: LeftRegion for integrase B1197 sequence
ccagaggcttcgcaaaagcagtctcgcaataaaaacacatacggggcatcgcagcagcggtgccccaaaactatatctaacggttacgctacgtttacggtataggttacggttacggtatggttacggttatacacggaacgtccgtggatttttggtcggacgttcctatggaatatcccgaaaaaggaggacttcgtatggcttctcgcatcgccgagaaactggccgcaaagaaggcggccatctatattcgcgtc

SEQ ID NO: 14197 - DNA, 260 bp, Unknown
  Description of Unknown: LeftRegion for integrase B1198 sequence
ccagaggcttcgcaaaagcagtctcgcaataaaaacacatacggggcatcgcagcagcggtgccccaaaactatatctaacggttacgttacgtttacggtataggttacggttacggtatggttacggttatacacggaacgtccgtggatttttggtcggacgttcctatggaatatcccgaaaaaggaggacttcgtatggcttctcgcatcgccgagaaactggccgcgaagaaggcggccatctatattcgcgtt

SEQ ID NO: 14198 - DNA, 260 bp, Unknown
  Description of Unknown: LeftRegion for integrase B1199 sequence
caagagacttcgccaaatcagtctcaaaataaaaacgcatacggggcatcgcgtcagcggtgccccaaaactatatctaacggttacgttacgtttacggtataggttacggttacggtatggttacggttatactcggaacgtccgtggatttttggtcggacgttcctatggaatatcccgaaaaaggaggacttcgtatggcttctcgcatcgccgagaaactggccgcgaagaaggcggccatctatattcgcgtc

SEQ ID NO: 14199 - DNA, 260 bp, Unknown
  Description of Unknown: LeftRegion for integrase B1200 sequence
ggctactggctgtaaaatgctggtagccctcattttttagttgtatctagtatataaggggtgtataatagataggaactgaaaacagcctcataaagccctctgttttatcgagggtaaagaagtctacacctaatatataaaagtggctgtatgaggcacacaggagctcacaggactattacaggagggtaaacaggatggcatacaggaaaataacggatataaaagctactataggtatgagagcggtattttat

SEQ ID NO: 14200 - DNA, 260 bp, Unknown
  Description of Unknown: LeftRegion for integrase B1201 sequence
acttgacgttttctgacggcccagtgttatccgccggcattgaagaatgtatgtcgggcggcgagctcatcctgctttgcatctcatattctccgacgccaaaatcttgatagacatactgtgcggggtggcgttctatgtcacctcgcttttctattcagtagtacgaatatttctacgattgcttggaggtagctgttatgacatcaatttctgagcgtctaaaaaagttcagggtcgcaatatacatccgcgtatcg

SEQ ID NO: 14201 - DNA, 260 bp, Unknown
  Description of Unknown: LeftRegion for integrase B1202 sequence
ggctactggctgtaaaatgctggtagccctcattttttagttgtatctagtatataaggggtgtataatagataggaactgaaaacagcctcataaagccctctattttatcgagggtaaagaagtctacacctaatatataaaagtgactgtacgaggcacacaggagctcacaggactattacaggagggtaaacaagatggcatacaggaaaataacggatataagagatactattggtatgagagcggtattttat

SEQ ID NO: 14202 - DNA, 260 bp, Unknown
  Description of Unknown: LeftRegion for integrase B1203 sequence
ccagaggcttcgcaaaatcagtctcgcaataaaaacacatacggggcatcgcagcagcggtgccccaaaactatatctaacggttacgttacgtttacggtataggttacggttacggtatggttacggttatacacggaacgtccgtggatttttggtcggacgttcctatggaatatcccgaaaaaggaggacttcgtatggcttctcgcatcgccgagaaactggccgcgaagaaggcggccatctatattcgcgtc

SEQ ID NO: 14203 - DNA, 260 bp, Unknown
  Description of Unknown: LeftRegion for integrase B1204 sequence
cagaggctttgcaaaaacagtctcgcgataaaaacacatacggggcatcgcgtcagcggtgccccaaaactatatctaacggttacgttacgtttacggtataggttacggttacggtatggttacggttatactcggaacgtccgtggatttttggtcggacgttcctatggaatatcccgaaaaaaggaggacttcgtatggcttctcgcatcgctgagaaactggccgccaagaaagcggccatttacattcgcgtc

SEQ ID NO: 14204 - DNA, 260 bp, Unknown; identical to SEQ ID NO: 14182
  Description of Unknown: LeftRegion for integrase B1205 sequence

SEQ ID NO: 14205 - DNA, 260 bp, Unknown
  Description of Unknown: LeftRegion for integrase B1206 sequence
ccagaggcttcgcaaaatcagtctcgcaataaaaacacatacggggcatcgcagcagcggtgccccaaaactatatctaacggttacgttacgtttacggtataggttacggttacggtatggttacggttatacacggaacgtccgtggatttttggtcggacgttcctatggaatatcccgaaaaaggaggacttcgtatggcttctcgcattgccgagaaactggccgcgaagaaggcggccatctatattcgcgtc

SEQ ID NO: 14206 - DNA, 260 bp, Unknown
  Description of Unknown: LeftRegion for integrase B1207 sequence
tatagtcgtcgcttcgaacaatggggcctacgcaataaagaggtttattaatgatctcgaaaataagcgaatcattcttcgccccgattcttctgatatcgccttttctgacattgtcatcccctatgaatcggccgataatttacaaattttcggtaaagtcgttatatattccgtagtactttaaaggcggtgcgatcatggcaaatagaaaatggcgcccggcctgttattgccgggtctcgacgatacaccaaatc

SEQ ID NO: 14207 - DNA, 260 bp, Unknown
  Description of Unknown: LeftRegion for integrase B1208 sequence
tgaaaagaaaaagggcggcgcggcttcgatcgccttgattgtaatcggcgtcctgttcctgatcggcggcgtgaatggcttttctattgccgtttcaaacggaattatcggacttctgatcggcggcgtctgcctgtatttcggaatcaggaaacggcgcaacccgaaacaataatatttttttgaaaaggaatcaaaccatgaatgaacagaaaatagttgcattatatacccgcgtttcgaccgggtatcagatcgac

SEQ ID NO: 14208 - DNA, 260 bp, Unknown; identical to SEQ ID NO: 13530
  Description of Unknown: LeftRegion for integrase B1209 sequence

SEQ ID NO: 14209 - DNA, 260 bp, Unknown; identical to SEQ ID NO: 14182
  Description of Unknown: LeftRegion for integrase B1210 sequence

SEQ ID NO: 14210 - DNA, 260 bp, Unknown; identical to SEQ ID NO: 14189
  Description of Unknown: LeftRegion for integrase B1211 sequence

SEQ ID NO: 14211 - DNA, 260 bp, Unknown
  Description of Unknown: LeftRegion for integrase B1212 sequence
ccagaggcttcgcaaaagcagtctcgcaataaaaacacatacggggcatcgcagcagcggtgccctaaaactatatctaacggttacgttacgtttacggtataggttacggttacggtatggttacggttatacacggaacgtccgtggatttttagtcggacgttcctatggaatatcccgaaaaaggaggacttcgtatggcttctcgcatcgccgagaaactggccgcgaagaaggcggccatctatattcgcgtc

SEQ ID NO: 14212 - DNA, 260 bp, Unknown
  Description of Unknown: LeftRegion for integrase B1213 sequence
attttgaggggcttgtacccctttttttgtttttctgttgctatttttatatagctggtgtataatagatacagactgaaaataaagccacttagagagcctcaagagttaggggtaggcagttatacccctgagcgattaaaacggctctgagaggctctcaggggctcaggataggattttataaaggagtgtacaggatggcttacaggagagcacaggatactaaaggattaagggcggttttctatgctagggta

SEQ ID NO: 14213 - DNA, 260 bp, Unknown
  Description of Unknown: LeftRegion for integrase B1214 sequence
ggctactggctgtaaaatgctggtagccctcattttttagttgtatctagtatataaggggtgtataatagataggaactgaaaacagcctcataaagccctctattttatagagggtaaagaagtctacacctaatatataaaagtggatgtatgaggcacacaggagctcacaggactattacaggagggtaaacaggatggcatacaggaaaataacggatataagagatactattggtatgagagcggtattttat

SEQ ID NO: 14214 - DNA, 260 bp, Unknown
  Description of Unknown: LeftRegion for integrase B1215 sequence
gccagaggcttcgcaaaaacagtctcgcaataaaaacacatacggggcatcgcggtagcggtgccccaaaactatatctaacggttacgttacgtttacggtataggttacggttacggtatggttacggttatactcggaacgtccgtgggtttttggtcggacgttcctatggaatatcccaaaaaggaggacttcgtatggcttctcgcatcgccgagaaactggccgcgaagaaggcggccatctatattcgcgtc

SEQ ID NO: 14215 - DNA, 260 bp, Unknown
  Description of Unknown: LeftRegion for integrase B1216 sequence
gctactggctgtaaaatgctggtagccctcattttttagttgtatctagtatataaggggtgtataatagatagaaactgaaaaacagcctcataaagccatctattttatcgagggtaaagaagtctacacctaatatataaaagtggctgtatgaggcacacaggagctcacaggactattacaggaggataaacaggatggcatacaggagaataacggatataagagatactattggtatgagagcggtattttat

SEQ ID NO: 14216 - DNA, 260 bp, Unknown
  Description of Unknown: LeftRegion for integrase B1217 sequence
gctactggctgtaaaatgctggtagccctcattttttagttgtatctagtatataaggggtgtataatagatagaaactgaaaaacagcctcataaagccctctattttatagagggtaagaaagtctacacctaatatataaaagtggctgtatgaggcacacaggagctcacaggactattacaggagggtaaacaggatggcatacaggaaaataacggatataagagatactattggtatgagagcggtattttat

SEQ ID NO: 14217 - DNA, 260 bp, Unknown; identical to SEQ ID NO: 14182
  Description of Unknown: LeftRegion for integrase B1218 sequence

SEQ ID NO: 14218 - DNA, 260 bp, Unknown
  Description of Unknown: LeftRegion for integrase B1219 sequence
ggctactggctgtaaaatgctggtagccctcattttttagttgtatctagtatataaggggtgtataatagatagaaactgaaaaacagcctcataaagccctctattttatagagggtaagaagtctacacctaatatataaaagtggctgtatgaggcatacaggagctcacaggactattacaggagggtaaacaggatggcatacaggaaaataacggatataagagatactattggtatgagagcggtattttat

SEQ ID NO: 14219 - DNA, 260 bp, Unknown; identical to SEQ ID NO: 13552
  Description of Unknown: LeftRegion for integrase B1220 sequence

SEQ ID NO: 14220 - DNA, 260 bp, Unknown; identical to SEQ ID NO: 14182
  Description of Unknown: LeftRegion for integrase B1221 sequence

SEQ ID NO: 14221 - DNA, 260 bp, Unknown; identical to SEQ ID NO: 14182
  Description of Unknown: LeftRegion for integrase B1222 sequence

SEQ ID NO: 14222 - DNA, 260 bp, Unknown; identical to SEQ ID NO: 14197
  Description of Unknown: LeftRegion for integrase B1223 sequence

SEQ ID NO: 14223 - DNA, 260 bp, Unknown
  Description of Unknown: LeftRegion for integrase B1224 sequence
ccagaggcttcgcaaaatcagtcttgcaataaaaacacatacggggcatcgcagcagcggtgccccaaaactatatctaacggttacgttacgtttacggtataggttacggttacggtatggttacggttatacacggaacgtccgtggatttttggtcggacgttcctatggaatatcccgaaaaaggaggacttcgtatggcttctcgcatcgccgagaaactggccgcgaagaaggcggccatctatattcgcgtt

SEQ ID NO: 14224 - DNA, 260 bp, Unknown
  Description of Unknown: LeftRegion for integrase B1225 sequence
gctactggctgtaaaatgctggtagccctcattttttagttgtatctagtatataaggggtgtataatagatagaaactgaaaaacagcctcataaagccctctattttatcgagggtaaagaagtctacacctaatatataaaagtggctgtatgaggcacacaggagctcacaggactattacaggagggtaaacaggatggcatacaggaaaataacggatataaaagatactattggtatgagagcggtattttat

SEQ ID NO: 14225 - DNA, 260 bp, Unknown
  Description of Unknown: LeftRegion for integrase B1226 sequence
ccagaggcttcgtgaaaacagtctcgtagtaaagacacatacggggcatcgcttcagcggtgccccaaaactatatctaacggttacgttacgtttacggtataggttacggttacggtatggttacggttatacacggaacgtccgtggatttttggtcggacgttcctatggaatatcccgaaaaaggaggacttcgtatggcttctcgcatcgccgagaaactggccgcgaagaaggcggccatctatattcgcgtt

SEQ ID NO: 14226 - DNA, 260 bp, Unknown; identical to SEQ ID NO: 14189
  Description of Unknown: LeftRegion for integrase B1227 sequence

SEQ ID NO: 14227 - DNA, 260 bp, Unknown; identical to SEQ ID NO: 14189
  Description of Unknown: LeftRegion for integrase B1228 sequence

SEQ ID NO: 14228 - DNA, 260 bp, Unknown; identical to SEQ ID NO: 14182
  Description of Unknown: LeftRegion for integrase B1229 sequence

SEQ ID NO: 14229 - DNA, 260 bp, Unknown
  Description of Unknown: LeftRegion for integrase B1230 sequence
ggctactggctgtaaaatgctggtagccctcattttttagttgtatctagtatataaggtgtgtataatagataggaactgaaaacagcctcataaagccctctattttatcgagggtaaagaagtctacacctaatatataaaagtggctgtatgaggcacacaggagctcacaggactattacaggagggtaaacaggatggcatacaggaaaataacggatataaaagatactattggtatgagagcggtattttat

SEQ ID NO: 14230 - DNA, 260 bp, Unknown; identical to SEQ ID NO: 14197
  Description of Unknown: LeftRegion for integrase B1231 sequence

SEQ ID NO: 14231 - DNA, 260 bp, Unknown; identical to SEQ ID NO: 14193
  Description of Unknown: LeftRegion for integrase B1232 sequence

SEQ ID NO: 14232 - DNA, 260 bp, Unknown
  Description of Unknown: LeftRegion for integrase B1233 sequence
aaactgtacttcgatgaaaacggcgatgtttgcaagccatatacaggctacttgtttgcggaactggaagttagggacggggatcttctggatatgaaagatggtcaatatcttgagtattccattcaaacactcgattcgcttactgctagtttcagccgctaagaaatgttatatcgcctaaaggagctgcaaaacacatggcacgttcagcgaagaaaattgaatatgcacccgctgaacagatcggcgtgatctat

SEQ ID NO: 14233 - DNA, 260 bp, Unknown
  Description of Unknown: LeftRegion for integrase B1234 sequence
cagaggcttcgcaaaaacagtctcgcaataaaaacacatacggggcatcgcggtagcggtgccccaaaactatatctaacggttacgttacgtttacggtataggttacggttacggtatggttacggttatactcggaacgtccgtggatttttggtcggacgttcctatggaatatcccgaaaaaaggaggacttcgtatggcttctcgcatcgccgagaaactggccgccaagaaagcggccatttacattcgcgtc

SEQ ID NO: 14234 - DNA, 260 bp, Unknown
  Description of Unknown: LeftRegion for integrase B1235 sequence
gggctactggctgtaaaatgctggtagccctcattttttagttgtatctagtatataaggggtgtataatagataggaactgaaaacagcctcataaagccctctattttatcgagggtaaaaagtctacacctaatatataaaagtggctgtatgaggcacacaggagctcacaggactattacaggagggtaaacaggatggcatacaggaaaataacggatataaaagatactattggtatgagagcggtattttat

SEQ ID NO: 14235 - DNA, 260 bp, Unknown
  Description of Unknown: LeftRegion for integrase B1236 sequence
ggctactggctgtaaaatgctggtagccctcattttttagttgtatctagtatataaggggtgtataatagatagaaactgaaaatagcctcataaagccttctgttttatcgagggtaaagaagtctacacctaatatataaaagtggctgtatgaggcacacaggagctcacaggactattacaggagggtaaacaggatggcatacaggaaaataacggatataaaagatactataggtatgagagcggtattttat

SEQ ID NO: 14236 - DNA, 260 bp, Unknown; identical to SEQ ID NO: 13548
  Description of Unknown: LeftRegion for integrase B1237 sequence

SEQ ID NO: 14237 - DNA, 260 bp, Unknown
  Description of Unknown: LeftRegion for integrase B1238 sequence
agggctactggctgtaaaatgctggtagccctcattttttagttgtatctagtatataaggggtgtataatagataggaactgaaaacagcctcataaagccctctattttatcgagggtaaaagtctacacctaatatataaaagtggctttatgaggcacacaggagctcacaggactattacaggagggtaaacaggatggcatacaggaaaataacggatataaaagatactattggtatgagagcggtattttat

SEQ ID NO: 14238 - DNA, 260 bp, Unknown; identical to SEQ ID NO: 14182
  Description of Unknown: LeftRegion for integrase B1239 sequence

SEQ ID NO: 14239 - DNA, 260 bp, Unknown; identical to SEQ ID NO: 14182
  Description of Unknown: LeftRegion for integrase B1240 sequence

SEQ ID NO: 14240 - DNA, 260 bp, Unknown
  Description of Unknown: LeftRegion for integrase B1241 sequence
cagaggcttcgcaaaaacagtctcgcaataaaaacacatacggggcatcgcggtagcggtgccccaaaactatatctgacggttacgttacgtttacggtataggttacggttacggtatggttacggttatactcggaacgtccgtggatttttggtcggacgttcctatggaatatcccgaaaaaaggaggacttcgtatggcttctcgcatcgccgagaaactggccgccaagaaagcggccatctacattcgcgtc

SEQ ID NO: 14241 - DNA, 260 bp, Unknown
  Description of Unknown: LeftRegion for integrase B1242 sequence
tcagaggcttcgcaaaagcagtctcgcaataaaaacacatacggggcatcgcagcagcggtgccccaaaactatatctaacggttatgttacgtttacggtataggttacggttacggtatggttacggttatacacggaacgtccgtggatttttggtcggacgttcctatggaatatcccgaaaaaggaggacttcgtatggcttctcgcatcgccgagaaactggccgcgaagaaggcggccatctatattcgcgtc

SEQ ID NO: 14242 - DNA, 260 bp, Unknown
  Description of Unknown: LeftRegion for integrase B1243 sequence
gctactggctgtaaaatgctggtagccctcattttttagttgtatctagtatataaggggtgtataatagatagaaactgaaaaacagcctcataaagccctctattttatcgagggtaaagaagtctacacctaatatataaaggtggctgtatgaggcacacaggagctcacaggactattacaggaggataaacaggatggcatacaggaaaataacggatataagagatactattggtatgagagcggtattttat

SEQ ID NO: 14243 - DNA, 260 bp, Unknown
  Description of Unknown: LeftRegion for integrase B1244 sequence
aagatacttatgaatacaagagggaagacggaaccgtcggaaaccttcacaaagagaataccgggatgtacgattttgagttgccagatgaacttccatcggctgaaactattccagagccgttatacggttatgtcgtagaatggcttgcagaaaaagcaaagtcatacagttgaatttgatctttgaggtaaggaactatggcacgttcagcgaagaaaattgaatacgcgcccgctgaacagatcggcgtgatttac

SEQ ID NO: 14244 - DNA, 260 bp, Unknown
  Description of Unknown: LeftRegion for integrase B1245 sequence
aagagacttcgccaaatcagtctcaaaataaaaacgcatacggggcatcgcgtcagcggtgccccaaaactatatctaacggttacgttacgtttacggtataggttacggttacggtatggttacggttatactcggaacgtccgtggatttttggtcggacgttcctatggaatatcccgaaaaaaggaggacttcgtatggcttctcgcatcgccgagaaactggccgccaagaaagcggccatctacattcgcgtc

SEQ ID NO: 14245 - DNA, 260 bp, Unknown; identical to SEQ ID NO: 14182
  Description of Unknown: LeftRegion for integrase B1246 sequence

SEQ ID NO: 14246 - DNA, 260 bp, Unknown
  Description of Unknown: LeftRegion for integrase B1247 sequence
gccagaggcttcgcaaaaacagtctcgcaataaaaacacatacggggcatcgcggtagcggtgccccaaaactatatctaacggttacgttacgtttacggtataggttacggttacggtatggttacggttatactcggaacgtccgtggatttttggccggacgttcctgtggaatatcccaaaaaggaggacttcgtatggcttctcgcatcgccgagaaactggccgcgaagaaggcggccatctatattcgcgtc

SEQ ID NO: 14247 - DNA, 260 bp, Unknown; identical to SEQ ID NO: 13525
  Description of Unknown: LeftRegion for integrase B1248 sequence

SEQ ID NO: 14248 - DNA, 260 bp, Unknown; identical to SEQ ID NO: 14202
  Description of Unknown: LeftRegion for integrase B1249 sequence

SEQ ID NO: 14249 - DNA, 260 bp, Unknown; identical to SEQ ID NO: 13548
  Description of Unknown: LeftRegion for integrase B1250 sequence

SEQ ID NO: 14250 - DNA, 260 bp, Unknown
  Description of Unknown: LeftRegion for integrase B1251 sequence
ttgacggcatattgtttgcatttctccgttaaattttaaacttgtttttatcaacaaaaataataaaatgaaaaccgcacttgaaataacattacaaaacctctcaataagtcctttatccaaagaagaactcgaaaaaggggtacgttacctttccggtgcggttacatgccttttaaacatgcggatggagatattgcgtgaaagcggtcatattaacaagagtatcgaccaaggagcaggaggagggacacagtctg

SEQ ID NO: 14251 - DNA, 260 bp, Unknown
  Description of Unknown: LeftRegion for integrase B1252 sequence
ggctactggctgtaaaatgctggtagccctcattttttagttgtatctagtatataaggggtgtataatagataggaactgaaaacagcctcataaagccctctagtttatcgagggtaaagaagtctacacctaatatataaaagtggctgtatgaggcacacaggagctcacaggactattacaggagggtaaacaggatggcatacaggaaaataacggatataagagatactattggtatgagagcggtattttat

SEQ ID NO: 14252 - DNA, 260 bp, Unknown; identical to SEQ ID NO: 14246
  Description of Unknown: LeftRegion for integrase B1253 sequence

SEQ ID NO: 14253 - DNA, 260 bp, Unknown; identical to SEQ ID NO: 14182
  Description of Unknown: LeftRegion for integrase B1254 sequence

SEQ ID NO: 14254 - DNA, 260 bp, Unknown; identical to SEQ ID NO: 14200
  Description of Unknown: LeftRegion for integrase B1255 sequence

SEQ ID NO: 14255 - DNA, 260 bp, Unknown; identical to SEQ ID NO: 14180
  Description of Unknown: LeftRegion for integrase B1256 sequence

SEQ ID NO: 14256 - DNA, 260 bp, Unknown
  Description of Unknown: LeftRegion for integrase B1257 sequence
ggctactggctgtaaaatgctggtagccctcattttttagttgtatctagtatataaggggtgtataatagatagaaactgaaaacagcctcataaagccctctattttatcgagggtaaagaagtctacacctaatatataaaaggggctgtatgaggcacacaggagctcacaggactattacaggagggtaaacaggatggcatacaggaaaataacggatataaaagatactattggtatgagagcggtattttat

SEQ ID NO: 14257 - DNA, 260 bp, Unknown
  Description of Unknown: LeftRegion for integrase B1258 sequence
agcaaaggaaagatcgctatgaacaaagacaacaacgtgtccgagtgcaagatcggacgaacaacttacatcgtgaagttagtattcaaccctgcttcaaaggaacgccttacggatattctgcaaagactgatagaccgtgaatgtgaagaaatgctcggtgaatccggacaagaacctgagaagtaggctgtgtaatattggcatttcggcgcattgccattgacggtatattgcgctataatgataacatagcttgc

SEQ ID NO: 14258 - DNA, 260 bp, Unknown
  Description of Unknown: LeftRegion for integrase B1259 sequence
gccagaggcttcgcaaaaacagtctcgcaataaaaacacatacggggcatcgcggtagcggtgccccaaaactatatctaacggttacgttacgtttacggtataggttacggttacggtatggttacggttatactcggaacgtccgtggatttttggttggacgttcctatggaatatcccaaaaaggaggacttcgtatggcttctcgcatcgccgagaaactggccgcgaagaaggcggccatctatattcgcgtc

SEQ ID NO: 14259 - DNA, 260 bp, Unknown
  Description of Unknown: LeftRegion for integrase B1260 sequence
ccagaggcttcgcaaaagcagtctcgcaataaaaacacatacggggcatcgcagcagcggtgccccaaaactatatctaacggttacgttacgtttacggtataggttacggttacggtatggttacggttatacacggaacgtccgtggatttttggtcggacgttcctatggaatatcccgaaaaaggaggacttcatatggcttctcgcatcgccgagaaactggccgcgaagaaggcggccatctatattcgcgtc

SEQ ID NO: 14260 - DNA, 260 bp, Unknown
  Description of Unknown: LeftRegion for integrase B1261 sequence
cgcccgttggttatctattgatataatcggacttggcgtttctcctgatgatccgcgttttattgttcaaaaaaataaaaatcaaagattttggaaggcaaaaattgataatatttccaatctttccgcgttcgatgatctcgtgatcgcgtcctgctgccggaatttaaaacaatagcattttgaaaaggaatcgaaccatgaatgaacagaaaatagttgcattatatacccgcgtttcgaccgggtatcagatcgaa

SEQ ID NO: 14261 - DNA, 260 bp, Unknown
  Description of Unknown: LeftRegion for integrase B1262 sequence
cagaggcttcgcaaaagcagtctcgcaataaaaacacatacggggcatcgcagcagcggtgccccaaaactatatctaacggttacgttacgtttacggtataggttacggttacggtatggttacggttatacacggaacgtccgtggatttttggtcggacgttcctatggaatatcccgaaaaaaggaggacttcgtatggcttctcgcatcgccgagaaactggccgcgaagaaggcggccatctatattcgcgtc

SEQ ID NO: 14262 - DNA, 260 bp, Unknown
  Description of Unknown: LeftRegion for integrase B1263 sequence
gccagaggcttcgtaaaagcagtctcgcaataaaaacacatacggggcatcgcagcagcggtgccccaaaactatatctaacggttacgttacgttttcggtataggttacggttacggtatggttacggttatacacggaacgtccgtggatttttggtcggacgttcctatggaatatcccgaaaaggaggacttcgtatggcttctcgcatcgccgagaaactggccgcgaagaaggcggccatctatattcgcgtc

SEQ ID NO: 14263 - DNA, 260 bp, Unknown
  Description of Unknown: LeftRegion for integrase B1264 sequence
cgaccttatcaatgtaatggacgacacgcccgttcgttttgatagcgacgaagaatcgtgttccttccggctttctccacttgaaaaagatatcattcttcgttttcgcttattatctgacggcgaacgaaatatgtttcttcgctctcttggaattgatgatacatattaagtgaatgtttcaagaaaggaatcaaaccatgaacgaacagaaaacagttgcactatatacccgcgtttcgaccgggtatcagatcgac

SEQ ID NO: 14264 - DNA, 260 bp, Unknown; identical to SEQ ID NO: 14202
  Description of Unknown: LeftRegion for integrase B1265 sequence

SEQ ID NO: 14265 - DNA, 260 bp, Unknown; identical to SEQ ID NO: 14182
  Description of Unknown: LeftRegion for integrase B1266 sequence

SEQ ID NO: 14266 - DNA, 260 bp, Unknown
  Description of Unknown: LeftRegion for integrase B1267 sequence
gctactggctgtaaaatgctggtagccctcattttttagttgtatctagtatataaggggtgtataatagatagaaactgaaaaacagccttataaagccctctattttatcgagggtaaagaagtctacacctaatatataaaagtggctgtataaggcacacaggaactcacaggactattacaggagggtaaacaggatggcatacaggaaaataacggatataaaagatactattggtatgagagcggtattttat

SEQ ID NO: 14267 - DNA, 260 bp, Unknown
  Description of Unknown: LeftRegion for integrase B1268 sequence
ccagaggcttcgcaaaagcagtctcgcaataaaaacacatacggggcatcgcagcagcggtgccccaaaactatatctaacggttacgttacgtttacggtataggttacggttacggtatggttacggttatacacggaacgtccgtggatttttggtcggacgttcctatggaatatcccgaaaaaggaggacttggtatggcttctcgcatcgccgagaaactggccgcgaagaaggcggccatctatattcgcgtc

SEQ ID NO: 14268 - DNA, 260 bp, Unknown; identical to SEQ ID NO: 14202
  Description of Unknown: LeftRegion for integrase B1269 sequence

SEQ ID NO: 14269 - DNA, 260 bp, Unknown; identical to SEQ ID NO: 14182
  Description of Unknown: LeftRegion for integrase B1270 sequence

SEQ ID NO: 14270 - DNA, 260 bp, Unknown; identical to SEQ ID NO: 14182
  Description of Unknown: LeftRegion for integrase B1271 sequence

SEQ ID NO: 14271 - DNA, 260 bp, Unknown
  Description of Unknown: LeftRegion for integrase B1272 sequence
ccagaggcttcgtaaaagcagtctcgcaataaaaacacatacggggcatcgcaacagcggtgccccaaaactatatctaacggttacgttacgtttacggtataggttacggttacggtatggttacggttatacacggaacgtccgtggatttttggtcggacgttcctatggaatatcccgaaaaaggaggacttcgtatggcttctcgcatcgccgagaaactggccgcgaagaaggcggccatctatattcgcgtc

SEQ ID NO: 14272 - DNA, 260 bp, Unknown; identical to SEQ ID NO: 14189
  Description of Unknown: LeftRegion for integrase B1273 sequence

SEQ ID NO: 14273 - DNA, 260 bp, Unknown
  Description of Unknown: LeftRegion for integrase B1274 sequence
gctactggctgtaaaatgctggtagccctcattttttagttgtatctagtatataaggggtgtataatagatagaaactgaaaaacagcctcataaagccctctattttatcgagggtaaagaagcctacacctaatatataaaagtggctatatgaggcacacaggagctcacaggactattacaggagggtaaacaggatggcatacaggaaaataacggatataagagatactattggtatgagagcggtattttat

SEQ ID NO: 14274 - DNA, 260 bp, Unknown; identical to SEQ ID NO: 14182
  Description of Unknown: LeftRegion for integrase B1275 sequence

SEQ ID NO: 14275 - DNA, 260 bp, Unknown; identical to SEQ ID NO: 14189
  Description of Unknown: LeftRegion for integrase B1276 sequence

SEQ ID NO: 14276 - DNA, 260 bp, Unknown
  Description of Unknown: LeftRegion for integrase B1277 sequence
gggctactggctgtaaaatgctggtagccctcattttttagttgtatctagtatataaggggtgtataatagatagaaactgaaaaacagcctcataaagccctctattttatagagggtaaaagtctacacctaatatataaaagtggctgtatgaggcacacaggagctcacaggactattacaggagggtaaacaggatggcatacaggaaaataacggatataagagatactattggtatgagagcggtattttat

SEQ ID NO: 14277 - DNA, 260 bp, Unknown
  Description of Unknown: LeftRegion for integrase B1278 sequence
ccagaggcttcgcaaaatcagtctcgcaataaaaacacatacggggcatcgcagcagcggtgccccaaaactatatctaacggttacgttacgtttacggtataggttacggttacggtatggttacggttatacacggaacgtccgtggatttttggccggacgttcctatggaatatcccgaaaaaggaggacttcgtatgacttctcgcatcgccgagaaactggccgcgaagaaggcggccatctatattcgcgtc

SEQ ID NO: 14278 - DNA, 260 bp, Unknown; identical to SEQ ID NO: 14246
  Description of Unknown: LeftRegion for integrase B1279 sequence

SEQ ID NO: 14279 - DNA, 260 bp, Unknown
  Description of Unknown: LeftRegion for integrase B1280 sequence
ggctactggctgtaaaatgctggtagccctcattttttagttgtatctagtatataaggggtgtataatagataggaactgaaagcagcctcataaagccctctattttatctggggtaaagaagtatacacctaatatataaaagtggctgtatgaggcacacaggagctcacaggactattacaggagggtaaacaggatggcatacaggaaaataacggatataaaagatactattggtatgagagcggtattttat

SEQ ID NO: 14280 - DNA, 260 bp, Unknown; identical to SEQ ID NO: 13395
  Description of Unknown: LeftRegion for integrase B1281 sequence

SEQ ID NO: 14281 - DNA, 260 bp, Unknown; identical to SEQ ID NO: 14182
  Description of Unknown: LeftRegion for integrase B1282 sequence

SEQ ID NO: 14282 - DNA, 260 bp, Unknown
  Description of Unknown: LeftRegion for integrase B1283 sequence
cgaggtcctttactgagtcaaatcactttcgggcggggctcgcgcagcgacgcctcgcccttatattatcttccggtatagatacggtgacggtgtaggtgacggtgtaggtgacggtgacggttaccacggaaaatcctcggactttccgcaggactgtccgtggactgtctaataatttctcaaacggaggtcttcttatgtctattcgagacaaactatccgccctcaaggtggcgatatacattcgcgtttcgacc

SEQ ID NO: 14283 - DNA, 260 bp, Unknown; identical to SEQ ID NO: 14195
  Description of Unknown: LeftRegion for integrase B1284 sequence

SEQ ID NO: 14284 - DNA, 260 bp, Unknown
  Description of Unknown: LeftRegion for integrase B1285 sequence
gtgaggtgattaaatggaaagagctattttgacagcgataaacgaaagactttacaaacttggtttgattgatgaagatacaaaaaacaaagtagctgctgaaattaatactacaaaatagcaaaaaactattgaacggagccggaaaatgtgattataataattctgactccgttccttagttggaagggagaaagtatatgaacatatatcatgcaagagaaacactcagaacgtgctctatttacgatttaaagtta

SEQ ID NO: 14285 - DNA, 260 bp, Unknown
  Description of Unknown: LeftRegion for integrase B1286 sequence
aatcttgacctgtgggattttttcgtaatctcccgcaagactctgattgaggataactcatcaagaaaaactatcacgctgccaagattgcaggaactcggcgtttggcagagtgattacttcggcatatccgaagcaatattaaaagcattggatgtctgatacctcggacatcctttttagattggagatgatattacatgatgcagaatagaactgctcctgcctctaccaacagggttgccatctatatcagagtc

SEQ ID NO: 14286 - DNA, 260 bp, Unknown
  Description of Unknown: LeftRegion for integrase B1287 sequence
aaatgcatttgaacatggatgcattaacagatatgaaatggctgaatatttaaatgtaactcttgattatttaaacgaagctattgactattatgcaagtaaatatggtgtaatgcatagagtcgataattatattatttacttctcccctaacttttatataggaaaaacttttaattaaatataatggaggtgatcttttgcttaaagttgctgtttattcaagaaaatcaaaatttactggtaaaggtgattctata

SEQ ID NO: 14287 - DNA, 260 bp, Unknown
  Description of Unknown: LeftRegion for integrase B1288 sequence
cttcgatcaagggcttatgacggtcttgcctgatcttacaattcaggtctcggactacgtgaaggacagctacgacgaccaaaatacgagagactggctactcggcgtagagggtacaaaaatcatcaggccgaagaggttcgcaccaaatcgcgatatgctggcctaccacaatgagtttgtattcctgaggtgattccatgcagcgagcagtgatatacgccagatacagccctggaccaaatcagacagagcagtca

SEQ ID NO: 14288 - DNA, 260 bp, Unknown
  Description of Unknown: LeftRegion for integrase B1289 sequence
aatcttgacctgtgggattttttcgtaatctcccgcaaggctctaaccaaggataactcatcaagaaaaactatcacgctgccaagattgcaggaactcggcgtttggcagagcgattacttcggcatatccgaagcaatattaaaagcattggatgtctgatacctcggacatcctttttagattggagatgatattacatgatgcaggatagaactgctcctgcctctaccaacagggttgccatctatatcagagtc

SEQ ID NO: 14289 - DNA, 260 bp, Unknown
  Description of Unknown: LeftRegion for integrase B1290 sequence
aatcttgacctgtgggattttttcgtaatctcccgcaaagctctaaccaaggataactcatcgagaaaaactatcacgctgccaagattgcaggaactcggcgtttggcagagcgattacttcggcatatccgaagcaatattaaaagcattggatgtctgatacctcggacatcctttttagattggagatgatattacatgatgcaggatagaactgctcctgcctctaccaacagggttgccatctatatcagagtc

SEQ ID NO: 14290 - DNA, 260 bp, Unknown
  Description of Unknown: LeftRegion for integrase B1291 sequence
gaggtgattatttggaaaaagctatcctacttgcaataaatgagaggctttataggcttgggctgattgatgaaaatacgaaaaataaagtagtttccgaaattaatactgcaaataattaaaaaaattgttgaatggagttggaaaatgtgcttataatattctgactccattccttcggttagaagggaagaaaacatatgaatatatatcacgcaagggaaatgctcagaacgcattctatttatgatctaaaatta

SEQ ID NO: 14291 - DNA, 260 bp, Unknown
  Description of Unknown: LeftRegion for integrase B1292 sequence
aatcttgacctgtgggattttttcgtaatctcccgcaagactctgattgaggataactcatcaagaaaaactatcacgctgccaagattgcaggaactcggcgtttggcagagtgattacttcggcatatccgaagcaatattaaaagcattggatgtctgatacctcggacatcctttttagattggagatgatattacatgatgcaggatagaactgctcctgcctctaccaacagggttgccatctatatcagagtc

SEQ ID NO: 14292 - DNA, 260 bp, Unknown
  Description of Unknown: LeftRegion for integrase B1293 sequence
acaaatagaaactgaaattgatggctacaaaatcatattagattttccacagcagaatgattgtaagatggaagaaacatcgctgaaagaagtaaagcaaatcatgttaacgcttttaaaagaacaaacaattcaagatatgtgaaaatttacagaggggacagactcttctgccctctcccaattaggaggataattaaatgagagatgtgaaagaagataccaaaaagatagtaagaattttacttcgtgtaagttct

SEQ ID NO: 14293 - DNA, 260 bp, Unknown
  Description of Unknown: LeftRegion for integrase B1294 sequence
tgacaaattaacacctcccatattgtaaaatatcacgattgacagttacggaaaaatgtaatataatatagttgcaagatattatttttacgttctgccgtaactgtgattttattatattacgtttaggcgtaaatgtcaatagtaaaattacggattggcataactttgtcagtgtgtataaaagcaggtgcatatttatgtctaaattgtatgaaactatcgaacaactttgcaaaaacaaaggcgttaatataacg

SEQ ID NO: 14294 - DNA, 260 bp, Unknown; identical to SEQ ID NO: 14290
  Description of Unknown: LeftRegion for integrase B1295 sequence

SEQ ID NO: 14295 - DNA, 260 bp, Unknown
  Description of Unknown: LeftRegion for integrase B1296 sequence
cgaggtcctttactgagtcgaatcactttcgggcggggctcgcgcagcgacgcctcgcccttatattatcttccggtatagatacggtgacggtgtaggtgtaggtgacggtgacggtgacggttgccgtggaaaatcctcggactttccgcgggactgtccgcggactgtccaataatttctcaaacggaggtcttcttatgtctattcgagacaaactatccgccctcaaggtggcgatatacattcgcgtttcgacc

SEQ ID NO: 14296 - DNA, 260 bp, Unknown
  Description of Unknown: LeftRegion for integrase B1297 sequence
taaaacagcttggagtagatgtttataccgttaaagatggactgctgactcttgaccttggagatatcacgggaatgctgatgttatccatgcgatatgcaatggcagaaaaaagcagttctgatacggagatgcatattaatacaatttagaaaatgtaatacagatggtcttatttttagatcgaggaggagaatcaaatgaaagatgtgaaagaagataccaaaaagatagtacgaattttactccgtgtaagttct

SEQ ID NO: 14297 - DNA, 260 bp, Unknown
  Description of Unknown: LeftRegion for integrase B1298 sequence
tgccatgaaagtcaattcttatgcccttattttatcaaattgttttcgtggtaccttttatttttctaattgtggataacaaaaaaagaacccaccaattgctgtcggtgagttctcataagaggttgtgataaccttaacgcaatcgtattatatcacaacctcttgttttggcataccccaaaaggaggttattttttatgtcactaacatacgttgtcgcctatgcgcgattttcttccgataaccaacgtgaagaa

SEQ ID NO: 14298 - DNA, 260 bp, Unknown
  Description of Unknown: LeftRegion for integrase B1299 sequence
atgaggtgattgaatggaaaaagctattttgatggcaataaatgaaagactttacaaactcggattgattgatgaagatacaaaaaacaaagtagctgctgaaattaatactacaaaataacaaaaaactattgaacggagccggaaaatgtgattataataattctgactccgttccttagttggaagggagaaagtatatgaacatatatcatgcaagagaaacactcagaatgtgctctatttacgatttaaagtta

SEQ ID NO: 14299 - DNA, 260 bp, Unknown; identical to SEQ ID NO: 13335
  Description of Unknown: LeftRegion for integrase B1300 sequence

SEQ ID NO: 14300 - DNA, 260 bp, Unknown
  Description of Unknown: LeftRegion for integrase B1301 sequence
aatcttgacctgtgggattttttcgtaatctcccgcaagactctgattgaggataactcatcaagaaaaactatcacgctgccaagattgcaggaactcggcgtttggcagagcgattacttcggcatatccgaagcaatattaaaagcattggatgtctgatacctcggacatcctttttagattggagatgatattacatgatgcaggatagaaccgctcctgcctctgccaacagggttgccatctatatcagagtc

SEQ ID NO: 14301 - DNA, 260 bp, Unknown
  Description of Unknown: LeftRegion for integrase B1302 sequence
ttccgattaaagaactgatcatgtccgcatacgatttgcgcaagcagcgggaagaacaggataataggtagaattgcggcccacttaggcagcggttcttctccgttttggtgaatagctttccttattataatagagtattgtttgtgttgcgaaaatgcaccaaccatttccgcaacatgaacagcgaggtgaaacttatgatatgcgtagaccagaatggacaagctgttgaaatctcggtggctgaccagatgtgg

SEQ ID NO: 14302 - DNA, 260 bp, Unknown; identical to SEQ ID NO: 14288
  Description of Unknown: LeftRegion for integrase B1303 sequence

SEQ ID NO: 14303 - DNA, 260 bp, Unknown; identical to SEQ ID NO: 14290
  Description of Unknown: LeftRegion for integrase B1304 sequence

SEQ ID NO: 14304 - DNA, 260 bp, Unknown
  Description of Unknown: LeftRegion for integrase B1305 sequence
atgaggtgattgaatggaaaaagctattttgatggcaataaatgaaagactttacaaactcggattgattgatgaagatacaaaaaacaaagtaactgctgaaattaatactacaaaataacaaaaaactattgaacggagccggaaaatgtgattataataattctgactccgttccttagttggaagggagaaagtatatgaacatatatcatgcaagagaaacactcagaacgtgctctatttacgatttaaagtta

SEQ ID NO: 14305 - DNA, 260 bp, Unknown
  Description of Unknown: LeftRegion for integrase B1306 sequence
tttaatcgaggtcctttactgagtcgaatcactttcgggcggggctcgcgcagcgacgcctcgcccttatattatcttccggtatagatacggtgacggtgacggtgtaggtgacggtgacggttgccgtggaaaatcctcggactttccgcgggactgtccgtggactgtccaataatttctcaaacggaggtcttcttatgtctattcgagacaaactatccgccctcaaggtggcgatatacattcgcgtttcgacc

SEQ ID NO: 14306 - DNA, 260 bp, Unknown
  Description of Unknown: LeftRegion for integrase B1307 sequence
tgttgaaccggtattcaaggaggagacgcagaacacattgggctgcgttcttctgcgcctgatgaaatcggaatctgcgggggcgtagtcccaggcggtggggcgtatccccgccgcatacatgacaacagggcgagacagcgatatacttgttgtggaatacaagtgttgctgttcggctgcccggaaaggaggactgcatgaaacagtcgaataacaacaaaaaatcccgtgacgtgaccgcctttctgtatgagagg

SEQ ID NO: 14307 - DNA, 260 bp, Unknown; identical to SEQ ID NO: 14288
  Description of Unknown: LeftRegion for integrase B1308 sequence

SEQ ID NO: 14308 - DNA, 260 bp, Unknown
  Description of Unknown: LeftRegion for integrase B1309 sequence
atggtcagaatctaaggttcaaagagaatcaattaatatgtggaatatgacagcagataatatatataaccgattgctggtagcatctaagcaagataacaagcccatactagcctacatacaagcttatgacatactagacaatataaatgattcactagcagaactagactttacagaggataattaagaggtgcattatggataacaacagtaatataagagtagcgatatatattagggttagtaccctataccag

SEQ ID NO: 14309 - DNA, 260 bp, Unknown
  Description of Unknown: LeftRegion for integrase B1310 sequence
attctcactgttctacttcgatgataaaaaacagtaagcaaaagcaggatgtcacatggcatcctgctttataaatatatagcttacggtatatggttacggttaaggttacggttacggtatatgtctggatttgacttggaaaaccaccgtgacaatccgttggacagtcctaagcactttatgcgcaggaggcaaaaatgacagcaatatcagaaaaactaaattcaaaaaaagtggcaatctacattcgtgtttct

SEQ ID NO: 14310 - DNA, 260 bp, Unknown; identical to SEQ ID NO: 14292
  Description of Unknown: LeftRegion for integrase B1311 sequence

SEQ ID NO: 14311 - DNA, 260 bp, Unknown; identical to SEQ ID NO: 14288
  Description of Unknown: LeftRegion for integrase B1312 sequence

SEQ ID NO: 14312 - DNA, 260 bp, Unknown
  Description of Unknown: LeftRegion for integrase B1313 sequence
agatgtgtataccgtcaaagatggactattgactcctgaccttggagatgttatggggatgctaaagttagccatgcaatatggaatggcagaaaaaacagtttagatacggagatgcatgttaatacaacacagaaaatgtaagagagttgtgaagataatacaaatggtcgtatttcaagatcgaggaggaaaatcatatgacagacgtaaaagaagataccaaaaagatagtaagaattttacttcgtgtaagttct

SEQ ID NO: 14313 - DNA, 260 bp, Unknown; identical to SEQ ID NO: 14288
  Description of Unknown: LeftRegion for integrase B1314 sequence

SEQ ID NO: 14314 - DNA, 260 bp, Unknown; identical to SEQ ID NO: 14301
  Description of Unknown: LeftRegion for integrase B1315 sequence

SEQ ID NO: 14315 - DNA, 260 bp, Unknown; identical to SEQ ID NO: 14288
  Description of Unknown: LeftRegion for integrase B1316 sequence

SEQ ID NO: 14316 - DNA, 260 bp, Unknown
  Description of Unknown: LeftRegion for integrase B1317 sequence
ctgtatctcaaaagtgaagtcctgaaacgaaactggcagtgagaatacgttatacccctttatacccttttgaaaggggtataaaggggtataacgttctttggagaacttttcaaaaaatctcatttgcaccttttcaaatgggttccaatccgttacaatatatctaacaacctaacaatgtaatgcgaggtgttgctatgaaaacaacagaccagccgcaggtgaagcaatacgtcatctattcccgcaaatccaaa

SEQ ID NO: 14317 - DNA, 260 bp, Unknown; identical to SEQ ID NO: 14304
  Description of Unknown: LeftRegion for integrase B1318 sequence

SEQ ID NO: 14318 - DNA, 260 bp, Unknown
  Description of Unknown: LeftRegion for integrase B1319 sequence
tgatttaataaataattgtccttttataagtcagcttcctttttcttattttacacttgatacatttaaaagtataattaatgatttactaactaataatgatataaatttaaatgattataaaaaatatattcaaaaacctgataaaaatattattgaaacaatataaataaaaatgtttatataaaggagatgtttttttgcttaaaattgctatttattctagaaaatctaaatttacaggcaaaggtgattctata

SEQ ID NO: 14319 - DNA, 260 bp, Unknown
  Description of Unknown: LeftRegion for integrase B1320 sequence
aatcttgacctgtgggattttttcgtaatctcccgcaaggctctaaccaaggataactcatcaagaaaaactatcacgctgccaagattacaggaactcggcgtttggcagagcgattacttcggcatatccgaagcaatattaaaagcattggatgtctgatacctcggacatcctttttagattggagatgatattacatgatgcaggatagaactgctcctgcctctaccaacagggttgccatctatatcagagtc

SEQ ID NO: 14320 - DNA, 260 bp, Unknown
  Description of Unknown: LeftRegion for integrase B1321 sequence
cgaggtcctttactgagtcaaatcactttcgggcggggctcgcgcagcgacgcctcgcccttatattatcttccggtatagatacggtgacggtgacggtgtaggtgacggtgtaggtgacggttaccatggaaaatcctcggactttccgcaggactgtccgtggactgtccaataatttctcaaacggaggtcttcttatgtctattcgagacaaactatccgccctcaaggtggcgatatacattcgcgtttcgacc

SEQ ID NO: 14321 - DNA, 260 bp, Unknown; identical to SEQ ID NO: 13390
  Description of Unknown: LeftRegion for integrase B1322 sequence

SEQ ID NO: 14322 - DNA, 260 bp, Unknown
  Description of Unknown: LeftRegion for integrase B1323 sequence
agggacatttaatggaaaaagctatattgtatgccataaacgaaagaatgttctcgcttggtctgatagacgagaaaacaagagataaaattaaagctgaaatcagcactagaaagtaacgaaaatgtattgagtggatttatatgaggtgttatactttatatgattccactccctgtttattaagggagaaatgcactatgaatatttattatgtcagagaaaaattaagaagttgctctatttacgacattgaatta

SEQ ID NO: 14323 - DNA, 260 bp, Unknown
  Description of Unknown: LeftRegion for integrase B1324 sequence
agggacgattaatggaaaaagctatattgtatgccataaatgaaagaatgttctcgctcggtctgatagacgagaaaacaagagataaaattaaagccgaaatcagcattagaaagtaacgaaaatgtattgagtggagttatgtgaagtgttatactttatatgattccactccctgtatattgagggagaaaagcattatgaatatttattatgtcagagaaaaattaaggagttgttctatttatgacatcgaactg

SEQ ID NO: 14324 - DNA, 260 bp, Unknown
  Description of Unknown: LeftRegion for integrase B1325 sequence
gagggacaattaatggaaaaagctatattgtatgccataaacgaaagaatgttctcacttggtctgatagatgagaaaacaagagataaaattaaagctgaaatcagcattagaaagtagaaaaatgtattgagtggaattatgtgaggtgttatactttatatgattccactccctgtttattgagggagaaatgcactatgaatatttattatgtcagagaaaaattaagaagttgctctatttacgacattgaatta

SEQ ID NO: 14325 - DNA, 260 bp, Unknown; identical to SEQ ID NO: 14322
  Description of Unknown: LeftRegion for integrase B1326 sequence

SEQ ID NO: 14326 - DNA, 260 bp, Unknown; identical to SEQ ID NO: 13390
  Description of Unknown: LeftRegion for integrase B1327 sequence

SEQ ID NO: 14327 - DNA, 260 bp, Unknown
  Description of Unknown: LeftRegion for integrase B1328 sequence
gagggacatttaatggaaaaagctatattgtatgccataaatgaaagaatgttctcacttggtctgatagatgagaaaacaagggacaaaataaaagctgaaattagcattagaaagtaacaaaatgtattgagtggagttatgtgaagtgttatactttatatgattccactccctgtatattgagggagaaatgcactatgaatatttattatgtcagagaaaaattaaggagttgttctatttacgacattgaacta

SEQ ID NO: 14328 - DNA, 260 bp, Unknown; identical to SEQ ID NO: 13390
  Description of Unknown: LeftRegion for integrase B1329 sequence

SEQ ID NO: 14329 - DNA, 260 bp, Unknown
  Description of Unknown: LeftRegion for integrase B1330 sequence
agggacaattaatggaaaaagctatattgtatgccataaacgaaagaatgttctcacttggtctgatagatgagaaaacaagagataaaattaaagctgaaatcagcattagaaagtaacgaaaatgtattgagtggagttatgtgaagtgttatactttatatgattccactccctgtatattgagggagaaaagcattatgaatatttattatgtcagagaaaaattaaggagttgttctatttatgacatcgaactg

SEQ ID NO: 14330 - DNA, 260 bp, Unknown
  Description of Unknown: LeftRegion for integrase B1331 sequence
gagggacaattaatggaaaaagctatattgtatgccataaacgaaagaatgttctcacttggtctgatagatgagaaaacaagagataaaattaaagctgaaatcagcattagaaagtagcaaaatgtattgagtggagttatgtgaggtgttatactttatatgattccactccctgtttattgagggagaaatgcactatgaatatttattatgtcagagaaaaattaagaagttgctctatttacgacattgaacta

SEQ ID NO: 14331 - DNA, 260 bp, Unknown; identical to SEQ ID NO: 13390
  Description of Unknown: LeftRegion for integrase B1332 sequence

SEQ ID NO: 14332 - DNA, 260 bp, Unknown; identical to SEQ ID NO: 13390
  Description of Unknown: LeftRegion for integrase B1333 sequence

SEQ ID NO: 14333 - DNA, 260 bp, Unknown
  Description of Unknown: LeftRegion for integrase B1334 sequence
agggacaattaatggaaaaagctatattgtatgccataaacgaaagaatgttctcacttggtctgatagatgagaaaacaagagataaaattaaagctgaaatcagcattagaaagtaacgacaatgtattgagtggatttatatgaggtgttatactttatatgattccactccctgtttattaagggagaaatgcactatgaatatttattatgtaagagaaaaattaagaaattgctctatttacgacattgaacta

SEQ ID NO: 14334 - DNA, 260 bp, Unknown
  Description of Unknown: LeftRegion for integrase B1335 sequence
ttcctattaaagagctgattatgtctgcatacgatctgcgcaagcaacgggaagaacaggataattggtagaaatgtggccggttttggcgacggttcttctccgttttggtgaatagctttccttattataatagagtattgtttgtgttgcgaaaatgcaccaaccatttccgcaacatgaacagcgaggtgaaacttatgatatgcgtagaccagaatgggcaagccgttgaaatctcggtggctgaccagatgtgg

SEQ ID NO: 14335 - DNA, 260 bp, Unknown
  Description of Unknown: LeftRegion for integrase B1336 sequence
cctacatagaagaaatgaaaaaaaggccttctgaaccaaaaagcgattcagaaaccgaatgatctacataagtgaattttatactccatgaactctcaaaagcgagtttaagcccttatagccccacatatgataaaatagttgcatcatcaaaataagccccatacaggggcttttctcttgttttggaggtattttttatgacaaataatgcagcatccgcacgggtagcaatctacgtccgtgtttccaccttatat

SEQ ID NO: 14336 - DNA, 260 bp, Unknown
  Description of Unknown: LeftRegion for integrase B1337 sequence
gagggacgattaatggaaaaagctatattgtatgccataaacgaaagaatgttctcatttggtctgatagatgaaaaaacaagagataaaattaaagctgaaatcagcattagaaagtagcaaaatgtattgagtggagttatgtgaggtgttatactttatatgattccactccctgtttattgagggagaaatgcactatgaatatttattatgtcagagaaaaattaagaagttgctctatttacgacattgaatta

SEQ ID NO: 14337 - DNA, 260 bp, Unknown
  Description of Unknown: LeftRegion for integrase B1338 sequence
agggacaattaatggaaaaagctatattgtatgccataaacgaaagaatgttttcacttggtctgatagatgagaaaacaagagataaaattaaagctgaaatcagcattagaaagtaacgacaatgtattgagtggatttatatgaggtgttatactttatatgattccactccctgtttattaagggagaaatgaactatgaatatttattatgtcagagaaaaattaagaaattgctctatttacgacattgaacta

SEQ ID NO: 14338 - DNA, 260 bp, Unknown; identical to SEQ ID NO: 14329
  Description of Unknown: LeftRegion for integrase B1339 sequence

SEQ ID NO: 14339 - DNA, 260 bp, Unknown
  Description of Unknown: LeftRegion for integrase B1340 sequence
gagggacaattaatggaaaaaactatattgtatgccataaatgaaagaatgttctcacttggtctgatagatgagaaaacaagggacaaaataaaagctgaaattagcattagaaagtaacaaaatgtattgagtggagttatgtgaagtgttatactttatatgattccactccctgtatattgagggagaaatgcactatgaatatttattatgtcagagaaaaattaaggagttgttctatttacgacattgaactg

SEQ ID NO: 14340 - DNA, 260 bp, Unknown
  Description of Unknown: LeftRegion for integrase B1341 sequence
gagggacatttaatggaaaaagctatattgtatgccataaatgaaagaatgttctcacttggtctgatagatgagaaaacaagggacaaaataaaagctgaaattagcattagaaagtaacaaaatgtattgagtggagttatgtgaagtgttatactttatatgattccactccctgtatattgagggagaaatgcactatgaatatttattatgtcagagaaaaattaaggagttgttctatttacgacattgaactg

SEQ ID NO: 14341 - DNA, 260 bp, Unknown; identical to SEQ ID NO: 13390
  Description of Unknown: LeftRegion for integrase B1342 sequence

SEQ ID NO: 14342 - DNA, 260 bp, Unknown; identical to SEQ ID NO: 13390
  Description of Unknown: LeftRegion for integrase B1343 sequence

SEQ ID NO: 14343 - DNA, 260 bp, Unknown; identical to SEQ ID NO: 13476
  Description of Unknown: LeftRegion for integrase B1344 sequence

SEQ ID NO: 14344 - DNA, 260 bp, Unknown
  Description of Unknown: LeftRegion for integrase B1345 sequence
agggctactggctgtaaaatgctggtagccctcattttttagttgtatctagtatataaggggtgtataatagataggaactgaaaacagcctcataaagccctctattttatcgagggtaaaagtctacacctaatatataaaagtggctgtatgaggcacacaggagctcacaggactattacaggagggtaaacaggatggcatacaggaaaataacggatataaaagatactattggtatgagagcggtattttat

SEQ ID NO: 14345 - DNA, 260 bp, Unknown
  Description of Unknown: LeftRegion for integrase B1346 sequence
aacagaaacaacttaccgccaaccggtacaaggattgtccgcgagtatcttggtgtagaacacattgtcacagttctacgcgatggttttgaatacaatggaatgaagtataccacgctatcagcagtagcaaaaaaaattaccggaagaaagatatccggacggtattttttcgcattagataaataaaaggatcaaccatggaagaacaaaaacaaataagatgcgcaatttacacacgtaaatcgactgatgaaggt

SEQ ID NO: 14346 - DNA, 260 bp, Unknown
  Description of Unknown: LeftRegion for integrase B1347 sequence
gggctactggctgtaaaatgctggtagccctcattttttagttgtatctagtatataaggggtgtataatagatagaaactgaaaaacagcctcataaagccctctattttatcgagggtaaaagtctacacttaatatataaaagtggctgtatgaggcacacaggagctcacaggactattacaggagggtaaacaggatggcatacaggaaaataacggatataagagatactattggtatgagagcggtattttat

SEQ ID NO: 14347 - DNA, 260 bp, Unknown
  Description of Unknown: LeftRegion for integrase B1348 sequence
tgataaatcaattaacctatcaatcatatttgatttactaaatttaaacttaataactgaaaaacagttttatatactaaaagaaaaaattaaatgtttttactaaaatatcatgtaaataaattttaaaataagatataatgtttgtagaacgaagcagtagttcaaaaagaaattgaaataaagaaagtgaggtataaatggcacaagttgagattatagctgctaatctcaaagataaaaataataatattactatt

SEQ ID NO: 14348 - DNA, 260 bp, Unknown
  Description of Unknown: LeftRegion for integrase B1349 sequence
gagggacaattaatggaaaaagctatattgtatgccataaatgaaagaatgttctcacttggtctgatagatgagaaaacaagggacaaaataaaagctgaaattagcattagaaagtaacaaaatgtattgagtggagttatgtgaagtgttatactttatatgattccactccctgtatattgagggagaaatgcactatgaatatttattatgtcagagaaaaattaaggagttgttctatttacgacattgaactg

SEQ ID NO: 14349 - DNA, 260 bp, Unknown
  Description of Unknown: LeftRegion for integrase B1350 sequence
aggaacaattaatggaaaaagctatattgtatgccataaacgaaagaatgttctcacttggtctgatagatgagaaaacaagagataaaattaaagctgaaatcagcattagaaagtaacgacaatgtattgagtggatttatatgaggtgttatactttatatgattccactccctgtttattaagggagaaatgcactatgaatatttattatgtcagagaaaaattgagaagttgctctatttacgatatcgaactg

SEQ ID NO: 14350 - DNA, 260 bp, Unknown; identical to SEQ ID NO: 14337
  Description of Unknown: LeftRegion for integrase B1351 sequence

SEQ ID NO: 14351 - DNA, 260 bp, Unknown; identical to SEQ ID NO: 14340
  Description of Unknown: LeftRegion for integrase B1352 sequence

SEQ ID NO: 14352 - DNA, 260 bp, Unknown
  Description of Unknown: LeftRegion for integrase B1353 sequence
gacacacctcctgaaacagatactcttatggttgtcattgttgatgacgaagaaggatttgttaagaaaatcagtattgatgaagatactgtgacccttcgctcttttaatccacactatcctccccgtgtttttggcggtgttgaaattggacgattgcgctttgtcggtagagtcatggagttaaaaaggagatttgcatgaaaaaatttccaatcgacctctcctgtctgacagaggaagaaatctctcaatttcaa

SEQ ID NO: 14353 - DNA, 260 bp, Unknown; identical to SEQ ID NO: 14348
  Description of Unknown: LeftRegion for integrase B1354 sequence

SEQ ID NO: 14354 - DNA, 260 bp, Unknown
  Description of Unknown: LeftRegion for integrase B1355 sequence
agggacaattaatggaaaaagctatattgtatgccataaacgaaagaatgttctcacttggtctgatagatgagaaaacaagagataaaattaaagctgaaatcagcattagaaagtaacgaaaatgtattgagtggagttatgtgaagtgttatactttatatgattccactccctgtatattgagggagaaaagcattatgaatatttattatgtcagagaaaaattaaggagttgttctatttacgatattgaactg

SEQ ID NO: 14355 - DNA, 260 bp, Unknown; identical to SEQ ID NO: 13463
  Description of Unknown: LeftRegion for integrase B1356 sequence

SEQ ID NO: 14356 - DNA, 260 bp, Unknown; identical to SEQ ID NO: 14323
  Description of Unknown: LeftRegion for integrase B1357 sequence

SEQ ID NO: 14357 - DNA, 260 bp, Unknown; identical to SEQ ID NO: 13390
  Description of Unknown: LeftRegion for integrase B1358 sequence

SEQ ID NO: 14358 - DNA, 260 bp, Unknown; identical to SEQ ID NO: 14322
  Description of Unknown: LeftRegion for integrase B1359 sequence

SEQ ID NO: 14359 - DNA, 260 bp, Unknown; identical to SEQ ID NO: 13390
  Description of Unknown: LeftRegion for integrase B1360 sequence

SEQ ID NO: 14360 - DNA, 260 bp, Unknown
  Description of Unknown: LeftRegion for integrase B1361 sequence
cttgggatgctggaggactggccgaaggtcagtcgtagtggaagcaaggctgcgctggaagacgcacaggctgaaattgagcggtggaggcaagagttccttgctgggaatatctcggcgaagaaatacgttaaaattgcggatgctctcatgtccaaataaaaaagccgccctcggtgggcggcgggaggttgctctgaatgtgcgcaaaaaagaaaccggccatgcttgagccggatatgcaggatgccgtgatctac

SEQ ID NO: 14361 - DNA, 260 bp, Unknown
  Description of Unknown: LeftRegion for integrase B1362 sequence
gatgattctcttttgaatttggacttatgggatttttatgttacgccatcagacatcttaaatgggcgcaaagtcatcactcttccaaaacttatttctttcagtccaatcatgtgtaattacagcagcattgaaaatgctgttttaagcgtagtataggtccaggatcacttgggcctttattttatggaggattttatatgcaatacaaagaatcgaatataaggcgaaataaccgcgttgccatttatgttagagtc

SEQ ID NO: 14362 - DNA, 260 bp, Unknown
  Description of Unknown: LeftRegion for integrase B1363 sequence
gagggacaattaatggaaaaagctatattgtatgccataaatgaaagaatgttctcacttggtctgatagatgagaaaacaagggacaaaataaaagctgaaattagcattaaaaagtaacaaaatgtattgagtgtagttatgtgaagtgttatactttatatgattccactccctgtatattgagggagaaatgcactatgaatatttattatgtcagagaaaaattaaggagttgttctatttacgacattgaactg

SEQ ID NO: 14363 - DNA, 260 bp, Unknown
  Description of Unknown: LeftRegion for integrase B1364 sequence
agggacaattaatggaaaaagctatattgtatgccataaatgaaagaatgttctcgctcggtctgatagacgagaaaacaagagatagaattaaagctgaaatcagcattagaaagtaacgaaaatgtattgagtggagttatatgaggtgttatactttatatgattccactccctgtttattaagggagaaatgcactatgaatatttattatgtcagagaaaaattaagaaattgctctatttacgacattgaacta

SEQ ID NO: 14364 - DNA, 260 bp, Unknown
  Description of Unknown: LeftRegion for integrase B1365 sequence
gagggacaattaatggaaaaagctatattgtatgccataaacgaaagaatgttctcacttggtctgatagatgagaaaacaagagataaaattaaagctgaaatcagcattagaaagtaacaaaatgtattgagtggagttatgtgaagtgttatactttatatgattccactccctgtatattgagggagaaatgcactatgaatatttattatgtcagagaaaaattaaggagttgttctatttacgacattgaactg

SEQ ID NO: 14365 - DNA, 260 bp, Unknown; identical to SEQ ID NO: 14337
  Description of Unknown: LeftRegion for integrase B1366 sequence

SEQ ID NO: 14366 - DNA, 260 bp, Unknown
  Description of Unknown: LeftRegion for integrase B1367 sequence
atggacggcggattaaagcattctttcgaggtaaaaaacaaggtaacttccataattggaaaatggactgtctatcaagcgcaaaagcgccttccgcttttagaattatgccaagacctgtccgaagaagaattagccgaagtaatcaactatattaaatttgttcaatcgaaacgacaaggcgggaagggggaagaataatgcagcaagcattaaacgcggtcatatacgcccgctattcttcccatagccagcaggaa

SEQ ID NO: 14367 - DNA, 260 bp, Unknown
  Description of Unknown: LeftRegion for integrase B1368 sequence
gagggacaattaatggaaaaagctatattgtatgccataaatgaaagaatgttctcacttggtctgatagatgagaaaacaagggacaaaataaaagctgaaattagcattagaaagtaacaaaatgtattgagtggagttatgtgaagtgttatactttatatgattccactccctgtatattgagggagaaatgcactatgaatatttattatgtcagagaaaaattaaggagttgttctatttatgacatcgaactg

SEQ ID NO: 14368 - DNA, 260 bp, Unknown; identical to SEQ ID NO: 14329
  Description of Unknown: LeftRegion for integrase B1369 sequence

SEQ ID NO: 14369 - DNA, 260 bp, Unknown
  Description of Unknown: LeftRegion for integrase B1370 sequence
gagggacgattaatggaaaaagctatattgtatgccataaacgaaagaatgttctcacttggtctgatagatgagaaaacaagagataaaattaaagctgaaatcagcattagaaagtagcaaaatatattgagtggagttatgtgaggtgttatactttatatgattccactccctgtttattgagggagaaatgcactatgaatatttattatgtcagagaaaaattaagaagttgctctatttacgacattgaatta

SEQ ID NO: 14370 - DNA, 260 bp, Unknown; identical to SEQ ID NO: 14333
  Description of Unknown: LeftRegion for integrase B1371 sequence

SEQ ID NO: 14371 - DNA, 260 bp, Unknown; identical to SEQ ID NO: 14324
  Description of Unknown: LeftRegion for integrase B1372 sequence

SEQ ID NO: 14372 - DNA, 260 bp, Unknown; identical to SEQ ID NO: 14333
  Description of Unknown: LeftRegion for integrase B1373 sequence

SEQ ID NO: 14373 - DNA, 260 bp, Unknown; identical to SEQ ID NO: 14330
  Description of Unknown: LeftRegion for integrase B1374 sequence

SEQ ID NO: 14374 - DNA, 260 bp, Unknown; identical to SEQ ID NO: 13390
  Description of Unknown: LeftRegion for integrase B1375 sequence

SEQ ID NO: 14375 - DNA, 260 bp, Unknown
  Description of Unknown: LeftRegion for integrase B1376 sequence
gagggacaattaatggaaaaagctatattgtatgccataaacgaaagaatgttctcacttggcctgatagacgagaaaacaagagataaaattaaaactgaaatcagcattagaaagtagcaaaatgtattgagtggagttatgtgaggtgttatactttatatgattccactccctgtttattgagggagaaatgcactatgaatatttattatgtcagagaaaaattaagaagttgctctatttacgacattgaacta

SEQ ID NO: 14376 - DNA, 260 bp, Unknown
  Description of Unknown: LeftRegion for integrase B1377 sequence
ggtcgtgtcgttgaagtttaccagaatccggtctatcacctcaaggttcaggtgccatgcggtgatactcggatagcagtacacatagacgtgtaccaccaaaagaaaaatactcacggcccttccgaattccatgcaaaaacacataaagatggtagtaattattcttacctttgcatcaaacaaataaaagtaagaatatgaaagcagcaatttacagtagagtatctacagaagggcaagattacagtaaacaaacg

SEQ ID NO: 14377 - DNA, 260 bp, Unknown
  Description of Unknown: LeftRegion for integrase B1378 sequence
gggctactggctgtaaaatgctggtagccctcattttttagttgtatctagtatataaggggtgtataatagatagaaactgaaaaacagcctcataaagccctctattttatagagggtaaaagtctacacttaatatataaaagtggctgtatgaggcacacaggagctcacaggactattacaggagggtaaacaggatggcatacaggaaaataacggatataagagatactattggtatgagagcggtattttat

SEQ ID NO: 14378 - DNA, 260 bp, Unknown
  Description of Unknown: LeftRegion for integrase B1379 sequence
agggacaattaatggaaaaagctatattgtatgccataaatgaaagaatgttctcgctcggtctgatagacgagaaaacaagagataaaattaaagctgaaatcagcattagaaagtaacgacaatgtattgagtggagttacatgaagtgttatactttatatgattccactccctgtatattgagggagaaatgcactatgaatatttattatgtcagagaaaaattaaggagttgttctatttacgacattgaactg

SEQ ID NO: 14379 - DNA, 260 bp, Unknown; identical to SEQ ID NO: 14323
  Description of Unknown: LeftRegion for integrase B1380 sequence

SEQ ID NO: 14380 - DNA, 260 bp, Unknown
  Description of Unknown: LeftRegion for integrase B1381 sequence
gatacacctcccgaaacagatactcttatggttgtcattgttgatgacgaagaaggatttgttaagaaaatcagcattgatgaagatactgtgacccttcgctcttttaacccacactatcctccccgtgtttttggcggtgttgaaattggacgattgcgctttgtcggtagagtcatggagctaaaaaggagatttgcatgaaaaaatttccaatcgacctttcctgtctgacagaggaagaaatctctcaatttcag

SEQ ID NO: 14381 - DNA, 260 bp, Unknown; identical to SEQ ID NO: 13390
  Description of Unknown: LeftRegion for integrase B1382 sequence

SEQ ID NO: 14382 - DNA, 260 bp, Unknown; identical to SEQ ID NO: 14361
  Description of Unknown: LeftRegion for integrase B1383 sequence

SEQ ID NO: 14383 - DNA, 260 bp, Unknown
  Description of Unknown: LeftRegion for integrase B1384 sequence
agggacatttaatggaaaaagctatattgtatgccataaacgaaagaatgttctcacttggtctgatagatgagaaaacaagagataaaattaaagctgaaatcagcattagaaaatagcaaaaatgtattgagtggatttatatgaggtgttatactttatatgattccactccctgtttattaagggagaaatgcactatgaatatttattatgtcagagaaaaattaaggagttgttctatttatgacatcgaactg

SEQ ID NO: 14384 - DNA, 260 bp, Unknown; identical to SEQ ID NO: 13144
  Description of Unknown: LeftRegion for integrase B1385 sequence

SEQ ID NO: 14385 - DNA, 260 bp, Unknown
  Description of Unknown: LeftRegion for integrase B1386 sequence
ggctactggctgtaaaatgctggtagccctcattttttagttgtatctagtatataaggggtgtataatagataggaactgaaaacagcctcataaagccatctattttatcgagggtaaagaagtctacacctaatatataaaagtggctgtatgaggcacacaggagctcacaggactattacaggagggcaaacaggatggcatacaggaaaataacggatataagagatactattggtatgagagcggtattttat

SEQ ID NO: 14386 - DNA, 260 bp, Unknown; identical to SEQ ID NO: 13390
  Description of Unknown: LeftRegion for integrase B1387 sequence

SEQ ID NO: 14387 - DNA, 260 bp, Unknown
  Description of Unknown: LeftRegion for integrase B1388 sequence
agggacaattaatggaaaaagctatattgtatgccataaacgaaagaatgttctcgctcggtctgatagacgagaaaacaagagatagaattaaagctgaaatcagcattagaaagtaacgacaatgtattgagtggagttatatgaggtgttatactttatatgattccactccctgtttattaagggagaaatgcactatgaatatttattatgtcagagaaaaattaagaaattgctctatttacgacattgaacta

SEQ ID NO: 14388 - DNA, 260 bp, Unknown
  Description of Unknown: LeftRegion for integrase B1389 sequence
agggacaattaatggaaaaagctatattgtatgccataaacgaaagaatgttctcacttggcctgatagatgagaaaacaagagataaaattaaagctgaaatcagcattagaaaataacaaaaatgtattgagtggatttatatgaggtgttatactttatgtgattccactccctgtttattgagggagaaatgcactatgaatatttattatgtcagagaaaaattaagaagttgctctatttacgacattgaacta

SEQ ID NO: 14389 - DNA, 260 bp, Unknown
  Description of Unknown: LeftRegion for integrase B1390 sequence
cctacatagaagaaatgaaaaaaaggccttctgaaccaaaaagcgattcagaaaccgaatgatctacataagtaaattttatactccatgaactcttaaaagcgagtttaagcccttatagccccacatatgataaaatagttgcatcatcaaaataagcccctgtatggggcttttctcttgttttggaggtattttttatgacaaataatgcagcatccgcacgggtagcaatctacgtccgtgtttccaccttatat

SEQ ID NO: 14390 - DNA, 260 bp, Unknown; identical to SEQ ID NO: 14348
  Description of Unknown: LeftRegion for integrase B1391 sequence

SEQ ID NO: 14391 - DNA, 260 bp, Unknown; identical to SEQ ID NO: 14327
  Description of Unknown: LeftRegion for integrase B1392 sequence

SEQ ID NO: 14392 - DNA, 260 bp, Unknown
  Description of Unknown: LeftRegion for integrase B1393 sequence
agggacaattaatggaaaaagctatattgtatgccataaacgaaagaatgttctcgctcggtctgatagacgagaaaacaagagatagaattaaagctgaaatcagcattagaaagtaacgaaaatgtattgagtggagttatatgaggtgttatactttgtatgattccactccctgtttattaagggagaaatgcactatgaatatttattatgtcagagaaaaattaagaaattgctctatttacgacattgaacta

SEQ ID NO: 14393 - DNA, 260 bp, Unknown; identical to SEQ ID NO: 13390
  Description of Unknown: LeftRegion for integrase B1394 sequence

SEQ ID NO: 14394 - DNA, 260 bp, Unknown; identical to SEQ ID NO: 14388
  Description of Unknown: LeftRegion for integrase B1395 sequence

SEQ ID NO: 14395 - DNA, 260 bp, Unknown
  Description of Unknown: LeftRegion for integrase B1396 sequence
agggacaattaatggaaaaagctatattgtatgccataaacgaaagaatgttctcgattggtctgatagatgagaaaacaagagataaaattaaagctgaaatcagcattagaaagtaacgacaatgtattgagtggatttatatgaggtgttatactttatatgattccactccctgtttattaagggagaaatgcactatgaatatttattatgtaagagaaaaattaagaaattgctctatttacgacattgaacta

SEQ ID NO: 14396 - DNA, 260 bp, Unknown; identical to SEQ ID NO: 14363
  Description of Unknown: LeftRegion for integrase B1397 sequence

SEQ ID NO: 14397 - DNA, 260 bp, Unknown; identical to SEQ ID NO: 14388
  Description of Unknown: LeftRegion for integrase B1398 sequence

SEQ ID NO: 14398 - DNA, 260 bp, Unknown; identical to SEQ ID NO: 14322
  Description of Unknown: LeftRegion for integrase B1399 sequence

SEQ ID NO: 14399 - DNA, 260 bp, Unknown; identical to SEQ ID NO: 13390
  Description of Unknown: LeftRegion for integrase B1400 sequence

SEQ ID NO: 14400 - DNA, 260 bp, Unknown; identical to SEQ ID NO: 13144
  Description of Unknown: LeftRegion for integrase B1401 sequence

SEQ ID NO: 14401 - DNA, 260 bp, Unknown
  Description of Unknown: LeftRegion for integrase B1402 sequence
ggtcgtgtcgttgaagtttaccagaatccggtctatcacctcaaggctcaggtgccatgcggtgatactcggatagcagtacacatagacgtgtaccaccaaaagaaaaatactcacagcccttccgaattccatgcaaaaacacataaagatggtagtaattattcttacctttgcatcaaacaaataaaagtaagaatatgaaagcagcaatttatagtagagtatctacagatcaacaagattacagcaagcaaact

SEQ ID NO: 14402 - DNA, 260 bp, Unknown
  Description of Unknown: LeftRegion for integrase B1403 sequence
agggacaattaatggaaaaagctatattgtatgccataaacgaaagaatgttctcacttggtctgatagatgagaaaacaagagataaaattaaagctgaaatcagcattagaaagtaacgacaatgtattgagtggatttatatgaggtgttatactttatatgattccactccctgtttattaagggagaaatgcactatgaatatttattatgtcagagaaaaattaagaagttgctctatttacgacattgaatta

SEQ ID NO: 14403 - DNA, 260 bp, Unknown; identical to SEQ ID NO: 14333
  Description of Unknown: LeftRegion for integrase B1404 sequence

SEQ ID NO: 14404 - DNA, 260 bp, Unknown; identical to SEQ ID NO: 14337
  Description of Unknown: LeftRegion for integrase B1405 sequence

SEQ ID NO: 14405 - DNA, 260 bp, Unknown
  Description of Unknown: LeftRegion for integrase B1406 sequence
tcgatggattggcttatgggccgatctgatgacggtagcgaactgatgcgcttgtactctttggcgagcgatgatgacaaacttgtcattgacacgattctgaagaagtacaagagagactaggacggcaaacaacactggggggcgctgacaaggcagtgctcccctgtctttgttcaagggtaacaggagcatcaagcatgagaaagaagattacaaaaaaacaggcggaagataaagtagcaatctatgtccgtgtc

SEQ ID NO: 14406 - DNA, 260 bp, Unknown; identical to SEQ ID NO: 13552
  Description of Unknown: LeftRegion for integrase B1407 sequence

SEQ ID NO: 14407 - DNA, 260 bp, Unknown
  Description of Unknown: LeftRegion for integrase B1408 sequence
agggacaattaatggaaaaagctatattgtatgccataaacgaaagaatgttctcacttggtctgatagatgagaaaacaagagataaaattaaagctgaaatcagcattggaaagtaacaaaaacgtattgagtggatttatatgaggtgttatactttatatgattccactccctgtttattaagggagaaatgcactatgaatatttattatgtcagagaaaaattaagaaattgctctatttacgacattgaacta

SEQ ID NO: 14408 - DNA, 260 bp, Unknown
  Description of Unknown: LeftRegion for integrase B1409 sequence
atggatacaatatacgcaacaatacttccggaaaaacaacgacgttcttcttccttgccgttagaaacacataaggaggcaagtaatataccaactaccccaaatggaaacacctggagcggataagccgaaaatgcaaaaacacataaagatggtaataattattcttacctttgcatcaaacaaataaaagtaagaatatgaaagcagcaatttatagtagagtatctacagatcaacaagattacagcaagcaaact

SEQ ID NO: 14409 - DNA, 260 bp, Unknown
  Description of Unknown: LeftRegion for integrase B1410 sequence
gagggacaattaatggaaaaagctatattgtatgccataaacgaaagaatgttctcacttggtctgatagatgagaaaacaagagataaaattaaagctgaaatcagcattagaaagtagcaaaatgtattgagtggagttatgtgaggtgttatactttatatgattccactccctgtttattgagggagaaatgcactatgaatatttattatgtcagagaaaaattaagaagttgctctatttacgacattgaatta

SEQ ID NO: 14410 - DNA, 260 bp, Unknown
  Description of Unknown: LeftRegion for integrase B1411 sequence
gatacacctcccgaaactgatactcttatggttgtcattgttgatgacgaagaaggatttgttaagaaaatcagcattgatgaagatactgtgacccttcgctcttttaacccacactatcctccccgtgtttttggcggtgttgaaattggacgattgcgctttgtcggtagagtcatggagttaaaaaggagatttgcatgaaaaaatttccaatcgacctctcctgtctgacagaggaagaaatctctcaatttcaa

SEQ ID NO: 14411 - DNA, 260 bp, Unknown
  Description of Unknown: LeftRegion for integrase B1412 sequence
tatgtcaacggttttatggttggcaatattcccggcgacgataccgatttcataaaccgggcccgccgccgcggtgtcgaggttgtcggttttaaggtcgattatttcgagcccgaggacgagcccgagcgcggtcgtgtgtactatgcccgaatcaagctcgagatcgtgcccgttcgtgcggcaaaggcggcgaaataatgccgcgggccgcgcaagccgccggggccgagtttgacggtacgccgcgggcggttatc

SEQ ID NO: 14412 - DNA, 260 bp, Unknown
  Description of Unknown: LeftRegion for integrase B1413 sequence
ctcaacagcaagaaataaatttacaataaataaaaaatcccggtgtgtatcacggcaccgggattctgacatcaccttatgggggataatgtcaagatgtttcaataaaagtatatcatccctcatacagttacgcaagcggaacgtttgttccttgctggctgttatttttatacttaattttaaggaggatgaataaaatgacaaatcaaaaagaaaaaatagtagcattatacgtccgtgtatctaccggttatcaa

SEQ ID NO: 14413 - DNA, 260 bp, Unknown
  Description of Unknown: LeftRegion for integrase B1414 sequence
aaaggagaatcgcatggagaaagttgtgttatatgccattaacgaaagattgtaccggcttggtcttatcaacgaggaaaccagagataaaatcaaagcggaaataagtgtaaaaaagtagaataataatgttgagtggaattgtgttgaggtggtatacttaatatgattccactcccttatcaatagggggaaataaaatgaatatctattacgctagggaacaattaaggagttgttctatttatgatctaaaaatt

SEQ ID NO: 14414 - DNA, 195 bp, Unknown
  Description of Unknown: LeftRegion for integrase B1415 sequence
tcaccgatatggtgagctgtgtgaaggagctcgtgctccagaacaaggcagtgaacattaattttccgcactttgtagctttagtttcagatattttttgtatctttgctgcgcaaaacataaagaattaataatatggatgttataggttatattagagtttcgacgaacaatcaagacctgcaaagacaaagg

SEQ ID NO: 14415 - DNA, 260 bp, Unknown
  Description of Unknown: LeftRegion for integrase B1416 sequence
tattacgtagatatcatacaagaagcacaataaaataaaagccccggcgctaccaacaccggagccaattggcactatctggaagataataccaaatcccgcaaatttagtttatcatcttccaggcagtcacgcaagcggaacgaatgttctttgctggctgttatttttatactcatttttaaggaggaatgatatttatgacagaacaaaatgagaaaatcgtagcactctacgtccgtgtatcaactggatatcaa

SEQ ID NO: 14416 - DNA, 260 bp, Unknown
  Description of Unknown: LeftRegion for integrase B1417 sequence
aaaggagaatcgtatggagaaagttgtgttatatgccattaacgaaagattgtaccggcttggtcttatcgacgaggaaaccagagataaaatcaaagcggaaataagtgtaaaaaagtagaataataatgttgagtggaattgtgttgaggtggtatacttaatatgattccactcccttatcaatagggggaaataaaatgaatatttattacgctagggaacaattaaggagttgttcaatttatgatctaaaaatt

SEQ ID NO: 14417 - DNA, 260 bp, Unknown
  Description of Unknown: LeftRegion for integrase B1418 sequence
ttcacttttgatttcaccacgcaaaaagacctcgacaacgagtataaaaaactcaataacggggagattggttctgtagtagcgacagttatattcggtgccttatttattgcagttttaggtttcctaaaatagtaatcgtttttcagccattaaacgcaaatttgaggctgttttcgttaaataaggggggtgacagtttgagttcggttgacaaaatcgccgttgtttacgcacggtattcttcccacgggcagacc

SEQ ID NO: 14418 - DNA, 260 bp, Unknown
  Description of Unknown: LeftRegion for integrase B1419 sequence
ctcaacagcaagaaataaatttacaataaataaaaaatcccggtgtgtatcacggcaccgggattctgacatcaccttatgggggataatgtcaagatgtttcaatgaaagtatatcatccctcatacagttacgcaagcggaacgtttgttccttgctagctgttatttttatacttaattttaaggaggatgaataaaatgataaatcaaaaagaaaaaatagtagcattatacgtccgtgtatctaccggttatcaa

SEQ ID NO: 14419 - DNA, 260 bp, Unknown
  Description of Unknown: LeftRegion for integrase B1420 sequence
catatcggaaaaatccgtttcatcgtcacgcctgtttacaaggaaacaggagagctgatgcgtgacatccttttgaagctgatgctggctgacttggagccggtataaccccatcgacatccttaacatgggcggtcaggcgaggtataatatagtcaggatgaatgacctcttgcttgactgccagagaggaggtttatatgaaacagtcaagcaaaaaacacgaactcggcacagccgctctctattgccgactgagc

SEQ ID NO: 14420 - DNA, 260 bp, Unknown
  Description of Unknown: LeftRegion for integrase B1421 sequence
ctcaacagcaagaaataaatttacaataaataaaaaatcccggtgtgtatcacggcaccgggattctgacattaccttatgggggataatgtcaagatgtttcaatgaaagtatatcatccctcatacagttacgcaagcggaacgtttgttccttgctggctgttatttttatacttaattttaaggaggatgaataaaatgacaaatcaaaaagaaaaaatagtagcattatacgtccgtgtatctaccggttatcaa

SEQ ID NO: 14421 - DNA, 260 bp, Unknown
  Description of Unknown: LeftRegion for integrase B1422 sequence
actgtggcagatcttcttgttcggcatgaaaaaattacatttgctcaaacagaagggctaaacgagaagatagatgaatgtctttcaagtggaagatgctctctgttctatttgacgaaaaggacttaaaaaagaaaagcaggatgccattaaaggtatcctgctttctaaataaatgaatctttgtgggagggtcgaaaatgcctgacaatccagcgacaatcaaaaaagttgccatctatattcgcgtatcgacaaaa

SEQ ID NO: 14422 - DNA, 260 bp, Unknown
  Description of Unknown: LeftRegion for integrase B1423 sequence
gttaagccggtattcaaggatgatagcacaaatacctttggaacaattcttctgcgtctcatgcgggcggattgtgaacgaaagacgtgaatcctttgcaaaaccggctgacaagtggctgtcgggcgcggtataattgaagcgtgaagttatagcacgcaagaaaatttgttgtccgactgtccaagaaaggaggacttatgaaacagtcgaacaataaaaagttccgtgatgtgacagccttcctctatgagcggctt

SEQ ID NO: 14423 - DNA, 260 bp, Unknown
  Description of Unknown: LeftRegion for integrase B1424 sequence
caagtcggcaaaatccaattcattgtcacgcccatctacaaggacaaaggcgagtccatgcgtgacatcctgttgaagctgatgctggctgatttggagccagtttaactgttccatcgacatccttaacacgggcagtcggcagaggtataatatacatagataagaacctcttgcttgattgcaggaaggaggatattttgaaacagtcaagcaagaaaatctctaccggcacggccgctctctactgccgactgagc

SEQ ID NO: 14424 - DNA, 260 bp, Unknown
  Description of Unknown: LeftRegion for integrase B1425 sequence
tttattcaaaagaacaaggctggaaagtaaaattacccttggggtctagccggctgcctgggacatacaatgactttgttccggggtagagtgatttttcccttgatcttctattcatatcacagctgtgatacaaagataaaacgtttgcagatggtagttataatagtacctttgtcttaaacaaaagcaaagataatatgaaaggtgcaatttatagtagagtatctacagaaggacaggattacagtaagcaaacc

SEQ ID NO: 14425 - DNA, 260 bp, Unknown
  Description of Unknown: LeftRegion for integrase B1426 sequence
aatcggtcgttcgttgttgagccggttttcaaagaagaaagcccggataccctgggtagcgttctccttcgcctgatgaagtccgagagtgaaaagctgtaaatagctttcaaacccggctgacagaggcagcaaatggcggtataatgtgttcgtacaagtatatttgctattcgactgccttgacggaaggaggacttatgaaacagtcgaataacaaaaaatcccgtgacgtgaccgcctttctctatgaaaggctt

SEQ ID NO: 14426 - DNA, 260 bp, Unknown
  Description of Unknown: LeftRegion for integrase B1427 sequence
ctcaacagcaagaaataaatttacaataaataaaaaatcccggtgtgtatcacggcaccgggattctgacatcaccttatgggggataatgtcaagatgtttcaatgacagtatatcatccataaggcagtcacgcaagcggaacgtttgttctttgctggctgttatttttatacttaattttaaggaggatgaataaaatgacgaatcagaaagaaaaaatagtggcactgtatgtccgtgtatcaacaggatatcag

SEQ ID NO: 14427 - DNA, 260 bp, Unknown; identical to SEQ ID NO: 13307
  Description of Unknown: LeftRegion for integrase B1428 sequence

SEQ ID NO: 14428 - DNA, 260 bp, Unknown
  Description of Unknown: LeftRegion for integrase B1429 sequence
tgaactcgccgaacacatgacgagccacaataccccgttctcgaagggtgccatcaaaggccttctcaccgatatggtgagctgtgtgaaggagctcgtgctccaaaataaggcagtgaacattaattttccgcactttgtagctttagtttcagatattttttgtatctttgctgcgcaaaacataaagaattaataatatggatgttataggttatattagagtttcgacgaacaatcaagacctgcaaagacaaagg

SEQ ID NO: 14429 - DNA, 260 bp, Unknown
  Description of Unknown: LeftRegion for integrase B1430 sequence
caaatgcaacaacaagaaattaatatccaataattaaaaagccccgatgctaccaacaccggagccaattggcactatctggaagataataccaaatcccgcaaatttagtttatcatcttccaggcagtcacgcaagcggaacgaatgttctttgctggctgttatttttatactcatttctaaggaggaatgatatttatgacagaacaaaatgagaaaatcgtagcactctacgttcgtgtatcaaccggataccaa

SEQ ID NO: 14430 - DNA, 260 bp, Unknown
  Description of Unknown: LeftRegion for integrase B1431 sequence
tgtaaagccggtattcaaggatgacagcgcaaatacctttggagcaattctgctgcggctcatgcaggcggattgtgaacgaaaaccatgaatcctttgcgaacccggctgacaaatggctgtcgggcgcagtataattgaagcgtgaagttatagtacgcaagaaaaatgttgtccgactgtccaaggaaggaggacttatgaaacagtcgaacaataaaaaatcccgtgatgtgacagccttcctctatgagcggctt

SEQ ID NO: 14431 - DNA, 260 bp, Unknown
  Description of Unknown: LeftRegion for integrase B1432 sequence
gtcgtttgtcgttcagccggtattcaagcctggaaataacaacacccttggtgaagttctgctgcgcctcatgcaggcggactgcgaaaaaagtttgtgattttcagaatatcagctgacaataacagttaagcgcagtataattgttgtgtgaaaaagaaaacacaattcgttgctcgactgttatagaaggaggacttatgaaaaagtcgaacaacaagaaaacacgcgacgttaccgcgttcatctacccccgcctg

SEQ ID NO: 14432 - DNA, 260 bp, Unknown
  Description of Unknown: LeftRegion for integrase B1433 sequence
ataactatttaatgttcaaggcaaaaaataaataataaaagccccgatgctaccaacaccggagccaattggcactatctggaagataataccaaatcccgcaaatttagtttatcatcttccaggcagtcacgcaagcggaacgaatgttctttgctggctgttatttttatactcatttttaaggaggaatgatgtttatggcagaacaaaatgagaaaatcgtagcgctctacgtccgtgtatcaactggatatcaa

SEQ ID NO: 14433 - DNA, 260 bp, Unknown; identical to SEQ ID NO: 13291
  Description of Unknown: LeftRegion for integrase B1434 sequence

SEQ ID NO: 14434 - DNA, 260 bp, Unknown
  Description of Unknown: LeftRegion for integrase B1435 sequence
ctcaacagcaagaaataaatttacaataaataaaaaatcccggtgtgtatcacggcaccgggattctgacatcaccttatgggggataatgtcaagatgtttcaatgaaagtatatcatccctcgtacagttacgcaagcggaacgtttgttccttgctggctgttatttttatacttaattttaaggaggatgaataaaatgacaaatcaaaaagaaaaaatagtagcattatacgtccgtgtatctaccggttatcaa

SEQ ID NO: 14435 - DNA, 260 bp, Unknown
  Description of Unknown: LeftRegion for integrase B1436 sequence
gtgaagccggtattcaaggatgacagcgcaaatacctttggagcaattctgctgcggctcatgcaggcagattgtgaacgaaaaccgtgaatcctttgcgaacccggctgacaaatggctgtcgggcgcggtataattgaagcgtgaagttatagcacgcaagaaaaattgttgtccgactgtccaaggaaggaggacttatgaaacagtcgaacaataaaaaatcccgtgatgtgacagctttcctctatgagcggctt

SEQ ID NO: 14436 - DNA, 260 bp, Unknown
  Description of Unknown: LeftRegion for integrase B1437 sequence
caaatgcaacaacaagaaattaatatccaataattaaaaagccccgatgctaccaacaccggagccaattggcactatctggaagataataccaaatcccgcaaatttagtttatcatcttccaggcagtcacgcaagcggaacgaatgttctttgctggctgttatttttatactcgtttttaaggaggaatgatatttatggcagaacaaaatgagaaaatcgtagcgctctacgtccgtgtatcaactggataccaa

SEQ ID NO: 14437 - DNA, 260 bp, Unknown
  Description of Unknown: LeftRegion for integrase B1438 sequence
tatgtcaacggttttatggttggcaatattcccggcgacgataccgatttcataaaccgggcccgccgccgcggcgtcgaggtcgtcggttttaaggtcgattattttgagcccgaggacgagcccgagcgtggtcgtgtgtactatgcccgaatcaagctcgagatcgtgcctatacgcgcggcaaaggcggcgaaataatgccgcgggccgcacaagccgccggggccgagtttgacggtacgccgcgggcggtaatt

SEQ ID NO: 14438 - DNA, 260 bp, Unknown
  Description of Unknown: LeftRegion for integrase B1439 sequence
acccatttttgaattgtgttcgtgcatgaagtttttgtgcatcattttcggttgccccaacggggcgagaaaatggcacattacggattgctatgccagcatagcaatccccatcgacatccttaacatgggcggtcaggcgaggtataatatagtcaggatgaatgacctcttgcttgactgccagagaggaggtttatatgaaacagtcaagcaaaaaacacgaactcggcacagccgctctctactgccgactgagc

SEQ ID NO: 14439 - DNA, 260 bp, Unknown
  Description of Unknown: LeftRegion for integrase B1440 sequence
ctgtgataataaaaacatgatttagcacaataaaataaaagccccgatgctaccaacaccggagccaattggcactatctggaagataataccaaatcccgcaaatttagtttatcatcttccaggcagtcacgcaagcggaacgaatgttctttgctggctgttatttttatactcatttttaaggaggaatgatgtttatggcagaacaaaatgagaaaatcgtagcactctacgtccgtgtatcaacaggataccaa

SEQ ID NO: 14440 - DNA, 260 bp, Unknown
  Description of Unknown: LeftRegion for integrase B1441 sequence
ctacatcggaaagatccgctttatcgtcacgcctgtttacaaggaaacgggagagctgatgcgtgacatccttttgaagctgatgctggctgacttggagccggtatagccccatcgacatccttaacatgggcggtcaggcgaggtataatatagtcaggatgaatgacctcttgcttgactgccagagaggaggttatatgaaacagtcaagtaagaaacacgaactcggcacagccgcgctctactgccgactgagc

SEQ ID NO: 14441 - DNA, 260 bp, Unknown
  Description of Unknown: LeftRegion for integrase B1442 sequence
ctcaacagcaagaaataaatttacaataaataaaaaatcccggtgtgtatcacggcaccgggattctgacatcaccttatgggggataatgtcaagatgtttcaatgaaagtatatcatccctcatacagttacgcaagcggaacatttgttccttgctggctgttatttttatacttaattttaaggaggatgaataaaatgacaaatcaaaaagaaaaaatagtagcattatacgtccgtgtatctaccggttatcaa

SEQ ID NO: 14442 - DNA, 260 bp, Unknown
  Description of Unknown: LeftRegion for integrase B1443 sequence
aaaggagaatcgcatggagaaagttgtgttatatgccattaacgaaagattgtaccggcttggtcttatcaacgaggaaaccagagataaaatcaaagcggaaataagtgtaaaaaagtagaataataatgttgagtggaattgtgttgaggtggtatacttaatgtgattccactcccttatcaatagggggaaataaaatgaatatctattacgccagggaacaattaaggagttgttcaatttatgatctaaaaatt

SEQ ID NO: 14443 - DNA, 260 bp, Unknown
  Description of Unknown: LeftRegion for integrase B1444 sequence
ctgtgataataagaacatgacttagcacaataaaataaaagccccgatgctaccaacaccggagccaattggcactatctggaagataataccaaatctcgcaaatttagtttatcatcttccaggcagtcacgcaagcggaacgaatgttctttgctggctgttatttttatactcatttttaaggaggaatgatatttatggcagaacaaaatgagaaaatcgtagcactctacgttcgtgtatcaactggctatcaa

SEQ ID NO: 14444 - DNA, 260 bp, Unknown; identical to SEQ ID NO: 14441
  Description of Unknown: LeftRegion for integrase B1445 sequence

SEQ ID NO: 14445 - DNA, 260 bp, Unknown
  Description of Unknown: LeftRegion for integrase B1446 sequence
tacgcagacatagtaaaagaagctgaataaatgaaaatcccggtgtgtatcacggcaccgggattctgacatcaccttatgggggataatgtcaagatgtttcaatgaaagtatatcatccctcgtacagttacgcaagcggaacgtttgttccttgctggctgttatttttatacttaattttaaggaggatgaataaaatgacaaatcaaaaagaaaaaatagtagcattatacgtccgtgtatctaccggttatcaa

SEQ ID NO: 14446 - DNA, 260 bp, Unknown
  Description of Unknown: LeftRegion for integrase B1447 sequence
tattatagcacgcatcgctcatttcatcaatcattttctcgatgcacatgagtgatgccctccgaactggcacgatcagcgcgcgaaaacctctgcctatccgcagaaattttcagattcttcccttgggtaccttttcaaatggattccaatccgttataatatatctaccaacctaacgaataacgcgaggtgccgccatgaaaacgaaagatacgccgaagcaatacgtcatctactcccgcaagtccaaattcacc

SEQ ID NO: 14447 - DNA, 260 bp, Unknown
  Description of Unknown: LeftRegion for integrase B1448 sequence
aaaggagaatcgcatggagaaagttgtgttatatgccattaacgaaagattgtaccggcttggtcttatcgacgaggaaaccagagataaaatcaaagcagaaataagtgtaaaaaagtagaataataatgttgagtggagttgtgttgaggtggtatacttaatgtgattccactcccttatcaatagggggaaataaaatgaatatttattacgctagggaacaattaaggagttgttcaatttatgatctaaaaatt

SEQ ID NO: 14448 - DNA, 260 bp, Unknown
  Description of Unknown: LeftRegion for integrase B1449 sequence
ttctccccatttacttttgatttagcacaataaaataaaagccccgatgctaccaacaccggagccaattggcactatctggaagataataccaaatcccgcaaatttagtttatcatcttccaggcagtcacgcaagcggaacaaatgttctttgctggctgtattttttatactcatttttaaggaggaatgatatttatggcagaacaaaatgagaaaatcgtagcactctacgtccgtgtatcaactggataccaa

SEQ ID NO: 14449 - DNA, 260 bp, Unknown
  Description of Unknown: LeftRegion for integrase B1450 sequence
tacgtcaatggttatatggtcggcaatattcccggcgacgataccgatttcataaaccgggcccgccgtcgcggtgtcaacgtcgtcggctttaaggtcgattatttcgagcccgaggacgagcccgagcgcgggcgcgtgtactacgcccgtatcaagctcgagatcgtgcctatacgcgcggcaaaggcggcgaaataatgccgcgggccgcacaagctgccggggccgcgttcgacggaacgccgcgggcggttatc

SEQ ID NO: 14450 - DNA, 260 bp, Unknown
  Description of Unknown: LeftRegion for integrase B1451 sequence
tacgcagacatagtgaaagaagctgaataaaggaaaatcccggtgtgtatcacggcaccgggattctgacattaccttatgggggataatgccaagatgtttcaatgacagtatatcatccataaggcagtcacgcaagcggaacgtttgttctttgctggctgttatttttatacttaattttaaggaggatgaataaaatgacgaatcagaaagaaaaaatagtggcactgtatgtccgtgtatcaacaggatatcag

SEQ ID NO: 14451 - DNA, 260 bp, Unknown
  Description of Unknown: LeftRegion for integrase B1452 sequence
caaatgcaacaacaagaaattaatatccaataattaaaaagccccgatgctaccaacaccggagccaattggcactatctggaagataataccaaatcccgcaaatttagtttatcatcttccaggcagtcacgcaagcggaacgaatgttctttgctggctgttatttttatactcatttttaaggaggaatgatatttatgacagaacaaaatgagaaaatcgtagcactctacgtccgtgtatcaactggatatcaa

SEQ ID NO: 14452 - DNA, 260 bp, Unknown
  Description of Unknown: LeftRegion for integrase B1453 sequence
aaaggagaatcgcatggagaaagttgtgttatatgccattaacgaaagattgtaccggcttggtcttatcgacgaggaaaccagagataaaatcaaagcggaaataagtgtaaaaaagtagaataataatgttgagtggaattgtgttgaggtggtatacttaatatgattccactcccttatcaatagggggaaataaaatgaatatttattacgctagggaacaattaaggagttgttcaatttatgatctaaaaatt

SEQ ID NO: 14453 - DNA, 260 bp, Unknown
  Description of Unknown: LeftRegion for integrase B1454 sequence
caaatgcaacaacaagaaattaatatccaataattaaaaagccccgatgctaccaacaccggagccaattggcactatctggaagataataccaaatcccgcaaatttagtttatcatcttccaggcagtcacgcaagcggaacgaatgttctttgctggctgttatttttatactcatttttaaggaggaatgatatttatgacagaacaaaatgagaaaattgtagcgctctatgttcgtgtatcaactggataccaa

SEQ ID NO: 14454 - DNA, 260 bp, Unknown
  Description of Unknown: LeftRegion for integrase B1455 sequence
ctcaacagcaagaaataaatttacaataaataaaaaatcccggtgtgtatcacggcaccgggattctgacattaccttatggggggtaatgtcaagatgtttcaatgaaagtatatcatccctcatacagttacgcaagcggaacgtttgttccttgctggctgttatttttatacttaattttaaggaggatgaataaaatgacaaatcaaaaagaaaaaatagtagcattatacgtccgtgtatctaccggttatcaa

SEQ ID NO: 14455 - DNA, 260 bp, Unknown
  Description of Unknown: LeftRegion for integrase B1456 sequence
ggctactggctgtaaaatgctggtagccctcattttttagttgtatctagtatataaggggtgtataatagataggaactgaaaacagcctcataaagccctctgttttatagagggtaaagaagtctacacctaatatataaaagtggctgtatgaggcacacaggagctcacaggactattacaggagggtaaacaggatggcatacaggaaaataacggatataaaagatactataggtatgagagcggtattctat

SEQ ID NO: 14456 - DNA, 260 bp, Unknown
  Description of Unknown: LeftRegion for integrase B1457 sequence
gcaagaatacaaagtcaacggcgttacctacattgtgtcggcggcgttcaagcatacagggcggaaagaggacaacacctcttttccgacctgtgtaaaaaaaatcctcacaagtgatttcgcacatttgataatcaccgagggaaatgatactatggcagcagaaaatgtgtgttcggctgccggaaaggaggacaacattgcagtcgaaaaagaaacaggataaggctggcattaccgccttgtactgccgcctttcc

SEQ ID NO: 14457 - DNA, 260 bp, Unknown
  Description of Unknown: LeftRegion for integrase B1458 sequence
gacgggaactcaaagagaacgctgcctgactgcgcttgaacaacagtacagccgaagtcaaaaaagcaaacgccgagcttgactgcttggcgtttttacatatataagtgtaaatcaaagatttgcacattcgacatctctcagagattttcctataatgcaaatacagtaagcacggtttactgggaaaggagttttcaatgaacagatatgaacgcttaaacgaagaacgcaagataattgaaaaaagaaagcgtgta

SEQ ID NO: 14458 - DNA, 260 bp, Unknown
  Description of Unknown: LeftRegion for integrase B1459 sequence
gacagaaacaacctaccacctgccggtacaagaattgtcagagaatatttgggggttgaaaacgttgttactgttatgaaagatggctttgaatataatggcatgaaatattcaagcctgtctgcggtggcaaaaaaaattactggccgaaaaatctctggacgttacttttttggattagataaataaaggaataaaccatggaagatcaaaaacaaatacgatgcgcaatttacacccgtaaatcaacagatgaaggt

SEQ ID NO: 14459 - DNA, 260 bp, Unknown
  Description of Unknown: LeftRegion for integrase B1460 sequence
aatttgccgccgacaggaacacgaattgtccgtgagtatttaggtgttgatcatgttgttgtggttctgcccgatgggtttgaattcaatggtctgaagtatcaaaccttatctgcggtggcaaagaaaataaccggccgcaaaatatccggacgatatttttttggtttagataagcaagaaaaataaaggagaaaccaatggaaagttttagccctatcagatgtgcaatatatacacgtaaatcaacagatgaaggt

SEQ ID NO: 14460 - DNA, 260 bp, Unknown
  Description of Unknown: LeftRegion for integrase B1461 sequence
cgtgaagtagacattgaagatggagatattgtcgtggccgttgtagatcggcaagacggctttatcaaacaagtccactttgaagagaatgtccttaccctgcattctttcaacccctactatcctgatatggtctttagagggaatgagatcaagcaagttcggtttgtaggtaaagcccgagaggtgaagagaattctatgaagaagttcaaattccccattgatctgtctatgctgacagaagaagagatcaaccaa

SEQ ID NO: 14461 - DNA, 260 bp, Unknown
  Description of Unknown: LeftRegion for integrase B1462 sequence
aatctgccaccgacagggacacgaattgtccgtgagtatttaggtgttgatcatgtagtcgtggttctgcccgatgggtttgaattcaatggcatgaagtatcaaaccttatctgcggtggccaagaaaataaccggccgcaaaatatccggacgatatttttttggtttagataagcaagaaaaataaaggagaaaccaatggaaagttttagcccaatcagatgtgcaatatatacgcgtaaatcaacagatgaagga

SEQ ID NO: 14462 - DNA, 260 bp, Unknown
  Description of Unknown: LeftRegion for integrase B1463 sequence
acaggtcttttgattgtgtgtagtgacccggcgcaaaagaaaattgacagagccgatgccttgaatattccaatcatttcagagcagcaatggtatgaactcatgccagaacttgaagccgttggaatgtggaacggaaagcaaattctgtttgcggacaatgatggcatctaccgtgttgaagtgggcggtgaaagctgatggccagaaaaaagaatattgctgccggcctcgatgccgtcatctatgcccggtactca

SEQ ID NO: 14463 - DNA, 260 bp, Unknown; identical to SEQ ID NO: 14115
  Description of Unknown: LeftRegion for integrase B1464 sequence

SEQ ID NO: 14464 - DNA, 260 bp, Unknown
  Description of Unknown: LeftRegion for integrase B1465 sequence
aatttgccgccgacagggacacgaattgtccgtgagtatttaggtgttgatcatgttgttgtggttctgcccgatgggtttgaattcaatggtctgaagtatcaaaccttatctgcggtggcaaagaaaataaccggccgcaaaatatccggacgatatttttttggtttagataagcaagaaaaataaaggagaaaccaatggaaagttttagccctatcagatgtgcaatatatacacgtaaatcaacagatgaaggt

SEQ ID NO: 14465 - DNA, 260 bp, Unknown
  Description of Unknown: LeftRegion for integrase B1466 sequence
taactctcaaagatcgcttgttttctcaaccttccttaaatgaacaagaagtagaattggttaatttattccgctcttgtaaaccgtctgtgcaattccaagttgttcatattatgatgacggaaaaagaaaaaacagactctacggaagagtctgctatcggctaaggtcatcgacctaaatgaatggagaaagaccctatgaagaagttcaagttccctatcgacttgtctatgttgacggaggaagagatcgaccaa

SEQ ID NO: 14466 - DNA, 260 bp, Unknown; identical to SEQ ID NO: 14459
  Description of Unknown: LeftRegion for integrase B1467 sequence

SEQ ID NO: 14467 - DNA, 260 bp, Unknown
  Description of Unknown: LeftRegion for integrase B1468 sequence
agaaaggtataatgtttttcatgtcttcctgatagttagacatgatgccaacggtaagaaatatttgtacgatgttataaaaacaaaaaaagaaacgagcaacccgcttagctactgacaagtcagcacgtacggtataaaaacccatttcttaatacaaagggtactatttattagtgaaaatgtcaaggagaaaaattgtgaataataaaaaaacaaaggtttatatttatactcgtgtttctacagttatgcagata

SEQ ID NO: 14468 - DNA, 260 bp, Unknown
  Description of Unknown: LeftRegion for integrase B1469 sequence
gtcaaaaaggtcgcaatcgcaccgataggaaccaaaatcatcaaacagtacaaaggccgcgattatgtcatccgcgttcttgaaaacggctatgaacttgacggacaaagatttaagagcttgtccggcatggccaagaaaattaccggtatgaaaatctccggtagtgcattctttggatttaatttgcgaggcaaataatggaagagcagaaaaaagtcagatgtgcaatttatacccgaaaatcaaccgacgaaggc

SEQ ID NO: 14469 - DNA, 260 bp, Unknown
  Description of Unknown: LeftRegion for integrase B1470 sequence
aagtatatatcgcattgcacaaatacacgtaaaataaaaaccgcccctgcgccaacaggaacggtctttaaggtacatccgaagatatacactatactttggtcggtaatattgtatcatcttcggacagctatcgcaagcggaacacttgttctctgctagctgttatttttatacccatttttaaggaaggtggtacaatgaaagaagataatagaattgtagcattatacgttcgtgtatctactggataccaagtt

SEQ ID NO: 14470 - DNA, 260 bp, Unknown
  Description of Unknown: LeftRegion for integrase B1471 sequence
gctactggctgtaaaatgctggtagccctcattttttagttgtatctagtatataaggggtgtataatagatagaaactgaaaaacagcctcataaagccttctattttatcgagggtaaagaagtctacacctaatatataaaagtggctgtatgaggcacacaggagctcacaggactattacaggagggtaaacaggatggcatacaggaaaataacggatataagagatactattggtatgagagcggtattttat

SEQ ID NO: 14471 - DNA, 260 bp, Unknown
  Description of Unknown: LeftRegion for integrase B1472 sequence
caataaaacaaaaaccgccccttcgccaaaaggagcggaatgttgaagaaacacacgcaaatatgtttcttccagtactccgaagagatacaattaattgccaatgaatattgtatcatcttcggacagccaatgcaatcagaacaactgttctgtgttggttgtatttttatacccatttttaaggaggatgattttttatgacagaaaaccaagaaaaaatagtagcactatacgtccgtgtatcgactggctatcag

SEQ ID NO: 14472 - DNA, 260 bp, Unknown
  Description of Unknown: LeftRegion for integrase B1473 sequence
gtatgtcattaacggtgtgagatatgtagttgagtcgagatttcaaaagcccgattacaaaaagccgaataagaacattttgctgaataaccgtatagggagttatctcacaagcgatttcgcagatttgccgtatgttggtacaagtaatataataagcaccgaatatgattgtacggctgccgggaaggaggataataatgcagccgaaaaagaataacaaaatcgggataacggcgctttactgccgtttgtcccgt

SEQ ID NO: 14473 - DNA, 260 bp, Unknown
  Description of Unknown: LeftRegion for integrase B1474 sequence
aatatatgataaacggagtaagatatattgtttgcggtaaatttgaggattttaacattaaaaaatatagcgacagcaatcatttgaataacagattgaaaaaatatctcacgggcgatttcgcagaattgtctgttgacagcatcaatgataaaatgacagatgaatatgattgttcgactgtcggaaaggaggattaaatgcagtcgaaaaacaaaaaccaaatagggataacggctctatattgtcgtttgtcccgt

SEQ ID NO: 14474 - DNA, 260 bp, Unknown
  Description of Unknown: LeftRegion for integrase B1475 sequence
gctactggctgtaaaatgctggtagccctcattttttagttgtatctagtatataaggggtgtataatagataggaactgaaaacagcctcataaagccctctattttatcgaggataaagaaagtctacacctaatatataaaagtggctgtatgaggcacacaggagctcacaggactattacaggagggtaaacaggatggcatacaggaaaataacggatataagagatactattggtatgagagcggtattttat

SEQ ID NO: 14475 - DNA, 260 bp, Unknown
  Description of Unknown: LeftRegion for integrase B1476 sequence
atgattcgcctttgaatcttgatctatgggacttctatgtggtaaattttctctctgcaattacttgtaggacaaaaactatcacgctgcaaactcttcttgatagcagaccgttgttaagtaactatcacaatctcaacaaaatcatacataatattattggtttctagtacttttgcattatggaaggaggtatcttaatgtctgcaacagcaactaaaaacagagtggcaatttacgttcgagtatcaacactttat

SEQ ID NO: 14476 - DNA, 260 bp, Unknown
  Description of Unknown: LeftRegion for integrase B1477 sequence
aatatatgataaatggagtaagatatatcgtttgcggtaaatttgaggattttaacattaaaaaatatagcgacagcaatcatttgaataacagattgaaaaaatatctcacgggcgatttcgcagaattgtctgttgatagcatcaatgataaaatgacagatgaatatgattgttcgactgtcggaaaggaggattaaatgcagtcgaaaaacaaaaatcaaatagggataacagctctttattgtcgtttgtcccgt

SEQ ID NO: 14477 - DNA, 260 bp, Unknown
  Description of Unknown: LeftRegion for integrase B1478 sequence
aataaaacaaaaaccgccccttcgccaaaaggagcggaatgttgaagaaacacacgcaaatatgtttcttccagtactccgaagagataccattaattgccaatgaatattgtatcatcttcggacagccaatgcaatcagaacagccgttctgtgttggttgtattttttatacccatttttaaggaggatgattttttatgacagaaaaccaagaaaaaatagtagcactatacgtccgtgtatcgactggctatcag

SEQ ID NO: 14478 - DNA, 260 bp, Unknown
  Description of Unknown: LeftRegion for integrase B1479 sequence
cttcaatgacaatatcggttccagaacaataaaataaaaaaccgcccctgcgccaacaggaacggtctttaaggtacatccgaagatatacactttactttggtcggtaatattgtatcatcttcggacagctatcgcaagcagaacgtccgttctctgctagctgttatttttatactcatttttaggaaggtggtactatgtcagaagacaaaagaatcgtagcattgtatgttcgtgtgtctactggatatcaggtg

SEQ ID NO: 14479 - DNA, 260 bp, Unknown
  Description of Unknown: LeftRegion for integrase B1480 sequence
ctctccatacatttttgacttagcgcaataaaataaaaaaccgcccctgcgccaacaggaacggtctttaagggcacatccgaagatatacactatactttgatcggtaatattgtatcatcttcggacagctatcgcaagcagaacatccgttctctgctagctgttatttttatactcatttttaggaaggtggtactatgtcagaagataaaagaatcgtagcattgtacgttcgtgtgtctactggatatcaggta

SEQ ID NO: 14480 - DNA, 260 bp, Unknown
  Description of Unknown: LeftRegion for integrase B1481 sequence
atatgttattaacagtgtaagatatgtggttgagtcgaaatttcaaaaacctaactacaaagaacccaaagagaatactttgctgaataaccgtatcggaaattatctcacaagcgatttcgcagatttgccgtctgtcgatacagataatataatagatactgaatatgattgtacggctgccgggaaggaggataatagtgcagccgaaaaagaataacaaaatcgggataacggcgctttactgccgtttgtcccgt

SEQ ID NO: 14481 - DNA, 260 bp, Unknown
  Description of Unknown: LeftRegion for integrase B1482 sequence
ttcaatgacaatatcggttccagaacaataaaataaaaaaaccgcccctgcgccaacaggaacggtctttaaggtacatccgaagatatacactatactttggtcggtaatattgtatcatcttcggacagctatcgcaagcagaacgtccgttctctgctagctgttatttttatactcatttttaggaaggtggtactatgtcagaagacaaaagaatcgtagcattgtacgttcgtgtgtctactggatatcaggta

SEQ ID NO: 14482 - DNA, 260 bp, Unknown
  Description of Unknown: LeftRegion for integrase B1483 sequence
ctcggcggaatcaacgccgacagcgttacaaagaaaaccaatttccttgttttgggaaataatgacctgtgttcctcaatcaaagacggcaaaagttccaaacataaaaaagccgaaaagtatattttgggcggcgcagacttgtctattatcccggaaaatgttttttatgatatgttagacgaataaagggtgattgtatgcgggcttttatttactgccgattttccagccataagcagcaagagcttagcatagag

SEQ ID NO: 14483 - DNA, 260 bp, Unknown
  Description of Unknown: LeftRegion for integrase B1484 sequence
aatatatgataaacggagtaagatatatcgtttgcggtaaatttgaggattttaacattaaaaaatatagcgacagcaatcatttgaataacagattaaaaaaatatctcacgggcgatttcgcagaattgtctgttgacagcatcaatgataaaatgacagatgaatatgattgttcgactgtcggaaaggaggattaaatgcagtcgaaaaacaaaaatcaaatagggataacagctctttattgtcgtttgtcccgt

SEQ ID NO: 14484 - DNA, 260 bp, Unknown; identical to SEQ ID NO: 14243
  Description of Unknown: LeftRegion for integrase B1485 sequence

SEQ ID NO: 14485 - DNA, 260 bp, Unknown
  Description of Unknown: LeftRegion for integrase B1486 sequence
atcaatgacaatatcggtcccagaacaataaaataaaaaaccgctcctgcgccaacaggaacggtctttaaggtacatccgaagatatacactatactttggtcggtaatattgtatcatcttcggacagctatcgcaagcagaacgtccgttctctgctagctgttatttttatactcatttttaaggaaggtggtacaatgaaagaagataatagaattgtagcattatacgttcgtgtatctactggataccaagtt

SEQ ID NO: 14486 - DNA, 260 bp, Unknown
  Description of Unknown: LeftRegion for integrase B1487 sequence
gtgatgctaaaacaaaaataataatccaataaaataaaaaaccgcccctgcgccaacaggaacggtctttaaggtacatccgaagatatacactatactttggtcagtaatattgtatcatcttcggacagctatcgcaagcgaaacatccgttctctgctagctgttatttttatactcatttttaggaaggtggtactatgtcagaagataaaagaatcgtagcattatatgttcgtgtgtctactggatatcaggta

SEQ ID NO: 14487 - DNA, 260 bp, Unknown
  Description of Unknown: LeftRegion for integrase B1488 sequence
aattgcaacaacaagaaatatcattacaataaaataaaaaaccgcccctgcgccaacaggaacggtctttaaggtacatccgaagatatacactatactttggtcggtaatattgtatcatcttcggacagctatcgcaagcagaacgtccgttctctgctagctgttatttttatactcatttttaggaaggtggtactatgtcagaagacaaaagaatcgtagcattgtacgttcgtgtgtctactggatatcaggta

SEQ ID NO: 14488 - DNA, 260 bp, Unknown
  Description of Unknown: LeftRegion for integrase B1489 sequence
aacctgtaaaataaaaaccgcccctacgccaataggaacggtttagttgaaacatacgccaatatgtttcaaaataacactccgaagaatgccatttattaccaataaatattgtatcatcttcggagcagccacgcaagcgaaacaaacgttctccgctggctgttatttttatactcatttttaggaaggttggtactatgtcagaagataaaagaatcgtagcattgtacgttcgtgtgtctactggatatcaggtg

SEQ ID NO: 14489 - DNA, 260 bp, Unknown
  Description of Unknown: LeftRegion for integrase B1490 sequence
gtcaataaagcaaaaaccgcccctcgccaaaggagcggaatgttgaagaatcatacgccaatatgtttcttccagtacctcgaagagataccattaattgccaatgaatattgtatcatcttcggacagccaatgcaatcagaacaactgttctgtgttggttgtatttttatacccatttttaaggaggatgattttttatgacagaaaacccagaaaaaatagtagcactatacgtccgtgtatcgactggctatcag

SEQ ID NO: 14490 - DNA, 260 bp, Unknown
  Description of Unknown: LeftRegion for integrase B1491 sequence
gtgatgctaaaacaaaaataataatccaataaaataaaaaaccgcccctgcgccaacaggaacggtctttaaggtacatccgaagatatacactttactttggtcggtaatattgtatcatcttcggacagctatcgcaagcagaacgtccgttctctgctagctgttatttttatactcatttttaggaaggtggtactatgtcagaagataaaagaatcgtagcattgtacgttcgtgtgtctactggatatcaggta

SEQ ID NO: 14491 - DNA, 260 bp, Unknown
  Description of Unknown: LeftRegion for integrase B1492 sequence
tctctccatacatttttgacttagcgcaataaaataaaaaaccgcccctgcgccaacaggaacggtctttaaggtacatccgaagatatacactatactttggtcggtaatattgtatcatcttcggacagctatcgcaagcggaacacttgttctctgctagctgttatttttatacccattttaaggaaggtggtacgatgaaagaagataatagaattgtagcattgtatgtccgtgtatctactggatatcaggta

SEQ ID NO: 14492 - DNA, 107 bp, Unknown
  Description of Unknown: LeftRegion for integrase B1493 sequence
gtgtttgagtatatttcaacacattttgagtggcaggatgattttttatgacagaaaaccaagaaaaaatagtagcactatacgtccgtgtatcgactggctatcag

SEQ ID NO: 14493 - DNA, 260 bp, Unknown
  Description of Unknown: LeftRegion for integrase B1494 sequence
attggtgatgctaaaacaaaaataataatccaataattaaaaagctccgacactacaaatgccggagccaatagacactatctggaagataatgccaattctcgcaaaattagtataccatcttccaggcagtcacgcaagcggaacaaatgttcttctgtggctgttatttttatactcatttttaggaaggtgatattatgtcagaagataaaagaatcgtagcattgtacgttcgtgtgtctactggatatcaggta

SEQ ID NO: 14494 - DNA, 260 bp, Unknown
  Description of Unknown: LeftRegion for integrase B1495 sequence
catcaatgacaatatcggttccaaaacaataaaataaaaaaccgcccctgcgccaacaggaacggtctttaaggtacatccgaagatatacactatactttggtcggtaatattgtatcatcttcggacagctatcgcaagcagaacgtccgttctctgctagctgttatttttatactcatttttaggaaggtggtactatgtcagaagataaaagaatcgtagcattatatgttcgtgtgtctactggatatcaggta

SEQ ID NO: 14495 - DNA, 260 bp, Unknown; identical to SEQ ID NO: 14488
  Description of Unknown: LeftRegion for integrase B1496 sequence

SEQ ID NO: 14496 - DNA, 260 bp, Unknown
  Description of Unknown: LeftRegion for integrase B1497 sequence
tatgtttaataaaagaacttggcaggaacaaaaacataccggaagaattagttagagcagtggaaataaaatatgataacgaatagttcaaaaagccaagatgttttgcaccttggctttgtaaatattgaattaaccaggttatgatgctatactatgctaaaatctatatttgataacctggtggataggagtaaattatgaagagaaaagttgcaatatacgccagagtatcaacggagcatgaagcacagattaat

SEQ ID NO: 14497 - DNA, 260 bp, Unknown
  Description of Unknown: LeftRegion for integrase B1498 sequence
cttcaatgacaatatcggttccagaacaataaaataaaaaaccgcccctgcgccaacaggaacggtctttaaggtacatccgaagatatacactttactttggtcggtaatattgtatcatcttcggacagctatcgcaagcagaacgtccgttctctgctagctgttatttttatactcatttttaggaaggtggtactatgtcagaagataaaagaatcgtagcattgtacgttcgtgtgtctactggatatcaggta

SEQ ID NO: 14498 - DNA, 260 bp, Unknown; identical to SEQ ID NO: 14497
  Description of Unknown: LeftRegion for integrase B1499 sequence

SEQ ID NO: 14499 - DNA, 260 bp, Unknown
  Description of Unknown: LeftRegion for integrase B1500 sequence
tctctccatacatttttgacttagcgcaataaaataaaaaaccgcccctgcgccaacaggaacggtctttaaggtacatccgaagatatacactatactttggtcggtaatattgtatcatcttcggacagctatcgcaagcggaacacttgttctctgctagctgttatttttatacccattttaaggaaggtggtacgatgaaagaagataatagaattgtagcattatacgttcgtgtatctactggataccaagtt

SEQ ID NO: 14500 - DNA, 199 bp, Unknown
  Description of Unknown: LeftRegion for integrase B1501 sequence
cgggtgttgatgttatcgcgctgcgacagcatctcatccagctccatgccgccgagcacggtgcggatgttggtcaatagcaatttatttcgtaatcccataaaatactctcatagcggagcgattgaggtgtaggtgattgaaaattataaaagatgctgttggttatgttcgtttcagctcagcaatacaggagcag

SEQ ID NO: 14501 - DNA, 260 bp, Unknown
  Description of Unknown: LeftRegion for integrase B1502 sequence
caacatattgtataataagagtaagcaaagccacgataagccggaaagcggcgtatctcgaatatcatcttcggacgtgttgagacgttcttcggaacgtcttttccgtgattcgtggttcctgtacgcgcttcggaaacgaagcgttttttattgctcatcttctctttcagcaaagccacttctataagggaagtgtgatgagaatgaaactccatcgagaagaagaacatcggaaagctgctctgtacatccgtgtc

SEQ ID NO: 14502 - DNA, 260 bp, Unknown
  Description of Unknown: LeftRegion for integrase B1503 sequence
atgattcgcctttgaatcttgatctatgggacttctatgtggtaaattttctctctgcaattacttgtaggacaaaaactatcacgctgcaaactcttcttgatagcagaccgttgttaagtaactatcgcaatctcaacaaaatcatacataatattattggtttctagtacttttgcattatggaaggaggtatcttaatgtctgcaacagcaactaaaaacagagtggcaatttacgttcgagtatcaacactttat

SEQ ID NO: 14503 - DNA, 260 bp, Unknown
  Description of Unknown: LeftRegion for integrase B1504 sequence
ctctccatacatttttgacttagcgcaataaaataaaaaaccgcccctgcgccaacaggaacggtctttaagggcacatccgaagatatacactatactttgatcggtaatattgtatcatcttcggacagctatcgcaagcagaacgtccgttctctgctagctgttatttttatactcatttttaggaaggtggtactatgtcagaagataaaagaatcgtagcattgtacgttcgtgtgtctactggatatcaggta

SEQ ID NO: 14504 - DNA, 260 bp, Unknown
  Description of Unknown: LeftRegion for integrase B1505 sequence
aatatatgataaatggagtaagatatatcgtttgcggtaaatttgaggattttaacattaaaaaatatagcgacagcaatcatttgaataacagattgaaaaaatatctcacgggcgatttcgcagaattgtctgttgacggcatcaatgataaaatgacagatgaatatgattgttcgactgtcggaaaggaggattaaatgcagtcgaaaaacaaaaatcaaatagggataacggctctttattgtcgtttgtcccgt

SEQ ID NO: 14505 - DNA, 260 bp, Unknown; identical to SEQ ID NO: 14486
  Description of Unknown: LeftRegion for integrase B1506 sequence

SEQ ID NO: 14506 - DNA, 260 bp, Unknown
  Description of Unknown: LeftRegion for integrase B1507 sequence
ccgtacccccgattgcagcggaatggacgatgccaccgccgtaacgctagagcaggcagaagccgctgggtatacaccttgtaagagatgctactaaaatagtaaagctccgcaggctacattttgaccagaacaaaataaaaaacgcccccggtgttggcgcaccgagagcgtttccatagatcagcttgcccacaaaagtggatacaatcgacccgacaattgtattgtaccaccttgcgggcaggattgcaaaccca

SEQ ID NO: 14507 - DNA, 260 bp, Unknown
  Description of Unknown: LeftRegion for integrase B1508 sequence
ctctccatacatttttgacttagcgcaataaaataaaaaaccgcccctgcgccaacaggaacggtctttaagggcacatccgaagatatacactatactttgatcggtaatattgtatcatcttcggacagctatcgcaagcagaacgtccgttctctgctagctgttatttttatactcatttttaggaaggtggtactatgtcagaagataaaagaatcgtagcattgtacgttcgtgtgtctactggatatcaggtg

SEQ ID NO: 14508 - DNA, 260 bp, Unknown
  Description of Unknown: LeftRegion for integrase B1509 sequence
atcaattacctggcagttggcccccttgatcccggcgtggtcgttgacaaagcttcgcataaatcaaccaaaattgtggaggccgaaaagctgcgggacaaaggcagcggagtaaaaattgtccgcctaaccgacttggtgaaaattctttttgacgaatcctgattgcacttgactgcaaaatggaaacgggagtaactatgcagaactatactgcgcccgcaccgcttcaagccccgcgggcttttggctattgccgc

SEQ ID NO: 14509 - DNA, 260 bp, Unknown
  Description of Unknown: LeftRegion for integrase B1510 sequence
cggtgcggtacagcagacagaaaaacccgtctgctgtcaaggtgattaaagaaactcttttagtcagcggaactactcgaaaaatctgattttttgcatattttgcttaaatatgagataataatggtgtaaatggcaccttgaaaacaaaatattccggccgccatatatacaccattctcagaaagcgagaggtatatatggctgaaaaaatcatgcaaggcataaagcagatttctgagttgatcggacaggctgtc

SEQ ID NO: 14510 - DNA, 260 bp, Unknown
  Description of Unknown: LeftRegion for integrase B1511 sequence
atctcagtgatagtaaaagattgatttaaaataacaaaaaactccggtgctaccaacaccggagccaatagacactatctggaagataatgccaattctcgcaaaattagtatatcatcttccagacagccacgcaagcggaacaaacgttcttagctggctgttatttttatactcaattttaaggaaggatgataattatgacagaaaagaaagaaaaaattgcagcattatacgtccgtgtatcaaccggctatcag

SEQ ID NO: 14511 - DNA, 260 bp, Unknown
  Description of Unknown: LeftRegion for integrase B1512 sequence
ggctactggctgtaaaatgctggtagccctcattttttagttgtatctagtatataaggggtgtataatagatagaaactgaaaaacagcctcataaagccctctattttatagagggtaagaagtctacacctaatatataaaagtggctgtatgaggcacacaggagctcacaggactattacaggagggtaaacaggatggcatacaggaaaataacggatataagagatactattggtatgagagcggtattttat

SEQ ID NO: 14512 - DNA, 260 bp, Unknown
  Description of Unknown: LeftRegion for integrase B1513 sequence
ctggatcattgacatggttatgatctgttgcaacaaattcaccgacagcaccggcgcggtggttggtctgaaggttgctgagtataccagacagccggatcctgatcttgcagaggcttctctggaggagcagcgggaggcagcggccgagactgccagagcttacggctataccgtaatagagtcaggcactcaggataatgccgacaagtaaaaacacggctcgaaaatatgccgcaggaggtagctcggataattcc

SEQ ID NO: 14513 - DNA, 260 bp, Unknown; identical to SEQ ID NO: 14510
  Description of Unknown: LeftRegion for integrase B1514 sequence

SEQ ID NO: 14514 - DNA, 260 bp, Unknown
  Description of Unknown: LeftRegion for integrase B1515 sequence
ccaaaggcaaacatacaggcaggccggtaatgtccaaagacgacttaccggctttgtttttaaaatatgccccgctataccatcagggacagcttaccaagaaggctctggcaaagttgtgcggggtgagttatccaaccatttttaaatatataactattgcaggaatagcttataggatataataaaggtgggaatatatgaaatatagtaaacggggtagtctgggtatgaaacgggttgtggcttattgcagagta

SEQ ID NO: 14515 - DNA, 260 bp, Unknown
  Description of Unknown: LeftRegion for integrase B1516 sequence
gtcggaaatacaaaaacttccaccattgaaaggtgaagtttcattccgacaggctctgtttacacgtaaacgattaaaagaaacaaaaggacaatccttagtgatttctaagttccattggatgttggatgggatgacagttacagatgagtgtttaaaacaatttgttcattttttaatacgactaaggagtgagagttatgaaaaagagtaatgaattacctaaatcaattatatatagtagatattcgtcaactaat

SEQ ID NO: 14516 - DNA, 260 bp, Unknown
  Description of Unknown: LeftRegion for integrase B1517 sequence
gcctgcgggcgggagattcgagtcatctccgtgtttccccggcatggcagcgaaaccgcggaggacaagctgaaagctctggcggaactggactttcggcagggaaagctgtgcgcgtaaagtgctggacatttcagaccgttcggggtattgtggtgtcgcaatgctctgaacggtttgacaaagaaaaggagggctgtatgaatcagtcaaaccaaatcaggaaaaccgccctgtactgccgtctcagccaggatgat

SEQ ID NO: 14517 - DNA, 260 bp, Unknown
  Description of Unknown: LeftRegion for integrase B1518 sequence
ggctactggctgtaaaatgctggtagccctcattttttagttgtatctagtatataaggggtgtataatagatagaaactgaaaacagcctcataaagccctctattttatcgagagtaaagaagtctacacataatatataaaagtggctgtatgaggcacacaggagctcacaggactattgcaggagggtaaacaggatggcatacaggaaaataacggatataagagatactattggtatgagagcggtattttat

SEQ ID NO: 14518 - DNA, 260 bp, Unknown
  Description of Unknown: LeftRegion for integrase B1519 sequence
ctgctttgattcagcatgcgctggatgaggtgcctttgtttccggatcgaggtctgccgcggccaatacttcaatttttaattgaccacaaattgcttttgtcttcctggttatctgtttcagatctggaggatgaattcgtggagactctccccggattgcgtgcgttaattaagaaatgtaaataaaaaaatcgcccagtgctgcgaacaccaggcgacctgttcttccttgcggaagctgtaaactctacgaataaa

SEQ ID NO: 14519 - DNA, 260 bp, Unknown
  Description of Unknown: LeftRegion for integrase B1520 sequence
cgcctgcatactatctccaccacaagcagcggcagtaaaggcttaatgggcggcgaccgtattcaggcaaccatggtatttgaaaagctgggctgataagctagtatttgcaaatgccagccatatttttatggctggcatttgcttttcacaaggggaaagagccctgccgggaagtccggcaggcagggagtaatatcatgtctgctacaattccatctcttatgcaagccccgcgggctttcggctactgccgtaaa

SEQ ID NO: 14520 - DNA, 260 bp, Unknown
  Description of Unknown: LeftRegion for integrase B1521 sequence
gcaaggtcagtgtttccgaagcgtctgaattggaagaacgcttactccgttatttttcattttgtgatgcagaaggaaagctgcgtattatccaatgcgctatgaatgaatttgacagaacagcaaaagaaaaaacagactctacggaaaagtctgctatcggctaaagttattgatctgagtgagtggagaaaaacgctatgaaaaaattccccattgacctgtccatgctgaccgaagaggaaatagaccaattccgg

SEQ ID NO: 14521 - DNA, 260 bp, Unknown
  Description of Unknown: LeftRegion for integrase B1522 sequence
agatgaaaaaacgaaaataataattcagtaaataaaaagccccggcgttaccaacaccggagccaatagacactatctggaagataatgccaattctcgcaaaattagtatatcatcttccaggcagccacgcaagcggaacgaatgttcttcgctggctgttatttttatactcatttttacaaggaggacgatattttatgccagaaaaagaaaaagttgtagcattgtatgtccgggtatcaaccgggtatcaggtg

SEQ ID NO: 14522 - DNA, 260 bp, Unknown
  Description of Unknown: LeftRegion for integrase B1523 sequence
ctccgcaatctatcgactatgaagccaggacgggtgttttcaagggatccggcaaaaagccgtatgaggtcaccgaaaccacctgcacctgccgagattattttgtccgcaagctgccgtgcaagcatatctaccggctgcgcatggagcttgccaaggctgacggcgaatagttttcaccagaaaaggagcatgacggcatgagaaaaaagtccaacctcaatgcggctactcgtgccgtcatctatgccaggtattcc

SEQ ID NO: 14523 - DNA, 189 bp, Unknown
  Description of Unknown: LeftRegion for integrase B1524 sequence
acaaggttacttcggcaagtgtgcaggatatccatcttctggtgaaaaataccaatattaacattacttacttcgtagttccaaatattttttgtatctttgcacccagaatttttaaatgtattaattatgaaggtaataggttatactcgtgtttcaacgaacaatcaagacttgaaacgacaaaaa

SEQ ID NO: 14524 - DNA, 260 bp, Unknown
  Description of Unknown: LeftRegion for integrase B1525 sequence
ggatagcaaatggtttataaattggacgaaagaatatcagggtattaatttaaattaagttatatatgtaaattgcaaataggaaaatattatcactagtatataaggataatattttccagataaaaatagtcaaattaaatatataacacaagtatatattataaatttgattgattaaaagtattggaggaatattaatgggatttaatgatttaattagtgctactgaggatagaaataatattaaaaatatagct

SEQ ID NO: 14525 - DNA, 260 bp, Unknown; identical to SEQ ID NO: 14186
  Description of Unknown: LeftRegion for integrase B1526 sequence

SEQ ID NO: 14526 - DNA, 260 bp, Unknown
  Description of Unknown: LeftRegion for integrase B1527 sequence
gttgtgccgcctccgtcgttgtccttgccgtcgcccggcacagagccctcgtcggtagttttgccgtaggtgtcatactcctctatgcggcatttcttgcgcagttcagcgttgctccaagtcttaattaacagaatatacttcatagttccaaatattttttgtatctttgcacccagaaattttaaaatgtattgattatgaaggtaataggttatactcgtgtttcgacgaacaatcaagacttgaaacgacaaaaa

SEQ ID NO: 14527 - DNA, 260 bp, Unknown
  Description of Unknown: LeftRegion for integrase B1528 sequence
tgcaacaacaagaaatattattacaataaaataaaaaaccgcccctgcgccaacaggaacggtctttaaggcacatccgaagatatacactatactttggtcggtaatattgtatcatctttggacagctatcacaagcggaacgaatgttcttcgctggctgttatttttatactcatttttaaggaggatgatattttatgccagaaaaagagaaaatcgtagcattgtatgtccgggtatcaaccgggtatcaggtg

SEQ ID NO: 14528 - DNA, 260 bp, Unknown
  Description of Unknown: LeftRegion for integrase B1529 sequence
gtggtgctagagccgccgctaggagtgctgccgccgttgtcaccgccgtcaccttcctcggtcacttcactgccaagggcagtaatcttacacatcttgcgaagctcggtgttgctccggttcttaattaatagaatatacttcatagttccaaatattttttgtatctttgcacccagaaattttaaaatgtattgattatgaaggtaataggttatactcgtgtttcgacgaacaatcaagacttgaaacgacaaaaa

SEQ ID NO: 14529 - DNA, 260 bp, Unknown
  Description of Unknown: LeftRegion for integrase B1530 sequence
aggaaaaatgccgtccttcgtccatagactacgatgcgggtattgccatttttgagggttcaggtaaaaagccttacgaaaccacggtaaattcctgcacctgcagagatttctttgtccgccgtttgccgtgcaagcatatctaccggcttcggatggagcttgaaaacagagaagctcgttaaaaatgggggcgttatatggctcgatcaaagaaaactgaatgcttgccacttgagcggatcggtgtgatctatgcc

SEQ ID NO: 14530 - DNA, 260 bp, Unknown
  Description of Unknown: LeftRegion for integrase B1531 sequence
gggctactagctgtaaaatgctggtagccctcattttttagttgtatctagtatataaggggtgtataatagataggaactgaaaacagcctcataaagccctctattttatcgagagtaaagaagtctacacctaattataaaagtggctgtatgaggcacacaggagctcacaggactattacaggagggtaaacaggatggcatacaggaaaataacagatataaaagatactattggtatgagagcggtattttat

SEQ ID NO: 14531 - DNA, 260 bp, Unknown
  Description of Unknown: LeftRegion for integrase B1532 sequence
cgcctgcacacgatctccaccacaagcagcggtagcaaaggcataatgggcggcgaccgtattcaggcaaccatggtatttgaaaagctgggctgataaactagtatttgcaaatgccagccatatttttatggctggcatttgcttttcacaaggggaaagagccctgccgggaaatccggcaggcagggagtaatatcatgtctgctacaattccatctcttatgcaagccccgcgggctttcggctactgccgtaaa

SEQ ID NO: 14532 - DNA, 260 bp, Unknown
  Description of Unknown: LeftRegion for integrase B1533 sequence
ggaatgttttaatttatacatttcaaaatattccagttgataataaaaagccccggtgctaccaacaccgagaccttttgataaatactatgcagtgctgagcacgtacaataattcatcggcaatgatattgtaccataaattttcagcaccgtataggtgtattttttatactcatttttacggaaaggataatatttatggacgaaaacaaaaaaatagtagcattgtatgttcgtgtaagcaccggctatcaggtc

SEQ ID NO: 14533 - DNA, 260 bp, Unknown
  Description of Unknown: LeftRegion for integrase B1534 sequence
aaataaaaaccgctcctgcgccaacaggaacggccgagcgatggaaacatacgccaatatgtttcaaaataacactccgaagaatgccatttattaccaataaatattgtatcatcttcggagcagccacgcaagcggaacaagcgttcttagttggctgtattttttatacccatttttagagaaaggatgatattattatgccagaaaaagaaaaagttgtagcattgtatgtccgggtatcaaccgggtatcaggtg

SEQ ID NO: 14534 - DNA, 260 bp, Unknown
  Description of Unknown: LeftRegion for integrase B1535 sequence
acaggtcttttgattgtgtgcagcgactcaatgcaaaagaaaatcgacagagcggatgccctgaatattccaatcgtttcggaacagcaatggtttgaactcatgccggaacttgaggccgctggaatgtggaacggaaagccaatttcattcgcggatgacgatggtatctaccgttttgatgtgggtggtgatggataatggcaaaaaagaagaagcccgccgggggcattgccgtcatctatgcccgctactcgtcc

SEQ ID NO: 14535 - DNA, 260 bp, Unknown
  Description of Unknown: LeftRegion for integrase B1536 sequence
ataattaataaaaaaagtcccctgcttccaacagaggacctaggggaaatctaatgcttccaacaaaagatttccaaagtattataaccttttcgataaaaaagtgtaatataatacccaccgcaatggttattatatcacactttttaacaccgttcaaggtgttatttttgtaccaaaaattaaggagtgagataataatgacaaaattaaaaaaagcagccttgtatatcagagtttctacaaggtaccaaattgat

SEQ ID NO: 14536 - DNA, 260 bp, Unknown
  Description of Unknown: LeftRegion for integrase B1537 sequence
actacgcagatatcatagaagaagcacaataaaataaaaagccccggtgctatcaacaccggagccaatagacactatctggaagataatgccaattctcgcaaaattagtataccatcttccaggcagtcacgcaagcggaacgaatgttcttcggtggctgttatttttatactcatttttaaggaggacgatattttatgtcagaaaaagagaaaatcgtagcattgtatgtccgtgtatcaaccgggtatcaggtg

SEQ ID NO: 14537 - DNA, 260 bp, Unknown
  Description of Unknown: LeftRegion for integrase B1538 sequence
gtaccgccgccttgttcagtgccgcctgaggtaccaccagaggtgccaccctcgtcggtgccggtatagccgccgtactcctgaatcttgcacttcttgcgcagctcagagttgctccagcttttaattaacagaatatacttcatagttccaaatattttttgtatctttgcacccagaaattttaaaatgtattgattatgaaggtaataggttatactcgtgtttcgacgaacaatcaagacttgaaacgacaaaaa

SEQ ID NO: 14538 - DNA, 260 bp, Unknown; identical to SEQ ID NO: 14535
  Description of Unknown: LeftRegion for integrase B1539 sequence

SEQ ID NO: 14539 - DNA, 260 bp, Unknown; identical to SEQ ID NO: 13548
  Description of Unknown: LeftRegion for integrase B1540 sequence

SEQ ID NO: 14540 - DNA, 260 bp, Unknown
  Description of Unknown: LeftRegion for integrase B1541 sequence
ggctactggctgtaaaatgctggtagccctcattttttagttgtatctagtatataaggggtgtataatagatagaaactgaaaacagcctcataaagccctctgttttatcgagggtaaagaagtctacacctaatatataaaagtggctatatgaggcacacaggagctcacaggactattacaggagggtaaacaggatggcatacaggaaaataacggatataaaagatactataggtatgagagcggtattttat

SEQ ID NO: 14541 - DNA, 260 bp, Unknown
  Description of Unknown: LeftRegion for integrase B1542 sequence
ggaatgttttaatttatacatttcaaaatattccagttgataataaaaagccccggtgctaccaacaccgagaccttttgataaatactatgcagtgctgagcacgtacaataattcatcggcaatgatattgtaccataaattttcagcactgtgtaggtgtattttttatactcatttttacagaaagagtgatatttatggatgaagataggaagattgtagcattatacgtccgtgtaagcactggatatcaggtc

SEQ ID NO: 14542 - DNA, 260 bp, Unknown
  Description of Unknown: LeftRegion for integrase B1543 sequence
cgatattgcgtttaaccgccgtcatctgtacgaaagcgataaggttaaaatcggcaaaaagacatttttagtcacatcggtatttcctatcggaaccgagaacggtgacaacccaagtgccgatgaaaaaattaaaaatttacttgaacgaaaaacgggataaatattttactggacattcaaaccgagtaggagtattgttgacttgcaatcctattcggtttgattcaacagagcctgaacggctcggaaaggatgaa

SEQ ID NO: 14543 - DNA, 260 bp, Unknown
  Description of Unknown: LeftRegion for integrase B1544 sequence
gtatatatcgcattgcacaaatacacgtaaaataaaaaccgcccctgcgccaacaggaacggtctttaaggcatatccgaagatatacactatactttggtcggtaatattgtatcatcttcggacagctatcgcaagcagaacgaatgttcttcgctggctgttatttttatactcatttttaaggaggatgatattttatgccagaaaaagagaaaatcgtagcattgtatgtccgggtatcaaccgggtatcaggtg

SEQ ID NO: 14544 - DNA, 260 bp, Unknown
  Description of Unknown: LeftRegion for integrase B1545 sequence
cctgtaaaataaaaaccgcccctacgccaataggaacggtttagttgaaacatacgccaatatgtttcaaaataacactccgaagaatgccatttattaccaataaatattgtatcatcttcggagcagccacgcaagcggaacaagcgttcttagttggctgttatttttatactcatttttaaggaggatgatattttatgccagaaaaaaagaaaatcgtagcattgtatgtccgggtatcaaccgggtatcaggtg

SEQ ID NO: 14545 - DNA, 260 bp, Unknown
  Description of Unknown: LeftRegion for integrase B1546 sequence
acaggtcttttgattgtgtgcagcgactcaatgcaaaagaaaatcgacagagcggatgccctgaatattccaatcgtttcggagcagcaatggtttgaactcatgccggaacttgaggccgctggaatgtggaacggaaagccaatttcattcgcagatgacgatggtatctaccgttttgatgtgggtggtgatggataatggcaaaaaagaagaagcccgccgggggcattgccgtcatctatgcccgctactcgtcc

SEQ ID NO: 14546 - DNA, 260 bp, Unknown; identical to SEQ ID NO: 13548
  Description of Unknown: LeftRegion for integrase B1547 sequence

SEQ ID NO: 14547 - DNA, 260 bp, Unknown
  Description of Unknown: LeftRegion for integrase B1548 sequence
ggctactggctgtaaaatgctggtagccctcattttttagttgtatctagtatataaggggtgtataatagatatgaactgaaaacagcctcataaagccctctattttatcgagggtaaagaagtctacacctaatatataaaagtggctgtatgaggcacacaggagctcacaggactattacaggagggtaaacaggatggcatacaggaaaataacggatataaaagatactattggtatgagagcggtattttat

SEQ ID NO: 14548 - DNA, 260 bp, Unknown
  Description of Unknown: LeftRegion for integrase B1549 sequence
ggctactggctgtaaaatgctggtagccctcattttttagttgtatctagtatataaggggtgtataatagataggaactgaaaatagcctcataaagccctatattttatcgagggtaaagaagtctacacctaatatataaaagtggttgtatgaggcacacaggagctcacaggactattacaggagggtaaacaggatggcatataggaaaataacggatataagagatactattggtatgagagcggtattttat

SEQ ID NO: 14549 - DNA, 260 bp, Unknown
  Description of Unknown: LeftRegion for integrase B1550 sequence
atctattaaatcattcgcaatacgaacgctgtattgatgagcttgaaaaacaatatcgtagaaaaagatgcagccaagcctaaacagcttggctctttacatatctaaatgtacaatcttctaatttgcacattcgacacaaaaacccctttttactatacttaaaatacggttgtaacaccgagaaaggagaaactacaatgaacaaatatgaacgcctaaatcaagaaagaaagttgattgacacgaaaaagcgagta

SEQ ID NO: 14550 - DNA, 260 bp, Unknown; identical to SEQ ID NO: 14533
  Description of Unknown: LeftRegion for integrase B1551 sequence

SEQ ID NO: 14551 - DNA, 260 bp, Unknown
  Description of Unknown: LeftRegion for integrase B1552 sequence
catcacggcaatcctaactaccagaaggaggaatttccatgaccaacaactttcagtgtgcacagatctaccagattcttgcgctcaacgacgaaatgctgaagagcggctgcatcacccgcgacgagcacgactttgtccgccatgtgcagacggacaagctgacccggctgcacagcacaccgtaaggaggccgcctgatggacgtccgcagactggacgaaatgcaggcgcagggccgcagcatcttcgataccgag

SEQ ID NO: 14552 - DNA, 260 bp, Unknown
  Description of Unknown: LeftRegion for integrase B1553 sequence
ggctactggctgtaaaatgctggtagccctcattttttagttgtatctagtatataaggggtgtataatagatagaaactgaaaacagcctcataaagccctctattttatcgagagtaaagaagtctacacctaatatataaaagtggctgtatgaggcacacaggagctcacaggactattacaggagggtaaacaggatggcatacaggaaaataacggatataagagatactattggtatgagagcggtattttat

SEQ ID NO: 14553 - DNA, 260 bp, Unknown
  Description of Unknown: LeftRegion for integrase B1554 sequence
gtaaaaggctggtaccctattttttttgttgctatttttatataggagctgtataatagatacatactgaaattaacctcatagagccgcttatttctcataccctaaaaatatacctctgtgcggttaaaatcgctctgtgaggctcacaggagctcacaggggcattataagcaagaacagtaaaggagaaatgcaggatggcatacaggaaagtaagatcattgttagatacaatcggattgagggcggtattttat

SEQ ID NO: 14554 - DNA, 260 bp, Unknown
  Description of Unknown: LeftRegion for integrase B1555 sequence
gctactggctgtaaaatgctggtagccctcattttttagttgtatctagtatataaggggtgtataatagatagaaactgaaaaacagcctcataaagccctatattttatcgagggcaaagaagtctacacctaatatataaaagtggctgtatgaggcacacaggagctcacaggactattacaggagggtaaacaggatggcatacaggaaaataacggatataaaagatactattggtatgagagcggtattttat

SEQ ID NO: 14555 - DNA, 260 bp, Unknown; identical to SEQ ID NO: 13291
  Description of Unknown: LeftRegion for integrase B1556 sequence

SEQ ID NO: 14556 - DNA, 260 bp, Unknown
  Description of Unknown: LeftRegion for integrase B1557 sequence
gcgcccgcgtcccccggctctattgatattgaggcagaggtcgcctattaccgttcccagctggaggaacagaaaaaagcggcggacggatcatctgcttccgctgggcacagctccagcggcacaaaaatggcatgacaaataaaaagagccgcccgtaaaaaggcggctcttgaaataatcacaaatggagggattttatggcagtgtttgctcaggctgtgcggccggactttaacaacgatgtggccgacgtcgtg

SEQ ID NO: 14557 - DNA, 260 bp, Unknown; identical to SEQ ID NO: 13308
  Description of Unknown: LeftRegion for integrase B1558 sequence

SEQ ID NO: 14558 - DNA, 260 bp, Unknown
  Description of Unknown: LeftRegion for integrase B1559 sequence
gcataatgggcggcgaccgtattcaggcaaccatggtatttgaaaagctgggctgataaactagtatttgcaaatgccagccatatttttatggctggcatttgcttttcacaaggggaaagagcttgaccgccgcaaagaacggctgcatatggcgtaaaaagccctgccgggaaatccggcaggcagggagtaatatcatgtctgctacaattccatctcttatgcaagccccgcgggctttcggctactgccgtaaa

SEQ ID NO: 14559 - DNA, 260 bp, Unknown
  Description of Unknown: LeftRegion for integrase B1560 sequence
tgcagcaacaagaaatatcattacaataaaataaaaaaccgcccctgcgccaacaggaacggtctttaaggtacatccgaagatatacactatactttggtcggtaatattgtatcatcttcggacagctatcgcaagcagaacactcgttctttgctggctgttatttttatactcatttttaaggaggatgatattttatgtcaggaaaagataaaatcgtagcattatacgtccgtgtatcaaccgggtatcaggtg

SEQ ID NO: 14560 - DNA, 260 bp, Unknown; identical to SEQ ID NO: 13821
  Description of Unknown: LeftRegion for integrase B1561 sequence

SEQ ID NO: 14561 - DNA, 260 bp, Unknown
  Description of Unknown: LeftRegion for integrase B1562 sequence
gcaccagattctggcagctgtggactaccatggccgcgccagtgaccagtgaataacttgatgccatattatactacggattatcagaatccgcaatcggtttcgttttgacgcacgcatcggcgtgcgcatggccgcccgctctcctgctacaatgagcatagatacatctgccggtctccgagaggaggcagagctctatgccaagagcacagaaagcggcaatatactgccgcgtgtccacgctgcaccaagtggac

SEQ ID NO: 14562 - DNA, 260 bp, Unknown
  Description of Unknown: LeftRegion for integrase B1563 sequence
aagacggatggattgtaaaaacagaattataaagttgcgtgaaagcacaggactgaatcggaaagatttttgcaagctcgtccatattccttaccggactatgactgaatgggaattggacaaccgccatgcaccggattatgtgctgtggcttttggagtattatatccgcaacgagggacttatggtaaaaggaaggaatgagggaggtggagattctgaaaaagaaacaacttaaatgctatctttatacaagagtg

SEQ ID NO: 14563 - DNA, 260 bp, Unknown
  Description of Unknown: LeftRegion for integrase B1564 sequence
gtgaattaggagggatgtcatgtgatcgataagatagtcatgctgattataaacaagagattgtatgatgaaggtataataagtcgagaagtatatacaaaaatcatcacgcaaataaataaatgttaaaaagcattgagcgaaatcattgtatggagtataatataaatggtttcgctcctttttgaaggagaatcgaaatgaacatataccatacaagagaaaggctaagaacccgttctatttatgatttgaattta

SEQ ID NO: 14564 - DNA, 260 bp, Unknown
  Description of Unknown: LeftRegion for integrase B1565 sequence
atcccgaggctatcggcgtatttaccaccaaaggaaagcagctcggaaacgtaaatgcagagttagcaagcgatttgatacataaatatcctaacaacaaaatgaaagttacaatttcagatataacaggcggcggagacaagaattacggttgtaatcttcacgtcgttatctacacggcataattaaggaggcggacaatggcaagagccgcaaagcaagacaataattcggaaataattgacggcgtgatatatgcc

SEQ ID NO: 14565 - DNA, 260 bp, Unknown
  Description of Unknown: LeftRegion for integrase B1566 sequence
gctgacacattctcagcgggaacgctgtttggtcgagcttgaaaagcaatatagtagggagcaaaaaagcagacgccgagcataacgcttggcgtttttacatagccgagtaaaaaaacaaatttgcacattcgacaccgcactctcttttttctataattaaatacagtaacaatgtttactgagaaaggagcttcgctatgataaatagatatgaacgcctaaaccaagagctgaagatggttgaaacgaaaagaaag

SEQ ID NO: 14566 - DNA, 260 bp, Unknown
  Description of Unknown: LeftRegion for integrase B1567 sequence
tcaaaatgaaaattggtggaacggtatatgagatttcgactcattttgatcccgaaggtagccagtgtgtattgcaacaattccgtgacctgatactttcagaggacttgcttgaaaatcgcataattgcagaaaatgcaaaggcacggtaagataattatgcctttgcaatgcccggttgtcggaaaggagatatgacaatggcaacagcaaactatatcaaagggcagaacgaaaccaaaattacggctctctactgc

SEQ ID NO: 14567 - DNA, 260 bp, Unknown
  Description of Unknown: LeftRegion for integrase B1568 sequence
aagacggatggattgtaaaaacagaattattaagttgcgtgaaagcacaggactgaaccggaaagatttttgcaagctcgtccatattccttaccggactatgaccgagtgggaattggacaaccgccatgcaccggattatgtgctgtggcttttggagtattatatccgcaacgagggacttatggtaaaaggaaggaatgagggaggtggagattctgaaaaagaaacaacttaaatgctatctttatacaagagtg

SEQ ID NO: 14568 - DNA, 260 bp, Unknown
  Description of Unknown: LeftRegion for integrase B1569 sequence
gctgacacattctcagcgggaacgctgtttggtcgagcttgaaaagcaatatagtagggagcaaaaaagcagacgccgagcataacgcttggcgtttttacatagccgagtaaaaaaacaaatttgcacattcgacaccgcactctcttttttctataattaaatacagtaacaaagtttactgagaaaggagcttcgctatgataaatagatatgaacgcctaaaccaagagctgaagatggttgaaacgaaaagaaag

SEQ ID NO: 14569 - DNA, 260 bp, Unknown
  Description of Unknown: LeftRegion for integrase B1570 sequence
gaattcaaaataactaaaactaaagaaattaataatattaacttataaaaaaaggataatgcgtattgttttgcggacaccacacattatccagagcgtaaacactattgaaagtgattacttaattattatatattaaagtaccttcattttcaatagtaaattaaaaatttattaaagaaaatggaggtttttttactatggaaaaaaagcaaaaatcagctttatatgttagggtgtctactacccaccaaattgat

SEQ ID NO: 14570 - DNA, 260 bp, Unknown
  Description of Unknown: LeftRegion for integrase B1571 sequence
gcaaggtcagtgtttccgaagcgtctgaattggaagaacgcttactccgttatttttcattttgtgatgcagaaggaaagctgcgtattatccaatgcgctatgaatgaatttgacagaacagcaaaagaaaaaacagactctacggaaaagtctgctatcggataaagttattgacctgagtgagtggagaaagacattatgaaaagcatgaaatttccgattgacctctctatgctgactgaagaagaaatagaccaa

SEQ ID NO: 14571 - DNA, 260 bp, Unknown; identical to SEQ ID NO: 13129
  Description of Unknown: LeftRegion for integrase B1572 sequence

SEQ ID NO: 14572 - DNA, 260 bp, Unknown
  Description of Unknown: LeftRegion for integrase B1573 sequence
ttcaaacatactagccctcctcacgcgctttactttttataattttatgctatctcactttacttattttgtcaagtgcgaatgcattttttctataaaaagtaaagtgatggtgcacgcatcggcgtgcgcatggccgcccgcggctctgctacaatgagcatagatacatctgccggtctccgagaggaggcagctctatgccaagagcacagaaggcggcaatctactgccgcgtgtccacgcttcaccaggtggac

SEQ ID NO: 14573 - DNA, 260 bp, Unknown; identical to SEQ ID NO: 14569
  Description of Unknown: LeftRegion for integrase B1574 sequence

SEQ ID NO: 14574 - DNA, 260 bp, Unknown
  Description of Unknown: LeftRegion for integrase B1575 sequence
gcgccggattctggcagctgtggactaccatggccgcgccagtgaccaggagtaacttgatgctatattatactacggattctcagaatccgcaatcggtttcgcttttgacgcacgcatcggcgtgcgcatggccgcccgcgctcctgctacaatgagcatagatacatctgccaatctccgagaggaggcagagctctatgccaagagcacagaaagcggcaatctactgccgcgtgtccacgcttcaccaggtggac

SEQ ID NO: 14575 - DNA, 260 bp, Unknown; identical to SEQ ID NO: 14569
  Description of Unknown: LeftRegion for integrase B1576 sequence

SEQ ID NO: 14576 - DNA, 260 bp, Unknown
  Description of Unknown: LeftRegion for integrase B1577 sequence
atccctacaagcgacgaaacggttttggtggagagtttatccgcccaactgcttatcggcttgctacgcgcggaaaatgggcatttcctgctgtttcagagcgtgtccgctccgccgctcgacatttcggacgacaaaaagtataaaattgtggctgaattagtctacacaatcagaaaatacggaaggagataaccaaaatggaagttataaagtatgttgttgcttatatgagatattcttcggaaggtcaaagagac

SEQ ID NO: 14577 - DNA, 260 bp, Unknown
  Description of Unknown: LeftRegion for integrase B1578 sequence
gacacacctcctgaaacagatactcttatggttgtcattgttgatgacgaagaaggatttgttaagaaaatcagcattgatgaagatactgtgacccttcgctcttttaacccacactatcctccccgtgtttttggcggtgttgaaattggacgattgcgctttgtcggtagagtcatggagttaaaaaggagatttgcatgaaaaaatttccaatcgacctctcctgtctgacagaggaagaaatctctcaatttcag

SEQ ID NO: 14578 - DNA, 260 bp, Unknown
  Description of Unknown: LeftRegion for integrase B1579 sequence
tcaaaatgaaaattggtggaacggtatatgagatttcgactcattttgatcccgaaggtagccggtgtgtattgcagcaattctgtgacctgatactttcagaggacttgcttgaaaatcgcataattgcagaaagcgcagaggcacggtaagataatcgtgcctttgcaatgcccggttgtcggaaaggagatatgacaatggcaacagcaaactatattaaagggcaaaacgaagccaaaattacggctctttactgc

SEQ ID NO: 14579 - DNA, 260 bp, Unknown; identical to SEQ ID NO: 13002
  Description of Unknown: LeftRegion for integrase B1580 sequence

SEQ ID NO: 14580 - DNA, 260 bp, Unknown; identical to SEQ ID NO: 13476
  Description of Unknown: LeftRegion for integrase B1581 sequence

SEQ ID NO: 14581 - DNA, 260 bp, Unknown
  Description of Unknown: LeftRegion for integrase B1582 sequence
agaacgattcgtatgaatttaatatcctcacgcccttccgatgttctattttcattataccatctatccaggcgatcatccatagatgaaaccattttcaaaaagcagaaacgcacgcatcggcgtgcgcatggccgcccgcgctcctgctacaatgagcatagatacatctgccagtctccgagaggaggcagagctctatgccaagagcacagaaagcggcaatctactgccgcgtgtccacgctgcatcaggtggac

SEQ ID NO: 14582 - DNA, 260 bp, Unknown; identical to SEQ ID NO: 13889
  Description of Unknown: LeftRegion for integrase B1583 sequence

SEQ ID NO: 14583 - DNA, 260 bp, Unknown
  Description of Unknown: LeftRegion for integrase B1584 sequence
cccgaggctatcggcgtatttaccaccaaaggaaagcagctcggaaacgtaaatgcagagttagcaagcgatttgatacataaatatcctaacaacaaaatgaaagttacaatttcagatataacaggcggcggagacaagaattacggttgtaatcttcacgtcgttatctacaaggcataattaaggaggcgggcaaaatggcaagagccgcaaagcaagacagcaattcggaaataattgacggcgtgatatatgcc

SEQ ID NO: 14584 - DNA, 260 bp, Unknown
  Description of Unknown: LeftRegion for integrase B1585 sequence
ggaatgttttaatttatacatttcaaaatattccagttgataataaaaagccccggtgctaccaacaccgagaccttttgataaatactatgcagtgctgagcacgtacaataattcatcggcaatgatattgtaccataaattttcagcaccgtataggtgtattttttatactcatttttacgggaaggacgatatttatggatgagaaaatagtagcactatatgtccgtgtaagtactggatatcaggtcgataag

SEQ ID NO: 14585 - DNA, 260 bp, Unknown
  Description of Unknown: LeftRegion for integrase B1586 sequence
aatgtctggatgatctaatgcctacgcaaacaagttaataatataaaaagccccggtgctaccaacaccgagaccttttgataaatactatacagtgctgagcacgtacaataattcatcggcaatgatattgtaccataaattttcagcaccgtataggtgtattttttatactcatttttacggaaaggatgatatttatggacgagaaaatagtagcattgtatgtccgcgtaagtactggttatcaggtcgacaag

SEQ ID NO: 14586 - DNA, 260 bp, Unknown
  Description of Unknown: LeftRegion for integrase B1587 sequence
atatggattgtgcgggatgtgctctctgctgaccattcttctgatgacgtacatcattctggactatcagcatccgaaaatcggcttgattcgtgccgacggtgttgcaccgattgtttatatctcggcgtgtggagttgcattcgttatcctgtttatcggtcgcaccatggtaaatcggcggttacaaaggaaagaaaatggaaggaaagccggacatgaacataattcccattgacctttcagcactgaccgacgca

SEQ ID NO: 14587 - DNA, 260 bp, Unknown
  Description of Unknown: LeftRegion for integrase B1588 sequence
gcctgcgggcgggagattcgagtcatctccgtgtttccccggcatggcagcgaaaccgcggaggacaagctgaaagctctggcggaactggactttcagcatcggaagctgtgtgcgtaaagtgctggacatttcaggccgttcggggtagtgtggtgtcgcaatgctctgaacggtttggcaaagaaaaggagggctgtatgaatcagtcaaaccaaatcaggaaaaccgctctttactgccgtctcagccaggacgat

SEQ ID NO: 14588 - DNA, 260 bp, Unknown
  Description of Unknown: LeftRegion for integrase B1589 sequence
cgcagaaattgagagcggctgtattgccgtggtcgtgatagacggtacagaagggtttttaaaacaggtcgagttcggtgaaaattccacctcgcttcactccttcaacccttactatcctgatatggagttcgtaggtgccgaccagaaacgcttgcactttatcggtcgtgtccgggaaatgaagcggaggttctgatatgcgtaaaaagtttaatatcgacctctctatgctaaccccggaagaacagcagcagttt

SEQ ID NO: 14589 - DNA, 260 bp, Unknown
  Description of Unknown: LeftRegion for integrase B1590 sequence
aaggagaaaagaacgctgtccgtcggactgtcagaaggatgtccgtcggaaattggtatattgtaatatttagttttatagttatttttgcatttccgtttgtttgattatactttaatatatttgtccgtcggactgtcagaaggacatccgcaggacagtcagaaggatgtcccacggacagcatcggagggaatagcatggagtcgagtaaggcaaagaaagcagtcctttacgtcagagtatcaacgcagcaccaa

SEQ ID NO: 14590 - DNA, 260 bp, Unknown
  Description of Unknown: LeftRegion for integrase B1591 sequence
cgcagaaattgagagcggctgtattgccgtggtcgtggtagacggtacagaagggtttttaaaacaggtcgagttcggtgagaactccacctcgcttcactcgttcaatccgtattaccccgacatggagtttgtagatgccgaccagaaacgtttgcactttatcggccgcgtccgggaaatgaagcggaggttttgatatgcgcaaaaagtttaatatcgacctctctatgctaaccccggaagaacagcagcagttt

SEQ ID NO: 14591 - DNA, 260 bp, Unknown
  Description of Unknown: LeftRegion for integrase B1592 sequence
aaatgaaaagttaattcataatacagaactgaaaaacgaacagttgaaagatgaaaccgaaatattcaattcttttatcaatgttatggtgcagatagttgaaaaatacggaaagactgttttgcaggaattagattgtgctgcgtaggttacgcagccttacatatcacatttccctataaatttatggaggtggtacgatgaacagagaaggaaagaaatgtgtcttatatccgagagtaagtactgaaatgcaggtg

SEQ ID NO: 14592 - DNA, 260 bp, Unknown
  Description of Unknown: LeftRegion for integrase B1593 sequence
aaggagaaaagaacgctgtccgtcggactgtcagaaggatgtccgtcggaaattggtatattgtaatatttagttttatagttatttttgcatttccgtttgtttgattatactttaatatatttgtccgtcggattgtcagaaggacatccgcaggacagtcagaaggatgtcccacggacagcatcggagggaatagcatggagtcgagtaaggcaaagaaagcagtcctttacgtcagagtatcaacgcagcaccaa

SEQ ID NO: 14593 - DNA, 260 bp, Unknown; identical to SEQ ID NO: 13138
  Description of Unknown: LeftRegion for integrase B1594 sequence

SEQ ID NO: 14594 - DNA, 260 bp, Unknown; identical to SEQ ID NO: 14585
  Description of Unknown: LeftRegion for integrase B1595 sequence

SEQ ID NO: 14595 - DNA, 260 bp, Unknown
  Description of Unknown: LeftRegion for integrase B1596 sequence
ataatgatatgctaaattgtagcatggaattatcactattaaataatttgtttagagaaaacttaataacagaagcagaatatcaagaaataaaaagaaaaatcttaaaagactacaaacttttgtaatatcaatttactttttgttgaaaaaatgatataaaatatttaagttttatctctaggcggaatggaggaaagatggaaattcaagtcatagagaaaacaaacggaagaataaatagagtaacaggcactaca

SEQ ID NO: 14596 - DNA, 260 bp, Unknown
  Description of Unknown: LeftRegion for integrase B1597 sequence
gatacacctcccgaaacagatactcttatggttgtcattgttgatgacgaagaaggatttgttaagaaaatcagtattgatgaagatactgtgacccttcgttcttttaacccacactatcctccccgtgtttttggcggtgttgaaattggacgattgcgctttgttggtagagtcatggagctaaaaaggagatttgcatgaaaaaatttccaatcgacctctcctgtctgacagaggaagaaatctctcaatttcaa

SEQ ID NO: 14597 - DNA, 260 bp, Unknown
  Description of Unknown: LeftRegion for integrase B1598 sequence
ggaaagcaccggcatgaaccgcaaggaattttgtaaatattttcggattccctatcggactgtgacagagtgggaactggataaccgccatgcgccggaatatgtactccgtttgttggagtattacattcagaatgaaggtctggcgaagaagaaagtaacggatgaatgttcagagctggaagaaaggagcggcctgcatgaagaaaactaaaacaaaatgttatctctacacacgggtatctacatccatgcaggtg

SEQ ID NO: 14598 - DNA, 260 bp, Unknown
  Description of Unknown: LeftRegion for integrase B1599 sequence
cgtgaaaaaagttcatcttaccgagtctcaagaaaaacaatttgaacacatgcttatggtctctattttgaaaacattaaaatcagaagggcttcttactgatgtacaattgatgaacgccatagcaaaaatagaaagcgaaaattcttgcccgccagataagaacgcagtataatacagaaaaaagggaggaattttaaatgaaaagcgcttgtccttctcatccagaaagttatgtagaaaacccaagcttatccaaa

SEQ ID NO: 14599 - DNA, 260 bp, Unknown
  Description of Unknown: LeftRegion for integrase B1600 sequence
catcttctccgcagaaaagacagggcgttttggaacgagttgaacctaaacgtgcaactctacttatataaatggctcccagataggatatttcggaaatgaatttaactttttgaccgttgaaagtgtggaaagatttattttccccagaacttgcaacggcttgcaacaaacttaaaactacttgaaaggtggtatttatgcctcgcaaaaagaaactgcaagaggtgggcggcctgcggctggtggcgtactatcgc

SEQ ID NO: 14600 - DNA, 260 bp, Unknown; identical to SEQ ID NO: 13530
  Description of Unknown: LeftRegion for integrase B1601 sequence

SEQ ID NO: 14601 - DNA, 260 bp, Unknown
  Description of Unknown: LeftRegion for integrase B1602 sequence
aaggaacaaagaacgctgtccgtcggactgtcagaaggatgtccgtcggaaattagtatattgtaatatttagttttataggtatttttgtatttccgtttgtttgattatattttaatatatttgtccgtcggactgtcagaaggacatccgcaggacagtcagaaggatgtcccacggacagcatcggagggaatagcatggagccgagtaaggcaaagaaagaagttctttacgtcagagtgtcaacgcagcaccaa

SEQ ID NO: 14602 - DNA, 260 bp, Unknown; identical to SEQ ID NO: 14046
  Description of Unknown: LeftRegion for integrase B1603 sequence

SEQ ID NO: 14603 - DNA, 260 bp, Unknown; identical to SEQ ID NO: 14589
  Description of Unknown: LeftRegion for integrase B1604 sequence

SEQ ID NO: 14604 - DNA, 260 bp, Unknown; identical to SEQ ID NO: 13535
  Description of Unknown: LeftRegion for integrase B1605 sequence

SEQ ID NO: 14605 - DNA, 260 bp, Unknown
  Description of Unknown: LeftRegion for integrase B1606 sequence
cggaaaatgaatatattcgggcaaagaataggattatgagttcatatcacattctggagtcggaatatttcaagaccggtacaggaaaaagggttgcttagacaaccgcttgtatacgttcgttcatattttcatttttaagtaagcttggtgctaagaggaacacgaagcaaagatttcaatttaaggaggattttattatggcagaagtagaagtaattaaggcagtggatgggccaattcttcgtaagagggattat

SEQ ID NO: 14606 - DNA, 260 bp, Unknown
  Description of Unknown: LeftRegion for integrase B1607 sequence
aaggagaaaagaacgctgtccgtcggactgtcagaaggatgtccgtcggaaattggtatattgtaatatttagttttatagttatttttgcatttccgtttgtttgattatactttaatatatttgtccgtcggactgtcagaaggacatccgcaggacagtcagaaggatgtccaacggacagcatcggagggaatagcatggagtcgagtaaggcaaagaaagcagtcctttacgtcagagtatcaacgcagcaccaa

SEQ ID NO: 14607 - DNA, 260 bp, Unknown
  Description of Unknown: LeftRegion for integrase B1608 sequence
atgacctcagaacagaacattaaattcagagcattaaaattgattgaacaattatatattgataagcagatagacgaaaaaatatatcgtaaagccatagaagaaaataaaaaggatattgacacaacacaatttactttatataatattactaacccattatacaaaaatgggaaatttaagtgggagtgtattaattaatgagagtagtgtattatggtagagtttcatcagaaaaagatgagcaaattaatgcctta

SEQ ID NO: 14608 - DNA, 260 bp, Unknown
  Description of Unknown: LeftRegion for integrase B1609 sequence
gtctatcataccttaccgtaactcatcgttactcttatacgttccccttatatttaatatatataatatataagacagttagagagaataagaggggtctggggagagaaggagaaaagaacgctgtccgtcggactgtcagaaggacatccgcaggacagtcagaaggatgccccacggacagcatcggagggaatagtatggagccaagtaaggcaaagaaagcagttctttacgtcagagtgtcaacgcagcaccaa

SEQ ID NO: 14609 - DNA, 260 bp, Unknown; identical to SEQ ID NO: 14587
  Description of Unknown: LeftRegion for integrase B1610 sequence

SEQ ID NO: 14610 - DNA, 260 bp, Unknown
  Description of Unknown: LeftRegion for integrase B1611 sequence
tctggagtcggaatatttcaaatccaatgcaggaaataaggttgcttagcaaccataatcagtattggggagatggcggagtctgtatatgcatgaaaatgtatatgcaggctccttttgtatgttcgttcatattttcattttttagtatgcttggtatgaaggataaaccaagcacgggtttaagaaggaggatttttatggcagaagtagaagttatcaaggcggtggagggtcctatactccgcaagagagattat

SEQ ID NO: 14611 - DNA, 260 bp, Unknown
  Description of Unknown: LeftRegion for integrase B1612 sequence
tgagcgaagtgacgatccggtgaaagcaatcgcttgattatgatatagaaagacgaggtaaaaaataatggaagataaagtaattcaacagtcgttcacatttaaaaattcagatagaatgacagcacaggcaaagaaaacagccacaaatattcagaaaagaaagtggcaggtaaaagaaatggaggaagattatgagcatgagagaagtacaggtcttacaggcaacaaaaacggcaccaaacagccgtggaagaaat

SEQ ID NO: 14612 - DNA, 260 bp, Unknown
  Description of Unknown: LeftRegion for integrase B1613 sequence
accgggcttttaatcgtgtgcagtgacccgatgcaaaagaaaatcgacagagctgccgccctaaatattccaatcatttcagagcagcaatggtttgaacttatgccggaactagaagccctcggaatgtggaatggaaagccacttccgtttgcggatgacaatggcatctaccgttttgatgtgggtggtgatggataatggcaaaaaagaagaagcccgccgggggcaatgccatcatctatgcccgctactcatcc

SEQ ID NO: 14613 - DNA, 260 bp, Unknown
  Description of Unknown: LeftRegion for integrase B1614 sequence
ggctactagctgtaaaatgctggtagccctcattttttagttgtatctagtatataaggggtgtataatagataggaactgaaaacagcctcataaagccctctattttatcgagagtaaagaagtctacacctaatatataaaagtggctgtatgaggcacacaggagctcacaggactattacaggagggtaaacaggatggcatacaggaaaataacagatataaaagatactattggtatgagagcggtattttat

SEQ ID NO: 14614 - DNA, 260 bp, Unknown
  Description of Unknown: LeftRegion for integrase B1615 sequence
ttgattaaagtaacaaaaaagtcccctgctaccaacagaggaccaatgctgacaaaccaatgctaccaacaaaggattgtcaaagtaccatacaaggcagatgccctgatataatacaccaacaaagatattatatcacttaagcacctgttttgtaaaggtgttatttttatacccaaaatacaggagagtgatataatatgaaaaataaaatagcagtatatataagagtatcgacaacacatcagattgataaagaa

SEQ ID NO: 14615 - DNA, 260 bp, Unknown
  Description of Unknown: LeftRegion for integrase B1616 sequence
taatatttccatggaggtggtatatatgaatttcaaaatactacaatggaaaatattactattaaaaataaaaatatgcggaaaatttcttaatacactcaagcaaatactattaaagcatgacatacgatttataagacttctctactctgctgcttgtaaaaagctactagatatatatgacgaggtacttgagaaagatgaaagcagctctctatattagagttagtactacttatcagattgataaggactcatta

SEQ ID NO: 14616 - DNA, 260 bp, Unknown
  Description of Unknown: LeftRegion for integrase B1617 sequence
caggtgcggaatcaaaaaactttgccattccatttgctacaaaactggataaaatgttaatcagtaaatttcacaagctccccgaagaaattcagcaggaagttttaagttatattgactttaaaatagctcaaactattgatgccaccagtcgcaaggtatcattataaatgttgattttaagaagggagtgagaatttatgactaatccgcgtgttgccatttatatccgtgtttcgacaacacatcaggttgataaa

SEQ ID NO: 14617 - DNA, 260 bp, Unknown
  Description of Unknown: LeftRegion for integrase B1618 sequence
taattaaagcaacaaaaaagtcccctgctactaacagaggacctacactgacaatccaatgctaccaacaaaggattgtcaaagtaccatacaaggcagatgccctgatataataccaaccacaaagatattatatcacttaagcacctgttttgtaaaggtgttatttttatacccaaaatacaggagagtgatataatatgaaaaataaaatagcagtatatataagagtatcgacaacacatcagattgataaagaa

SEQ ID NO: 14618 - DNA, 260 bp, Unknown
  Description of Unknown: LeftRegion for integrase B1619 sequence
cgcagaaattgagagcggctgtattgccgtggtcgtggtagacggcacagaagggtttttaaaacaagtcgagttcggtgagaactccacctcgcttcactccttcaacccttactatcctgatatggagttcgtaggtgccgaccagaaacgtttgcactttatcggtcgcgtccgggaaatgaagcggaggttctgatatgcgtaaaaagtttaatatcgacctctccatgttaaccccggaggaacagcagcagttt

SEQ ID NO: 14619 - DNA, 260 bp, Unknown
  Description of Unknown: LeftRegion for integrase B1620 sequence
caggtgcggaatccaaaaactttgccattccatttgctacaaaactggataaaatgttaatcagtaaatttcacaagctccccgaagaaattcagcaggaagttttaagttatatcgactttaaaatagctcaaactattgatgccaccagtcgcaaggtatcattataaatgttgatctcaaaagaggtgtaagaatccatgactgatccaagggtagctatctatatccgtgtttcgacaacacatcaaattgataaa

SEQ ID NO: 14620 - DNA, 260 bp, Unknown
  Description of Unknown: LeftRegion for integrase B1621 sequence
cgcagaaattgagagcggctgtattgccgtggtcgtggtagacggcacagaaggatttttaaaacaggtcgagttcggtgaaaactccacctcgcttcactccttcaacccttactatcctgatatggagttcgtaggtgccgaccagaaacgcttgcactttatcggccgcgtccgggaaatgaagcggaggttctgatatgcgtaaaaagtttaatatcgacctctccatgctaaccccggaggaacagcagcaattt

SEQ ID NO: 14621 - DNA, 260 bp, Unknown; identical to SEQ ID NO: 13018
  Description of Unknown: LeftRegion for integrase B1622 sequence

SEQ ID NO: 14622 - DNA, 260 bp, Unknown
  Description of Unknown: LeftRegion for integrase B1623 sequence
gtcggtgggaagtgctttcttgtgacctccgtattccccggcagcgcatcggcaacgcccacagacaagctcctgcaactcatcgacacgaagttagagcgggagcatcatgagcagtaaaattccggtagacttgcgagagccggtgcggtatacttcgtgttaccgtaccggcctgccccaacgaaaaggaggtaactatggcaggtcaagaaaatcagcaatacaccgtactctacgggcggctcagtcaggaggac

SEQ ID NO: 14623 - DNA, 260 bp, Unknown
  Description of Unknown: LeftRegion for integrase B1624 sequence
gtcaggcagtaatctcagaagggtcactttacgaagataagctattgcgatacttctctttgtgtgacgcggagggtaaacttcgtgttattcagtgcgccatgaatgaattcgatagaacccagaaagaaaaaacagaagttgaataaccgattgctgtcggctaaagttatcaaccttattgaatggagaaatatactatgaaactacctatcgacctctcctgtctgacggaagaagaaatctctcaatttcaggaa

SEQ ID NO: 14624 - DNA, 260 bp, Unknown
  Description of Unknown: LeftRegion for integrase B1625 sequence
cacggtcagatacagcggggataaaaatcccccggcgctccaggccatcaaggacgtgcttatcaatagcgtttccactcaaaaagactgattttttgcatattttggtgaaatatgagataataatggtgtagatggcaccttgaaaaataaatagaactggccgccatatagcaccgccagaacaggaggtaatctatatggcggaacaaatcatccaacttgcgaaaaatgtcttaaaacgagtggtatgtctttac

SEQ ID NO: 14625 - DNA, 260 bp, Unknown
  Description of Unknown: LeftRegion for integrase B1626 sequence
cgtaaagagcttttgtctgataaagaatatgaaaaaataagacgtaaggtgatggataattatctggttgcaggagaacgaagtgatgatttaacgaaagtaattgtgtgattagaaatatgccaaataaaaggatttgacattcgttaacatttagtaattcagatagaatgacagaaaacaaagaaaggattatgggtatgaacgaagtacaagttttacatgcaactaaaactgctccaaatagccggggtagaagt

SEQ ID NO: 14626 - DNA, 260 bp, Unknown
  Description of Unknown: LeftRegion for integrase B1627 sequence
caaattaattaaataaaaaagtcccctgctaccaacagaggacccacactgacaatccaatgctaccaacaaaggattgtcaaagtaccatacaaggcagatgccctgatataatacaccaacaaagatattatatcacttaagcacctgttttgtaaaggtgttatttttatacccaaaatacaggagagtgatataatatgaaaaacaaaatagcagtatatataagagtatcaacaacacatcagattgataaagaa

SEQ ID NO: 14627 - DNA, 260 bp, Unknown
  Description of Unknown: LeftRegion for integrase B1628 sequence
cgcagaaattgagagcggctgtattgccgtggtcgtagtagacggtacagaagggtttttaaaacaagtcgagttcggtgagaactctacttcgcttcactccttcaacccttactatcctgatatggagttcgtaggtgccgaccagaaacgtttgcactttatcggtcgcgtccgggaaatgaagcggaggttttgatatgcgtcagaagtttaaaatcgacctctctatgctgaccccggaagagcagcaacagttt

SEQ ID NO: 14628 - DNA, 260 bp, Unknown
  Description of Unknown: LeftRegion for integrase B1629 sequence
cattcacaaagatgacgaggctgccgtcgatggcagcctagctgagtgcgcaataaagcacggtcttttactgtcacgatatacggggacaaaaatgattttggagttggttgactatctatctccgcaagagcagaagcgattccgcgcagatttgaaaaccatccgaaaagccaagaaagaacaagggggtgcgaatattggcacgaaccgcgaccaaacacccggcaaagccgaagcgcggtaagaaactcgaagcg

SEQ ID NO: 14629 - DNA, 260 bp, Unknown
  Description of Unknown: LeftRegion for integrase B1630 sequence
ctcgcgaccctcttccagtttgttcccgccctctgctccatcgcctgggttgtcgtccttttctttgtcattaaggcccctcagacgtccctgtccgttgtctattacattctcttcgccgtcctcttcctgccgaatctggtcagcgctttccgcaaatagtaatttccattccctgtagctgtaaggatgattgacctatgaccacactccccattgacctctccgccctcaccgccgaggagcggaaacagtttgac

SEQ ID NO: 14630 - DNA, 260 bp, Unknown
  Description of Unknown: LeftRegion for integrase B1631 sequence
aaggcaacagaggtaagctcccatatgctgacaactacgataggtacatatcatgtcacattagaatttagtcctgataataacagcaaagcagttgaagaaatcagaagcacactgaaagaaaaatatataaaaggggctatacaggaggataaagaggcgttacaatctgactccctagtgggaaaggagagagaagcatgaaaagagtaaattgtttatacagagtttcatctaaacagcagttgcatggggatgac

SEQ ID NO: 14631 - DNA, 260 bp, Unknown
  Description of Unknown: LeftRegion for integrase B1632 sequence
acggataaaaacaagataagggcaagaaaaaacgaaacgctgtatatcgtaagcactgaatcgacgcaatgggcgcgagaatcagcatacgagatattagagcgtttggtaatgaaaaaatttacaagcctgacggaagaacggcttggatatggtaagttacgaacttgctgtttggaatctgacggaggtaaacagatatgttagaattacaaacggcaaataaaaataaaagaacaaaaaacggaggtgacggaata

SEQ ID NO: 14632 - DNA, 260 bp, Unknown
  Description of Unknown: LeftRegion for integrase B1633 sequence
gtcggtgggaagtgctttcttgtgacctccgtattccccggcggcgcatcggcaacacccacggacaagctcctgcagcttatcgacacgaagttagagcgggagcatcatgagcagtaaaattccggtagacttgcgagagccggtgcggtatacttcgtgttaccgtaccggcctgccccaacgaaaaggaggtaactatggcaggtcaagaaaatcagcaatacaccgtactctacgggcggctcagtcaggaggac

SEQ ID NO: 14633 - DNA, 260 bp, Unknown; identical to SEQ ID NO: 13029
  Description of Unknown: LeftRegion for integrase B1634 sequence

SEQ ID NO: 14634 - DNA, 260 bp, Unknown
  Description of Unknown: LeftRegion for integrase B1635 sequence
taaaaaaagaagttcaaaaaaagataataaattatttatatcaaaataacgatattactattagtgagtatgaggcattaatttcaaagtgtgatgaaaagataaataaattaaatgaacaattagaaaaaaataaagaaaaatattcttatccaatgaaagttgatataagaatataaaaataaatggaggtgatttaagtggatttatatgctataagaaatatgctaggtcaaggaaaaagtatttatgatttacca

SEQ ID NO: 14635 - DNA, 260 bp, Unknown
  Description of Unknown: LeftRegion for integrase B1636 sequence
gtcggtgggaagtgcttccttgtgacctccgtattccccggcggcgcatcggcaacacccacagacaagctcctgcagctcatcgacacgaagttagagcgggagcatcatgagcagtaaaattccggtagacttgcgagagccggtgcggtatacttcgtgttaccgtaccggcctgccccaacgaaaaggaggtaactatggcaggtcaagaaaatcagcaatacaccgtactctacgggcggctcagtcaggaggac

SEQ ID NO: 14636 - DNA, 260 bp, Unknown
  Description of Unknown: LeftRegion for integrase B1637 sequence
ttatgaaaataggtaatacaacttacgaagtaaacacacattttaatcctaatggcagagaaaatgtacttcaacaatttgaatatttacttacagaattgaaaatagcataagtttgcacaatcgacactgcggcattgcaaatgtaaaatacaattacattgcaatgccctgttgtcacagaagggagcaaatagtttatggcaacaaataaaaatatacaagggcaagaagtaaaaatcaccgctctgtattgccgt

SEQ ID NO: 14637 - DNA, 260 bp, Unknown
  Description of Unknown: LeftRegion for integrase B1638 sequence
caggtgcggaatcaaaaaactttgccattccatttgctacaaaactggataaaatgttaatcagtaaatttcacaagctccccgaagaaattcagcaggaagttttaagttatatcgactttaaaatagctcaaactattgatgccaccagtcgcaaggtatcattataaatgttgatctcaaaagaggtgtaagaatccatgactgatccaagggtagctatctatatccgtgtttcgacaacacatcagatagacaag

SEQ ID NO: 14638 - DNA, 260 bp, Unknown
  Description of Unknown: LeftRegion for integrase B1639 sequence
caggcgcggaatccaaaaactttgccattccatttgctacaaaactggataaaatgttaatcagtaaatttcacaagctccccgaagaaattcagcaggaagttttaagttatattgactttaaaatagctcaaactattgatgccaccagtcgcaaggtatcattataaaaattgattttaagaaggaggtgagaatttatgactagtgcccgtgttgccatttatatccgtgtttcgacaacacatcaggttgataaa

SEQ ID NO: 14639 - DNA, 260 bp, Unknown
  Description of Unknown: LeftRegion for integrase B1640 sequence
aaattaattaaagcaaaaaagtcccctgctaccaacagaggacctacactgacaatccaatgctaccaacaaaggattgtcaaagtaccatacaaggcagatgccctgatataatacaccaacaaagatattatatcacttaagcacctgttttgtaaaggtgttatttttatacccaaaatacaggagagtgatataatatgaaaaataaaatagcagtatatataagagtatcgacaacacatcagattgataaagaa

SEQ ID NO: 14640 - DNA, 260 bp, Unknown
  Description of Unknown: LeftRegion for integrase B1641 sequence
caggcgcggaatccaaaaactttgccattccatttgctacaaaactggataaaatgttaatcagtaaatttcacaagctccccgaagaaattcagcaggaagttttaagttatattgactttaaaatagctcaaactattgatgccaccagtcgcaaggtatcattataaaaattgattttaagaagggggtgagaatttatgactagtgcccgtgttgccatttatatccgtgtttcgacaacacatcaggttgataaa

SEQ ID NO: 14641 - DNA, 260 bp, Unknown
  Description of Unknown: LeftRegion for integrase B1642 sequence
cttgatgggtcgataggtcaatgcctacatctgggatatgcccaaggatgccgttgcattgcgttgccagtgttatcagcagaggacgtacaattgcctgcaagagttcatgttcgtggtgaaataaaagagatatcagacatggacgaattgtattctctcattggatattgaccaagtcaagaatggaggtcgcaagggtggcccgaaagaaagtaaccgaatcggaggggaatgctgtcgcatacgcgcgatacgcc

SEQ ID NO: 14642 - DNA, 260 bp, Unknown
  Description of Unknown: LeftRegion for integrase B1643 sequence
gggctactggctgtaaaatgctggtagccctcattttttagttgtatctagtatataaggggtgtataatagataggaactgaaaacagcctcataaagccatctattttatcgagggtaagaagtctacacctaatatataaaagtggctgtatgaggcacacaggagctcacaggactattacaggagggtaaacaggatggcatacaggaaaataacggatataagagatactattggtatgagagcggtattttat

SEQ ID NO: 14643 - DNA, 260 bp, Unknown
  Description of Unknown: LeftRegion for integrase B1644 sequence
gaataatactattaaaaaagtcccctgctaccaacagaggacctacactgacaatccaatgctaccaacaaaggattgtcaaagtaccatacaaggcagatgccctgatataataccaaccacaaagatattatatcacttaagcacctgttttgtaaaggtgttatttttatactcaaaatacaggagagtgatataatatgaaaaataaaatagcagtatatataagagtatcaacaacacatcagattgataaagaa

SEQ ID NO: 14644 - DNA, 260 bp, Unknown
  Description of Unknown: LeftRegion for integrase B1645 sequence
cgcagaaattgagagcggctgtattgccgtggtcgtggtagacggtacagaagggtttttaaaacaggtcgagttcggtgaggactctacttcgcttcactccttcaacccttactatcctgatatggagttcgtaggtgccgaccagaaacgtttgcactttatcggtcgcgtccgggaaatgaagcggaggttctgatatgcgtaaaaagtttaatatcgacctctccatgctgaccccggaggaacagcagcagttt

SEQ ID NO: 14645 - DNA, 260 bp, Unknown
  Description of Unknown: LeftRegion for integrase B1646 sequence
gttgttctacgatgatcgccaaactgctgatgaagtataaatctatggaaacagaagaagaccaagagggctggatgcaagaaggggcatccagccctcttctttttttactgcagctattgaaaagttttttgtcatcgtttatactgtttgaagtagatgtttattactgacaaaacagaatgaaggaggtaccgtccatggaaaatgcatacatatatacacgtgtttcaactttgatacaggtggacggtttttct

SEQ ID NO: 14646 - DNA, 260 bp, Unknown
  Description of Unknown: LeftRegion for integrase B1647 sequence
agaataatacaattaaaaaagtcccctgctaccaacagaggacccacactgacaatccaatgctaccaacaaaggattgtcaaagtaccatacaaggcagatgccctgatataatacactaacaaagatattatatcacttaagcacctgttttgtaaaggtgttatttttatacccaaaatacaggagagtgatataatatgaaaaacaaaatagcaatatatataagagtatcaacaacacatcagattgataaagaa

SEQ ID NO: 14647 - DNA, 260 bp, Unknown
  Description of Unknown: LeftRegion for integrase B1648 sequence
ctggatcattgacatggttatgatctgttgcaacaaattcaccgacagtaccggcgcggtggttggtctgaaggttgctgagtataccagacagccggatcctgatcttgcagaggcttctctggaggagcagcgggaggcagcggccgagactgccagagcttacggctataccgtaatagagtcaggcgctcaggataatgccgacaggtaaaaacacggctcgaaaatatgccgcaggaggtggctcggataattcc

SEQ ID NO: 14648 - DNA, 260 bp, Unknown
  Description of Unknown: LeftRegion for integrase B1649 sequence
caaaaactattaataaaaaagtcccctgctaccaacagaggacctacactgacaatccaatgctaccaacaaaggattgtcgaagtaccatacaaggcagatgccctgatataatacaccaacaaagatattatatcacttaagcacctgttttgtaaaggtgttatttttatacccaaaatacaggagagtgatataatatgaaaaataaaatagcagtatatataagagtatcaacaacacatcagattgataaagaa

SEQ ID NO: 14649 - DNA, 260 bp, Unknown
  Description of Unknown: LeftRegion for integrase B1650 sequence
cgcagaaattgagagcggctgtattgccgtggtcgtggtagacggcacagaagggtttttaaaacaggtcgagttcggtgaaaactccacctcgcttcactccttcaacccttactatcctgatatggagttcgtaggtgccgaccagaaacgcttgcactttatcggccgcgtccgggaaatgaagcggaggttctgatatgcgtaaaaagtttaatatcgacctctccatgttaaccccggaggaacagcagcagttt

SEQ ID NO: 14650 - DNA, 260 bp, Unknown
  Description of Unknown: LeftRegion for integrase B1651 sequence
ttatgaaaataggcaacacaacttatgaagtcagtacacattttaatcctaacggcagagaaaatgtgcttcaacaatttgaagatttacttacagaattaaagatagcataagtttgcacaatcgacactgcggcattgcaagtgtacaatacctatacattgcaatgccatgttgtcacagaaaggagcaaatagtttatggcaacaaacaaaaatatacaagggcaagaagaaaaaatcaccgctctgtattgccgt

SEQ ID NO: 14651 - DNA, 260 bp, Unknown
  Description of Unknown: LeftRegion for integrase B1652 sequence
atatctcacatatctgccaacaaaggaacagctaaaagcagagattgaaaggcagaaagaaatattttatatgcagcatcctgcattgtctgaaaaagataaagaagatatgaaggaatagtaagacagctaatacaattcagttgttcggaattcccgaacagctgaagggagaattttgacacaggagataacatctgatgaaaaaacagcagaaatgttacatatatacaagagtttccacttccatgcaggtagaa

SEQ ID NO: 14652 - DNA, 260 bp, Unknown; identical to SEQ ID NO: 14644
  Description of Unknown: LeftRegion for integrase B1653 sequence

SEQ ID NO: 14653 - DNA, 260 bp, Unknown
  Description of Unknown: LeftRegion for integrase B1654 sequence
ctggatcatcgacatggttatgatctgttgtaacaaattcaccgacagcaccggcgcggtggtcggtctgaaggttgctgagtataccagacagccggatcttgatcttgcagaggcttctctggaggagcagcgggaggcagcggccgagactgccagagcttacggctataccgtaatagagtcaggcgctcaggataatgccgacaagtaaaaacacggctcgaaaatatgccgcaggaggtagctcggataattcc

SEQ ID NO: 14654 - DNA, 260 bp, Unknown
  Description of Unknown: LeftRegion for integrase B1655 sequence
atttcagttaaataataatacaaaagaagataaaaaaatagaattataaaaaaggataatgtgtattgttttgcggacaccacacattatccagagcgtaatcactattgaaagtgaatacttttttattatatcgtaaagtaacttcattttcaatagtaaatctaaaatttattataagaaaatggaggttttttattatggataaaaagaaaaaatcggctttatatgtaagggtatctactactcatcaaattgat

SEQ ID NO: 14655 - DNA, 260 bp, Unknown
  Description of Unknown: LeftRegion for integrase B1656 sequence
aatatatcagcgaatatatggcccaaaatccgaatcttgaaaaagcgctgaattcccatttgataagtgccgcctcaggctggggcgttttggaagatgattatcaaacatttttccaaaacaggttaaactggttctgcgaggaactgaacaaacgagtgattgttacacaggcggatagaacagcataaggaagttttatgaaaaaagaaaagataaaagtttatacatatacgagagtgtccaccgccatgcagatt

SEQ ID NO: 14656 - DNA, 260 bp, Unknown; identical to SEQ ID NO: 13137
  Description of Unknown: LeftRegion for integrase B1657 sequence

SEQ ID NO: 14657 - DNA, 260 bp, Unknown; identical to SEQ ID NO: 14654
  Description of Unknown: LeftRegion for integrase B1658 sequence

SEQ ID NO: 14658 - DNA, 260 bp, Unknown
  Description of Unknown: LeftRegion for integrase B1659 sequence
ggctactggctgtaaaatgctggtagccctcattttttagttgtatctagtatataaggggtgtataatagataggaactgaaaacagcctcataaagccctctgttttatcgagggtaaagaagtctacacctaatatataaaagtggctgtatgaggcacacaggagctcacaggactattacaggagggtaaacaggatggcatacaggaaaataacggatataaaagatactattggtatgagagctgtattttat

SEQ ID NO: 14659 - DNA, 260 bp, Unknown; identical to SEQ ID NO: 13032
  Description of Unknown: LeftRegion for integrase B1660 sequence

SEQ ID NO: 14660 - DNA, 260 bp, Unknown
  Description of Unknown: LeftRegion for integrase B1661 sequence
acaccacaatagaatattttctaacaggaaaacgccctatatctaatctgactgatatggaaaatcttctattagaagcatacagatcagcagatgtaaaaggacaagctacaatcatccaagtctgcatgaatgaaaaggatgcaaaaggggaaactatcattgcaggataataagcattgaagaatggaggaagaaccatgtacgaagagattaagactgcctgtctatatctgcgatattcaagcagcaaccaaact

SEQ ID NO: 14661 - DNA, 260 bp, Unknown
  Description of Unknown: LeftRegion for integrase B1662 sequence
aagacggatggattgtaaaaacagaattataaagttgcgggaaagcacaggactgaatcggaaagatttttgcaagctcgtccatattccttaccggactatgactgaatgggaattggacaaccgccatgcaccggattatgtgctgtggcttttggagtattatatccgtaacgagggacttatggtaaaaggaaggaatgagggaggtggagattctgaaaaagaaacaacttaaatgctatctttatacaagagtg

SEQ ID NO: 14662 - DNA, 260 bp, Unknown
  Description of Unknown: LeftRegion for integrase B1663 sequence
gatatatcctccgaatggttggaaaactcatacacatatacgccaagaccatataagccttcaaagcgcgccctccaaatggaggctgacatcaaagaaactgctcacaagtacataacaaacgaaaaagccctcctgctgggcgcagaagggcgtaacgggtaacagatatgtcgatagatattaaatggcgggtgccaatggcaaagccggaggtcagcgaactggccgtcgtatacgcccggtattcaagccacagt

SEQ ID NO: 14663 - DNA, 260 bp, Unknown
  Description of Unknown: LeftRegion for integrase B1664 sequence
tagattggaaatagaaaaagaaggagtacagataatattggaatatcctcaacctactgacaaagactatatggttaaacaagagatacaaaagaatttagaaagtatgctcaaggagcaaattaaacaaatatcttaatatatcggagagaactttatctctccgatgtaatttctttacgaaaggaatactaaaaattatgaaagcgaaaatagttagaatgttattaagagtaagttcagaccaacaattagaggct

SEQ ID NO: 14664 - DNA, 260 bp, Unknown
  Description of Unknown: LeftRegion for integrase B1665 sequence
atcgactcaggggatgtggctgtcgtactggtcaatgatggtatcagtacagaagggtttgtgaagaagatcgagctggatgagacaggtgtggtgctgcactcctacaatccatactacccgcccatggtcttctcaggcatgaacgctcaacaggtctccttcgttggtaaggtgatcgaactgaaaaggaagttctgatgagaaagaagaacaaatttccaatcgacctctctatgctaacagacttggagatccag

SEQ ID NO: 14665 - DNA, 260 bp, Unknown
  Description of Unknown: LeftRegion for integrase B1666 sequence
ccgccgtcgcgatctgcttcaggttactggtgcactgccggcccttggccgtcgcccgcgctttgttcagcgacggcaggagcatggcggcgagaatcgcgatgatggctattactacaattagttctatgtaaaacatgtagtttggttgattatcggtaaacgacgacctatattaaagcaagcaacctgaggtgataatgaaagcaattatttacgcacgacaaagctctggttctgatgatatctccgaatcggtc

SEQ ID NO: 14666 - DNA, 260 bp, Unknown; identical to SEQ ID NO: 14344
  Description of Unknown: LeftRegion for integrase B1667 sequence

SEQ ID NO: 14667 - DNA, 260 bp, Unknown
  Description of Unknown: LeftRegion for integrase B1668 sequence
aatacaaccttcaccgtcaattcgttcttcctggaacaaacaaaagacggtgtggtttctaaaatagagcggcttatcaaggatgatgtccgaaaaaaagccgctacaatttgacctccataggcagacaaaaccaacaaagcgcggtagaatgaagatagaacttcataccgtgtttgactgccagattggaggttattatgtttcatcagtcaaacaccgctgccgcacttcaattcccttacaacgctatgagcgtc

SEQ ID NO: 14668 - DNA, 260 bp, Unknown; identical to SEQ ID NO: 13552
  Description of Unknown: LeftRegion for integrase B1669 sequence

SEQ ID NO: 14669 - DNA, 260 bp, Unknown
  Description of Unknown: LeftRegion for integrase B1670 sequence
aggaaaaatgccgtccttcgtccatagactacgatgcgggtattgccatttttgagggttcaggtaaaaagccttacgaaaccacggtaaattcctgcacctgcagagatttctttgtccgccgtttgccgtgcaagcatatctaccggcttcggatggagcttgaaaacagagaagctcgttaaaaatgggggcgttatatggctcgatcaaagaaaactgaatgcttgccacttgagcggatcggcgtgatctatgcc

SEQ ID NO: 14670 - DNA, 260 bp, Unknown; identical to SEQ ID NO: 14186
  Description of Unknown: LeftRegion for integrase B1671 sequence

SEQ ID NO: 14671 - DNA, 260 bp, Unknown; identical to SEQ ID NO: 14654
  Description of Unknown: LeftRegion for integrase B1672 sequence

SEQ ID NO: 14672 - DNA, 260 bp, Unknown
  Description of Unknown: LeftRegion for integrase B1673 sequence
tagcatttgcgcgatgtgcaatttgcacacaattcccgctcaatgacttttgcggcggcagtccgtatacttgaaaaaatcaagcaaaaaagaaccgccattcagcaaaaaatgtgtcgaaagcccctacacaaatcgtgcaaagagagttatactacagctggcagacatcctgaatcgctgttcggaaaggatggaaaatgaaagagaaacagctacaggatattaccgctttatatggcagattgagccgcgatgat

SEQ ID NO: 14673 - DNA, 260 bp, Unknown; identical to SEQ ID NO: 14534
  Description of Unknown: LeftRegion for integrase B1674 sequence

SEQ ID NO: 14674 - DNA, 260 bp, Unknown
  Description of Unknown: LeftRegion for integrase B1675 sequence
cacgacctttatcgtcaattcttttttccctcaaacgggaaaccagacgatagcctccaaactggagaacctgataaaagccgatgttcagaaacaaactgtgacttgaaaacctcctaacaggcagacagggaaaagaaagcgcggtataatgaagttggacttcaatatcgtgtttgactgccggataggaggtatttatgtattatcagtcaaacaccgctgccgcgcttcaattcccttacacggctatgagctcc

SEQ ID NO: 14675 - DNA, 260 bp, Unknown; identical to SEQ ID NO: 13141
  Description of Unknown: LeftRegion for integrase B1676 sequence

SEQ ID NO: 14676 - DNA, 260 bp, Unknown
  Description of Unknown: LeftRegion for integrase B1677 sequence
ttttcagtgaagcagaggcaggcagtttgaaagaaaaaggttatcctgtgggatatgccgaaaacggaacaaaaggaacaggccatcgtccagcatggtacataaaattcgtcaaataaaaaccgcctcagcttgcgccgagacggaaacatttagaaagcgaaagcaccaccaaacgctttccgttgccagtatagcatatgctgcgcggcgttgtaaagccccgaaaggaaaactttatgaacgcagtgatttatgcc

SEQ ID NO: 14677 - DNA, 260 bp, Unknown; identical to SEQ ID NO: 13141
  Description of Unknown: LeftRegion for integrase B1678 sequence

SEQ ID NO: 14678 - DNA, 260 bp, Unknown
  Description of Unknown: LeftRegion for integrase B1679 sequence
atccgacagttttctgattttggcaaagatatccgaccattcgctcgtagtcatacggcatggctcctttctcaaatttactgtcggcagcaactgaattatatcaaatacgcacccgcttttcagggattcgtagaattataccgaaaatcggaaaaatattgcgaattttgaagaagataatcgtgaggtgatggttgatggcccgaaaaaagaatattgctgctggcctcgatgccgtcatctatgcccggtactcg

SEQ ID NO: 14679 - DNA, 260 bp, Unknown
  Description of Unknown: LeftRegion for integrase B1680 sequence
tataatccaaaagggttgttttgagagggctatcagtgtaagggctgatagccctatttttttttgtctaaatttcaggagatttctggttattactcaaataatatgtaatgggtttacatagtatcaaaaagatgtataataagtatgagatattatgacaaacctgtacaaattctaatcaacaggaggaaaacaggatggtacaggagaaattaagagcggtattttatgcaagggtatctacagaggaagagaga

SEQ ID NO: 14680 - DNA, 260 bp, Unknown; identical to SEQ ID NO: 13141
  Description of Unknown: LeftRegion for integrase B1681 sequence

SEQ ID NO: 14681 - DNA, 260 bp, Unknown
  Description of Unknown: LeftRegion for integrase B1682 sequence
aaagccttcgaccgaggccttataactatcactccttccatgaaaatctatgtttctccaataattttggatagccctcaggacgcttttacagcccgctggctggcttctcttgacggaatggttttaccccccccccgatttccgccgcgtagagagcttctggagtaccataacgacgaaatttttaggagggtcacatgaatacagtaatttatgctcggtattctgccggcccgagacagaccgaccagagtatc

SEQ ID NO: 14682 - DNA, 260 bp, Unknown
  Description of Unknown: LeftRegion for integrase B1683 sequence
gcagagttggtagtattgaaaatgatgtagatataatcaaaactgatatgagtataattaagactagattagaaattaaacaatagggatgtttttatagcatccctttttttcgttttttggttatatttgccttgtttatgttgtatgtgttatactatgtataatgaaaaatacatacaaattaggggtgattttacatgaagaatactgtaaaagtatgtgcttattgcagggtgtcaacaaataaatcagaacaa

SEQ ID NO: 14683 - DNA, 260 bp, Unknown
  Description of Unknown: LeftRegion for integrase B1684 sequence
atgagccgatcattcctgaaaacacggtgtatgagaaaaagctgttgaagtatttcagtatgtgcgacggagaaggaaagctgagaatcattcagctagcaatgaatgaatttgacagaacgcagaaagaaaaaaaggaaaatcaagaaccggctgttgtcggataagattattagcttttacgaatggagacaaatactatgaaatttccgattgatctctccactttaacaaaagaagaaatctcgcaatttgaagaa

SEQ ID NO: 14684 - DNA, 260 bp, Unknown
  Description of Unknown: LeftRegion for integrase B1685 sequence
aacacgacctttatcgtcaattccttctttcgggaaaagggcgatgagggtattgccgtaaagctggaacgtctgatgaaagcggacgttcagaaagaagctacaacttaattctcccaaacaggcagacagggacaaaaagacgcggtataatgaaggtgacttcaaaaccgtgtttgactgccggatgggaggttactatgtatcatcagtcaaacaccgctgccgcgcttcaattcccttacagcgctatgagcgtc

SEQ ID NO: 14685 - DNA, 260 bp, Unknown
  Description of Unknown: LeftRegion for integrase B1686 sequence
cacgacctttatcgtcaattcttttttccctcaaacgggaaatcagacgatagcctccaaactggagaacctgataaaagccgatgttcagaaacaaactgtgacttgaaaacctcttaacaggcagacagggaaaagaaagcgcggtataatgaagttggacttcaatatcgtgtttgactgccagataggaggtatttatgtattatcagtcaaacaccgctgccgcgcttcaattcccttacacggctatgagctcc

SEQ ID NO: 14686 - DNA, 260 bp, Unknown
  Description of Unknown: LeftRegion for integrase B1687 sequence
aaaaaatattttgcaaaatgaaaaatacaggggtgatgcattgcttcagaaacggtattccagagactttcttgaccgtgaaatgcgtaaaaacgagggcgcagttcctcaatattatattgttggaaatcatgaagcaatcattgatacagagatgtttcagagagtgcaggaagaactgaaaagaagagaatccaggcatggaaaataacaaaaagctgagggtcgcagcgtatgtgagggtttctgaagagacaaaa

SEQ ID NO: 14687 - DNA, 260 bp, Unknown
  Description of Unknown: LeftRegion for integrase B1688 sequence
catcttctccgcagaaaagacagggcgttttggaacgagttgaacctaaacgtgcaactctacttatataaatggctcccagatatgatatttcggaaatgaatttaactttttgactgttgaaagtgtggaaagatttattttccccagaacttgcaacggcttgcaacaaacttaaaactacttgaaaggtggtatttatgcctcgcaaaaagaaactgcaagaggtaggcggactgcggctggtggcgtactatcgc

SEQ ID NO: 14688 - DNA, 260 bp, Unknown; identical to SEQ ID NO: 13018
  Description of Unknown: LeftRegion for integrase B1689 sequence

SEQ ID NO: 14689 - DNA, 260 bp, Unknown; identical to SEQ ID NO: 13141
  Description of Unknown: LeftRegion for integrase B1690 sequence

SEQ ID NO: 14690 - DNA, 260 bp, Unknown
  Description of Unknown: LeftRegion for integrase B1691 sequence
ctattcaaattgacatcgaagaggcaaagtctcttggtttagcaccgtgtaaaaggtgctgtaactaaaaaaccgccctgcagcggcaactgcagagcgtttatatagatgttacctatcaacccgagggccaatataataactccataagcaagtcttattatatcacatgccctcttttttagaaaggggctttttatatgtctaaaactgtcgctatatacgtcagagtttcaacagggaaacaggctgacagagac

SEQ ID NO: 14691 - DNA, 260 bp, Unknown
  Description of Unknown: LeftRegion for integrase B1692 sequence
ctattcaaattgacatcgaagaggcaaagtctcttggtttagcaccgtgtaaaaggtgctgtaactaaaaaaccgccctgcagcggcaactgcagagcgtttatatagatgttacctatcaacccgagggccaatataataactccctagacaagtcttattatatcacatgccctcttttttagaaaggggctttttatatgtctaaaactgtcgctatctatgtcagggtttccacagggaaacaggctgacagagac

SEQ ID NO: 14692 - DNA, 260 bp, Unknown
  Description of Unknown: LeftRegion for integrase B1693 sequence
ctattcaaattgacatcgaagaggcaaagtctcttggtttagcaccgtgtaaaaggtgctgtaactaaacaaacgccctgcagcggcaactgcagagcgtttatatagatgttacctattaacccgagggccaatataataactccataagcaagtcttattatatcacatgccctcttttttagaaaggggctttttatatgtctaaaactgtcgctatctatgtcagggtttccacagggaaacaggctgacagagac

SEQ ID NO: 14693 - DNA, 260 bp, Unknown
  Description of Unknown: LeftRegion for integrase B1694 sequence
ctattcaaattgacatcgaagaggcaaagtctcttggtttagcaccgtgtaaaaggtgctgtaactaaacaaacgccctgcagcggcaactgcagagcgtttatatagatgttacctattaacccgagggccaatataataactccataagcaagtcttattatatcacatgccctcttttttagaaaggggctttttatatgtctaaaactgtcgctatctatgtcagggtttcaacagggaaacaggctgacagagac

SEQ ID NO: 14694 - DNA, 260 bp, Unknown
  Description of Unknown: LeftRegion for integrase B1695 sequence
ttgaagacctcacatttatgtggggtcttttacgttatctatgttttgttggagtcaacaaaacgtaaaaatcgccctgcagctaccaactgcagagcgattatatagatgttacctatcaacccgagggccaatataataactccatgaacaagtcttattatatcacacgccctcttttttagaaaggggctttttatatgtctaaaattgtcgctatctatgtcagggtttctacagggaaacaggctgacagagac

SEQ ID NO: 14695 - DNA, 260 bp, Unknown
  Description of Unknown: LeftRegion for integrase B1696 sequence
agatatggttattcaaccctaatcaaagtctcttggtttagcaccgtgtaaaaggtgctgtaactaaacaaccgccctgcagctaccaactgcagagcgattatatagatgttacctatcaacccgagggccaatataataactccctaagcaagtcttattatatcacatgccctcttttttagaaaggggctttttatatgtctaaaactgtcgctatctatgtcagggtttccacagggaaacaggctgacagagac

SEQ ID NO: 14696 - DNA, 260 bp, Unknown
  Description of Unknown: LeftRegion for integrase B1697 sequence
ctattcaaattgacatcgaagaggcaaagtctcttggtttatcaccgtgtaaaaggtgctgtaactaaacaaacgccctgcagcggcaactgcagagcgtttatatagatgttacctattaacccgagggccaatataataactccataagcaagtcttattatatcacatgccctcttttttagaaaggggctttttatatgtctaaaactgtcgctatctatgtcagggtttccacagggaaacaggctgacagagac

SEQ ID NO: 14697 - DNA, 260 bp, Unknown
  Description of Unknown: LeftRegion for integrase B1698 sequence
ctattcaaattgacatcgaagaggcaaagtctcttggtttagcaccgtgtaaaaagtgctgtaattaaacaaacgccctgcagcggcaactgcagagcgattatatagatgttacctattaacccgagggccaatataataactccctagacaagtcttattatatcacatgccctcttttttagaaaggggctttttatatgtctaaaactgtcgctatctatgtcagggtttccacagggaaacaggctgacagagac

SEQ ID NO: 14698 - DNA, 260 bp, Unknown
  Description of Unknown: LeftRegion for integrase B1699 sequence
tattaagattttacaatgaagaggcaaaatctcttggtttagcaccgtgtaaaaggtgctgtaactaaacaatcgccctgcagcggcaactgcagagcgattaaatagatgttacctatcaacccgagggctgatgtagtaaaaccctagacaagtcttattatatcacatgccctcttttttagaaaggggctttttatatgtctaaaactgtcgctatctatgtcagggtttccacagggaaacaggctgacagagac

SEQ ID NO: 14699 - DNA, 260 bp, Unknown
  Description of Unknown: LeftRegion for integrase B1700 sequence
tattcaaattgacatcgaagaggcaaagtctcttggtttatcaccgtgtaaaaggtgctgtaactaaacaaacgccctgcagctaccaactgcagagcgattatatagatgttacctattaacccgagggccaatataataactccctaagcaagtcttattatatcacatgccctcttttttagaaaggggctttttatatgtctaaaaccgtcgctatctatgtcagggtttcaacagggaaacaggctgacagagac

SEQ ID NO: 14700 - DNA, 260 bp, Unknown; identical to SEQ ID NO: 13535
  Description of Unknown: LeftRegion for integrase B1701 sequence

SEQ ID NO: 14701 - DNA, 260 bp, Unknown
  Description of Unknown: LeftRegion for integrase B1702 sequence
agaaagaagaatattatggttccgaagatggtaaatcctacatcaaatatctgcattctgtagatggcgcgcctatatttgatgttaaaaaaggtgatacgtcttattccctgattagctgccgtgaaattctttaatctttaatcacctagcccctatcgttataatacgcggtaggggcgtttttgtttggaaatggtatgaaaactaaactgtattcgtatattcgcttctcgtctatgcgtcagaatgatggttcg

SEQ ID NO: 14702 - DNA, 260 bp, Unknown
  Description of Unknown: LeftRegion for integrase B1703 sequence
ctattcaaattgacatcgaagaggcaaagtctcttggtttagcaccgtgtaaaaggtgctgtaactaaacaaacgccctgcagcggcaactgcagagcgtttatatagatgttacctatcaacccgagggccaatataataactccctaagcaagtcttattatatcacatgccctcttttttagaaaggggctttttatatgtctaaaactgtcgctatctatgtcagggtttcaacagggaaacaggctgacagagac

SEQ ID NO: 14703 - DNA, 260 bp, Unknown
  Description of Unknown: LeftRegion for integrase B1704 sequence
agaaagaagaatattatggttccgaagatggtaagtcttacatcaaatatctgcattctattgatggttctcctatatttgatgttaaaaaaggtgatacgtcttattccctgattagctgccgtgaaattctttaatctttaatcacctagcccctatcgttataatacacggtaggggcgtttttgtttggaaatggtatgaaaactaaactgtattcgtatattcgcttctcgtctatgcgtcagaatgatggttcg

SEQ ID NO: 14704 - DNA, 260 bp, Unknown; identical to SEQ ID NO: 14693
  Description of Unknown: LeftRegion for integrase B1705 sequence

SEQ ID NO: 14705 - DNA, 260 bp, Unknown
  Description of Unknown: LeftRegion for integrase B1706 sequence
ctattcaaattgacatcgaagaggcaaagtctcttggtttatcaccgtgtaaaaggtgctgtaactaaacaaacgccctgcagcggcaactgcagagcgtttatatagatgttacctattaacccgagggccaatataataactccataagcaagtcttattatatcacatgccctcttttttagaaaggggctttttatatgtctaaaactgtcgctatctatgtcagggtttcaacagggaaacaggctgacagagac

SEQ ID NO: 14706 - DNA, 260 bp, Unknown
  Description of Unknown: LeftRegion for integrase B1707 sequence
agatatggttattcaaccctaatcaaagtctcttggtttagcaccgtgtaaaaggtgctgtaactaaacaaccgccctgcagctaccaactgcagagcgattatatagatgttatctatcaacccgagggccaatataataactccataagcaagtcttattatatcacatgccctcttttttagaaaggggctttttatatgtctaaaactgtcgctatctatgtcagggtttcaacagggaaacaggctgacagagac

SEQ ID NO: 14707 - DNA, 260 bp, Unknown; identical to SEQ ID NO: 14697
  Description of Unknown: LeftRegion for integrase B1708 sequence

SEQ ID NO: 14708 - DNA, 260 bp, Unknown; identical to SEQ ID NO: 14692
  Description of Unknown: LeftRegion for integrase B1709 sequence

SEQ ID NO: 14709 - DNA, 260 bp, Unknown
  Description of Unknown: LeftRegion for integrase B1710 sequence
ctgaatcaattgtgtagtgaaatagctgtactggctggtcaacctaatgatgaagaacttattaccgcgtgtatctggagtcatgtagaggatattaatattcgtgatgctcgactgaaaggtaaaaaatactaatgacttactaaccaatgcccctatcgttataatacgcggtaggggcttttttgtttggaaatggtatgaaaactaaactgtattcgtatattcgcttctcgtctatgcgtcagaatgatggttcg

SEQ ID NO: 14710 - DNA, 260 bp, Unknown
  Description of Unknown: LeftRegion for integrase B1711 sequence
ggaacggtttatacggaggacagcgttcatcatatcgaaatgcatccgggcaaccgggtgctgtttgtttttcaggacggtcacaccgaggaacacttctgggaagaccattcccgcaaagacagctggaatgaggaaaagcgtcagaaagccgcggagaaaaccagaatccagcaccagaaaaggaaggagcaggaacaatgagcgaagccagaacctatgaacccacagtcacgcgcgtcaaaacggttcgggtcatc

SEQ ID NO: 14711 - DNA, 260 bp, Unknown
  Description of Unknown: LeftRegion for integrase B1712 sequence
actcgctgtctataggcgatgagcattacgaggataaattaatacgttttgactttaccattcttgaaggtgacatatttgctgattcatatgatggcaacatagaaacttatgatgacatagtggaaaagagaaatgaactggccgagacggctggactgaaaaagagaaaatgattatgtaactgtggcggtgagtctatgaaaacaaaaaagcccgctcgaaagcgggaaaatttaataggcgttaattactgccga

SEQ ID NO: 14712 - DNA, 260 bp, Unknown; identical to SEQ ID NO: 14693
  Description of Unknown: LeftRegion for integrase B1713 sequence

SEQ ID NO: 14713 - DNA, 260 bp, Unknown
  Description of Unknown: LeftRegion for integrase B1714 sequence
tgaaggtcagtatatgaaagcaattttacttgctctgttggagggaggaaaaataaatcaggcacagtatgacgagtgcaaaaggaggctcaaaataaattagctggactttcaaattactttgaatataatgtgtgttgaaaaaggcaggtgcctttacatccggtgcctgcctgtgaaaaaacagaaaggagaaagttatgcttaaaactgatgacagggtactgcgagtggcggcgtactgccgtgtatccaccgac

SEQ ID NO: 14714 - DNA, 260 bp, Unknown
  Description of Unknown: LeftRegion for integrase B1715 sequence
ttaaatcaactgtgtactgaattagcacagattgccggagttggtgacgatgacgactttattactgcgtgtgtatggagtcatatcgaggatattaataaacgtgatgcaaaactaactggaaagaaatattaatgacttactaaccaatgcccctatcgttataatacacggtaggggcgtttttgtttggaaatggtatgaaaactaaactgtattcgtatattcgcttctcgtctatgcgtcagagtgatggttcg

SEQ ID NO: 14715 - DNA, 260 bp, Unknown; identical to SEQ ID NO: 14694
  Description of Unknown: LeftRegion for integrase B1716 sequence

SEQ ID NO: 14716 - DNA, 260 bp, Unknown; identical to SEQ ID NO: 14693
  Description of Unknown: LeftRegion for integrase B1717 sequence

SEQ ID NO: 14717 - DNA, 260 bp, Unknown
  Description of Unknown: LeftRegion for integrase B1718 sequence
attttcagacgtgttttaacgcatcgcaagccttctagctggtgttattcggttttagttgtgttgggaagtggtgaaaaacggcaataaaaagtgctgttttcagagagaaaccccgcgcgggaacttggcggaacgcgcgcggggctggtcaagaagcagggcgctttaccgcgctcgctctaaggggtgattttagcatggtaaagaaccgcgccgccatatatgcgcgcttcagctcgcacaatcagcgctcagag

SEQ ID NO: 14718 - DNA, 260 bp, Unknown; identical to SEQ ID NO: 14696
  Description of Unknown: LeftRegion for integrase B1719 sequence

SEQ ID NO: 14719 - DNA, 260 bp, Unknown; identical to SEQ ID NO: 14695
  Description of Unknown: LeftRegion for integrase B1720 sequence

SEQ ID NO: 14720 - DNA, 260 bp, Unknown
  Description of Unknown: LeftRegion for integrase B1721 sequence
agatatggttattcaaccctaatcaaagtctcttggtttagcaccgtgtaaaaggtgctgtaactaaacaaccgccctgcagctaccaactgcagagcaattatatagatgttacctatcaacccgagggccaatataataactccctagacaagtcttattatatcacatgccctcttttttagaaaggggctttttatatgtctaaaactgtcgctatctatgtcagggtttccacagggaaacaggctgacagagac

SEQ ID NO: 14721 - DNA, 260 bp, Unknown
  Description of Unknown: LeftRegion for integrase B1722 sequence
agatatggttattcaaccctaatcaaagtctcttggtttagcaccgtgtaaaaggtgctgtaactaaacaaccgccctgcagctaccaactgcagagcgattatatagatgttatctatcaacccgagggccaatataataactccataagcaagtcttattatatcacatgccctcttttttagaaaggggctttttatatgtctaaaactgtcgctatctatgtcagggtttccacagggaaacaggctgacagagac

SEQ ID NO: 14722 - DNA, 260 bp, Unknown
  Description of Unknown: LeftRegion for integrase B1723 sequence
ttaaatcaactgtgtactgaattagcacaggttgccggagttggtgacgatgacgactttattactgcgtgtgtatggagtcatatcgaggatattaataaacgtgatgcaaaactaactggaaagaaatattaatgacttactaaccaatgcccctatcgttataatacgcggtaggggcttttttgtttggaaatggtatgaaaactaaactgtattcgtatattcgcttctcgtctatgcgtcagagtgatggttcg

SEQ ID NO: 14723 - DNA, 260 bp, Unknown
  Description of Unknown: LeftRegion for integrase B1724 sequence
taattttcaagccggatatttattagatgcttccggtaagtggacgatattttgataacagatattctctatatctaatttaattatacaagtgacagagaaatgcgtcaacatggaaaataagtattgaaaagaattggaataagtactaaaataaagttgggacaataaagcggagttactatatagaggaaaagactatgaagaatataaaaattaaatgtaatatctataccagagtatccacaaccatgcaggta

SEQ ID NO: 14724 - DNA, 260 bp, Unknown; identical to SEQ ID NO: 13291
  Description of Unknown: LeftRegion for integrase B1725 sequence

SEQ ID NO: 14725 - DNA, 260 bp, Unknown
  Description of Unknown: LeftRegion for integrase B1726 sequence
ctattcaaattgacatcgaagaggcaaagtctcttggtttatcaccgtgtaaaaggtgctgtaactaaacaaacgccctgcagcggcaactgcagagcgtttatatagatgttacctattaacccgagggccaatataataactccataagcaagtcttattatatcacatgccctcttttttagaaaggggctttttatatgtctaaaactgttgctatctatgtcagggtttccacagggaaacaggctgacagagac

SEQ ID NO: 14726 - DNA, 260 bp, Unknown
  Description of Unknown: LeftRegion for integrase B1727 sequence
ctattcaaattgacatcgaagaggcaaagtctcttggtttagcaccgtgtaaaaggtgctgtaactaaacaaacgccctgcagcggcaactgcagagcgattatatagatgttacctattaacccgagggccaatataataactccataagcaagtcttattatatcacatgccctcttttttagaaaggggctttttatatgtctaaaactgtcgctatctatgtcagggtttcaacagggaaacaggctgacagagac

SEQ ID NO: 14727 - DNA, 260 bp, Unknown; identical to SEQ ID NO: 14696
  Description of Unknown: LeftRegion for integrase B1728 sequence

SEQ ID NO: 14728 - DNA, 260 bp, Unknown; identical to SEQ ID NO: 14721
  Description of Unknown: LeftRegion for integrase B1729 sequence

SEQ ID NO: 14729 - DNA, 260 bp, Unknown; identical to SEQ ID NO: 14693
  Description of Unknown: LeftRegion for integrase B1730 sequence

SEQ ID NO: 14730 - DNA, 260 bp, Unknown
  Description of Unknown: LeftRegion for integrase B1731 sequence
cgcagaaatcgagagcggctgtattgccgtggtcgtggtggacggtacagaagggtttttaaaacaagtcgagttcggtgagaattccacctcgcttcactcgttcaatccgtattatcccgacatggagtttgtagatgccgaccagaaacgtttgcactttatcggccgcgtccgggaaatgaagcggaggttctgatatgcctcagaagtttaaaatcgacctctctatgctgaccccggaagaacagcagcagttt

SEQ ID NO: 14731 - DNA, 260 bp, Unknown; identical to SEQ ID NO: 13434
  Description of Unknown: LeftRegion for integrase B1732 sequence

SEQ ID NO: 14732 - DNA, 260 bp, Unknown; identical to SEQ ID NO: 14721
  Description of Unknown: LeftRegion for integrase B1733 sequence

SEQ ID NO: 14733 - DNA, 260 bp, Unknown
  Description of Unknown: LeftRegion for integrase B1734 sequence
atgaagattttacaatgaagaggcaaaatctcttggtttagcaccgtgtaaaaggtgctgtaactaaacaaccgccctgcagctaccaactgcagagcgattatatagatgttacctatcaacccgagggccaatataataactccctaagcaagtcttattatatcacatgccctcttttttagaaaggggctttttatatgtctaaaactgtcgctatctatgtcagggtttccacagggaaacaggctgacagagac

SEQ ID NO: 14734 - DNA, 260 bp, Unknown
  Description of Unknown: LeftRegion for integrase B1735 sequence
gtcaggtttaatggatgaattaagcaaatcacatgatgaatagtcagttttgcgccggcgcaaattaaaaaccgccctgcagctaccaactgcagagcgattaaatagatgttacctatcaacccgagggccaatataataactccctaagcaagtcttattatatcacatgccctcttttttagaaaggggctttttatatgtctaaaactgtcgctatctatgtcagggtttctacagggaaacaggctgacagagac

SEQ ID NO: 14735 - DNA, 260 bp, Unknown
  Description of Unknown: LeftRegion for integrase B1736 sequence
ccgtgagataattgtgggcggacgaaaattctttgtccgctccatcttctctaccgcagagaaagcaaaaacgcctacggagcagatgctccaaatcatcgacagtgatttagaaaaaggttcgatttgaggatagacattgggcaggagatacggtatgtttgttgttaccgtatcggcttgcccggaaaggagtagcaatggcaagcaataaaaaatatgccgtcctctatggccggctgagtcaggaggatacgcag

SEQ ID NO: 14736 - DNA, 260 bp, Unknown; identical to SEQ ID NO: 14692
  Description of Unknown: LeftRegion for integrase B1737 sequence

SEQ ID NO: 14737 - DNA, 260 bp, Unknown
  Description of Unknown: LeftRegion for integrase B1738 sequence
tcaggtttaatggatgaattaagcaaatcacatgatgaatagtcagttttgcgccggcgcaaattaaaaaatcgccctgcagctaccaactgcagagcgattatatagatgttacctatcaacccgagggccaatataataactccctagacaagtcttattatatcacatgccctcttttttagaaaggggctttttatatgtctaaaactgtcgctatctatgtcagagtttcaacggggaaacaggctgacagagac

SEQ ID NO: 14738 - DNA, 260 bp, Unknown
  Description of Unknown: LeftRegion for integrase B1739 sequence
tattcaaattgacatcgaagaggcaaagtctcttggtttatcaccgtgtaaaaggtgctgtaactaaacaaacgccctgcagctaccaactgcagagcgattatatagatgttacctattaacccgagggccaatataataactccataagcaagtcttattatatcacatgccctcttttttagaaaggggctttttatatgtctaaaactgtcgctatctatgtcagggtttcaacagggaaacaggctgacagagac

SEQ ID NO: 14739 - DNA, 260 bp, Unknown; identical to SEQ ID NO: 14694
  Description of Unknown: LeftRegion for integrase B1740 sequence

SEQ ID NO: 14740 - DNA, 260 bp, Unknown; identical to SEQ ID NO: 14738
  Description of Unknown: LeftRegion for integrase B1741 sequence

SEQ ID NO: 14741 - DNA, 260 bp, Unknown; identical to SEQ ID NO: 13018
  Description of Unknown: LeftRegion for integrase B1742 sequence

SEQ ID NO: 14742 - DNA, 260 bp, Unknown; identical to SEQ ID NO: 14738
  Description of Unknown: LeftRegion for integrase B1743 sequence

SEQ ID NO: 14743 - DNA, 260 bp, Unknown; identical to SEQ ID NO: 13396
  Description of Unknown: LeftRegion for integrase B1744 sequence

SEQ ID NO: 14744 - DNA, 260 bp, Unknown
  Description of Unknown: LeftRegion for integrase B1745 sequence
gtgagtaggaataaatgtgataacaagaacagaagtagaagaatgttttgccgttattgatgatgaaatagtatggcatggcgggatgaatctacttggaaaagctgatgtctgggataacttaatgcgtatcagaaattcacaagttgcaacggaattgttggaaattgctttgggatgttctgaggagaggaggaaaagtgaataaaaagataaaatgtgatacctataccagagtatccacaaccatgcaggtagat

SEQ ID NO: 14745 - DNA, 260 bp, Unknown; identical to SEQ ID NO: 14697
  Description of Unknown: LeftRegion for integrase B1746 sequence

SEQ ID NO: 14746 - DNA, 260 bp, Unknown; identical to SEQ ID NO: 14721
  Description of Unknown: LeftRegion for integrase B1747 sequence

SEQ ID NO: 14747 - DNA, 260 bp, Unknown; identical to SEQ ID NO: 14695
  Description of Unknown: LeftRegion for integrase B1748 sequence

SEQ ID NO: 14748 - DNA, 260 bp, Unknown
  Description of Unknown: LeftRegion for integrase B1749 sequence
taacaatatagtcagttttagaatgccgccagcaaatgaccagcaaattgctggcaaatgaaaatcccccggtgttaccagcaccgagggacctgcaagaacgtgttaccagcacgctcaattatcaacccaagcactaccaagagctgattacttttttattatatcagctctgctcaaaaaatgaaaggagtacaaatatgcttagagcagtaatttacgcgcgcttcagcagcgatatgcagcgcgaagaatccatt

SEQ ID NO: 14749 - DNA, 260 bp, Unknown
  Description of Unknown: LeftRegion for integrase B1750 sequence
ctattcaaattgacatcgaagaggcaaagtctcttggtttagcaccgtgtaaaaggtgctgtaactaaaaaaccgccctgcagcggcaactgcagagcgtttatatagatgttacctatcaacccgagggccaatataataactccctagacaagtcttattatatcacatgccctcttttttagaaaggggctttttatatgtctaaaaccgtcgctatctatgtcagggtttcaacagggaaacaggctgacagagac

SEQ ID NO: 14750 - DNA, 260 bp, Unknown; identical to SEQ ID NO: 14694
  Description of Unknown: LeftRegion for integrase B1751 sequence

SEQ ID NO: 14751 - DNA, 260 bp, Unknown
  Description of Unknown: LeftRegion for integrase B1752 sequence
gtattctgactatgagtggtgagcagttgcttgtcggaaacggcactgtgacgcacaagcaggccgtggacaaagccaccactgaatatcggaagtataagacaagaacgctcagcgacgtagaacaagactatctggattccatccagttcttagagcaaaaaatcgacaagaaataacggtatctgtgaggatttcttatgtcacagggaaagacaaaagtttatatttacactcgtgtatctaccacgatgcaaatc

SEQ ID NO: 14752 - DNA, 260 bp, Unknown
  Description of Unknown: LeftRegion for integrase B1753 sequence
agaaagaagaatattatggttccgaagatggtaagtcttacatcaaatatctgcattctgtagatggcgctcctatatttgatgttaaaaaaggtgatacatcttataccctgattagctgccgtgaaattctttaatctttaatcacctagcccctatcgttataatacgcggtaggggcgtttttgtttggaaatggtatgaaaactaaactgtattcgtatattcgcttctcgtctatgcgtcagaatgatggttcg

SEQ ID NO: 14753 - DNA, 260 bp, Unknown; identical to SEQ ID NO: 14697
  Description of Unknown: LeftRegion for integrase B1754 sequence

SEQ ID NO: 14754 - DNA, 260 bp, Unknown
  Description of Unknown: LeftRegion for integrase B1755 sequence
ggtcgtttcaaaatgaaacagccttccagatggcgatgtatctggcaaggcggatgctggccgaaaagctcatcaccgggaaggagtaccgggacttcgagcaggagatgcttcgccgctatcagcctttttccggggacttatacacttgataattgtatcaaacagagtgatatatagtgtcgaaaggagctgattctatgcggactatccgtaagattgaacgacgcataccaaatttgaagcaaagaaagaaagtc

SEQ ID NO: 14755 - DNA, 260 bp, Unknown
  Description of Unknown: LeftRegion for integrase B1756 sequence
ctattcaaattgacattgaaaaggcaaagtctcttggtttagcaccgtgtaaaaggtgctgtaactaaacaaacgccctgcagcggcaactgcagagcgattatatagatgttacctattaacccgagggccaatataataactccctagacaagtcttattatatcacatgccctcttttttagaaaggggctttttatatgtctaaaactgtcgctatctatgtcagggtttccacagggaaacaggctgacagagac

SEQ ID NO: 14756 - DNA, 260 bp, Unknown; identical to SEQ ID NO: 14701
  Description of Unknown: LeftRegion for integrase B1757 sequence

SEQ ID NO: 14757 - DNA, 260 bp, Unknown; identical to SEQ ID NO: 14695
  Description of Unknown: LeftRegion for integrase B1758 sequence

SEQ ID NO: 14758 - DNA, 260 bp, Unknown
  Description of Unknown: LeftRegion for integrase B1759 sequence
cgcagaaattgagagcggctgtattgccgtggtcgtggtagacggtacagaagggtttttaaaacaggtcgagttcggtgaggactctacttcgcttcactccttcaacccttactatcctgatatggagttcgtaggtgccgaccagaaacgcttgcactttatcggtcgtgtccgggaaatgaagcggaggttctgatatgcatatcgacctctctatgttaaccccggaagaacagcagcagtttcgtgatgatcct

SEQ ID NO: 14759 - DNA, 260 bp, Unknown; identical to SEQ ID NO: 13821
  Description of Unknown: LeftRegion for integrase B1760 sequence

SEQ ID NO: 14760 - DNA, 260 bp, Unknown
  Description of Unknown: LeftRegion for integrase B1761 sequence
aaagatacagaatcgtatatcaacatcctgtataagggcaatacccgcaaatggatctgccggctaaagctaacggataatcagaaaacactgattattcctgatgagaataaaaaggaaaccaagtattccatgcaggacatctatgagttaaacaactacaaggaacagttggtagccgttttgaaccgctatctgtgatgcatcccgcagaccacaaccgaacactgttttgttgtggtctgcatttttacacccgc

SEQ ID NO: 14761 - DNA, 260 bp, Unknown
  Description of Unknown: LeftRegion for integrase B1762 sequence
gataggaaacacctgttatgtggtaaaatcccgctcaaaagaacaggcacaggaagacgcagtaacgaaagtaaaaaggcttatccgtaatgacttgaaacaataattttgctataaaacagggcagacagaaaacagaaaatgcggtacaataaagttgcaaaagcattgtctgtttgactgtcggataggaggtatttatgttacagcagtcaaacaacactatcacttccatttatccgattggaaatcaaacagag

SEQ ID NO: 14762 - DNA, 260 bp, Unknown
  Description of Unknown: LeftRegion for integrase B1763 sequence
aaatattacctattaaattataacactgcatttagcaaaaagcaacaggaatatgtacaaacaatgtaagaatattttgttgcgaggtgatattatggaaataaccgaagcagagatagaaataattacaaggcagattgttaaaatcatcataaatcatcaacgtgacgcatcagctgtcattcctgaggatgcagacgatgaataagctcagagccgcagcctattgccgtgtttcgaccgaccgtgccgagcaatcc

SEQ ID NO: 14763 - DNA, 260 bp, Unknown
  Description of Unknown: LeftRegion for integrase B1764 sequence
aaatattacctatttaattataacactgcatttatcaaaaagcaacaggaatatgtacaaacaatgtaagaatattttgttgcgaggtgatattatggaaataaccgaagcagagatagaaattattacaaggcagatcgttaaaatcatcataaatcatcaacgtgacgcatcagctgtgggtcctgaggacgcagacgatgaataagctcagagccgcagcctattgccgtgtttcgaccgaccgcaccgagcaatcc

SEQ ID NO: 14764 - DNA, 260 bp, Unknown; identical to SEQ ID NO: 13821
  Description of Unknown: LeftRegion for integrase B1765 sequence

SEQ ID NO: 14765 - DNA, 109 bp, Unknown
  Description of Unknown: LeftRegion for integrase B1766 sequence
gtaattagtacaaatgccatgcttgtctgttgtcggaaaggaggacaaaatgttacagacaagcaagattaccgctttatattgcagattgagccaggaagatatgcaa

SEQ ID NO: 14766 - DNA, 260 bp, Unknown
  Description of Unknown: LeftRegion for integrase B1767 sequence
atgtttttgatgatatggtaagactcagtcccgtgaatccggaatatcaacccaaagagctaaggggtgttgatatggaaacatatcacattctcggcgtaccacgtattcttattcgcgaaataagttaaaaagcccgctcccgtgagaacaggaacgaacgagaaagtgccacagaaaagtaagaaagcggagagagtatgacaaatgcagtgatatatgcccggtatagcccgggaccaaatcaaacggatcaatca

SEQ ID NO: 14767 - DNA, 260 bp, Unknown
  Description of Unknown: LeftRegion for integrase B1768 sequence
aaatattacctatttaattataacactgcatttatcaaaaagcaacaggaatatgtacaaacaatgtaagaatattttgttgcgaggtgatattatggaaataaccgaagcagagatagaaattattacaaggcagatcgttaaaatcatcataaatcatcaacgtgacgcatcagctgttagtcctgaggacgcagacgatgaataagctcagagccgcagcctattgccgtgtttcgaccgaccgtaccgagcaatcc

SEQ ID NO: 14768 - DNA, 260 bp, Unknown
  Description of Unknown: LeftRegion for integrase B1769 sequence
caagccaccatcacccggcagagcgaagactaccggcggcacatcatgcagatgcagacctactacggaatgctgcaccgtcaggagcaccgggcaattctattcctgtccatcggtgtcaccgtgctggtggtgtttctggttgcctggctggtgttagatgttctccacccgagcattgggtggattaagaggtaactatgagaaattgcaccattgatttatcgtctctcacccctgaggagcgccggcagttctcg

SEQ ID NO: 14769 - DNA, 260 bp, Unknown
  Description of Unknown: LeftRegion for integrase B1770 sequence
aaatattacctattaaattataacactgcatttagcaaaaagcaacaggaatatgtacaaacaatgtaagaatattttgttgcgaggtgatattatggaaataaccgaagcagagatagaaataattacaaggcagattgttaaaatcatcataaatcatcaacgtgatgcatcagctgtcattcctgaggatgcagacgatgaataagctcagagccgcagcctattgccgtgtttcgaccgaccgtgccgagcaatcc

SEQ ID NO: 14770 - DNA, 260 bp, Unknown
  Description of Unknown: LeftRegion for integrase B1771 sequence
aaatattacctatttaattataacactgcatttatcaaaaagcaacaggaatatgtacaaacaatgtaagaatattttgttgcgaggtgatattatggaaataaccgaagcagagatagaaatcattacaaggcagattgttaaaatcatcataaatcatcaacgtgacgcatcagctgtcggtcctgaggacgcagacgatgaataagctcagagccgcagcctattgccgtgtttcaaccgaccgtgccgagcaatcc

SEQ ID NO: 14771 - DNA, 260 bp, Unknown; identical to SEQ ID NO: 13821
  Description of Unknown: LeftRegion for integrase B1772 sequence

SEQ ID NO: 14772 - DNA, 260 bp, Unknown
  Description of Unknown: LeftRegion for integrase B1773 sequence
aaatattacctattaaattataacactgcatttagcaaaaagcaacaggaatatgtacaaacaatgtaagaatattttgttgcgaggtgatattatggaaataaccgaagcagagatagaaatcattacaaggcagattgttaaaatcatcataaatcatcaacgtgacgcatcagctgtgggtcctgaggacgcagacgatgaataagctcagagccgcagcctattgccgtgtttcaaccgaccgtgccgagcaatcc

SEQ ID NO: 14773 - DNA, 260 bp, Unknown
  Description of Unknown: LeftRegion for integrase B1774 sequence
actcgagtataataagaagaaaatacatatgacattggaatttccttatacagtagatcctaaggatgccgaacgctttgagaaaactttgagacaggtatatctcaataggattcaaaaagggtctggacaaatggcatataatgcggtatcctcccactccttaaaagaaaagtcaggtgtaaaaggaggatacgataatgagtaaaagagtaaggacattattacgtgtgtcatctaggcaacagttacatgatgat

SEQ ID NO: 14774 - DNA, 260 bp, Unknown
  Description of Unknown: LeftRegion for integrase B1775 sequence
ttgttaaacatctgctatatgctgtatatattggtatttacgcgcgttttcttatcattttgattgttgcatgatatttgacgttgtattggcgttgtattagcgttgctcgtttcgacaaataagaaactaaagttgtatagactattgcatatttcattgaaaatgagtacctttgcaccgtcaaatgaaataacgctatggataagaaaatactttgcatcatacgagccagcaccgaaaagcaagaaacggaatcc

SEQ ID NO: 14775 - DNA, 260 bp, Unknown
  Description of Unknown: LeftRegion for integrase B1776 sequence
ggctactggctgtaaaatgctggtagccctcattttttagttgtatctagtatataaggggtgtataatagatagaaactgaaaacagcctcataaagccctctattttatcgagggtaaagaagtctacacctaatatataaaagtggctgtatgaggcacacaggagctcacaggactattacaggagggtaaacaggatggcatacaggaaaataacggatataaaagatactattggtatgagagcggtattttat

SEQ ID NO: 14776 - DNA, 260 bp, Unknown
  Description of Unknown: LeftRegion for integrase B1777 sequence
tttgtataagcaaggtctaataactgaaatggaaaggaataaaatggtaaataaaatagcaaatacgcaagcttcattcattaaggttgacaacatcagtaacaaaattgaaaaaatgtcgagtttagtctaatttcttggtttacaaactttatgtatcatgatataataatgatataattgttaattaggaggaaaaaatggatatacatgaaactagacaaaaattaaaattaaaaaatatatttgatattaatttg

SEQ ID NO: 14777 - DNA, 260 bp, Unknown; identical to SEQ ID NO: 14761
  Description of Unknown: LeftRegion for integrase B1778 sequence

SEQ ID NO: 14778 - DNA, 260 bp, Unknown
  Description of Unknown: LeftRegion for integrase B1779 sequence
atgaagatatcatggcacgatgcatcttaagagcaatcaacaaccggatgcttcagagcggaattattgatgaggagactaagaagcgaatagaaaatcgcattcagaggtcgaaatttgtcagtaattgattgaaaaacaattatgcaggggatataatcaaattgattttgcccctgcattttttgcaggaggacattatggatatatataaggtaaggcagcttttaaaagagcaaagtatttttgacatcccgcta

SEQ ID NO: 14779 - DNA, 260 bp, Unknown
  Description of Unknown: LeftRegion for integrase B1780 sequence
tggcaccgctattaatagaacaacaataagcaaatgggaaaacggaacccaagaagctggtatgggttttgtccttatttttgctgatttctttggcgtttccttagattatataatggaaaaatggtgagtgtccctactcctgcggggacaggaacgagcgagaaagtgacaatgaaaagtaagaaagcggagagagtatgacaaatgcagtaatatatgcccggtatagcccggggccaaatcaaacggatcaatca

SEQ ID NO: 14780 - DNA, 260 bp, Unknown
  Description of Unknown: LeftRegion for integrase B1781 sequence
cgcagaaattgagagcggctgtattgccgtggtcgtggtagacggtacagaagggtttttaaaacaggtcgagttcggtgaaaattccatctcgcttcactccttcaacccttactatcctgatatggagttcgtaggtgccgaccagaaacgcttgcactttatcggtcgtgtccgggaaatgaagcggaggttctgatatgcgtaaaaagtttaatatcgacctctccatgttaaccccggaggaacagcagcagttt

SEQ ID NO: 14781 - DNA, 260 bp, Unknown; identical to SEQ ID NO: 13028
  Description of Unknown: LeftRegion for integrase B1782 sequence

SEQ ID NO: 14782 - DNA, 260 bp, Unknown
  Description of Unknown: LeftRegion for integrase B1783 sequence
caagccaccatcacccggcagagcgaagactaccggcggcacatcatgcagatgcagacctactacggaatgctgcaccgtcaggagcaccgggcaattctattcctgtccatcggcgtcaccgtgctggtggtgtttctggttgcctggctggtgttagatgttctccacccgagcattgggtggattaagaggtaactatgagaaattgcaccattgatttatcgtctctcacccctgaggagcgccggcagttctcg

SEQ ID NO: 14783 - DNA, 260 bp, Unknown
  Description of Unknown: LeftRegion for integrase B1784 sequence
ttcgtgatcagcttgtttctgattatggggaacagtttactaaagaagaggccgactatgcaatagatcatcttgaataacactatagttgctataccattttgaaataatggagctttgctattataagatgtaccggtgcaactattgagttacatccttatcaaacggtgacaaattgtcaccgtttgataaattaaatgtccgaaaatacgattcaaataattaaaatcgctcagggcataccgggacggaatcac

SEQ ID NO: 14784 - DNA, 260 bp, Unknown; identical to SEQ ID NO: 13821
  Description of Unknown: LeftRegion for integrase B1785 sequence

SEQ ID NO: 14785 - DNA, 260 bp, Unknown
  Description of Unknown: LeftRegion for integrase B1786 sequence
gtgcgtcgcttttgcgttttagcggtgatggcggtgcaggcaaagatgctttgactggaacgatggttgatacgagatctggggaaactgtttcaacaaagatcgaaagcctagaagacctttgcaaactgtttcctgcggtgaagttatacgtggcaggataatattcgtatttgtgaacagaaagagggcgggcagcattgtcgaagcgcgaatcgaaaagcagccagaagtgtttggcagcggagcagatcggcgtg

SEQ ID NO: 14786 - DNA, 260 bp, Unknown; identical to SEQ ID NO: 13027
  Description of Unknown: LeftRegion for integrase B1787 sequence

SEQ ID NO: 14787 - DNA, 260 bp, Unknown; identical to SEQ ID NO: 13028
  Description of Unknown: LeftRegion for integrase B1788 sequence

SEQ ID NO: 14788 - DNA, 260 bp, Unknown; identical to SEQ ID NO: 13857
  Description of Unknown: LeftRegion for integrase B1789 sequence

SEQ ID NO: 14789 - DNA, 260 bp, Unknown; identical to SEQ ID NO: 14779
  Description of Unknown: LeftRegion for integrase B1790 sequence

SEQ ID NO: 14790 - DNA, 260 bp, Unknown
  Description of Unknown: LeftRegion for integrase B1791 sequence
cacttttgatttcaccacgcaaaaagacctcgacaacgagtataaaaaactcaataacggggagattggttctgtagtagcgacagttatattcggtgccttatttattgcagttttaggtttcctaaaatagtaatcgtttttcagccattaaacgcaaatttgaggctgttttcgttaaataaggggggggtgacagtttgagttcggttgacaaaatcgccgttgtttacgcacggtattcttcccacgggcagacc

SEQ ID NO: 14791 - DNA, 260 bp, Unknown
  Description of Unknown: LeftRegion for integrase B1792 sequence
atatcggtgctaacttttttctagacagaaatccgttaaattgcgacagaaaaaaagagcgtggaatcgtcctgttgtccattccacttcctgaggctcttgcaattgcctattgttgtaaataagaaactaaagttgtatagactattgcatatttcattgaaaatgagtacctttgcaccgtcaaatgaaataacgctatggataagaaaatactttgcatcatacgagccagcaccgaaaagcaagaaacggaatcc

SEQ ID NO: 14792 - DNA, 260 bp, Unknown
  Description of Unknown: LeftRegion for integrase B1793 sequence
tcgcaccctcggcattctgctgattgcgcttggcgttctcctgctggtgcttgggcttctatcatgggcgtgggcgatccttggtgcgctgagtgccgtcggcggggtgctgctgcttaaaaatgcaaaattgatttctgaacgcgggaacgctgctgctttggctgcggctcgaaacgtggccgaggcaaggatggaagatgaagaagaagccgattgaacctgaaatgcaggatgccgtgatctacactcggtactcg

SEQ ID NO: 14793 - DNA, 260 bp, Unknown
  Description of Unknown: LeftRegion for integrase B1794 sequence
gccaaatacgcctgtgtattgagcggaatgtctgttcatcagcaggaggacaagccagaacttcgtccggatgaaacaacaatgcccaaagtcgccattgcctaacctaaaacagcgtgatataattttcattgcataacctgtctaaaccttctgcggaggaaatcaaaaaactccgcagaaggtgattggagaagacgatgaaggaaagaacgaaggtatacctatatacccgcgtgtccaccgccatgcagattgat

SEQ ID NO: 14794 - DNA, 260 bp, Unknown
  Description of Unknown: LeftRegion for integrase B1795 sequence
aaatattacctattaaattataacactgcatttatcaaaaagcaacaggaatatgtacaaacaatgtaagaatattttgttgcgaggtgatattatggaaataaccgaagcagagatagaaatcattacaaggcagattgttaaaatcatcataaatcatcaacgtgacgcatcagctgtgggtcctgaggatgcagacgatgaataagctcagagccgcagcctattgccgtgtttcgaccgaccgtgccgagcaatcc

SEQ ID NO: 14795 - DNA, 260 bp, Unknown
  Description of Unknown: LeftRegion for integrase B1796 sequence
atgaagatatcatggcacgatgcatcttaagagcaatcaataaccggatgcttcggagcggaattattgatgaggagactaagaagcgaatagaaaatcgcattcagaggtcgaaatttgtcagtaattgattgaaaaacaattatgcaggggatataatcaaattgattttgcccctgcattttttgcaggaggacattatggatatatataaggtaaggcagcttttaaaagggcaaagtatctttgacatcccgcta

SEQ ID NO: 14796 - DNA, 260 bp, Unknown; identical to SEQ ID NO: 13138
  Description of Unknown: LeftRegion for integrase B1797 sequence

SEQ ID NO: 14797 - DNA, 260 bp, Unknown; identical to SEQ ID NO: 14770
  Description of Unknown: LeftRegion for integrase B1798 sequence

SEQ ID NO: 14798 - DNA, 260 bp, Unknown; identical to SEQ ID NO: 13853
  Description of Unknown: LeftRegion for integrase B1799 sequence

SEQ ID NO: 14799 - DNA, 260 bp, Unknown
  Description of Unknown: LeftRegion for integrase B1800 sequence
tggcacctctattaatagaacaacaataagcaaatgggaaaacggaacccaagaagctggtatgggttttgtccttatttttgctgatttctttggcgtttccttagattatataatggaaaaatggtgagtgtccctactcctgcggggacaggaacgagcgagaaagtgacaatgaaaagtaagaaagcggagagagtatgacaaatgcagtaatatatgcccggtatagcccgggaccgaatcaaacagatcaatca

SEQ ID NO: 14800 - DNA, 260 bp, Unknown
  Description of Unknown: LeftRegion for integrase B1801 sequence
gttcatctcgcggggctcctttctcgaacttttgttcgatttatattgtagactcattttttgaggttgtcaatagaaactttaaagaaaaatatcggttcctatcagcaccgatatgtaaaataaataaaaaagcccgctcccgtgagaacaggaacgagcgagagagtgccacagaaaagtaagaaagcggagagagtatgacaaatgcagtgatatatgcccggtatagcccgggaccgaatcaaacagatcaatca

SEQ ID NO: 14801 - DNA, 260 bp, Unknown
  Description of Unknown: LeftRegion for integrase B1802 sequence
aaatattacctatttaattataacactgcatttatcaaaaagcaacaggaatatgtacaaacaatgtaagaatattttgttgcgaggtgatattatggaaataaccgaagcagagatagaaatcattacaaggcagattgttaaaatcatcataaatcatcaacgtgacgcatcaactgtcggtcctgaggacgcagacgatgaataagctcagagccgcagcctattgccgtgtttcaaccgaccgtgccgagcaatcc

SEQ ID NO: 14802 - DNA, 260 bp, Unknown; identical to SEQ ID NO: 13026
  Description of Unknown: LeftRegion for integrase B1803 sequence

SEQ ID NO: 14803 - DNA, 260 bp, Unknown
  Description of Unknown: LeftRegion for integrase B1804 sequence
aaatattacctattaaattataacactgcatttatcaaaaagcaacaggaatatgtacaaacaatgtaagaatattttgttgcgaggtgatattatggaaataaccgaagcagagatagaaatcattacaaggcagattgttaaagtcatcataaatcatcaacgtgacgcatcagctgtgggtcctgaggatgcagacgatgaataagctcagagccgcagcctattgccgtgtttcgaccgaccgtgccgagcaatcc

SEQ ID NO: 14804 - DNA, 260 bp, Unknown; identical to SEQ ID NO: 13821
  Description of Unknown: LeftRegion for integrase B1805 sequence

SEQ ID NO: 14805 - DNA, 260 bp, Unknown; identical to SEQ ID NO: 14779
  Description of Unknown: LeftRegion for integrase B1806 sequence

SEQ ID NO: 14806 - DNA, 260 bp, Unknown; identical to SEQ ID NO: 13027
  Description of Unknown: LeftRegion for integrase B1807 sequence

SEQ ID NO: 14807 - DNA, 260 bp, Unknown; identical to SEQ ID NO: 14761
  Description of Unknown: LeftRegion for integrase B1808 sequence

SEQ ID NO: 14808 - DNA, 260 bp, Unknown; identical to SEQ ID NO: 13264
  Description of Unknown: LeftRegion for integrase B1809 sequence

SEQ ID NO: 14809 - DNA, 260 bp, Unknown; identical to SEQ ID NO: 14770
  Description of Unknown: LeftRegion for integrase B1810 sequence

SEQ ID NO: 14810 - DNA, 260 bp, Unknown
  Description of Unknown: LeftRegion for integrase B1811 sequence
gacttccggctggcggctctgataaaggcagaacggaatacataccgcaaacccgctccgcagaatgagccgcggcagcaggaaacagtgttcacagaatatgagccgactgacgagattcagcgcatgactaatgaaatcaatcggttaatcaattcggaagatactgataaggaaaaggttgaagcacttatagtaagatgcgctcaattgaaatatgcgacaataagtgtggtgagaagatgatgcaaacattggca

SEQ ID NO: 14811 - DNA, 260 bp, Unknown; identical to SEQ ID NO: 13027
  Description of Unknown: LeftRegion for integrase B1812 sequence

SEQ ID NO: 14812 - DNA, 260 bp, Unknown
  Description of Unknown: LeftRegion for integrase B1813 sequence
aaatattacctatttaattataacactgcatttatcaaaaagcaacaggaatatgtacaaacaatgtaagaatattttgttgcgaggtgatattatggaaataaccgaagcagagatagaaatcattacaaggcagattgttaaaatcatcataaatcatcaacgtgatgcatcagctgtgggtcctgaggatgcagacgatgaataagctcagagccgcagcctattgccgtgtttcaaccgaccgtgccgagcaatcc

SEQ ID NO: 14813 - DNA, 260 bp, Unknown; identical to SEQ ID NO: 13018
  Description of Unknown: LeftRegion for integrase B1814 sequence

SEQ ID NO: 14814 - DNA, 260 bp, Unknown
  Description of Unknown: LeftRegion for integrase B1815 sequence
ttgataaactcgaaggagaggtgaatcgactgcttggatacaggaagtatctaacagctgctgactgggaggaattagaacggaactaccagaaaaacaattgatgacattcgtgacataatcggaaagtacagatgaatcttcctcctctcgttgcaaaaagggagaaatctaattgatcggtcaaataggagaaaacaatggcgaaaaaaagatatgacctgcggccggtgcgcaccgtatgcatctatgcgcggtac

SEQ ID NO: 14815 - DNA, 260 bp, Unknown
  Description of Unknown: LeftRegion for integrase B1816 sequence
gtcgtaaatatcggcggttccgtcggcaacggtgtcacaaagaaaaccgactttctcgttgtcggctctacagattattgcgcctctgtaaagggcggcaaaactggcaagctgaaaaaagccgaggatttgcagaaaaagggcgcaaaccttgccattatcgacgagggcgctttttacgacatgttgggcgagtgattatggcacaacaaaaaaaggccgccggggccgagtttgacggtacgccgcgggcggttatc

SEQ ID NO: 14816 - DNA, 260 bp, Unknown; identical to SEQ ID NO: 13441
  Description of Unknown: LeftRegion for integrase B1817 sequence

SEQ ID NO: 14817 - DNA, 260 bp, Unknown
  Description of Unknown: LeftRegion for integrase B1818 sequence
ttacggccttacaagcctgtgcatcatcctggctatggccctgatggcctatgttgttctggatgcccaaaatcccacgattggcctcatccgggccgacggtatcaatatttgggtgtatctggcggcattggcaatcatcgggatttgcctgtttatcgggcaaacaatggttaaaaagagactgcggaggaaagaaaatgaaaatgccgattgatttgtcttccctgacaccggcggaaagaacactatttgatagc

SEQ ID NO: 14818 - DNA, 260 bp, Unknown
  Description of Unknown: LeftRegion for integrase B1819 sequence
taaaagcgcattgattccttcagatgaaatccggtcagaagaacttctggcggaacaaaaatttgaagcgtttatcacttcgctggcacatatcatcgagaaatatggtatgagagtgctgggcgaggttgacggagctgcgtgagaatcgcagctttacataggatattttccaaaagtaaattttggaggtatgaattatgaaccgatatggaaaacgctgtgttttgtatccgagggtcagcacagagatgcaagtg

SEQ ID NO: 14819 - DNA, 260 bp, Unknown
  Description of Unknown: LeftRegion for integrase B1820 sequence
gagcaaaaagacgacggatcgatgccgccgattggcaccagactggttaaaacctattgcggcaaggaatacaatgtgatgatttccaccgccggtttccaatttgaaggcgtgtattacaaaacgctgtccgccgtggttaaaaagataaccggcagaaaaatatcaggcaggttctttttcggcataggaggcaaagcgtgaacaccgtgcgatgcgccatatacacccgaaaatccaccgaagaaggcttggacaag

SEQ ID NO: 14820 - DNA, 260 bp, Unknown
  Description of Unknown: LeftRegion for integrase B1821 sequence
catcttctccgcagaaaagacagggcgttttggaacgagttgaacctaaacgtacaactctacttatataaatggctcccagatatgatatttcggaaatgaatttaactttttgactgttgaaagtgtggaaagatttattttccccagaacttgcaacggcttgcaacaaacttaaaactacttgaaaggtggtatttatgcctcgcaaaaagaaactgcaagaggttggcggcctgcgcctggtggcgtactatcgc

SEQ ID NO: 14821 - DNA, 260 bp, Unknown; identical to SEQ ID NO: 13491
  Description of Unknown: LeftRegion for integrase B1822 sequence

SEQ ID NO: 14822 - DNA, 260 bp, Unknown
  Description of Unknown: LeftRegion for integrase B1823 sequence
atactgcgagaattgcggatacagctttgactttaccacacaggatgacctcaacgcccaatataataaactgaacacaaacgagggatgcgccattttggtggcggtcattctcggcgttattcttataacaatttggttttacagccattaaatgcaaatttgaggatgttttcgttaaataaggagggggtgacagtttgaatccagttgacaaaatcgccgttgtttacgcacgatattcttcccacgggcagacc

SEQ ID NO: 14823 - DNA, 260 bp, Unknown
  Description of Unknown: LeftRegion for integrase B1824 sequence
tatgtcaacggttttatggttggcaatattcccggcgacgataccgatttcataaaccgggcccgccgccgcggtgtcgaggtcgtcggttttaaggtcgattatttcgagcccgaggacgagcccgagcgcggtcgtgtgtactatgcccgaatcaagctcgagatcgtgcccgttcgtgcggcaaaggcggcgaaataatgccgcgggccgcgcaagccgccggggccgcgttcgacggaacgccgcgggcggtaatt

SEQ ID NO: 14824 - DNA, 260 bp, Unknown
  Description of Unknown: LeftRegion for integrase B1825 sequence
aaagaatttgaaaagcagtacatgagcgcggtactgctgtcgctctacgaaaacaagatgatcaattatcagcagtatgaagaatgtaagcgcaggctcaaaattgtttagctggactttgaagattctttgcatataatgtgtgttgaaagcgggcgccggaataaacaaaggcgcccgcaaatgaaaggaggataaaaatgtttattgatgataacagaccaaaacgggtggcggcgtactgccgcgtgtctaccgac

SEQ ID NO: 14825 - DNA, 109 bp, Unknown
  Description of Unknown: LeftRegion for integrase B1826 sequence
actggtaaaaaaatatccggacgatttttctttaaattaggaaataaaaatgaaaacgattaagtgtgcaatctataccagaaaatctacagacgaaggcttagataaa

SEQ ID NO: 14826 - DNA, 260 bp, Unknown
  Description of Unknown: LeftRegion for integrase B1827 sequence
ttacggccttacaagcctgtgcatcatcctggccatggccctgatggcctatgttgttctggatgcccagcatcccacgattggccttatccgggccgacggtatcaatatgtgggtgtatctggcggcattggcaatcatcgggatttgcctgtttatcggacagacaataattaaaaagagacttcggaggaaagaacatgaaaatgcagattgatttgtccgccctgacaccggcggaaagaacactattcgacggc

SEQ ID NO: 14827 - DNA, 260 bp, Unknown
  Description of Unknown: LeftRegion for integrase B1828 sequence
ttacggtcttacaagcctgtgcatcatcctggctatggccctgatggcctatgtcgtcctggatgcccggaatcccacgattggcctcatccggtccgacggtatcaatatgtgggtgtatctggtggcattggcaatcatcgtgacttgcctgtttatcggacaaaccgtgatgaaaaagagactgcggaggaaagaacatgaaaatgcagattgatttgtccgccctgacaccggcggaaagaacactattcgacagc

SEQ ID NO: 14828 - DNA, 260 bp, Unknown
  Description of Unknown: LeftRegion for integrase B1829 sequence
ctttgtctggaatagatgcccaccgtgacggaatttctttccagtttggttctaacaactacaccgtccttttaaataatgcagcatatgcaagtcgtattttggaggcagcaatcaacggagttccagctgccgatgaactggtttcttcggccgaagtgtaagtgcaatatgagatggtttaaatggagggtaatgggatgaacgaacaaaataaatggcccattgctgatattttggcccggtactcaacagacaat

SEQ ID NO: 14829 - DNA, 260 bp, Unknown; identical to SEQ ID NO: 13421
  Description of Unknown: LeftRegion for integrase B1830 sequence

SEQ ID NO: 14830 - DNA, 260 bp, Unknown
  Description of Unknown: LeftRegion for integrase B1831 sequence
cggggagattggttctgtagtagcgacaattatattcggcgtcttattcattgcggttttaggttttctaaaatagtaaccgtttttcagccattaaacgcaattttgagagtttttgtatctaatttagccttttaagcataaaattggagccttaattacaaatttaggctcattttcgttagataagaggtgatactttgagttcggttgataaaatcgccgttatttacgcgcgttattcgtctcacggccagacc

SEQ ID NO: 14831 - DNA, 260 bp, Unknown
  Description of Unknown: LeftRegion for integrase B1832 sequence
gacaaaatcctcgaactgcgcgaatcgaccgggatgaaccgccgggagttttgcactttcttccaaattccctaccgcactgtaacagaatgggaactcggccaccgccatgcgccagagtatgtactccggttgctagagtattatatccagcatgaaaatctcacacaacaaccaaccgccgaaagtgaggatttcttatgaaaaaagcacgcaccaaatgctacatttatactcgcgtatctacggccatgcaggtg

SEQ ID NO: 14832 - DNA, 260 bp, Unknown; identical to SEQ ID NO: 13341
  Description of Unknown: LeftRegion for integrase B1833 sequence

SEQ ID NO: 14833 - DNA, 260 bp, Unknown
  Description of Unknown: LeftRegion for integrase B1834 sequence
gtatctgataccctatggatagggtatctataccgtatccataccatagcgatacctcgcgtgcgcgtgcgcgggtgcgcgtgatcgggcgcgcactgttactgtctctgtatctgtaactggtactgtatctgtaaactgttatctgtttctgtatttctatcttaggaaatctatcgttagaagaaggaggtggcgctgtgcctaaaaaacctacaaagcacccggccaagccgaaacggggcaagaagctggaaatc

SEQ ID NO: 14834 - DNA, 260 bp, Unknown; identical to SEQ ID NO: 14687
  Description of Unknown: LeftRegion for integrase B1835 sequence

SEQ ID NO: 14835 - DNA, 109 bp, Unknown
  Description of Unknown: LeftRegion for integrase B1836 sequence
cgggcaaacgaatttccggacgctttttctttggattgggagagaataaatgaaaactatacgatgtgccgtttatacccgaaaatcaactgaagatggtctggaaaaa

SEQ ID NO: 14836 - DNA, 260 bp, Unknown
  Description of Unknown: LeftRegion for integrase B1837 sequence
aagaaaagaatttttcaaagtaaatatagatgacttaagaaaaatagttgataatatagatccttctgctgagtttaatactacaatgttagcagaacagtatagagaaacattagctcttgaagaataagtattcagctactttgtagctgtttattttatagtttaaaataacatctattcgttaaggagatgataaattgaacaccattgctatttatactcgtaaatctaaattcactggaaaaggtgaatctatt

SEQ ID NO: 14837 - DNA, 260 bp, Unknown
  Description of Unknown: LeftRegion for integrase B1838 sequence
ggctactggctgtaaaatgctggtagccctcattttttagttgtatctagtatataaggggtgtataatagatagaaactgaaaaagagcctcataaagccctctattttatcgagggtaaagaagttacacctaatatataaaagtggctgtatgaggcacacaggagctcacaggactattacaggagggtaaacaggatggcatacaggaaaataacggatataagagatactattggtatgagagcggtattttat

SEQ ID NO: 14838 - DNA, 260 bp, Unknown; identical to SEQ ID NO: 14548
  Description of Unknown: LeftRegion for integrase B1839 sequence

SEQ ID NO: 14839 - DNA, 260 bp, Unknown; identical to SEQ ID NO: 13032
  Description of Unknown: LeftRegion for integrase B1840 sequence

SEQ ID NO: 14840 - DNA, 260 bp, Unknown
  Description of Unknown: LeftRegion for integrase B1841 sequence
aggtgattgcatggaaaaagttattttgattgccataaacgaaaggctttttaaactcggactaatcaatgaagaaaccagaaataaagtattggcagaaattaatgcaacaaaataacgaaaaaactattgaatggagttgagaataatgattataatattcttgattccattcctgcaattacaaaggggaatgatttatgaacatatattatgcaagggaaagattaaggacaggatctatttttgacctaaagtta

SEQ ID NO: 14841 - DNA, 260 bp, Unknown
  Description of Unknown: LeftRegion for integrase B1842 sequence
ccaatattcgataccctatggatagggtatctataccgtatccataccgtagcgatacttcgcgtgcgcgcgtgcgtgtgcgcgcgatcatgcgcgcactgtctctgtacctgtctctgtatctgagactgtatctgtaatctgtttctaattctgaaattctactactgcaatctatcgttagaaggggggtggcgctgttgccgaaaaagactgcaaagcacccggcaaagccgaagcggggcaagaaactggaaatc

SEQ ID NO: 14842 - DNA, 260 bp, Unknown
  Description of Unknown: LeftRegion for integrase B1843 sequence
gaggacaacgatggcacgtgccttcctccggttggaacccgtctggttaagacctaccgcggaaaagaatataatgttattgtttctaccgccggctttcaatttgaggggatttattacaaaagtctgtccgcggttgctttaaaaatcacgggcaaacgaatttccggacgctttttctttggattgggagagaataaatgaaaagcatacgatgtgctgtttatacccgaaaatcaacggaagatggtcttgaaaaa

SEQ ID NO: 14843 - DNA, 260 bp, Unknown
  Description of Unknown: LeftRegion for integrase B1844 sequence
aaatacagatatgctagttttaaaagatttactacttttagatttttgactggttcagataaatatattactgaaaattttaaagattttatagattctaaaaacaaagattatcacgaacacttaaattttataagtgcttttcaaggtaattttttttagcagcaaacagaacgtatattcgttaaggagatgataaattgaacaccattgctatttatactcgtaaatctaaattcactggaaaaggtgaatctatt

SEQ ID NO: 14844 - DNA, 260 bp, Unknown
  Description of Unknown: LeftRegion for integrase B1845 sequence
acgtatgttttaatacatttaggaggtggatttaatgtttaaactttacaaaataaaaatcaaaatatcactactaacattgactaacaaatctttatactatctgaaaaaactattaaacataaaagtagttgaagacctttacgtttcaagctactacaaaataatatctctattttctgagcttgagagtgttataaatgaaagcagctctttacgttagagtatcgacaacttatcagatagataaagattcgtta

SEQ ID NO: 14845 - DNA, 260 bp, Unknown
  Description of Unknown: LeftRegion for integrase B1846 sequence
gaggacaacgatggcacgtgccttcctccggttggaacccgtctggttaagacctaccgcggaaaagaatataatgttattgtttctaccgccggctttcaatttgaggggatttattacaaaagtctgtccgcggttgctttaaaaatcacgggcaaacgaatttccggacgctttttctttggattgggagaaaataaatgaaaaccatacgatgtgccgtttatacccggaaatcaacggaagatggtcttgaaaaa

SEQ ID NO: 14846 - DNA, 260 bp, Unknown
  Description of Unknown: LeftRegion for integrase B1847 sequence
cgtgaagtagacattgaagatggagatattgtcgtggccgtggtagatcggcaagacggttttatcaaacaagtccactttgaagagaatatccttaccctgcattccttcaacccttactaccctgatatggtctttaaggggaacgagatcaagcaagtccgctttgtaggtaaagcccgagaggtgaagagaattctatgaagaagttcaaattccctattgacttgtctatgctgacagaagaagagatcaaccaa

SEQ ID NO: 14847 - DNA, 260 bp, Unknown
  Description of Unknown: LeftRegion for integrase B1848 sequence
gaggataacgatggcacgggacttcctccggttggaacccgtctggttaagacctatcgcggaaaagaatataatgtcattgtttctaccgccggctttcaatttgaggggatttattacaaaagtctgtccgcgattgctttaaaaatcacgggcaaacgaatttccggacgctttttctttggattgggagagaataaatgaaaaccatacgatgtgccgtttatacccggaaatcaacggaagatggtcttgaaaaa

SEQ ID NO: 14848 - DNA, 260 bp, Unknown
  Description of Unknown: LeftRegion for integrase B1849 sequence
cgcagaaattgagagcggctgtattgccgtggtcgtggtagacggtgtggaaggatttttgaaacaggtcgagttcggtgagaactctacctcgcttcactccttcaacccttactatcctgatatggagtttgtaggtgccgaccagaaacgcttgcactttatcggtcgtgtccgggaaatgaagcggaggttctgatatgcgtcagaagtttaagatcgacctctctatgctgaccccggaagaacagcagcagttt

SEQ ID NO: 14849 - DNA, 260 bp, Unknown
  Description of Unknown: LeftRegion for integrase B1850 sequence
ttacaaagaaaacaaattatctagttgtcggctcattcgatttcataaaatcagtaaaaggcggcaaatcttcaaagatagtaaaagctgaacaaatgcgccttgacggtttcgacattaacgttattacagagaacacatttttagatatgctagcaggaaaataaaaagcctgctccgagtggataggagggcggacaatggcaagagccgcaaagcaagacaataattcagaaataattgacggcgtgatatatgcc

SEQ ID NO: 14850 - DNA, 260 bp, Unknown
  Description of Unknown: LeftRegion for integrase B1851 sequence
aatctgcttttgttgatctacgttgagtgcttcaaacatggtcaaggcttccttgtcagaaaccttaccttctttgttagtgatatgacatattctactccaatcttaggaagttcttcctatgtattagcgccaagtgatattatagcactttatctttcgtttgccattggtaaatagaggaaaggataacagatattatgacagttaaaaaatttccaatcgacctctcctgtctgacagaggaagaaatctctcaa

SEQ ID NO: 14851 - DNA, 260 bp, Unknown
  Description of Unknown: LeftRegion for integrase B1852 sequence
tgaggtgattgcatggaaaaagttattttgattgccataaatgaaaggctttttaaactcggactaatcaatgaagaaaccagaaataaagtattggcagaaattaatgcaacaaaataacaaaaactattgaatggagttgagaataacgattataatattcttgattccattcctgcaattacaaaggggaatgatttatgaacatatattatgcaagggaaagattaaggacaggatctatttttgacttaaagtta

SEQ ID NO: 14852 - DNA, 260 bp, Unknown
  Description of Unknown: LeftRegion for integrase B1853 sequence
ggctactggctgtaaaatgctggtagccctcattttttagttgtatctagtatataaggggtgtataatagataggaactgaaaacagcatcataaagccatctattttatcgagggtaaagaagtctacacctaatatataaaagtggctgtatgaggcacacaggagctcacaggactattacaggagggtaaacaggatggcatacaggaaaataacggatataagagatactattggtatgagagcggtattttat

SEQ ID NO: 14853 - DNA, 260 bp, Unknown; identical to SEQ ID NO: 13476
  Description of Unknown: LeftRegion for integrase B1854 sequence

SEQ ID NO: 14854 - DNA, 109 bp, Unknown
  Description of Unknown: LeftRegion for integrase B1855 sequence
cgggcaaacgaatttccggacgctttttctttggattgggagagaataaatgaaaaccatacgatgtgccgtttatacccggaaatcaacggaagatggtcttgaaaaa

SEQ ID NO: 14855 - DNA, 260 bp, Unknown; identical to SEQ ID NO: 13530
  Description of Unknown: LeftRegion for integrase B1856 sequence

SEQ ID NO: 14856 - DNA, 260 bp, Unknown; identical to SEQ ID NO: 13077
  Description of Unknown: LeftRegion for integrase B1857 sequence

SEQ ID NO: 14857 - DNA, 260 bp, Unknown; identical to SEQ ID NO: 13013
  Description of Unknown: LeftRegion for integrase B1858 sequence

SEQ ID NO: 14858 - DNA, 260 bp, Unknown
  Description of Unknown: LeftRegion for integrase B1859 sequence
gatacggattacacggtagatcaaaagcgcaacccgtctctgccagaggatgttactactatgctttctgagctcgacagcgcggacctcgaaaaagttatgatctacgcccgcggtttgctggacggggacaagtatcagaaacgccgtccgcggtaaagcaggaagtgcttctggcacgaaatagaaaggggcagacaatgagagtatccgtaaacttaaacgcacaaaagccggataccacgacaaacgccgtcatt

SEQ ID NO: 14859 - DNA, 260 bp, Unknown
  Description of Unknown: LeftRegion for integrase B1860 sequence
aggtgattgcatggaaaaagttattttgattgccataaatgaaaggctttttaaactcggactaatcaatgaagaaaccagaaataaagtattgacagaaattaatgcaacaaaatagcgaaaaaactattgaatggagtcaagaataacgattataatattcttgattccattcctgcaattacaaaggggaatgatttatgaacatatattatgcaagggaaagattaaggacagggtctatttttgacctaaagtta

SEQ ID NO: 14860 - DNA, 260 bp, Unknown; identical to SEQ ID NO: 14583
  Description of Unknown: LeftRegion for integrase B1861 sequence

SEQ ID NO: 14861 - DNA, 260 bp, Unknown; identical to SEQ ID NO: 14186
  Description of Unknown: LeftRegion for integrase B1862 sequence

SEQ ID NO: 14862 - DNA, 260 bp, Unknown
  Description of Unknown: LeftRegion for integrase B1863 sequence
ccctcacgatctgaggggaaaacatgaatacaccgccaataagagatcgtaccaaatcctcattccccacgccgaactgaaagccgccgtgaagaagggcttgactgagatttgggaactggctgaatactttgatgtaccgtgtgagttcatgcaaagagccgccgagtattggcagagggtagaaatggcaggataatatgaaaaagaagtttcccattgatctgtctatgctcacccctgaggaaattgaccagttt

SEQ ID NO: 14863 - DNA, 260 bp, Unknown
  Description of Unknown: LeftRegion for integrase B1864 sequence
ctatggcaaaaagcaaaactgaaatccatgtcacaacggtatttgacggcgaactggacgctacggacgttttcgtgagcctgattgcacagaaatacagccagagaaatgataaagaatatcttgtgaaaaagcaagatttagagtataataaagacaaggttcagcatgaccgtgttccgtctggattgtgcgggtaaatggttatgatgaacggaatggaatatacaggcatggacgcaatactggcgggcagcttc

SEQ ID NO: 14864 - DNA, 260 bp, Unknown
  Description of Unknown: LeftRegion for integrase B1865 sequence
aggtgattgcatggaaaaagttattttgattgccataaacgaaaggctttttaaactcggactaatcaatgaagaaaccagaaataaagtattggcagaaattaatgcaacaaaataacgaaaaaactattgaatggagtcgagaataacgattataatattcttgattccattcctgcaattacaaaggggaatgatttatgaacatatattatgcaagggaaagattaaggacaggatctatttttgacctaaagtta

SEQ ID NO: 14865 - DNA, 260 bp, Unknown
  Description of Unknown: LeftRegion for integrase B1866 sequence
aattctattctgatgatttaatagacagttgtgcatttttaaatcaactacctttttcttatttttctatcgatacatttaaacttatagtaaatgatttaatagaaaatgatgagataaatctgaatgattataaaaaatatattaatgaacctaaataaaactctcacggaaatattttaatctaaggagatgataaattgaacaccattgctatttatactcgtaaatctaaattcactggaaaaggtgaatctatt

SEQ ID NO: 14866 - DNA, 260 bp, Unknown
  Description of Unknown: LeftRegion for integrase B1867 sequence
tactttgtagatatggtatctataccgtatctataccgtatccataccgtaccgatacctcgcgtgcgcgcgtgcgtgtgcgcgcgatcgtgcgcgcactgtctctgtatctgtatctgtatctgagactgtatctgtaatctgtttctgattctgaatatctactactgcaaatctatcgttagaagggggtggcgctgttgccgagaaaacctgcaaagcacccggcgaagccgaagcggggcaagaagctggaaatc

SEQ ID NO: 14867 - DNA, 260 bp, Unknown
  Description of Unknown: LeftRegion for integrase B1868 sequence
cgaacaatagataccctatagatatggtatctataccgtatctatatggtagcgatacatcgcgtgcgcgcgtgcgtgtgcgcgcgatcgtgcgcgcactgtctctgtacctgtatctgtatctgagactgtatctgtaatctgtttctgattctgaatatctactactgcaaatctatcgttagaagggggtggcgctgttgccaagaaaacctgcaaagcacccggcgaaaccgaagcggggcaagaagctggaaatc

SEQ ID NO: 14868 - DNA, 260 bp, Unknown; identical to SEQ ID NO: 14237
  Description of Unknown: LeftRegion for integrase B1869 sequence

SEQ ID NO: 14869 - DNA, 260 bp, Unknown
  Description of Unknown: LeftRegion for integrase B1870 sequence
gaggacaacgatggcacatgccttcctccggttggaacccgtctggttaagacctaccgaggaaaagaatataatgtcattgtttctaccgccggctttcaatttgaggggatttattacaaaagtctgtccgcggttgctttaaaaatcacaggcaaacgaatttccggacgctttttctttggattgggggagaataaatgaaaaccatacgatgtgctgtttatacccgaaaatcaacggaagatggtcttgaaaaa

SEQ ID NO: 14870 - DNA, 260 bp, Unknown
  Description of Unknown: LeftRegion for integrase B1871 sequence
gaaacagatgacacgggctttttgcctccggttgggacacgtttggtgaagacgtatagagggtgtgaatacaacgtgattgtgtcaaccgcaggtttccaatttgaaggaatttattataaaagtctgtcggcagtggcacaaaaaataacgggaaagcgaatttcaggccgcttcttctttggcttgggagaaagtaaatgaaaacgatgcgatgcgccatttacactcgtaaatcaaccgaagatggtttggataaa

SEQ ID NO: 14871 - DNA, 260 bp, Unknown; identical to SEQ ID NO: 14449
  Description of Unknown: LeftRegion for integrase B1872 sequence

SEQ ID NO: 14872 - DNA, 260 bp, Unknown
  Description of Unknown: LeftRegion for integrase B1873 sequence
gcatctgataccctatggatagggtatctataccgtatccatatcatagcgatacctcgcgtgcgcgtgcgcgggtgcgcgcgatcgggcgcgcactgttactgtctctgtatctgtaactggtactgtatctgtaaactgttatctgtttctgtatttctatcttaggaaatctatcgttagaagaaggaggtggcgctgtgcctaaaaaacctacaaagcatccggccaagccgaaacggggcaagaagctggaaacc

SEQ ID NO: 14873 - DNA, 260 bp, Unknown; identical to SEQ ID NO: 14864
  Description of Unknown: LeftRegion for integrase B1874 sequence

SEQ ID NO: 14874 - DNA, 260 bp, Unknown
  Description of Unknown: LeftRegion for integrase B1875 sequence
gaaacggatgacacgggctttttgcctccggtcgggacacgtttggtgaagacgtatcgagggcgtgaatacaacgtgattgtgtcaaccgcaggtttccaatttgaaggaatttattataaaagtctgtcggcagtggcgcaaaaaataacgggaaagcgaatttcaggccgcttcttctttggcttgggagaaagtaaatgaaaacgatgcgatgcgccatttacactcgtaaatcaaccgaagatggtttggataaa

SEQ ID NO: 14875 - DNA, 260 bp, Unknown
  Description of Unknown: LeftRegion for integrase B1876 sequence
aggtgattgcatggaaaaagttattttgattgccataaatgaaaggctttttaaactcggactaatcaatgaagaaaccagaaataaagtattgacagaaattaatgcaacaaaatagcgaaaaaactattgaatggagtcaagaataacgattataatattcttgattccattcctgcaattacaaaggggaatgatttatgaacatatattatgcaagggaaagattaaggacaggatctatttttgacctaaagtta

SEQ ID NO: 14876 - DNA, 260 bp, Unknown
  Description of Unknown: LeftRegion for integrase B1877 sequence
tgcttattttcttgtgtgttctttaatgtgtaacgtttttcttggattttcaggtgtaatttgtaatgtttttcttaaaaattttgaaaacatttccaaaaactaattctgtgtttgatatagatatatgaattactatgtgatataatcatcataataaagtgatgatacaacgaaattgaaaatagggaagtgaagaaatggatattttaaaaacgagggaacagctcaggagttgcagtatatatgacctgccgttg

SEQ ID NO: 14877 - DNA, 260 bp, Unknown
  Description of Unknown: LeftRegion for integrase B1878 sequence
caaaggtctggtgaaacagttggaatacgaaggctattcaaatgaagctgcaacatttgcagtagataattgtggcgctgactggaatgaacaggctgcaaaagtagctgaaagttatatcaaccattcttctttttcacgttctggattgattgatcagttacagtacgaaggatttacaaaagatcaggcagagtacggtgctactgctgttggatattaattttaatagaacttttgaaccgaactatagattaata

SEQ ID NO: 14878 - DNA, 260 bp, Unknown; identical to SEQ ID NO: 14628
  Description of Unknown: LeftRegion for integrase B1879 sequence

SEQ ID NO: 14879 - DNA, 260 bp, Unknown
  Description of Unknown: LeftRegion for integrase B1880 sequence
ggctactggctgtaaaatgctggtagccctcattttttagttgtatctagtatataaggggtgtataatagataggaactgaaaacagcctcataaagccctctattttatcgatagtaaagaagtctacacctaatatataaaagtggctgtatgaggcacacaggagctcacaggactattacaggagggtaaacaggatggcatacaggaaaataacggatataaaagatactattggtatgagagcggtattttat

SEQ ID NO: 14880 - DNA, 260 bp, Unknown
  Description of Unknown: LeftRegion for integrase B1881 sequence
cacctacgctgtaagaacctttttcagcgaggatgctagggataacatcaccgaaaaggtgcagcgcatcatcctgaaaagcgatgataatagcaaagagatttgaaactaccgcattaaagcgttaaagtttacagtcggatatggtagaatgggttcacctataaattcgatcatatccggctgtggaaaggagagctatgacaaaacaaccggataaaatcacagccctgtactgccgcctgtcccgtgacgatgaa

SEQ ID NO: 14881 - DNA, 260 bp, Unknown
  Description of Unknown: LeftRegion for integrase B1882 sequence
ctaaatctgaaactctttccgtcaaaggctgcaaagtcaagattacttatgcgccttcggatacggactgtctggatgcgatccagaagctgctgcaaaccaccatcctgcgcacggcagggcacaccgctgcctgacatccttgtgttccttgaatgcgtgagataagataaaatcgaactgaaccttgaaaacaaaatatggacgaaacacgtttgatttttccttcctcactcaaagaaagagagattgaaatgaaa

SEQ ID NO: 14882 - DNA, 260 bp, Unknown
  Description of Unknown: LeftRegion for integrase B1883 sequence
aaattgacatgaaaaacgctatcaaagaaatctgatcggaactgatatgggcaactatatgagtgcagacgaactggccggaagaaaaaacctgatcaacctgatcgccgaatccgtcgcacacgacatcgaacaagaaaaaaacaaccccgctgtatctgataacatcatcctgttagtgcccccagaaaaacgaaaaaatgaaatctaccatttacgcccgctacagcaccgacaaacaacgcgagtcatccatcgat

SEQ ID NO: 14883 - DNA, 260 bp, Unknown
  Description of Unknown: LeftRegion for integrase B1884 sequence
tatatatggtatcgcacgcaaactttttgagaaaatcatcatggtataccgtagtgatacctcgcgtgcgcgtgcgtgtgcgcgcgatcgtgcgcgcactgtctctgtacctgtatctgtatctgagactgtatctgtattctgtttctgattctgaatatctactactgcaaatctatcgttagaagggggtggcgctgttgccgagaaaacctgcaaagcacccggcgaagccgaagcggggcaagaagctggaaatc

SEQ ID NO: 14884 - DNA, 260 bp, Unknown
  Description of Unknown: LeftRegion for integrase B1885 sequence
cctgcagagatgctgcgtgagtatttcaaccgcgtatacgacggggtgtgcgatgaggagacggaaggttacttgtacaacctggagcaagccgccgaagccgccgggttcgaggtcgtggagaaggactttggagaagcgtaggaggcattgaaggcaatgaatacatataagcagaaattacgggagggggtaagagcttggcacgcaagaagaagttcgagctgaacgacaacaatctcgccatcgcctactaccga

SEQ ID NO: 14885 - DNA, 260 bp, Unknown; identical to SEQ ID NO: 13421
  Description of Unknown: LeftRegion for integrase B1886 sequence

SEQ ID NO: 14886 - DNA, 260 bp, Unknown
  Description of Unknown: LeftRegion for integrase B1887 sequence
ctaaatcggaaactctttccgtcaaaggctgcaaagtcaagatcacctatgcgtctgcggatacggactgtctggatgcaatccagaagctgctgcaaaccaccatcctgcgcacggcagggcacaccgctgcctgacatccttgtgttccttgaatgcgtgagataagataaaatcgaactgaaccttgaaaacaaaatatggacgaaacacgtttgatttttcctttctcactcaaagaaagagagattgaaatgaaa

SEQ ID NO: 14887 - DNA, 260 bp, Unknown
  Description of Unknown: LeftRegion for integrase B1888 sequence
aagttagttaggaggttatatatggacaagaatacatcacaaagtattattgataagattagtaattttaaaatacagctaatcttgaacaagaacttatatattgatgaagtaataacaaaggaatactatgaagttgtagaaaataacctattagaaaagatacatactctatctaatgaattggagttgtatgtataatgatgactctatttgaaataagaaatgctttagctgatggtacttctatctatgaacta

SEQ ID NO: 14888 - DNA, 260 bp, Unknown
  Description of Unknown: LeftRegion for integrase B1889 sequence
aatctgcttttgttgatctacgctgagtgcttcaaacatggttaaggcttccttgtcagaaaccttaccttctttgttagtgatatgacatattctactccaatcttaggaagttcttcctatgtattagcgccaagtgatattatagcactttatctttcgtttgccattggtaaatagaggaaaggataacggacattatgacagttaaaaaatttccaatcgacctctcctgcctgacagaggaagaaatctctcaa

SEQ ID NO: 14889 - DNA, 260 bp, Unknown; identical to SEQ ID NO: 13412
  Description of Unknown: LeftRegion for integrase B1890 sequence

SEQ ID NO: 14890 - DNA, 260 bp, Unknown
  Description of Unknown: LeftRegion for integrase B1891 sequence
aatctgcttttgttgatctacgctgagtgcttcaaacatggtcaaggcttccttgtcagaaaccttaccttctttgttagtgatatgacatattctactccaatcttaggaagttcttcctatgtattagcgccaagtgatattatagcactttatctttcgtttaccattggtaaatagaggaaaggataacagacattatgacagttaaaaaatttccaatcgacctctcctgtctgacagaggaagaaatctctcaa

SEQ ID NO: 14891 - DNA, 260 bp, Unknown
  Description of Unknown: LeftRegion for integrase B1892 sequence
ataatccaaaagggttattttgagagggctatcagtgtaagggctgatagccctatttttttttgtgtctaaatttcaggagatttctggttattactcaaataataagtaatgggtttacatagtatcaaaaagatgtataataagtatgagatattatgacaaacctgtataacaaggataatacaggaggtcacaggatgaacaggaaagaactattatttaaaggataccgggttgtattttatgcccgtgtttca

SEQ ID NO: 14892 - DNA, 260 bp, Unknown
  Description of Unknown: LeftRegion for integrase B1893 sequence
aataccatatagggcatacgatttacagagttaaaaccgtctttaacccagcttttcggcaaagcctgagcgacattcttgcaaggctcatcacggctgactgtgagaaaatgctcggtgaaaccggacaagaacaggacaagcaggctgtttgattttggaatatcggcgcattgaaaaaagaaataaggtgcgctataatgataatagcttgctgtatcctgtcggaaagtgaggttaaaatgacagacaagataaca

SEQ ID NO: 14893 - DNA, 260 bp, Unknown
  Description of Unknown: LeftRegion for integrase B1894 sequence
tattagtgctgttggctacctttgcagcaataattacacatgttacatatatacaaaaaacgtggagccagtcctgtcactcgttccactgtagaaaggccttcgcattgccctgattgtaagttgaaaatcaaagttctagcagctattgcatattccaaatattctttgtatctttgcaccatcaaaacaaagaaatcatggataaaagaatactgtgcattattagagcgagcaccgagaaacaagaaacggaatcg

SEQ ID NO: 14894 - DNA, 260 bp, Unknown
  Description of Unknown: LeftRegion for integrase B1895 sequence
cacctacgctgtaagagcctttttcagtgaaggtgcaagggagaacatcaccgaaaaggtgcagcgcatcatcctgaaaaacgatgataaaagcaacgaacattaaaactatcgcattaaagcgttgaagtttatggccggatatggtagaatgggctcacctacaaattcgatcatatccggctgtggaaaggagagctatgacaaaacaaccggataaaatcacagccctgtattgccgcctgtcccgtgacgatgag

SEQ ID NO: 14895 - DNA, 260 bp, Unknown
  Description of Unknown: LeftRegion for integrase B1896 sequence
attaaatgctgcgttaaacgacataaattcaaagattgaaaagggctatgtatataagcccagaggaaagagtaggaaataaaaaatccccgcccggcgctggaacaccgaacggggaagaagctgtgatacaatcacaaccttagacaagtttattgtatcatagctccctgaaaatgtcaaggagtgataacaaatatatgaaaaccgccgtaatatacgcccggtattcgtccgacaagcagacggagcagtccatt

SEQ ID NO: 14896 - DNA, 260 bp, Unknown
  Description of Unknown: LeftRegion for integrase B1897 sequence
ccttttaatcggcggtctggttatctgcgtggcgtcgctctggcacctgttcgacgggacgttcttcccgcgcctgctcgtcgggtggctgatgattctggccgcatatctcgtctttaaatacaactagaccccaccgcctcatggtgcgagggatggggtctgccagatagccgcccgtttggagggcatcatagattatgccagaagatataaagaccgccgtcatatacgcccgcttctcgtgctcgaagcagcgc

SEQ ID NO: 14897 - DNA, 260 bp, Unknown
  Description of Unknown: LeftRegion for integrase B1898 sequence
taaaagcgcattgattccttcagatgaaatccggtcagaagaacttctggcggaacaaaaatttgaagcgtttatcacttcgctggcacatatcatcgagaaatatggtatgagagtgctgggcgaggttgacggagctgcgtgagaatcgcagctttacataggatattttccaaaagttaattttggaggtatgaattatgaaccgatatggaaaacgctgtgttttgtatccgagggtcagcacagagatgcaagtg

SEQ ID NO: 14898 - DNA, 260 bp, Unknown
  Description of Unknown: LeftRegion for integrase B1899 sequence
ctaaatcggaaactctttccgtcaaaggctgcaaggtcaaaatcacctatgcgcctacggatacggactgtctggatgcgatccagaagctgctgcaaaccaccatcctgcgcacggcaggacacaccgctgcctgacatccttgtgttccttgaatgcgtgagataagataaaatcgaactgaaccttgaaaacaaaatatggacgaagcacgtttgatttttcctttctcactcaaagaaagagagattgaaatgaaa

SEQ ID NO: 14899 - DNA, 260 bp, Unknown
  Description of Unknown: LeftRegion for integrase B1900 sequence
tatatggtatcgcacgcaaactttttgtgaaaatcatcatggtataccgtagtgatacctcgcgtgcgcgcgtgcgtgtgcgcgcgatcgtgcgcgcactgtctctgtacctgtatctgtatctgagactgtatctgcaatctgtttctgattctgaatatctactactgcaaatctatcgttagaagggggtggcgctgttgccgaaaaaaactgcaaagcacccggccaagccgaagcggggcaagaagctggaaatc

SEQ ID NO: 14900 - DNA, 260 bp, Unknown
  Description of Unknown: LeftRegion for integrase B1901 sequence
ctcagtggcttcgattaaccttttgtttttttgttcatctgtcgttttgttcggatatgcagtttttgcttctttcatattgccttgttcctttcgtcagaatttctaatttcgctacaaccattataatacaattaaatagaactacttcaattttgttattttataacaaatatatgaataagcaaggaggcgagctcatggcacgcaaacgaataaacacaccagaagcgacaggtgtcatatacgctcgtttttct

SEQ ID NO: 14901 - DNA, 260 bp, Unknown
  Description of Unknown: LeftRegion for integrase B1902 sequence
cacctacgccgtaagagccttcttcagcgaggatgcaagggagaacatcactgaaaaggtgcagcgcatcatcctgaaaagcgatgataataacaaagaggtttgaaactaccacattaaagcgttgaagtttacagtcggatatggtagaatgggctcacctacaaatttgatcatatccggctgtggaaaggagaactatgacaaaacaaccggataaaatcacagccctgtactgccgcctgtcccgcgacgatgag

SEQ ID NO: 14902 - DNA, 260 bp, Unknown
  Description of Unknown: LeftRegion for integrase B1903 sequence
tatatggtatcgcacgcaaactttttgggaaaatcatcatggtataccgtagtgatacctcgcgtgcgcgcgtgcgtgtgcgcgcgatcgtgcgcgcactgtttctgtacctgtatctgtatctgagactgtatctgtattctgtttctgattctgaatatctactactgcaaatctatcgttagaagggggtggcgctgttgccgagaaaacctgcaaagcacccggcgaagccgaagcggggcaagaagctggaaatc

SEQ ID NO: 14903 - DNA, 260 bp, Unknown
  Description of Unknown: LeftRegion for integrase B1904 sequence
tgtaacatctggtctttctgtgctgtttggtttgctcctgatagtatatgtaaccttggacgctaggaatccaaatttaggactaattaagggaactgcagcagccccaattgtgtacgttgcggctttttcctttatcggaatgtgcttgtatatcgcccgaaccgtggtaaagagaaacgcaaaacggaggaaacgtgatgcaaacaatgcccattgacctgtcggcgctgactgcggaggaaagacagcagtttgcg

SEQ ID NO: 14904 - DNA, 260 bp, Unknown
  Description of Unknown: LeftRegion for integrase B1905 sequence
gatacaccccctgaaacagatactcttatggttgtcattgttgatgacgaagaaggatttgttaagaaaatcagcattgatgaagatactgtgacccttcgctcttttaacccacactatcctccccgtgtttttggtggtgttgaaattggacgattgcgctttgtcggtagagtcatggagttaaaaaggagatttgcatgaaaaaatttcctatcgacctctcctgtctgacagaggaagaaatctctcaatttcaa

SEQ ID NO: 14905 - DNA, 260 bp, Unknown; identical to SEQ ID NO: 13013
  Description of Unknown: LeftRegion for integrase B1906 sequence

SEQ ID NO: 14906 - DNA, 260 bp, Unknown
  Description of Unknown: LeftRegion for integrase B1907 sequence
gatacacctcccgaaacagatactcttatggttgtcattgttgatgacgaagaaggatttgttaagaaaatcagcattgatgaagatactgtgacccttcgctcttttaatccacactatcctccccgtgtttttggcggtgttgaaattggacgattgcgctttgtcggtagagtcatggagttaaaaaggagatttgcatgaaaaaatttccaatcgacctctcctgtctgacagaggaagaaatctctcaatttcag

SEQ ID NO: 14907 - DNA, 260 bp, Unknown
  Description of Unknown: LeftRegion for integrase B1908 sequence
gacacaccccctgaaacagatactcttatggttgtcattgttgatgacgaagaaggatttattaagaaaatcagtattgatgaagatactgtgacccttcgctcttttaatccacactatcctccccgtgtttttggtggtgttgaaattggacgattgcgctttgtcggtagagtcatggagttaaaaaggagatttgcatgaaaaaatttctaatcgacctctcctgtctgacagaggaagaaatctctcaatttcag

SEQ ID NO: 14908 - DNA, 260 bp, Unknown
  Description of Unknown: LeftRegion for integrase B1909 sequence
gatacacctcccgaaacagatactcttatggttgtcattgttgatgacgaagaaggatttgttaagaaaatcagtattgatgaagatactgtgacccttcgttcttttaacccacactatcctccccgtgtttttggcggtgttgaaattggacgattgcgctttgtcggtagagtcatggagctaaaaaggagatttgcatgaaaaaatttccaatcgacctctcctgtctgacagaggaagaaatctctcaatttcag

SEQ ID NO: 14909 - DNA, 260 bp, Unknown
  Description of Unknown: LeftRegion for integrase B1910 sequence
gccgggctacatccgcacctccgaggtggtcgagatcgtcggacgccgcggcgggctgctgtctgtagggcgcgagggttcgctgacgggcaaccgcgtggactgcttcatcctcgacgacctctacagaaagtaatcaattttgtcgcaaaatatcgtaaaaaacattatatttgcacaaaagattgattattagcgttatggagaaatcgaaacgagttgtgggttatgcccgtgtatcgacggaagcgcaagacatc

SEQ ID NO: 14910 - DNA, 260 bp, Unknown
  Description of Unknown: LeftRegion for integrase B1911 sequence
cgcagaaattgagagcggctgcattgccgtagtcgtggtagacggtacagaagggtttttaaaacaagtcgagttcggtgagaactctacttcgcttcactccttcaacccttactatcccgacatggagtttgtagatgccgatcagaaacgtttgcactttatcggccgcgtccgggaaatgaagcggaggttctgatatgcgtaaaaagtttaatatcgacctctctatgctgaccccggaagaacagcagcaattt

SEQ ID NO: 14911 - DNA, 260 bp, Unknown
  Description of Unknown: LeftRegion for integrase B1912 sequence
ggtgataccctatggatagggtatcgataccgtatccataccgtatcgatagtctatcgatacctcgcgtgcgcgcgtgcgtgtgcgcgcgatcgcgcgcgcactgtctctgtatctgtaactgatactgcatctgtaatctgtttctgtattctgaatatttactactgcaaatctatcgttagaaggaggtggcactgttgccgaagaaacccatcaagcacccagcgaaaccgaagaggggagtaaagctggatatt

SEQ ID NO: 14912 - DNA, 260 bp, Unknown
  Description of Unknown: LeftRegion for integrase B1913 sequence
gtgccagcgtgtgaagacgatcagttcgcgcgaggcgttgtgcatgcgcgtccgcacgaccgaggtataccactcccagcaattggcgcggacgatgggcgaattggcttcgagggcatccttgtacagaaagtaatcaattttgtcgcaaaatatcataaaaaacattatatttgcacaaaagattgattattagcgttatggagaaatcgaaacgagttgtgggttatgcccgtgtatcgacggaagcccaagacatc

SEQ ID NO: 14913 - DNA, 260 bp, Unknown; identical to SEQ ID NO: 14908
  Description of Unknown: LeftRegion for integrase B1914 sequence

SEQ ID NO: 14914 - DNA, 260 bp, Unknown
  Description of Unknown: LeftRegion for integrase B1915 sequence
atcttctgggtcttagtgaagtaagaaaaccttctcccgctttgtcggaagaagaaatgcttctgcttaacgcatacagaagcgctacttcacaaggacgcttccgcattatccaggtctgcatgaatgaacaggatagtgcaggaaaaggggaaaccgcaaatgtagggtgatagacctaaacgaatggaggaagcatcatgtatgaagatataaaaacctgtgtcctgtatgtcaggtattcaagtaacaaccaaacc

SEQ ID NO: 14915 - DNA, 260 bp, Unknown
  Description of Unknown: LeftRegion for integrase B1916 sequence
aaatcttcttcgtgaacacggggttaaatttgaagttgacaatccggatcttttattctccggtgtatgcgtttcttcagaagaaacatcaaaaatcaataataacacccagatattgaaaattcttaaaatttgtttactgattattttttggcctgttggcttatattatttgatacgcaaaaaaaataggagtaccaatgtctgatactcctaaattaaatgcagctttttatggtagatattccgccggacctaat

SEQ ID NO: 14916 - DNA, 260 bp, Unknown
  Description of Unknown: LeftRegion for integrase B1917 sequence
tctggtgatagcgattttgttccagccgcgaaattggctcggagagaaggaatcgattttattctcgatccaatgtgggcagatatcaaggctgatttgtttgaacacatcgacggccttaatagtcaatggaaaaagaaagaaagccaataaggaatatttcggtataaggtgccgggttttttaggagggctgaaagagtggaagaacttgatacgcgcccggtagccgatattctggcccggtactcaacagacaat

SEQ ID NO: 14917 - DNA, 260 bp, Unknown
  Description of Unknown: LeftRegion for integrase B1918 sequence
cgcagaaatcgagagcggctgtattgccgtggtcgtggtagacggtgtggaaggatttttgaaacaggtcgagttcggtgagaactctacctcgcttcactccttcaacccttactatcctgatatggagtttgtaggtgctgatcagaaacgcttgcactttatcggtcgtgtccgggaaatgaagcggaggttctgatatgcgtcagaagtttaagatcgacctctctatgctgaccccagaagaacagcagcagttt

SEQ ID NO: 14918 - DNA, 260 bp, Unknown
  Description of Unknown: LeftRegion for integrase B1919 sequence
gagcctgccgagcctgccgagcctcccgatgctgaaaaactccgcgccgagaacgcggcccttcgtgcgcagcttgctcagcagcagaagtccctgcgcatgcaccggcttgtgacgcttatcctcttgggtattcttttgctgtgtgcccttgcgcttgtggccgacgtgctcatcccatcgatcggctggatccgcacatgaataaaaccgccccggcccagcgccggagcggtatccgtataaccttttgcccttgt

SEQ ID NO: 14919 - DNA, 260 bp, Unknown
  Description of Unknown: LeftRegion for integrase B1920 sequence
ggctactggctgtaaaatgctggtagccctcattttttagttgtatctagtatataaggggtgtataatagataggaactgaaaacagcctcataaagccctctgttttatcgagggtaaagaagtctacacctaatatataaaagtggctgtatgaggcacacaggagctcacaggactattacaggagggtaaacaggatggcatacaggaaaataacggatataaaagatactattggtatgagagcggtattttat

SEQ ID NO: 14920 - DNA, 260 bp, Unknown
  Description of Unknown: LeftRegion for integrase B1921 sequence
tgtaacatctggtctttctgtgctgtttggtttgctcctgatggtatatgtaaccttggacgctaggaatccaaatcttggcctaattaggggcaccacaacagccccaattgtgtacgttgcggctttttccattatcggaatgtgcttgtatatcgtccgaacagtggcaaggcgaaacgcaaaagggaggaaacgggatgcaaacaatgcccattgacctgtcggcgctgactccggaggaaaggcagcagtttgcg

SEQ ID NO: 14921 - DNA, 260 bp, Unknown
  Description of Unknown: LeftRegion for integrase B1922 sequence
gatacacctcccgaaacagatactcttatggttgtcattgttgatgacgaagaaggatttgttaagaaaatcagcattgatgaagatactgtgacccttcgctcttttaacccacactatcctccccgtgtttttggcggtgttgaaattggacgattgcgctttgtcggtagagtcatggagctaaaaaggagatttgcatgaaaaaatttccaatcgacctttcctatctgacagaggaagaaatctctcaatttcag

SEQ ID NO: 14922 - DNA, 260 bp, Unknown; identical to SEQ ID NO: 13516
  Description of Unknown: LeftRegion for integrase B1923 sequence

SEQ ID NO: 14923 - DNA, 260 bp, Unknown
  Description of Unknown: LeftRegion for integrase B1924 sequence
gatacacctcccgaaacagatactcttatggttgtcattgttgatgacgaagaaggatttgttaagaaaatcagtattgatgaagatactgtgacccttcgttcttttaacccacactatcctccccgtgtttttggcggtgttgaaattggacgattgcgctttgttggtagagtcatggagctaaaaaggagatttgcatgaaaaaatttccaatcgacctctcctgcctgacagaggaagaaatctctcaatttcag

SEQ ID NO: 14924 - DNA, 260 bp, Unknown
  Description of Unknown: LeftRegion for integrase B1925 sequence
cgcagaaattgagagcggctgtattgccgtggtcgtggtagacggtacagaagggtttttaaaacaagtcgagttcggtaagaactccacctcgcttcactcgttcaatccgtattatcccgacatggagtttgtagatgccgaccagaaacgtttgcactttatcggtcgcgtccgggaaatgaagcggaggttctgacatgcctcagaagtttaaaatcgacctctctatgctgaccccggaagaacagcagcagttt

SEQ ID NO: 14925 - DNA, 260 bp, Unknown
  Description of Unknown: LeftRegion for integrase B1926 sequence
ccaagctgcccaagcgcgattttaccggatcggaggccgtttctttgttgcttatatttcgaggttttgatagctattcaacctgaaatgtgagataatcaaggtggcaaaatgccgtgtactttgaaaagtgaatacatgaaaaggtgtatctgaacctctcacatttctaaatcattcattgagaggaaggatacattatggctgaaagagtttgttgttcttatcaaaatgtactcagcatccagaacagagtatgc

SEQ ID NO: 14926 - DNA, 260 bp, Unknown; identical to SEQ ID NO: 14916
  Description of Unknown: LeftRegion for integrase B1927 sequence

SEQ ID NO: 14927 - DNA, 260 bp, Unknown; identical to SEQ ID NO: 13476
  Description of Unknown: LeftRegion for integrase B1928 sequence

SEQ ID NO: 14928 - DNA, 260 bp, Unknown
  Description of Unknown: LeftRegion for integrase B1929 sequence
gacacacctcctgaaacagatactcttatggttgtcattgttgatgacgaagaaggatttgttaagaaaatcagcattgatgaagatactgtgacccttcgctcttttaatccacactatcctccccgtgtttttggcggtgttgaaattgggcgattgcgctttgtcggtagagtcatggagttaaaaaggagatttgcatgaaaaaatttccaatcgacctctcctgtctgacagaggaagaaatctctcaatttcag

SEQ ID NO: 14929 - DNA, 260 bp, Unknown; identical to SEQ ID NO: 14010
  Description of Unknown: LeftRegion for integrase B1930 sequence

SEQ ID NO: 14930 - DNA, 260 bp, Unknown
  Description of Unknown: LeftRegion for integrase B1931 sequence
gacacacctcctgaaacagatactcttatggttgtcattgttgatgacgaagaaggatttgttaagaaaatcagcattgatgaagatactgtgacccttcgctcttttaatccacactatcctccccgtatttttggcggtgttgaaattggacgattgcgctttgtcggtagagtcatggagttaaaaaggagatttgcatgaaaaaatttccaatcgacctctcctgtctgacagaggaagaaatctctcaatttcaa

SEQ ID NO: 14931 - DNA, 260 bp, Unknown
  Description of Unknown: LeftRegion for integrase B1932 sequence
tgtaacatctggtctttctgtgctgtttggtttgctcctgatggtatatgtaaccttggacgctaggaatccaaatctaggcctaattagaggcaccacaacagccccaattgtgtacgttgcggctttttccattatcggaatgtgcttgtatatcgtccgaacagtggcaaggcgaaacgcaaaagggaggaaacgggatgcaaacaatgcccattgacctgtcggcgctgactccggaggaaaggcagcagtttgcg

SEQ ID NO: 14932 - DNA, 260 bp, Unknown
  Description of Unknown: LeftRegion for integrase B1933 sequence
aaattgaaattttgcaacaactttgataaagtcgagccgacaaaagtggaaaacacttctgaatcgtgtttggaatcagaattctatgaagcggcggctcatttagtatatctaatattgcagaaaaataaataatcgcaaatgctgttgataattttttattgacagcatttgttttctaagaatgttggaggtaatctatgaataatcacaggaaaatagctgcttgctatatgagatacagttcacacgctcaagat

SEQ ID NO: 14933 - DNA, 260 bp, Unknown
  Description of Unknown: LeftRegion for integrase B1934 sequence
gagcctgccgagtcttccgagcctcccgatgctgaaaaactccgtgccgagaccgtggcccttcgtgcgcagcttgcccagcagcagaagtccctgcgcatgcaccgacttgtgacgctcatcctcttgggtattcttttgctgtgtgcccttgcgcttgtggccgacgtgctcatcccatcaatcggctggatccgcacatgaataaaaccgccccggcccagcgccggagcggtatccgtataaccttttgcccttgt

SEQ ID NO: 14934 - DNA, 260 bp, Unknown
  Description of Unknown: LeftRegion for integrase B1935 sequence
gacacaccccctgaaacagatactcttatggttgtcattgttgatgacgaagaagggtttgttaagaaaatcagcatcgatgaagatactgtgacccttcgctcttttaatccacactatcctccccgtgtttttggtggtgttgaaattggacgattgcgctttgtcggtagagtcatggagttaaaaaggagatttgcatgaaaaaatttccaatcgacctctcctgtctgacagaggaagaaatctctcaatttcag

SEQ ID NO: 14935 - DNA, 260 bp, Unknown; identical to SEQ ID NO: 14933
  Description of Unknown: LeftRegion for integrase B1936 sequence

SEQ ID NO: 14936 - DNA, 260 bp, Unknown; identical to SEQ ID NO: 13129
  Description of Unknown: LeftRegion for integrase B1937 sequence

SEQ ID NO: 14937 - DNA, 260 bp, Unknown; identical to SEQ ID NO: 13476
  Description of Unknown: LeftRegion for integrase B1938 sequence

SEQ ID NO: 14938 - DNA, 260 bp, Unknown; identical to SEQ ID NO: 14904
  Description of Unknown: LeftRegion for integrase B1939 sequence

SEQ ID NO: 14939 - DNA, 260 bp, Unknown; identical to SEQ ID NO: 13013
  Description of Unknown: LeftRegion for integrase B1940 sequence

SEQ ID NO: 14940 - DNA, 260 bp, Unknown
  Description of Unknown: LeftRegion for integrase B1941 sequence
ccgcatgatgagcctgccgagtcttccgatgccgaaaaactccgcgccgagaacgcggcgcttcgtgcacagcttgcccagcagcagaagtccctgcgcatgcaccgacttgtgacgctcatcctcttgagtattcttttgctgtgtgcccttgcgcttttggccgacgtgctcatcccatcgatcggctggatccgcacatgaataaaaccgccccggcccagcgccggagcggtatccgtataaccttttgcccttgt

SEQ ID NO: 14941 - DNA, 260 bp, Unknown; identical to SEQ ID NO: 13402
  Description of Unknown: LeftRegion for integrase B1942 sequence

SEQ ID NO: 14942 - DNA, 260 bp, Unknown
  Description of Unknown: LeftRegion for integrase B1943 sequence
ggctactggctgtaaaatgctggtagccctcattttttagttgtatctagtatataaggggtgtataatagataggaactgaaaacagcctcataaagccctctattttatcgatggtaaagaagtctacacctaatatataaaagtggctgtatgaggcacacaggagttcacaggactattacaggagggtaaacaggatggcatacaggaaaataacggatataaaagatactattggcatgagagctgtattttat

SEQ ID NO: 14943 - DNA, 260 bp, Unknown
  Description of Unknown: LeftRegion for integrase B1944 sequence
ggctactggctgtaaaatgctggtagccctcattttttagttgtatctagtatataaggggtgtataatagataggaactgaaaacagcctcataaagccctctattttatcgaggataaagaagtctacacctaatatataaaagtggctgtatgaggcacgcaggagctcacaggactattacaggagggtaaacaggatggcatacaggaaaataacggatataagagatactattggtatgagagcggtattttat

SEQ ID NO: 14944 - DNA, 260 bp, Unknown; identical to SEQ ID NO: 13442
  Description of Unknown: LeftRegion for integrase B1945 sequence

SEQ ID NO: 14945 - DNA, 260 bp, Unknown
  Description of Unknown: LeftRegion for integrase B1946 sequence
gcccggttatatccgtacggccgacgaagtggaggtcatcggccgccgcggcgggctgctctccgtcgggcgcgaaggggcgctcacgggtaaccgcgtcgactgcttcatcctcgacgacctctacagaaagtaatcaattttgtcgcagaatatcataaaaaacattatatttgcacaaaagattgattattagcgttatggggaaatcgaaacgagttgtgggttatgcccgtgtatcgacggaagcgcaagacatc

SEQ ID NO: 14946 - DNA, 260 bp, Unknown
  Description of Unknown: LeftRegion for integrase B1947 sequence
tgtaacatctggtctttctgtgctgtttggtttgctcctgatgatatatgtaaccttggacgctaggaacccaaatctaggcctaattaggggcaccacagcggccccaattgtgtacgttgcggctttttctattatcggaatgtgcttgtatatcacccgaaccgtcgtaaggcgaaacgccaaaaggaggaaacgtgatgcaaacaatgcccattgacctctcggcgctgactccggaggaaagacagcagtttgcg

SEQ ID NO: 14947 - DNA, 260 bp, Unknown
  Description of Unknown: LeftRegion for integrase B1948 sequence
gtgccagcgggtgaagacgatcagctcgcgcgaagcgttgtgcatgcgggtgcggaccaccgacgtataccactcccagcagttggcgcggatgagcggagaattggcttcgagggcgtccttgtacagaaagtaatcaattttgtcgcaaaatatcataaaaaacattatatttgtacaaaagattgattattagcgttatggagaaatcgaaacgagttgtgggttatgcccgtgtatcgacggaagcgcaagacatc

SEQ ID NO: 14948 - DNA, 260 bp, Unknown
  Description of Unknown: LeftRegion for integrase B1949 sequence
gggctactggctgtaaaatgctggtagccctcattttttagttgtatctagtatataaggggtgtataatagataggaactgaaaacagcctcataaagccctctattttatcgagggtaagaagtctacacctaatatataaaagtggctgtatgaggcacacaggagctcacaggactattacaggagggtaaacaggatggcatacaggaaaataacggatataagagatactattggtatgagagcggtattttat

SEQ ID NO: 14949 - DNA, 260 bp, Unknown; identical to SEQ ID NO: 14628
  Description of Unknown: LeftRegion for integrase B1950 sequence

SEQ ID NO: 14950 - DNA, 260 bp, Unknown
  Description of Unknown: LeftRegion for integrase B1951 sequence
tagcatataaggaaggggggctaagacagtgacggaggttgatcgcgagattgctttggctttattaaaacgactatggaagcgggagttgatttcggaagaaacgtatgtttctgccagcagctcccgtttttttgacaaacggcaatttacatctgatactgaaaccgtcaacaaaataactgaggaggtcagtacggatggtaacaattagatggcttcgagagcagattcggcagggaaaaaccatttacgatctg

SEQ ID NO: 14951 - DNA, 260 bp, Unknown
  Description of Unknown: LeftRegion for integrase B1952 sequence
gtggtgggcggctccggcagcggcaagacccggttttggctcaagcccaaccttttacaatgtcacagttcctatgtggttactgacccgaaaggctataatgaataaggataaagcaaagatgcgtttacaagagagtaaaaatatcgtatctttgttacatatcaagcaaccccactaaaaacaaagaaggtgaaactatggcaaaatccaaccaaggaaaaatcacggcattgtacgaaagactttccagagatgac

SEQ ID NO: 14952 - DNA, 260 bp, Unknown
  Description of Unknown: LeftRegion for integrase B1953 sequence
cgcagaaattgagagcggctgtattgccgtggtcgtggtagacggtacagaagggtttttaaaacaggtcgagttcggtgaaaattccacctcgcttcactccttcaacccttactatcctgatatggagttcgtaggtgccgaccagaaacgcttgcactttatcggtcgtgtccgggaaatgaagcggaggttctgatatgcgtaaaaagtttaatatcgacctctctatgttaaccccggaagaacagcagcagttt

SEQ ID NO: 14953 - DNA, 260 bp, Unknown; identical to SEQ ID NO: 14933
  Description of Unknown: LeftRegion for integrase B1954 sequence

SEQ ID NO: 14954 - DNA, 260 bp, Unknown
  Description of Unknown: LeftRegion for integrase B1955 sequence
tgaaattcattgagtgataccatatggatagggtatctataccgtatccataccgtaccgatacctcacgtgcgcgcgtgcgtgtgcgcacgatcgtgcgcgcactgtctctgtacctgtatctgagactgtatctgtaatctgtttctgattctgaatatctactactgcaaatctatcgttagaagggggtggcgctgttgccgagaaaacctgcaaagcacccggcgaagccgaagcggggcaagaagctggaagtc

SEQ ID NO: 14955 - DNA, 260 bp, Unknown
  Description of Unknown: LeftRegion for integrase B1956 sequence
gggacgcaaaaattgagagcggctggcggtggccgtagtagacggtacagaagggtttttaaaacaagtcgagttcggtgagaactccacctcgcttcactcgttcaatccgtattatcccgacatggagtttgtagatgccgaccagaaacgtttgcactttatcggccgcgtccgggaaatgaagcggaggttctgatatgcctcagaagtttaaaatcgacctctccatgctgaccccggaagaacagcagcagttt

SEQ ID NO: 14956 - DNA, 260 bp, Unknown; identical to SEQ ID NO: 13476
  Description of Unknown: LeftRegion for integrase B1957 sequence

SEQ ID NO: 14957 - DNA, 260 bp, Unknown; identical to SEQ ID NO: 13442
  Description of Unknown: LeftRegion for integrase B1958 sequence

SEQ ID NO: 14958 - DNA, 260 bp, Unknown; identical to SEQ ID NO: 13476
  Description of Unknown: LeftRegion for integrase B1959 sequence

SEQ ID NO: 14959 - DNA, 260 bp, Unknown; identical to SEQ ID NO: 13476
  Description of Unknown: LeftRegion for integrase B1960 sequence

SEQ ID NO: 14960 - DNA, 260 bp, Unknown
  Description of Unknown: LeftRegion for integrase B1961 sequence
ctacggcgctgtagggcttgccatgatgtttggtttgattttgatgatttacgtttccttagacatgcggaatccaaatctaggccttattcgggaggggcatacttccccaattgtatatgtggccgctatcttgatcgttggtgcgtttctgtccatcgggcacgcaatcagactgcaaagaatggagaaaaagaaaaatgcagacaatacccattgatttatcttccttgacggcgcaggagcagagacagttcgcc

SEQ ID NO: 14961 - DNA, 260 bp, Unknown
  Description of Unknown: LeftRegion for integrase B1962 sequence
attgcatatgtaacatctgggctttctgttctgtttggtttgttcctgatggtatatgtgttcctggacctgagaaacccaaatctgggcctgttcaggggcaccacagcagctcccattgtatatgtcgctgtctttgctattgccggaacgttcctgtatatcgtctgtaaagcgaaacgaaaaaaggaggaaacgtgatgcaaacaatgcccattgacctgtcggctctgacaccggcggaaagacaacagttttcg

SEQ ID NO: 14962 - DNA, 260 bp, Unknown
  Description of Unknown: LeftRegion for integrase B1963 sequence
tgtaacatctgggctttctgtgctgtttggtttattcctgatggtatatgtgttcctggacctgagaaacccaaatctgggcctgttcaggggcaccacagcagcccctattgtgtatgttgctgcctttaccattatcggaacgtgcctgtatatcatccgcactgcagtaaagcgaaacgcgaaaaggagaaaacgtgatgcaaacaatacccattgacctgtcggctctgacaccggcggaaagacagcagttttcg

SEQ ID NO: 14963 - DNA, 260 bp, Unknown
  Description of Unknown: LeftRegion for integrase B1964 sequence
cgtgccagcgcgtgaagacgatcaactcgccggagaagttgtgcatacgggtcttcacgaccgaggtgtaccactcccaacagttctcccgcacgacgggcgaattggcctccatcgcatctttgtacatatagtaatcaattttgtcgcagattaacaaaaaaacgttaaatttgcgctaaagattgattgacagcgttatggaaaaatcgaaaagagtagtcggttacgcccgtgtttcgacggaggcacaagacatt

SEQ ID NO: 14964 - DNA, 260 bp, Unknown
  Description of Unknown: LeftRegion for integrase B1965 sequence
gatacacctcccgaaacagatactcttatggttgtcattgtcgatgacgaagaaggatttgttaagaaaatcagcattgatgaagatactgtgacccttcgctcttttaatccacactatcctccccgtgtttttggcggtgttgaaattggacgattgcgctttgtcggtagagtcatggagttaaaaaggagatttgcatgaaaagatttccaatcgacctctcctgtctgacagaggaagaaatctctcaatttcaa

SEQ ID NO: 14965 - DNA, 260 bp, Unknown
  Description of Unknown: LeftRegion for integrase B1966 sequence
gacacacctcctgaaacagatactcttatggttgtcattgttgatgacgaagaaggatttgttaagaaaatcagtattgatgaagatactgtgacccttcgctcttttaatccacactatcctccccgtgtttttggcggtgttgaaattggacgattgcgctttgtcggtagagtcatggagttaaaaaggagatttgcatgaaaaaatttccaatcgacctctcctgtctgacagaggaagaaatctctcaatttcag

SEQ ID NO: 14966 - DNA, 260 bp, Unknown
  Description of Unknown: LeftRegion for integrase B1967 sequence
gtaaaaccatcatttcagaagggtcactttacgaagataagctactgcgatacttctctttatgtgacgcagagggtaaacttcgagtcattcaatgtgccatgaacgagttcgatagaacccaaaaagaaaaaacagaagttgaagaaccgattgctgtcggttaaggttgttgaccttatagaatggagagaaacactatgaaactacctatcgacatctcctgtctgacaaaggaagaaatctctcaatttcaggaa

SEQ ID NO: 14967 - DNA, 260 bp, Unknown
  Description of Unknown: LeftRegion for integrase B1968 sequence
gacacacctcctgaaacagatactcttatggttgtcattgttgatgacgaagaaggatttgttaagaaaatcagcattgatgaagatactgtgacccttcgctcttttaatccacactatcctccccgtgtttttggcggtgttgaaattggacgattgcgctttgtcggtagagtcatggagttaaaaaggagatttgcatgaaagaatttccaatcgacctctcctgtctgaccgaggaagaaatctctcaatttcag

SEQ ID NO: 14968 - DNA, 260 bp, Unknown; identical to SEQ ID NO: 13476
  Description of Unknown: LeftRegion for integrase B1969 sequence

SEQ ID NO: 14969 - DNA, 260 bp, Unknown
  Description of Unknown: LeftRegion for integrase B1970 sequence
cgtgcgagctggtggtcttcacccgctggcacgaggcgttgtgcatgcgggtccgcacgacggaggtgtaccactcccagcagttggcgcggacgagcggcgaattggcttcaagcgcgtctttatacatatagtaatcaattttgtcgcagattaacaaaaaaacgttaaatttgcgctaaagattgattgacagcgttatggaaaaatcgaaaagagtggtcggttacgcccgtgtttcgacggaggcacaagacatt

SEQ ID NO: 14970 - DNA, 260 bp, Unknown; identical to SEQ ID NO: 14908
  Description of Unknown: LeftRegion for integrase B1971 sequence

SEQ ID NO: 14971 - DNA, 260 bp, Unknown; identical to SEQ ID NO: 14904
  Description of Unknown: LeftRegion for integrase B1972 sequence

SEQ ID NO: 14972 - DNA, 260 bp, Unknown; identical to SEQ ID NO: 13129
  Description of Unknown: LeftRegion for integrase B1973 sequence

SEQ ID NO: 14973 - DNA, 260 bp, Unknown
  Description of Unknown: LeftRegion for integrase B1974 sequence
gatacacctcccgaaacagatactcttatggttgtcattgtcgatgacgaagaaggatttgttaagaaaatcagcattgatgaagatactgtgacccttcgctcttttaatccacactatcctccccgtgtttttggcggtgttgaaattggacgattgcgctttgtcggtagagtcatggagttaaaaaggagatttgcatgaaaaaatttccaatcgacctctcctgtctgacagaggaagaaatctctcaatttcag

SEQ ID NO: 14974 - DNA, 260 bp, Unknown
  Description of Unknown: LeftRegion for integrase B1975 sequence
gatacacctcccgaaacagatactcttatggttgtcattgttgatgacgaagaaggatttgttaagaaaatcagtattgatgaagatactgtgacccttcgttcttttaacccgcactatcctccccgtgtttttggcggtgttgaaattggacgattgcgctttgttggtagagtcatggagctaaaaaggagatttgcatgaaaaaatttccaatcgacctctcctgtctgacagaggaagaaatctctcaatttcaa

SEQ ID NO: 14975 - DNA, 260 bp, Unknown; identical to SEQ ID NO: 13552
  Description of Unknown: LeftRegion for integrase B1976 sequence

SEQ ID NO: 14976 - DNA, 260 bp, Unknown
  Description of Unknown: LeftRegion for integrase B1977 sequence
gatacacctcccgaaacagatactcttatggttgtcattgttgatgacgaagaaggatttgttaagaaaatcagcattgatgaagatactgtgacccttcgctcttttaacccacactatcctccccgtgtttttggcggtattgaaattggacgattgcgctttgtcggtagagtcatggagctaaaaaggagatttgcatgaaaaaatttccaatcgacctttcctgtctgacagaggaagaaatctctcaatttcag

SEQ ID NO: 14977 - DNA, 260 bp, Unknown; identical to SEQ ID NO: 13476
  Description of Unknown: LeftRegion for integrase B1978 sequence

SEQ ID NO: 14978 - DNA, 260 bp, Unknown
  Description of Unknown: LeftRegion for integrase B1979 sequence
ttacaaagaaaacaaattatctcgttgtcggctcattcgatttcataaaatcagtaaaaggcggcaaatcttcaaagatagtaaaagctgaacaaatgcgccttgacggtttcgacattaacgttattacagagaacacatttttagatatgctagcaggaaaataaaaagcctgctccgagtggataggagggcggacaatggcaagagccgcaaagcaagacaataattcagaaataattgacggcgtgatatatgcc

SEQ ID NO: 14979 - DNA, 260 bp, Unknown; identical to SEQ ID NO: 14976
  Description of Unknown: LeftRegion for integrase B1980 sequence

SEQ ID NO: 14980 - DNA, 260 bp, Unknown; identical to SEQ ID NO: 14908
  Description of Unknown: LeftRegion for integrase B1981 sequence

SEQ ID NO: 14981 - DNA, 260 bp, Unknown; identical to SEQ ID NO: 13402
  Description of Unknown: LeftRegion for integrase B1982 sequence

SEQ ID NO: 14982 - DNA, 260 bp, Unknown
  Description of Unknown: LeftRegion for integrase B1983 sequence
tggagccgcagggcttgcggttctgttcggcatcttccttatggtatatgtctttctggatatgcaaaatccgaatcttggcctgttccagtccggccacgccgcgccgatcgtttatgtcgcggccttttccattatcgaaacatgcctgtatatcgtccgaactgtgacaaagcgaaacgcaaaaaggaggaaccgcgatgcaaacaataccaattgatctatcggctcttacaccggaggaaagacagcagtttgcg

SEQ ID NO: 14983 - DNA, 260 bp, Unknown
  Description of Unknown: LeftRegion for integrase B1984 sequence
gatacacctcccgaaacagatactcttatggttgtcattgtcgatgacgaagaaggatttgttaagaaaatcagcattgatgaagatactgtgacccttcgctcttttaatccacactatcctccccgtgtttttggcggtgttgaaattggacgattgcgctttgtcggtagagtcatggagttaaaaaggagatttgcatgaaaaaatttccaatcgacctctcctgtctgacagaggaagaaatctctcaatttcaa

SEQ ID NO: 14984 - DNA, 260 bp, Unknown
  Description of Unknown: LeftRegion for integrase B1985 sequence
gacacacctcctgaaacagatactcttatggttgtcattgttgatgacgaagaaggatttgttaagaaaatcagcattgatgaagatactgtgacccttcgctcttttaacccacactatcctccccgtgtttttggcggtgttgaaattggacgattgcgctttgtcggtagagtcatggagctaaaaaggagatttgcatgaaaaaatttccaatcgacctctcctgtctgacagaggaagaaatctctcaatttcaa

SEQ ID NO: 14985 - DNA, 260 bp, Unknown
  Description of Unknown: LeftRegion for integrase B1986 sequence
tggagccgcagggcttgcggctctgttcggtattttccttatgatctatgtctttctggatatgcggaacccgaaccttggtctgttccagtccggccacgcctcgccgatcgtttatgccgcaggcttttccattatcggaacatgcctgtatatcgtccgaactgtgataaagcgaaacgcaaaaaggaggaaacacgatgcaaacaataccaattgatctatcggctcttacaccggaggaaagacagcagtttgcg

SEQ ID NO: 14986 - DNA, 260 bp, Unknown
  Description of Unknown: LeftRegion for integrase B1987 sequence
ttgataaactcgaaggagaggtgaatcgactgcttggatacaggaagtatctaacagctgctgactgggaggaattagaacggaactaccagaaaaacaattgatgacattcgtgacataatcggaaagtacagatgaatctttctcctctcgttgcaaaaagggagaaatctaattgatcggtcaaataggagaaaacaatggcgaaaaaaagatatgacctgcggccggtgcgcaccgtatgcatctatgcgcggtac

SEQ ID NO: 14987 - DNA, 260 bp, Unknown; identical to SEQ ID NO: 14596
  Description of Unknown: LeftRegion for integrase B1988 sequence

SEQ ID NO: 14988 - DNA, 260 bp, Unknown; identical to SEQ ID NO: 14904
  Description of Unknown: LeftRegion for integrase B1989 sequence

SEQ ID NO: 14989 - DNA, 260 bp, Unknown
  Description of Unknown: LeftRegion for integrase B1990 sequence
tggagccgcagggcttgcggttctgttcggcatcttccttatggtatatgtctttctggatatgcaaaacccgaatcttggcctgttccagtccggccacgcctcgccgatcgtttatgtcgcggcctttttcattatcggaacatgcctgtatatcgtccgaactgtgataaagcgaaacgcaaaaaggagtaaacacgatgcaaacaataccaattgatctatcggctcttacgccggaggaaagacagcagtttgcg

SEQ ID NO: 14990 - DNA, 260 bp, Unknown
  Description of Unknown: LeftRegion for integrase B1991 sequence
gacacacctcctgaaacagatactcttatggttgtcattgttgatgacgaagaaggatttgttaagaaaatcagtattgatgaagatactgtgacccttcgctcttttaacccgcactatcctccccgtgtttttggcggtgttgaaattggacgattgcgctttgtcggtagagtcatggagttaaaaaggagatttgcatgaaagaatttccaatcgacctctcctgtctgacagaggaagaaatctctcaatttcag

SEQ ID NO: 14991 - DNA, 260 bp, Unknown
  Description of Unknown: LeftRegion for integrase B1992 sequence
gatacacctcccgaaacagatactcttatggttgtcattgttgatgacgaagaaggatttgttaagaaaatcagtattgatgaagatactgtgacccttcgctcttttaacccacactatcctccccgtgtttttggcggtgttgaaattggacgattgcgctttgtcggtagagtcatggagttaaaaaggagatttgcatgaaaaaatttccaatcgacctctcctgtctgacagaggaagaaatctctcaatttcag

SEQ ID NO: 14992 - DNA, 260 bp, Unknown
  Description of Unknown: LeftRegion for integrase B1993 sequence
gatacacctcccgaaacagatactcttatggttgtcattgttgatgacgaagaaggatttgttaagaaaatcagtattgatgaagatactgtgacccttcgttcttttaacccacactatcctccccgtgtttttggcggtgttgaaattggacgattgcgctttgtcggtagagtcatggagttaaaaaggagatttgcatgaaaaaatttccaatcgacctctcctgtctgacagaggaagaaatctctcaatttcaa

SEQ ID NO: 14993 - DNA, 260 bp, Unknown
  Description of Unknown: LeftRegion for integrase B1994 sequence
gacacacctcctgaaacagatactcttatggttgtcattgttgatgacgaagaaggatttgttaagaaaatcagtattgatgaagatactgtgacccttcgctcttttaatccacactatcctccccgtgtttttggtggtgttgaaattggacgattgcgctttgttggtagagtcatggagttaaaaaggagatttgcatgaaaaaatttccaatcgacctctcctgtctgacagaggaagaaatctctcaatttcag

SEQ ID NO: 14994 - DNA, 260 bp, Unknown
  Description of Unknown: LeftRegion for integrase B1995 sequence
gacacaccccctgaaacagatactcttatggttgtcattgttgatgacgaagaagggtttgttaagaaaatcagcattgatgaagatactgtgacccttcgctcttttaatccacactatcctccccgtgtttttggcggtgttgaaattggacgattgcgctttgtcggtagagtcatggagttaaaaaggagatttgcatgaaaaaatttccaatcgacctctcctgtctgacagaggaagaaatctctcaatttcag

SEQ ID NO: 14995 - DNA, 260 bp, Unknown
  Description of Unknown: LeftRegion for integrase B1996 sequence
cgcagaaatcgagagcggctgtattgccgtggtcgtggtagacggtacagacgggtttttaaaacaagtcgagttcggtgagaactccacctcgcttcactcgttcaatccgtattatcccgacatggagtttgtagatgccgaccagaaacgtttgcactttgtcggtcgcgtccgggaaatgaagcggaggttctgatatgcgtaaaaagtttaatatcgacctctccatgttgaccccggaagaacagcagcaattt

SEQ ID NO: 14996 - DNA, 260 bp, Unknown; identical to SEQ ID NO: 14908
  Description of Unknown: LeftRegion for integrase B1997 sequence

SEQ ID NO: 14997 - DNA, 260 bp, Unknown
  Description of Unknown: LeftRegion for integrase B1998 sequence
tggagccgcggggcttgcggttctgtttggcgccttccttacggtatatgtctttctggatatgcgaaacccgaatcttggcctgttccagtccggccacgcctcgccgatcgtttatgtcgcggccttttccattatcggaacatgcctgtatatcgtccgaactgtgataaagcgaaacgcaaaaaggaggaaccgcgatgcaaacaataccaattgatctatcggctctaacaccggaggaaagacagcagtttgcg

SEQ ID NO: 14998 - DNA, 260 bp, Unknown
  Description of Unknown: LeftRegion for integrase B1999 sequence
gacacacctcctgaaacagatactcttatggttgtcattgttgatgacgaagaaggatttgttaagaaaatcagtattgatgaagatactgtgacccttcgctcttttaatccacactatcctccccgtgtttttggtggtgttgaaattggacgattgcgctttgtcggtagagtcatggagttaaaaaggagatttgcatgaaaaaatttccaatcgacctctcctgtctgacagaggaagaaatctctcaatttcaa

SEQ ID NO: 14999 - DNA, 260 bp, Unknown
  Description of Unknown: LeftRegion for integrase B2000 sequence
gacacacctcctgaaacagatactcttatggttgtcattgttgatgacgaagaaggatttgttaagaaaatcagcattgatgaagatactgtgacccttcgctcttttaacccacactatcctccccgtgtttttggcggtgttgaaattggacgattgcgctttgtcggtagagtcatggagttaaaaaggagatttgcatgaaaaaatttccaatcgacctttcctgtctgacagaggaagaaatctctcaatttcaa

SEQ ID NO: 15000 - DNA, 260 bp, Unknown
  Description of Unknown: LeftRegion for integrase B2001 sequence
tggagccgcagggcttgcggttctgttcggcatcttccttatggtatatgtctttctggatatgcaaaacccgaatcttggcctgttccagtccggccacgcctcgccgatcgtttatgtcgcggccttttccattatcggaacatgcctgtatatcgtccgaactgtgataaaacgaaacacaaaaagggggaaacacgatgcaaacaataccaattgatctatcggctcttacgccggaggaaagacagcagtttgca

SEQ ID NO: 15001 - DNA, 260 bp, Unknown
  Description of Unknown: LeftRegion for integrase B2002 sequence
ctctgtctggtccttcatggtatatccctcctaatttgtggtgtctgtaaatattactaaagtatttcaccacaaatacgactttgttacattctaacgaaccgcgttagggaaatcagcgtcaatgcaagtttggagggcaaacttgctgaaatcggagcattttgtacaattacacttgtacgtgagggggcgcgcgcatggccaggaaaaaggcggagaaggccgagggcaacatctgtgtggtgtacgctcggtat

SEQ ID NO: 15002 - DNA, 260 bp, Unknown
  Description of Unknown: LeftRegion for integrase B2003 sequence
aggaaatcttctcttggtagctatcaactatgacaagaaaacgaagaaacatcagtgccttattgaaaaagtagtataaagatcatgccgtggaaggaaccttcttccacggcttttctataccatgattgagtcattgacttgtacattttgaaaatactgaatgcagtattatactgatgggaaaggagggaaaaccgatgcaatatgataaagcagaccagcaaaactgcccgcgcagagtcgtgttctatgggcgc

SEQ ID NO: 15003 - DNA, 260 bp, Unknown
  Description of Unknown: LeftRegion for integrase B2004 sequence
ctatggagccgcagggcttgcggttctgttcggcatcttccttatggtatatgtctttctggatatgcaaaacccgaacctcgggctttttagaggaagcaacagcagccccgttgtttatgctgctgcgttcgccatcgccggtgtctgtctgctcgtctgccgaaaaatggtaaaaagaagaatggagcaaaagaaaaatgcaaacgatacccattgatttatccgcgctcaccgcccaggagcggcaacagtttgcc

SEQ ID NO: 15004 - DNA, 260 bp, Unknown; identical to SEQ ID NO: 13129
  Description of Unknown: LeftRegion for integrase B2005 sequence

SEQ ID NO: 15005 - DNA, 260 bp, Unknown; identical to SEQ ID NO: 14596
  Description of Unknown: LeftRegion for integrase B2006 sequence

SEQ ID NO: 15006 - DNA, 260 bp, Unknown; identical to SEQ ID NO: 13476
  Description of Unknown: LeftRegion for integrase B2007 sequence

SEQ ID NO: 15007 - DNA, 260 bp, Unknown
  Description of Unknown: LeftRegion for integrase B2008 sequence
tctgataccctatggatagggtatcgataccgtatccataccgtatcgataccctatcgatacctcgcgtgcgcgcgtgcgtgtgcgcgcgatcacgcgcgcactgtctctgtatctgtaactgatactgcatctgtaatctgtttttgcattctgaatatctactactgcaaatctatcgttagaaggaggtggcactgttgccgaagaaacccatcaagcacccagcgaaaccgaagaggggagtaaagctggatatt

SEQ ID NO: 15008 - DNA, 260 bp, Unknown
  Description of Unknown: LeftRegion for integrase B2009 sequence
gacacacctcctgaaacagatactcttatggttgtcattgttgatgacgaagaaggatttgttaagaaaatcagcattgatgaagatactgtgacccttcgctcttttaatccacactatcctccccgtgtttttggcggtgttgaaattggacgattgcgctttgtcggtagagtcatggagttaaaaaggagatttgcatgaaaaaatttccaatcgacctctcctgtctaacagaggaagaaatctctcaatttcaa

SEQ ID NO: 15009 - DNA, 260 bp, Unknown; identical to SEQ ID NO: 14410
  Description of Unknown: LeftRegion for integrase B2010 sequence

SEQ ID NO: 15010 - DNA, 260 bp, Unknown; identical to SEQ ID NO: 13476
  Description of Unknown: LeftRegion for integrase B2011 sequence

SEQ ID NO: 15011 - DNA, 246 bp, Unknown
  Description of Unknown: LeftRegion for integrase B2012 sequence
ggcttgcggttctgttcggcatcttccttatggtatatgtctttctggatatgcaaaacccgaacctcgggcttttccgaggaacccgcagcagcccagttgtttatgctgctgcgttcgccatcgccggtgtctgtctgctcgtctgccgaaaaatggtaaaaagaagaatggagcaaaagaaaaatgcaaacgatacccattgatttatccgcgctcaccgcccaggagcggcaacagtttgac

SEQ ID NO: 15012 - DNA, 260 bp, Unknown; identical to SEQ ID NO: 13476
  Description of Unknown: LeftRegion for integrase B2013 sequence

SEQ ID NO: 15013 - DNA, 260 bp, Unknown; identical to SEQ ID NO: 13402
  Description of Unknown: LeftRegion for integrase B2014 sequence

SEQ ID NO: 15014 - DNA, 260 bp, Unknown
  Description of Unknown: LeftRegion for integrase B2015 sequence
cgtgccagcgggtgaagaccaccagctcgcgcgaggcgttgtgcatgcgggtccgcacgacggaggtgtaccactcccagcagttggcgcggacgagcggcgaattggcttcaagcgcgtctttatacacattataatcaattttgtcgcagattaacaaaaaatcgttaaatttgcgctaaagattgattgacagcgttatggaaaaatcgaaaagagtggtcggttacgcccgtgtttcgacggaggcacaagacatt

SEQ ID NO: 15015 - DNA, 260 bp, Unknown
  Description of Unknown: LeftRegion for integrase B2016 sequence
ctatggggccgcagggcttgcgacgctgtttggggcctgcctgatgatttatgtattcctggatatgaaaaatccgaacctcgggctttttagaggaacccgcagcagccccgttgtttatgctgctgcgttcgccattgctggtgtctgtctgttcgtctgccgaaaaatggtaaaaaaaaggatggagcaaaagaaaaatgcaaacgatacccattgatttatccgcgctcaccgcccaggagcggcaacagtttgcc

SEQ ID NO: 15016 - DNA, 260 bp, Unknown
  Description of Unknown: LeftRegion for integrase B2017 sequence
gatacaccccctgaaacagatactcttatggttgttattgttgatgacgaagaaggatttgttaagaaaatcagcattgatgaagatactgtgacccttcgctcttttaatccacactatcctccccgtgtttttggcggtgttgaaattggacgattgcgctttgtcggtagagtcatggagttaaaaaggagatttgcgtgaaaaaatttccaatcgacctctcctgtctgacagaggaagaaatctctcaatttcaa

SEQ ID NO: 15017 - DNA, 260 bp, Unknown; identical to SEQ ID NO: 14455
  Description of Unknown: LeftRegion for integrase B2018 sequence

SEQ ID NO: 15018 - DNA, 260 bp, Unknown
  Description of Unknown: LeftRegion for integrase B2019 sequence
tggagccgcggggcttgcggttctgttcggcatcttccttatggtatatgtctttctggatatgcaaaacccgaatcttggcctgttccagtccggccacgcctcgccgatcgtttatgtcgcggccttttccattatcggaacatgcctgtatatcgtccgaactgtgataaagcgaaacgcaaaaaggagtaaacacgatgcaaacaataccaattgatctatcggctcttacgccggaggaaagacagcagtttgca

SEQ ID NO: 15019 - DNA, 260 bp, Unknown
  Description of Unknown: LeftRegion for integrase B2020 sequence
cgtgccagcgcgtgaagaccaccagttcgcgcgaggcgttgtgcatccgagtccgcaccaccgaggtgtaccactcccagcagttggcccgcacaatcggcgagttggcctcaagcgcatccttgtacacattataatcaatcttgtcgcagattaacaaaaaaacgttaaatttgcgataaagattgcttgagcgcgttatggaaaaatcgaaaagagtagtcggttacgcccgtgtttcgactgaggcacaagacatt

SEQ ID NO: 15020 - DNA, 260 bp, Unknown; identical to SEQ ID NO: 15015
  Description of Unknown: LeftRegion for integrase B2021 sequence

SEQ ID NO: 15021 - DNA, 260 bp, Unknown
  Description of Unknown: LeftRegion for integrase B2022 sequence
agcgtatgctgcctgtactatggcggtactgctagggttctttttaatgatatacgttatcctggatgcccggaatccaaacatgggcctgtttcggcggcgggagataagccccatcgtttatgttgcggcgttctcaatcgtcctggttctgttcgtgatagcacattcgctcgttaagaaaaaagttggtgataaaaatgcagatgataccaattgatttatcagccctgacagcctcggaacagcggcagtttacg

SEQ ID NO: 15022 - DNA, 260 bp, Unknown
  Description of Unknown: LeftRegion for integrase B2023 sequence
tggagccgcagggcttgcggttctgttcggcatctttcttatggtatatgtctttctggatatgcaaaacccgaatcttggcctgttccagtccggccacgcctcgccgatcgtttatgtcgcggccttttccattatcggaacatgcctgtatatcgtccgaactgtgataaagcgaaactcaaaaaggagtaaacacgatgcaaacaatcccaattgatctatcggctcttacaccggatgaaagacagcagtttgcg

SEQ ID NO: 15023 - DNA, 260 bp, Unknown
  Description of Unknown: LeftRegion for integrase B2024 sequence
gatacacctcccgaaacagatactcttatggttgtcattgttgatgacgaagaaggatttgttaagaaaatcagtattgatgaagatactgtgacccttcgttcttttaacccacactatcctccccgtgtttttggcggtgttgaaattggacgattgcgctttgtcggtagagtcatggagctaaaaaggagatttgcatgaaaaaatttccaatcgacctctcttgtctgacagaggaagaaatctctcaatttcag

SEQ ID NO: 15024 - DNA, 260 bp, Unknown
  Description of Unknown: LeftRegion for integrase B2025 sequence
cgtgccagcgggtgaagaccaccagctcgcgcgaggcgttgtgcatgcgggtccgcacgacggaggtgtaccactcccagcagttggcgcggacgagcggcgaattggcttcaagcgcgtctttatacatatagtaatcaattttgtcgcatattaacaaaaaaacgttaaatttgcgctaaagattgattgacagcgttatggaaaaatcgaaaagagtggtcggttacgcccgtgtttcgacggaggcacaagacatt

SEQ ID NO: 15025 - DNA, 260 bp, Unknown; identical to SEQ ID NO: 14983
  Description of Unknown: LeftRegion for integrase B2026 sequence

SEQ ID NO: 15026 - DNA, 260 bp, Unknown
  Description of Unknown: LeftRegion for integrase B2027 sequence
cgtgatgactccttgccggatgctgaatatggaagtaacgaatccctaggcaatttaaaggtcgagtccgaagcaatttttatgcattctcatctgctggacttgaaatatgaatcaactacagaagattatgaaagtcttttacagtctcgtaatgagcttgccggcgttctcggcaagtctggcaggtgatgtagataatgaaaaaaattgagacaaatcaaccaaccgttgagcgcggagtaatttatgctcgatac

SEQ ID NO: 15027 - DNA, 260 bp, Unknown
  Description of Unknown: LeftRegion for integrase B2028 sequence
taatatgtttctgttgatccgcgctgagtgcttcaaacattgcaacagcttcctcttcggaaactgtgctttcattagtggtatgacatactctactcctatcctgtcctaaagaaatacttcctacgtattagtgtcaagagtattatagcactttttattcaatttgccatgttaaattgtgtaaaggaaatagatatatgtcaattacaaaatttccaattgatctttcgtggttaacagaagaagaattggcccaa

SEQ ID NO: 15028 - DNA, 260 bp, Unknown
  Description of Unknown: LeftRegion for integrase B2029 sequence
catcttctccgcagaaaagacagggcgttttggaacgagttgaacctaaacgtgcaactctacttatataaatggctcccagatatgatatttcggaaatgaatttaactttttgactgttgaaagtgtggaaagatttatttttcccagaacttgcaacggcttgcaacaagcttaaaactacttgaaaggtggtatttatgcctcgtaaaaagaaactgcaagaggtgggcggcctgcgcctggtggcgtactatcgc

SEQ ID NO: 15029 - DNA, 260 bp, Unknown
  Description of Unknown: LeftRegion for integrase B2030 sequence
gcggccttcggcaatgcgctctgtgtgcaaagcctatcgcttttgtgtatggacattctcgtgtgtatcactcgacgacttggtgtaccgatgcaatgtcacaaccgtttcaaatgtttgaagaagaagctattgcaaaaggatttcggaagtgcaaggcttgtcaaaagcgagatgaaagcattaaggagtaatggtgtatggcacgttcagcgaagaaaattgaatatgcacccgctgaacagatcggtgtgatctat

SEQ ID NO: 15030 - DNA, 260 bp, Unknown; identical to SEQ ID NO: 14983
  Description of Unknown: LeftRegion for integrase B2031 sequence

SEQ ID NO: 15031 - DNA, 260 bp, Unknown; identical to SEQ ID NO: 14982
  Description of Unknown: LeftRegion for integrase B2032 sequence

SEQ ID NO: 15032 - DNA, 260 bp, Unknown
  Description of Unknown: LeftRegion for integrase B2033 sequence
ctatggagccgcagggcttgcggttctgttcggcatcttccttatggtatatgtctttctggatatgcaaaacccgaacctcgggctttttagaggaagcaacagcagccccgttgtttatgctgctgcgttcgccatcgccggtgtctgtctgctcatctgccgaaaaatggtaaaaagaagaatggagcaaaagaaaaatgcaaacgatacccattgatttatccgcgctcaccgcccaggagcggcaacagtttgcc

SEQ ID NO: 15033 - DNA, 260 bp, Unknown
  Description of Unknown: LeftRegion for integrase B2034 sequence
tggagccgcagggcttgcggttctgttcggcatcttccttatggtatatgtctttctggatatgcaaaatccgaatcttggcctgttccagtccggccacgccgcgccgatcgtttatgtcgcggccttttccattatcgaaacatgcctgtatatcgtccgaactgtgacaaagcgaaacgcaaaaaggaggaaccgcgatgcaaacaataccaattgatctatcggctcttacaccggaggaaagacagcagttcgcg

SEQ ID NO: 15034 - DNA, 260 bp, Unknown
  Description of Unknown: LeftRegion for integrase B2035 sequence
ctatggtgccgcagggcttgcggcgctgtttggggcctgcctgatgatttatgtattcctggatatgaaaaatccgaacctcgggctttttagaggaacccgcagcagccccgttgtttatgccgccgcgttcgccatcgccggtgtctgtctgttcgtctgccgaaaaatggtaaaaaaaaggatggagcaaaagaaaaatgcaaacgatacccattgatttatccgcgctcaccgcccaggagcggcaacagtttgcc

SEQ ID NO: 15035 - DNA, 260 bp, Unknown; identical to SEQ ID NO: 14908
  Description of Unknown: LeftRegion for integrase B2036 sequence

SEQ ID NO: 15036 - DNA, 260 bp, Unknown
  Description of Unknown: LeftRegion for integrase B2037 sequence
cgtgcgacgatcgcccgccagaccgaggaatacaaccggcacgtcacccagctgcaaacccactacagcatgctgcatcggcaggaccgacggacgatcctgtttctgtccatcggcgtcaccgtgctggtgatttttctgatcttctggctggtgctggacgttctccgcccggaaatcggctggatcaagaggtaactatgaaaaactgcgtcattgatttatcaactctcaccccggaggagcgccgccagtttgcg

SEQ ID NO: 15037 - DNA, 260 bp, Unknown; identical to SEQ ID NO: 14904
  Description of Unknown: LeftRegion for integrase B2038 sequence

SEQ ID NO: 15038 - DNA, 260 bp, Unknown; identical to SEQ ID NO: 13476
  Description of Unknown: LeftRegion for integrase B2039 sequence

SEQ ID NO: 15039 - DNA, 260 bp, Unknown; identical to SEQ ID NO: 14908
  Description of Unknown: LeftRegion for integrase B2040 sequence

SEQ ID NO: 15040 - DNA, 260 bp, Unknown; identical to SEQ ID NO: 13129
  Description of Unknown: LeftRegion for integrase B2041 sequence

SEQ ID NO: 15041 - DNA, 260 bp, Unknown
  Description of Unknown: LeftRegion for integrase B2042 sequence
accccgctattcacacaaatgatggtggtcttactaagcagttacttcaatggtttaatctctgtgacatggagggtaaactaacgattgtacaatgtgcttctcaagagtttaagagaactcaaaaagaaaaaacagaagttgaagaaccggttgctgtcggttaaggttattgaccttatagaatggagaaaaacactatgaaactacctatcgacctctcctgtttgacagaggaagaaatctctcaatttcaggaa

SEQ ID NO: 15042 - DNA, 260 bp, Unknown
  Description of Unknown: LeftRegion for integrase B2043 sequence
gatacacctcctgaaacagatactcttatggttgtcattgttgatgacgaagaaggatttgttaagaaaatcagcattgatgaagatactgtgacccttcgctcttttaacccacactatcctccccgtgtttttggcggtgttgaaattggacgattgcgctttgtcggtagagtcatggagttaaaaaggagatttgcatgaaaaaatttccaatcgacctctcctgtctgacagaggaagaaatctctcaatttcaa

SEQ ID NO: 15043 - DNA, 260 bp, Unknown; identical to SEQ ID NO: 13468
  Description of Unknown: LeftRegion for integrase B2044 sequence

SEQ ID NO: 15044 - DNA, 260 bp, Unknown; identical to SEQ ID NO: 14983
  Description of Unknown: LeftRegion for integrase B2045 sequence

SEQ ID NO: 15045 - DNA, 260 bp, Unknown; identical to SEQ ID NO: 13476
  Description of Unknown: LeftRegion for integrase B2046 sequence

SEQ ID NO: 15046 - DNA, 260 bp, Unknown; identical to SEQ ID NO: 13129
  Description of Unknown: LeftRegion for integrase B2047 sequence

SEQ ID NO: 15047 - DNA, 260 bp, Unknown
  Description of Unknown: LeftRegion for integrase B2048 sequence
ctatggagccgcagggcttgcgacgctgtttggggcctgcctgatgatttatgtattcctggatatgaaaaacccgaacctcgggcttttccgaggaacccgcagcagccccgttgtttatgctgctgcgtttgccatcgccggtgtctgtctgctcgtctgccgaaaaattgtaaaaaggaaaatggagcaaaagaaaaatgcaaacgatacccattgatttatccgcgctcaccgcccaggagcggcaacagtttgcc

SEQ ID NO: 15048 - DNA, 260 bp, Unknown
  Description of Unknown: LeftRegion for integrase B2049 sequence
taaaaaaatcaggcttcccgcaaaggaagccttttatcgttgataatcatccatcagagcagttcaccataccttttgacataaatcgtctttacaaccgtagcaagcagcacacactatcctccccgtgtttttggcggtgttgaaattggacgattgcgctttgtcggtagagtcatggagctaaaaaggagatttgcatgaaaaaatttccaatcgacctctcctgtctgacagaggaagaaatctctcaatttcag

SEQ ID NO: 15049 - DNA, 260 bp, Unknown; identical to SEQ ID NO: 13442
  Description of Unknown: LeftRegion for integrase B2050 sequence

SEQ ID NO: 15050 - DNA, 260 bp, Unknown; identical to SEQ ID NO: 14967
  Description of Unknown: LeftRegion for integrase B2051 sequence

SEQ ID NO: 15051 - DNA, 260 bp, Unknown; identical to SEQ ID NO: 14990
  Description of Unknown: LeftRegion for integrase B2052 sequence

SEQ ID NO: 15052 - DNA, 260 bp, Unknown; identical to SEQ ID NO: 14683
  Description of Unknown: LeftRegion for integrase B2053 sequence

SEQ ID NO: 15053 - DNA, 260 bp, Unknown
  Description of Unknown: LeftRegion for integrase B2054 sequence
atcttgtagttctatttttgcttgtttttttgaaatttttacaagaggaagttcattaatcccatctttcatgatgggatatagtttattcccccgaacaaggtagcgatctctattatcatctgtacatatagcaatcaattttgtcgcagattaacaaaaaaacgttaaatttgcgctaaagattgattgacagcgttatggaaaaatcgaaaagagtagtcggttacgcccgtgtttcgacggaggcacaagacatt

SEQ ID NO: 15054 - DNA, 260 bp, Unknown
  Description of Unknown: LeftRegion for integrase B2055 sequence
tggagccgcagggcttgcggttctgttcggcatcttccttatggtatatgtctttctggatatgcaaaacccgaatcttggcctgttccagtccggccacgcctcgccgatcgtttatgtcgcggccttttccattatcggaacatgcctgtatatcgtccgaactgtgataaagcgaaacgcaaaaaggagtaaacacgatgcaaacaataccaattgatctatcggctcttacgccggaggaaagacagcagtttgcg

SEQ ID NO: 15055 - DNA, 260 bp, Unknown; identical to SEQ ID NO: 13442
  Description of Unknown: LeftRegion for integrase B2056 sequence

SEQ ID NO: 15056 - DNA, 260 bp, Unknown
  Description of Unknown: LeftRegion for integrase B2057 sequence
gacacacctcctgaaacagatactcttatggttgtcattgttgatgacgaagaaggatttgttaagaaaatcagcattgatgaagatactgtgacccttcgctcttttaacccacactatcctccccgtgtttttggcggtgttgaaattggacgattgcgctttgttggtagagtcatggagttaaaaaggagatttgcatgaaaaaatttccaatcgacctctcctgtctgacagaggaagaaatctctcaatttcag

SEQ ID NO: 15057 - DNA, 260 bp, Unknown
  Description of Unknown: LeftRegion for integrase B2058 sequence
agcgtatgctgcctgtactatggcggtactgctagggttctttttaatgatatacgttatcctggatgcccggaatccaaacatgggcctgtttcggcggcgggagataagccccatcgtttatgttgcggcgttctccatcgttctggttctgtccctgatagcacattcgctcgttaagaaaaaagttggtgataaaaatgcagatgataccaattgatttatcagccctgacagcctcggagcaacagcagtttacg

SEQ ID NO: 15058 - DNA, 260 bp, Unknown; identical to SEQ ID NO: 14994
  Description of Unknown: LeftRegion for integrase B2059 sequence

SEQ ID NO: 15059 - DNA, 260 bp, Unknown
  Description of Unknown: LeftRegion for integrase B2060 sequence
tgtgatttagctgagaatttaaatgttacaactgatttcttaattcaatctatcgagcattataaaagaaaatatggtgtttattatgttggtgataaatatttacttgtttttgaaccattacatattgttgaaatgtgttgacatgtacatatatttacccaactttgaatatatattttctgaagggagttgtgactatgaattcaaatatagcaatctattctcgtaaatcaaagtttactggtaaaggcgaaagt

SEQ ID NO: 15060 - DNA, 260 bp, Unknown; identical to SEQ ID NO: 14908
  Description of Unknown: LeftRegion for integrase B2061 sequence

SEQ ID NO: 15061 - DNA, 260 bp, Unknown
  Description of Unknown: LeftRegion for integrase B2062 sequence
ctatggggccgcagggcttgcgacgctgtttggggcctgcctgatgatttatgtattcctggatatgaaaaatccgaacctcgggcttttccgaggaacccgtagcagccccgttatttatgctgctgcgttcgccattgctggtgtctgtctgttcgtctgccgaaaaatagtaaaaaaaaggatggagcaaaagaaaaatgcaaacgatacccattgatttatccgcgctcaccgcccaggagcggcaacagtttgcc

SEQ ID NO: 15062 - DNA, 260 bp, Unknown
  Description of Unknown: LeftRegion for integrase B2063 sequence
tggagccgcagggtttgcggttctgttcggcatcttccttatgggatatgtctttctggatatgcgaaacccgaaccttggcctgttccagtccggccacaccgcgccgatcgtttatgtcgcggccttttccattatcggaacatgcctgtatatcgtccgaactgtgataaaacgaaacacagaaagggggaaacacgatgcaaacaataccaattgatctatcggctcttacactggaggaaagacagcagtttgcg

SEQ ID NO: 15063 - DNA, 260 bp, Unknown
  Description of Unknown: LeftRegion for integrase B2064 sequence
tggagccgcagggcttgcggttctgttcggcatcttccttatggtatatgtctttctggatatgcaaaacccgaatcttggcctgttccagtccggccacgcctcgccgatcgtttatgtcgcggccttttccattatcggaacatgcctgtatatcgtccgaactgtgataaagcgaaacgcaaaaaggagtaaacacgatgcaaacaataccaattgatctatcggctcttacgccggaggaaagacagcagtttgca

SEQ ID NO: 15064 - DNA, 260 bp, Unknown
  Description of Unknown: LeftRegion for integrase B2065 sequence
gacacacctcctgaaacagatactcttatggttgtcattgtcgatgacgaagaaggatttgttaagaaaatcagcattgatgaagatactgtgacccttcgctcttttaatccacactatcctccccgtgtttttggcggtgttgaaattggacgattgcgctttgtcggtagagtcatggagttaaaaaggagatttgcatgaaaaaatttccaatcgacctctcctgtctgacagaggaagaaatctctcaatttcaa

SEQ ID NO: 15065 - DNA, 260 bp, Unknown; identical to SEQ ID NO: 14982
  Description of Unknown: LeftRegion for integrase B2066 sequence

SEQ ID NO: 15066 - DNA, 260 bp, Unknown
  Description of Unknown: LeftRegion for integrase B2067 sequence
cgccgggctacatccgcacctccgaggaggtcgagatcgtcggacgccgcggcgggctgctgtctgtagggcgcgagggttcgctgacgggcaaccgcgtggattgcttcatcctcgacgacctctacatattataatcaatattgtcgcagattaacagaaaaacgttaaatttgcgataaagattgtttgagcgcgttatggaaaaatcgaaaagagtagtcggttacgctcgtgtttcgactgaggcacaagatatt

SEQ ID NO: 15067 - DNA, 260 bp, Unknown; identical to SEQ ID NO: 14908
  Description of Unknown: LeftRegion for integrase B2068 sequence

SEQ ID NO: 15068 - DNA, 260 bp, Unknown; identical to SEQ ID NO: 14908
  Description of Unknown: LeftRegion for integrase B2069 sequence

SEQ ID NO: 15069 - DNA, 260 bp, Unknown
  Description of Unknown: LeftRegion for integrase B2070 sequence
accccgctattcacacaaatgatggtggtcttacgaagcagttgcttcaatggtttaatctctgtgacatggagggtaaactaacgattatacaatgtgcttctcaagagtttaaaagaactcaaaaagaaaaaaatgaaaatgcggaacaggttgctgtcagctaaagtcattgacctcgaaaagtggaggaaaacattatgaaatcacctatcgacctctcctgtctgacagaggaagaaatctctcaatttcaagaa

SEQ ID NO: 15070 - DNA, 260 bp, Unknown
  Description of Unknown: LeftRegion for integrase B2071 sequence
taatttggaaggaggagtatttataaaaatgaatggagaaacaaaaaaggcaggaatttatattcgtgtaagtacagaagatcaagcaagagaacggatttagtttaggagaacaggaagaaaaactaaaacaactttgtaagtataaggaatatgagatattcaaggtttacaaagatgcaggaattagtgcaaaagatatggaacacagaccagcttttcagcaaatgctaacagacatgagagcaggaaaaatcaat

SEQ ID NO: 15071 - DNA, 260 bp, Unknown
  Description of Unknown: LeftRegion for integrase B2072 sequence
ggctactggctgtaaaatgctggtagccctcattttttagttgtatctagtatataaggggtgtataatagataggaactgaaaacagcttcataaagccctctattttatcgagggtaaagaagtctacacctaatatataaaagtggctgtatgaggcacacaggagctcacaggactattacaggagggtaaacaggatggcatacaggaaaataacggatataaaagatactattggtatgagagcggtattttat

SEQ ID NO: 15072 - DNA, 260 bp, Unknown
  Description of Unknown: LeftRegion for integrase B2073 sequence
ttgtcagcgtttcggtagatttttccgtttttcagcaaaataaaaacgcccacggtgttaccagcaccgcaggcgttccagatcagcttgctcagagagatggtacagggataaaacctgtccagagcaataacagacctcgcagatgttattgtaccacctccgggcaggcttgtcaaagtgtacccggaggtatttttatgggcaaaaaacaaaagacaaacggcggcgatgcggtcatctacgcccgctattcttcc

SEQ ID NO: 15073 - DNA, 260 bp, Unknown
  Description of Unknown: LeftRegion for integrase B2074 sequence
tattaatttattatcagataagattgatgatttacaagctgatattaataatttaactataagaacattaaaaaatgaaaataatataattaatttttctaaagttattaagatcaataacagagatgctcaataaaaaatactattaaagattttaaagagttatgatattcatagctctttaaaaatatggaggaaaaatgaataagaaaagtgcaatttacgttagagtatcaacttcacatcaaatagataaagac

SEQ ID NO: 15074 - DNA, 260 bp, Unknown; identical to SEQ ID NO: 15070
  Description of Unknown: LeftRegion for integrase B2075 sequence

SEQ ID NO: 15075 - DNA, 260 bp, Unknown
  Description of Unknown: LeftRegion for integrase B2076 sequence
gaagccccattagaaacagataccttaatggtagttcttgttgatgacgatgaaggttttgtgaaaaaagtgagtattcatgcagatagtgttacacttcattcgtttaacccgcattatccacctcgtgtattcggtggttctgaaattggacgcttacgctttgtagggcgtgtggttgaaatgaagcggaggtttgtatgaaatatcctatcgacctctcctgtctgacagaggaagaaatctctcaatttcaggaa

SEQ ID NO: 15076 - DNA, 260 bp, Unknown
  Description of Unknown: LeftRegion for integrase B2077 sequence
gtgggcgccgaaacggtcttgctttccagtcgtcggggaggacgccaaaacatagcctgttggaaaccacgtcttggaggaatcagcatctttattgtatacaatgtcctccggtttgtcaacgagaaaatgtagaatctggatgcatcatctaaaatgttgtccatgatcgcgtaaatatttgaggaggcttgtatgctatgacgcacggcgcttatattttagcccggtactccaccgagaaccagtccgaggccagt

SEQ ID NO: 15077 - DNA, 260 bp, Unknown
  Description of Unknown: LeftRegion for integrase B2078 sequence
ctttgtcagcgtttcggtagatttttccgtttttcagcaaaataaaaacgcccacggtgttaccagcaccgcaggcgttccagatcagcttactcagagatggtacagggataaaacctgtccagagcaataacagacctcgcagatgttattgtaccacctccgggcaggcttgtcaaagtgtacccggaggtatttttatgggcaaaaagcaaaagacaaacggcggcgatgcggtgatctacgcccgctattcttcc

SEQ ID NO: 15078 - DNA, 260 bp, Unknown
  Description of Unknown: LeftRegion for integrase B2079 sequence
atgcgccgaaacggtcttgctttccagtcgtcggggaggacggcccaaaacatagcctgttggaaaccatgtcttggaggaatcagcatctttattgtatacaatgtcctccggtttgtcaatgcaaaaatgtagaatctggatacatcatctaaaatgttgtccatgatcgcgtaaaaattttaggaggcttgtatgctatgatgcatggcgcttatattttagcccggtactccaccgagaaccagtccgaggccagt

SEQ ID NO: 15079 - DNA, 260 bp, Unknown
  Description of Unknown: LeftRegion for integrase B2080 sequence
gggcgccgaaacggtcttgctttccagtcgtcggggaggacggcccaaaacatagcctgttggaaaccacgtcttggaggaatcagcatctttattgtatacaatgtcctccggtttgtcaatgcaaaaatgtagaatctggatacatcatctaaaatgttgtccatgatcgcgtaaaaattttaggaggcttgtatgctatgatgcatggcgcttatattttagcccggtactccaccgagaaccagtccgaggccagt

SEQ ID NO: 15080 - DNA, 260 bp, Unknown
  Description of Unknown: LeftRegion for integrase B2081 sequence
taaaaccgccatttcagaagggtctccatacgaagataagctattgcgatacttctctttgtgtgacgcagagggtaaacttcgtgttattcagtgcgccatgaatgaattcgatagaacccaaaaagaaaaaaacagaagttgaagaaccgattgctgtcggctaaagttatcaaccttatcgaatggagaaatatactatgaaactacctatcgacctctcctgtctgacggaagaagaaatctctcaatttcaggaa

SEQ ID NO: 15081 - DNA, 260 bp, Unknown
  Description of Unknown: LeftRegion for integrase B2082 sequence
ctggataaactggccagtctctttgagagcgccatgacggaggtcgccgtcgtgaactacccgcgcaagagcgcgtaaagatctcgaaccaaaaaaagatgcccccggcgctaccaacaccgagggcgatcaaagggcagctgactatcgacaggtcttactgcccttctatcttacaacagaataggaggtttcgcaacatgaaaatgatgcagaacgacaaccggacggccatcacctactaccgctattccagccac

SEQ ID NO: 15082 - DNA, 260 bp, Unknown
  Description of Unknown: LeftRegion for integrase B2083 sequence
ctcgaagtggatgaattctgcgcttgaaaagcagatggcagaggcaaatgagcagcttaatgaaaaagcggcggcgattggcgcggacgctatcgttggcttgcgccattctggaattggcgcaaatcatgtgtttattggtacggcagtaaggtttaagtaagccgtttccttgagaagcacttgaaatggagggtatgatggctcgatcaaagcgaaatgaatactcatctgctgaacagatcggcgtgatctatgcc

SEQ ID NO: 15083 - DNA, 260 bp, Unknown
  Description of Unknown: LeftRegion for integrase B2084 sequence
gcgcaggaactggaaaagtacattgccacctacgaagaatccaaagcaactgcgtccagcggaaatgttgtgtccgtggtggatgaaattcgtggcttgaagcagctgctggatgagggcatcctgacggaagaagagtttgctgccaagaaaaagcagcttttgggaatttgaattttgaaagtggatggtgatagataatggcaaaaaagaagaagcccgccgggggcaatgccatcatctatgcccgctactcatcc

SEQ ID NO: 15084 - DNA, 260 bp, Unknown
  Description of Unknown: LeftRegion for integrase B2085 sequence
gtgggcgccgaaacggtcttgctttccagtcgtcggggaggacgccaaaacatagcctgttgaaaaccatgtcttggaggaatcagcatctttattgtatacaatgtcctccggtttgtcaacgagaaaatgtagaatttggatgcatcatctaaaatgttgtccatgatcgcgtaaatatttgaggaggcttgtatgctatgacgcacggcgcttatattttagcccggtactccaccgagaaccagtccgaggccagt

SEQ ID NO: 15085 - DNA, 260 bp, Unknown
  Description of Unknown: LeftRegion for integrase B2086 sequence
catcttctccgcagaaaagacagggcgttttggaacgagttgaacctaaacgtgcaactctacttatataaatggctcccagatatgatatttcggaaatgaatttaactttttgactgttgaaagtgtggaaagatttatttttcccagaacttgcaacggcttgcaacaaacttaaaactacttgaaaggtggtatttatgcctcgcaaaaagaaactgcaagaggtaggcggactgcggctggtggcgtactatcgc

SEQ ID NO: 15086 - DNA, 260 bp, Unknown; identical to SEQ ID NO: 15077
  Description of Unknown: LeftRegion for integrase B2087 sequence

SEQ ID NO: 15087 - DNA, 260 bp, Unknown; identical to SEQ ID NO: 13395
  Description of Unknown: LeftRegion for integrase B2088 sequence

SEQ ID NO: 15088 - DNA, 260 bp, Unknown
  Description of Unknown: LeftRegion for integrase B2089 sequence
ggctactggctgtaaaatgctggtagccctcattttttagttgtatctagtatataaggggtgtataatagataggaactgaaaacagcctcataaagccctctattttatcgaaagtaaagaagtctacacctaatatataaaagtggctgtatgaggcacacaggagctcacaggactattacaggagggtaaacaggatggcatacaggaaaataacggatataaaagatactattggtatgagagcggtattttat

SEQ ID NO: 15089 - DNA, 260 bp, Unknown
  Description of Unknown: LeftRegion for integrase B2090 sequence
catcttctccgcagaaaagacagggcgttttggaacgagttgaacctaaacgtgcaactctacttatataaatggctcccagatatgatatttcggaaatgaatttaactttttgactgttgaaagtgtggaaagatttattttccccagaacttgcaacggcttgcaacaaacttaaaactacttgaaaggtggtatttatgcctcgcaaaaagaaactgcaagaggttggcggcctgcggctggtggcgtactatcgc

SEQ ID NO: 15090 - DNA, 260 bp, Unknown; identical to SEQ ID NO: 13019
  Description of Unknown: LeftRegion for integrase B2091 sequence

SEQ ID NO: 15091 - DNA, 260 bp, Unknown
  Description of Unknown: LeftRegion for integrase B2092 sequence
catcttctccgcagaaaggacagggcgttttggaacgagttgaacctaaacgtgcaactctacttatataaatggctcccagatatgatatttcggaaatgaatttaactttttgactgttgaaagtgtggaaagatttattttccccagaacttgcaacggcttgcaacaaacttaaaactacttgaaaggtggtatttatgcctcgcaaaaagaaactgcaagaggtgggcggactgcggctggtggcgtactatcgc

SEQ ID NO: 15092 - DNA, 260 bp, Unknown
  Description of Unknown: LeftRegion for integrase B2093 sequence
aaatataacaggatgctgcaacactgtcagcgttttggcggatttttccgttttttagcaaaataaaaacgcccacggtgctaccaacaccgtaagcgttccagatcagcttacccagagggcaataacagccaacctcacaggtgttattgtaccacctccgggcaggcttgtcaaagtgtaccttggaggaaattacaatggcaagaaaaaagaaatcagtgagcggcgatgctgtcatctatgcccgctactcgtcc

SEQ ID NO: 15093 - DNA, 260 bp, Unknown; identical to SEQ ID NO: 14094
  Description of Unknown: LeftRegion for integrase B2094 sequence

SEQ ID NO: 15094 - DNA, 260 bp, Unknown
  Description of Unknown: LeftRegion for integrase B2095 sequence
tctttattcatactataacataatgtgctcaaaattaaataagtattttaaaatctttttatctccatattgaataaacttttatcatcaagtatcataatgagtatatagcttattacataatattcttaacttgtcagctccttgtagtatactacttggagcttctaatttatattttaatggcagaggtgttttctatgaagatagcaatctattctcgtaaatcaaaagccaccgacaaaggtgaatctatagaa

SEQ ID NO: 15095 - DNA, 260 bp, Unknown; identical to SEQ ID NO: 14094
  Description of Unknown: LeftRegion for integrase B2096 sequence

SEQ ID NO: 15096 - DNA, 260 bp, Unknown
  Description of Unknown: LeftRegion for integrase B2097 sequence
gtgggcgccgaaacggtcttgctttccagtcgtcggggaggacgccaaaacatagcctgttgaaaaccatgtcttggaggaatcagcatctttattgtatacaatgtcctccggtttgtcaacgaaaaaatgtagaatctggatacatcgtccaaaatgatgtccatgatcgcgtgataattttaggaggcttgtatgcaatgacgcatggcgcttatattttagcccggtactccaccgagaaccagtccgaggccagt

SEQ ID NO: 15097 - DNA, 260 bp, Unknown
  Description of Unknown: LeftRegion for integrase B2098 sequence
tctccaactggacggcaaaggcacccgcgccggcagttgcaccgcagcctgcgccacaggttattgaacaaaagccgtctgcagctgatgaaatccgcaagtacaagggcctgctggatgatggtatcatttcacaggaagaatttgaggcaaagaagaagcagttgcttggcctgtaaaaccgaaaggagcgtgacggcatgaaaaagcgaatcaacactaattccgcagcccgtgccgtcatctacgctcgttattcc

SEQ ID NO: 15098 - DNA, 260 bp, Unknown; identical to SEQ ID NO: 13344
  Description of Unknown: LeftRegion for integrase B2099 sequence

SEQ ID NO: 15099 - DNA, 260 bp, Unknown; identical to SEQ ID NO: 14660
  Description of Unknown: LeftRegion for integrase B2100 sequence

SEQ ID NO: 15100 - DNA, 260 bp, Unknown
  Description of Unknown: LeftRegion for integrase B2101 sequence
acgattccgcaccggtatgcccgcctgatatggagcaccaacttcttttctttttcgatcaatgtgaccaagagggtaaacttcgtatcatccaacttgccatgaacgaatatgatcgcgccatgaaagaaaaaacagaacatgcggagccgattgctgttggataaaaccatcgacttaaacgaatggaggaaaacgctatgacattacccgtcgacctaagatgtctcactgaggaggaacttactcaattcctcgaa

SEQ ID NO: 15101 - DNA, 260 bp, Unknown; identical to SEQ ID NO: 15097
  Description of Unknown: LeftRegion for integrase B2102 sequence

SEQ ID NO: 15102 - DNA, 260 bp, Unknown; identical to SEQ ID NO: 13344
  Description of Unknown: LeftRegion for integrase B2103 sequence

SEQ ID NO: 15103 - DNA, 260 bp, Unknown
  Description of Unknown: LeftRegion for integrase B2104 sequence
gaataaaagatattgaagagttatctgatctcgaacaaactcttctgttttgttttgaaaattgtgacgcaataggccaaatgcgtatcattcaagttgccatgaatgaacacgatagaacgcaaaaagaaaaaacaggctctacgggagagtctgttatcagctaaggttgttgacctgaacgaatggagaaaaacccaatgaaaaacatgaaattccccatcgacctgtccatgttgacagaggaagagattaaccag

SEQ ID NO: 15104 - DNA, 260 bp, Unknown
  Description of Unknown: LeftRegion for integrase B2105 sequence
atagcagccgttagaattgatgattctgctacactcaaacgtttttataaaatccctggcggttgcatgctattaccagaaaatgccaaatataaagccatgacttttacttccgagaattgcgataatatagccataatcggcattcctgttgcgaaatatacaaaacatgtcgcccaataaattaagcggagggaaaaatggatacttccaaatatatgccggcttgctattgccgagtatctactgtgcaccaaata

SEQ ID NO: 15105 - DNA, 260 bp, Unknown
  Description of Unknown: LeftRegion for integrase B2106 sequence
cgtgaagtagacattgaagatggagatattgtcgtggccgtggtagatcggcaagacggctttatcaaacaagtccactttgaagagaatgtccttaccctgcactccttcaacccttactaccctgatatggtctttaaggggaacgagatcaagcaagtccgctttgtaggtaaagcccgagaggtgaagagaattctatgaagaagttcaaattccccattgacctgtccatgctgacagaggaagagatcaaccaa

SEQ ID NO: 15106 - DNA, 260 bp, Unknown
  Description of Unknown: LeftRegion for integrase B2107 sequence
ccgatgacaggggaactgtaacaatccctattcaggaatctattcagctttctgaggaagaacgtattttgatttccgcatttaggagtgcttctatagaaggacgcatgagaatcatccaagtctgtatgaatgaaaaggatgcaaaaggggaaactatcattgcaggataataagcattgaggaatggaggaagaatcatgtacgaagagattaagactgcttgtctatatctaagatattcaagcagcaaccaaact

SEQ ID NO: 15107 - DNA, 260 bp, Unknown
  Description of Unknown: LeftRegion for integrase B2108 sequence
ttaacatatatgtaaaattagcgaccatttgagagccattgagcaccgaccctttaaataccattgattttaaaatgcatggttgatatattaaattaagaagccctaagaggcacttaataaaaccctacgaggttcccgaagcctatgcatttttgtattagacttctttttatataaaattaataggaggtggctatatgatagctgcaatttattcacgaaagtctaaattcacaggcaaaggtgaatctatagaa

SEQ ID NO: 15108 - DNA, 260 bp, Unknown
  Description of Unknown: LeftRegion for integrase B2109 sequence
gatagcagccgttagaattgatgattctgctacactcaaacgtttttataaaatccctggtggttgcatgctattaccagaaaatgccaaatataaagccatgacttttacttccgagaattgcgataatatagctataatcggcattcctgtcgcgaaatatacaaaacatgtcgcccaataactttagcggagggaaaatggatacttccaaatatatgccggcttgctattgccgagtatctactgtgcaccaaata

SEQ ID NO: 15109 - DNA, 260 bp, Unknown
  Description of Unknown: LeftRegion for integrase B2110 sequence
ctttgaaagaccgtttattcccagaagatacttattcccttcaagaaaaagaattaatagacctgtttcgtgacagcagtccttctattcaatttgaggtcatcactatattgaaaaatcacataaaagaaaaaacaaattctacaaagagagcttctggcaaataaaatcattgacttgtctgaatggagaaagacattatgaaaagtgtgaaatttccgattgacctctccatgttgaccgaagaggaaatagaccaa

SEQ ID NO: 15110 - DNA, 260 bp, Unknown
  Description of Unknown: LeftRegion for integrase B2111 sequence
gttatgatattttccgtgacaaagaggggatattcgtcattccatacggagcgcaacaggtaaaacggcccgatgggcaatatgtttatgattttccgaatgatgaagtaaccgatatgctgaacaagtatcattgcaatagatgtgctggcggttatgttacaaaggcgcgtgagtgaaactgaaaggggcgtgacggcatgaaaaagcgaatcagccctaattctgcggcccgtgccgtcatctatgcccggtattcc

SEQ ID NO: 15111 - DNA, 260 bp, Unknown; identical to SEQ ID NO: 13967
  Description of Unknown: LeftRegion for integrase B2112 sequence

SEQ ID NO: 15112 - DNA, 260 bp, Unknown
  Description of Unknown: LeftRegion for integrase B2113 sequence
cggttcctcccgttttacccaatgattacaaaaaattgcttaccctttacagagagtcagacgatgatggaaaaacagtaatcatgagtcatgctattcaagaatgcagaagatcaatgagggaaaaagaaaaaacagactctacggaagagtctgctatcggctaaggtcatcgacctaaatgaatggagaaagactctatgaagaagttcaaattccctatcgacctgtccatgctgacagaggaagagatcaaccaa

SEQ ID NO: 15113 - DNA, 260 bp, Unknown
  Description of Unknown: LeftRegion for integrase B2114 sequence
tattaatttattatcagataagattgatgatttacaagctgatattaataatttaactataagaacattaaaaaatgaaaataatataattaatttttctaaggttattaagagcaataacagagatgctcaataaaaaatactattaaagattttaaagagttatgatattcatagctctttaaaaatatggaggaaaaatgaataaaaaaagtgcaatttatgtgagagtatcaacttcccatcaaatagataaagac

SEQ ID NO: 15114 - DNA, 260 bp, Unknown; identical to SEQ ID NO: 13967
  Description of Unknown: LeftRegion for integrase B2115 sequence

SEQ ID NO: 15115 - DNA, 260 bp, Unknown
  Description of Unknown: LeftRegion for integrase B2116 sequence
ttacaaaccatagatatggtcaaagacaaatataaaaaagatttatattcttccgattcacaaaaaataggttgaaaataaaaaatccccgactgctactaacagtcggggaaatagtgtagtgttatggtacaccaattaaaaacatatatattgtaccataacaccgattaaaaatcaagttaagaggtgttatttttatgaaaaaaactaaaaattcagtgcaaagggctgttatatatgcacgttattcgtgtagt

SEQ ID NO: 15116 - DNA, 260 bp, Unknown
  Description of Unknown: LeftRegion for integrase B2117 sequence
gaaaggtcagtatttccggcgcgtcagagttagaagaacggctactcagatacttttctttttgtgacgcagagggtaaattgcgtattattcaatgcgccatgaatgaatttgaccgaacagcaaaagaaaaaacagacccttcggaagagcctgttgttggctaaggtcatcgacctgtctgaatggagaaagacgctatgaaaatcacaaaattccccattgacctctccatgttgaccgaagaggaaatagaccag

SEQ ID NO: 15117 - DNA, 260 bp, Unknown
  Description of Unknown: LeftRegion for integrase B2118 sequence
atagcagccgttagaattgatgattctgccacactcaaacgtttttataaaattcctggcggttgcatgctgttaccagaaaatgccaaatataaagccatgacttttacttccgagaattgcgataatatagctataatcggcattcccgtagcgaaatatacaaagcatgtcgcccaataaattaagcggagggaaaaatggatacttccaaatatatgccggcttgctattgccgagtatctactgtgcatcagatc

SEQ ID NO: 15118 - DNA, 260 bp, Unknown
  Description of Unknown: LeftRegion for integrase B2119 sequence
atccctgaacatcctgccagagcgctgtgcgctagtggaaagtgagccggagcgcactcaagggctgcggcagatgctggtggacaactactcggtgttctacattgtgggcgaggataccgtgtcggtggcgcgtgtgctgtacagtgcatccgaccttgtgcgccgcctgcggagaatgaagtgaaaggggtgtttgcatgaccgccgtaatctacgcccgctattcgtcggacaaccagcgtgaagaatccatcgaa

SEQ ID NO: 15119 - DNA, 260 bp, Unknown
  Description of Unknown: LeftRegion for integrase B2120 sequence
gatagcagccgttagaattgatgattctgctacactaaagcgtttttataaaattcctggcggttgcatgctgttaccagaaaatgccaaatataaagccatgacttttacttccgagaattgcgataatatagctataatcggcattcctgtcgcgaaatatacaaaacatgtcgcccaataactttagcggaggggaaatggatacttccaaatatatgccggcttgctattgccgagtgtctactgtccatcaaatc

SEQ ID NO: 15120 - DNA, 260 bp, Unknown
  Description of Unknown: LeftRegion for integrase B2121 sequence
gttatgatattttccgtgacaaagagggcgtattcgttattccatacggagcacagcaggtaaaacagcccgatgggcaatatgtttatgattttccgaacgatgaagtaaccgatatgctgaataagcatcattgcaatagatgtgctggcggttatgttacaaaggcgcgcgagtaagcccgaaaggagcgtgacggcatgaaaaagcgaatcaacactaattccgcagcccgtgccgtcatctatgcccggtattcc

SEQ ID NO: 15121 - DNA, 260 bp, Unknown
  Description of Unknown: LeftRegion for integrase B2122 sequence
ttgatgataaaaacatcaatatccctgagtttggtcagactcttttattcttctttgaaaactgtgatgcacccggccaactgcgtataattcaattagccatgaacgaatatgatcgaacacaaaaagaaaaaacaaacccgccaaaagactctgctatcggctaaggtcatcgacctatctgaatggagaaagacgctatgaaaatcacgaaatttcccattgacctctccatgctgaccgaagaagagatagaccag

SEQ ID NO: 15122 - DNA, 260 bp, Unknown
  Description of Unknown: LeftRegion for integrase B2123 sequence
gaaaggtcagtatttccggcgcgtcagagttagaagaacggctactcagatacttttctttttgtgacgcagagggtaaattgcgtattattcaatgcgccatgaatgaatttgaccgaacagcaaaagaaaaaacagaccctccggaagagcctgttgttggctaaggtcatcgacctgtccgaatggagaaagacgctatgaaaatcacaaaattccccattgacctctccatgttgaccgaagaggaaatagaccag

SEQ ID NO: 15123 - DNA, 260 bp, Unknown; identical to SEQ ID NO: 13709
  Description of Unknown: LeftRegion for integrase B2124 sequence

SEQ ID NO: 15124 - DNA, 260 bp, Unknown
  Description of Unknown: LeftRegion for integrase B2125 sequence
ctttccatgcgtcgcctgcccttacagcatagcacgctttttcgatatgggcaaataaatgccccggcgctggtacgatgcagcgccggggataacatggagtgcagcacaaaaccggacaaagaaaattttatgcttgcaggggtcagtatatcacactccctgcatatgggcaaaccgcccggaaaggaagtgttatcatgccccgtaaaaaagctcctgcggccgaagtgccgcgcctggtggcttactaccgctac

SEQ ID NO: 15125 - DNA, 260 bp, Unknown; identical to SEQ ID NO: 14410
  Description of Unknown: LeftRegion for integrase B2126 sequence

SEQ ID NO: 15126 - DNA, 260 bp, Unknown; identical to SEQ ID NO: 13967
  Description of Unknown: LeftRegion for integrase B2127 sequence

SEQ ID NO: 15127 - DNA, 260 bp, Unknown
  Description of Unknown: LeftRegion for integrase B2128 sequence
tactgaggaagcagcaactactgaatatacttcaagttctattaatatcgattatgaggttgaatcatatagacaagaacttgaagctgaacaaaaggagaaaacatcatcagcttcagaaaagccaaaaggcgcttaaagttataaaataatcaataaagagttatgttatcatagctctttaaaaatatggaggaaaaatgaataaaaaaagtgcaatttatgtgagagtatcgacttcacatcaaatagataaagac

SEQ ID NO: 15128 - DNA, 260 bp, Unknown; identical to SEQ ID NO: 15097
  Description of Unknown: LeftRegion for integrase B2129 sequence

SEQ ID NO: 15129 - DNA, 260 bp, Unknown
  Description of Unknown: LeftRegion for integrase B2130 sequence
cgtgaagtagacattgaagacggcgatattgtagtggccgttgtagatcggcaagacggctttatcaaacaagtctacatggaagagaatgttcttaccctacattctttcaatccctactacccagatatggtctttaagggaaacgaaattaaacaagtccgttttgtaggtaaagcccgagaggtgaaaagaattctatgaaaaaattcaaattccctatcgacctttccatgctgacagaggaagagatcaaccaa

SEQ ID NO: 15130 - DNA, 260 bp, Unknown
  Description of Unknown: LeftRegion for integrase B2131 sequence
aaaacgctgtgaagaacttataggaggccattatggaaaagaaagagatttccgaattatttgaccaattcaccaatgaaccggacaaagaaaagcgtcataccataatcgacaatcttacagaggaacaggcaaaacttatcctgaaatccattgctgatttcaaatatagaacctctccgttttaagaggtgtaccgtatgaagaagttcaaattccccattgacctgtccatgctgacagaggaagagatcaaccaa

SEQ ID NO: 15131 - DNA, 260 bp, Unknown; identical to SEQ ID NO: 13984
  Description of Unknown: LeftRegion for integrase B2132 sequence

SEQ ID NO: 15132 - DNA, 260 bp, Unknown
  Description of Unknown: LeftRegion for integrase B2133 sequence
aaaacactgtaaagaacttgtgggaggcaattatggaaaagaaagagatttctgaattatttgaccgatttaccaatgaaccggacaaagaaaagcgtcatgccatgatcgacaatcttacagaggaacaggcaaaacttatcctgaaatctattgccgatttcaaatatagaacctccccgttttaagaggtgtgctgtatgaagaagttcaaattccccatcgacctgtccatgctgacagaggaagagatcaaccaa

SEQ ID NO: 15133 - DNA, 260 bp, Unknown
  Description of Unknown: LeftRegion for integrase B2134 sequence
acgattccgcaccggtatgcccgcctgatatggagcaccaacttcttttctttttcgatcaatgtgaccaagagggtaaacttcgtatcatccaacttgccatgaacgaatacgaccgctccacgaaagaaaaaacggcacatgaggatccggttgctgtcggataaaacaatcgacctgaacgaatggaggaaaacactatgacattccccgtcgacctaagctgcctcactgaggaggaacttgcccaattccgtgaa

SEQ ID NO: 15134 - DNA, 260 bp, Unknown
  Description of Unknown: LeftRegion for integrase B2135 sequence
aattataaatgctttggtaaagtgttgggaaaagctaaagttttaattaaggtttaaagttacatatagagtatcgataacaaataaaaatcccgctcagtgctaccaacaccgaacgggaaagagctgcggtataaccacaacattttacaagttaattgtaccacagctccttgtaaatgtcaaggagtgatataaaaatgaaaagaaccgcaatatacgctcgttacagctctgataatcaacgggcggagagtatt

SEQ ID NO: 15135 - DNA, 260 bp, Unknown
  Description of Unknown: LeftRegion for integrase B2136 sequence
cgagggttggcaagaaaaaattaaaaggctgacataactttggaaacaccagtttcgcacaaaaaataagaaagaacccccggtgcgactaccacatgttaaccatgctgttaaactctccctctcgttctccggtgacgtttactgtactgaaccgcaataatagaaagtcttgcatagcctttgaaaggagtgaaactatgtaccgtccgccagagctgaccctcaacccggatgagatccttgtctacctgcgaaag

SEQ ID NO: 15136 - DNA, 260 bp, Unknown
  Description of Unknown: LeftRegion for integrase B2137 sequence
cggacattagcaacatggattttggctttttcaccgccgaaaaccgcgtggaaaggcttgggctgcttgcttccgcggtgattgcggtcatcctaacggcaatgcaatttatagaaaaggccagaacgaaaagaaagaaggataaagagaacgacaacttaatataatcaaacaataacccacgaaagaagctgatcgttttgtattatcaaccgaagatagattttaagccggaagaagtcattgattatttaagaaaa

SEQ ID NO: 15137 - DNA, 260 bp, Unknown
  Description of Unknown: LeftRegion for integrase B2138 sequence
atcgcgctggacatcagcgatagggagcacggcctttttgttgcaagcagattccccgtcattgggtgtgcgctgtgcattctcattggtgccgccgtctttgggtttctatactatattgcaaagagcagaagaaaagaggataaatagaaagacagtttaatataatcgaacaataacatcagaaagaagttgattttttgtattatcaaccaaagatagatttcaagccagaagaagtcattgactatttgagaaag

SEQ ID NO: 15138 - DNA, 260 bp, Unknown
  Description of Unknown: LeftRegion for integrase B2139 sequence
tagacattagcaacatggattttggctttttcaccgccgaaaaccgcgtggaaaggcttggactgcttgctgctgcggtgattgcggtcatcctaacggcaatgcaatttatagaaaaggccagaacgaaaagaaagaaggataaagagaacgacaacttaatataatcaaacaataaccaacgaaagaagctgatcgttttgtattatcaaccgaagatagattttaagccggaagaagtcattgattatttaaggaaa

SEQ ID NO: 15139 - DNA, 260 bp, Unknown
  Description of Unknown: LeftRegion for integrase B2140 sequence
tggacattagcaacatggattttggctttttcaccgccgataaccgcttggaaaggctcggactgcttgcttctgcggtgattgcggtcatcctaacggcaatgcaatttatagaaaaggccagaacgaaaagaaaaaaggataaagagaacgacaacttaatataatcaaacaataacccacgaaagaagctgatcgttttgtattatcaaccgaagatagattttaagccggaagaagtcattgattatttaagaaaa

SEQ ID NO: 15140 - DNA, 260 bp, Unknown
  Description of Unknown: LeftRegion for integrase B2141 sequence
tagacattagcaacatggattttggctttttcaccgccgaaaacagcgtggaaaggcttggactgcttgctgctgcggtgattgctgtcatcctaacggcaatgcaatttatagaaaaggccagaacgaaaagaaagaaggataaagagaacgacaacttaatataatcaaacaataacccacgaaagaagctgatcgttttgtattatcaaccgaagatagattttaagccggaagaagtcattgattatttaagaaaa

SEQ ID NO: 15141 - DNA, 260 bp, Unknown; identical to SEQ ID NO: 15140
  Description of Unknown: LeftRegion for integrase B2142 sequence

SEQ ID NO: 15142 - DNA, 260 bp, Unknown
  Description of Unknown: LeftRegion for integrase B2143 sequence
atcgcgctggacatcagcgatagggagcacggcctttttgttgcaagcagattccccgtcattgggtgtgcgctgtgcattttcattggtgccgccgtctttgggtttctatactatattgcaagaagcagaagaaaaaaggataaatagaaagacagtttaatataatcgaacaataacctaagaaagaagttgattttttgtattatcaaccaaagatagatttcaagccagaagaagtcattgactatttgagaaag

SEQ ID NO: 15143 - DNA, 260 bp, Unknown
  Description of Unknown: LeftRegion for integrase B2144 sequence
atcgcgctggacatcagtgataagaagcacggcctttttgttgcaaacagattccccgtcattgggtgtgcgctgtgcattctcattggtgccgccgtctttgggttcctatactatgttgcaaaaagcagaagaaaaaaggataaatagaaagacagtttaatataatcgaacaataacctaagaaagaagttgattttttgtattatcaaccgaagatagatttcaagcccgaagaagtcattgactatttaagaaag

SEQ ID NO: 15144 - DNA, 260 bp, Unknown
  Description of Unknown: LeftRegion for integrase B2145 sequence
ctgatgaagttatcaaagatagcaaagaaaggattgactatctaaaaaagatagcagatggaaggctgaaggtaatcactatattaggttttgcacttggaataaccctgcttataattattattgctttacttatggataaagcaaatcctgatcttgggttcttttggaaaaaaccctaatcgaaaggaagatgaaatgtgtattatcaaccgaaaatagattttacgcctgatgaagttatagattatttaaggaaa

SEQ ID NO: 15145 - DNA, 260 bp, Unknown; identical to SEQ ID NO: 13176
  Description of Unknown: LeftRegion for integrase B2146 sequence

SEQ ID NO: 15146 - DNA, 260 bp, Unknown
  Description of Unknown: LeftRegion for integrase B2147 sequence
ccgccgtaattattgaggatgaagcttcgctgaaacgtgtcaattatttcccggaaaagaacttgctgatactgaaggcagaaaacgcaaaatatgaagatctggtttataccggtgaggaactgaatcatattcgaattctgggccgtgctgttgcctttcaaagcgatatccgctaacgtgcaatgaggtgattttatttgtactaccagccaaagattaatttctctcccaacgaagttatagcatatttgcgcaag

SEQ ID NO: 15147 - DNA, 260 bp, Unknown
  Description of Unknown: LeftRegion for integrase B2148 sequence
tggacattagcaacatggattttggctttttcaccgccgataaccgcttggaaaggctcggactgcttgcttccgtggtgattgcggtcatcctaacagcaatgcaatttatagaaaaggccagaacgaaaagaaagaaggataaagagaacgacaacttaatataatcaaacaataacccacgaaagaagctgatcgttttgtattatcaaccgaagatagattttaagccggaagaagtcattgattatttaagaaaa

SEQ ID NO: 15148 - DNA, 260 bp, Unknown; identical to SEQ ID NO: 14597
  Description of Unknown: LeftRegion for integrase B2149 sequence

SEQ ID NO: 15149 - DNA, 260 bp, Unknown
  Description of Unknown: LeftRegion for integrase B2150 sequence
tgcgaaatagagcggtagctttaacttcccaagaggaaactttaattgaagtgttccgttccgtaaatgagatggataaatttgaaattatccactatctgatgacacttcgagataaaatgacaaaagaaaaaacagactctcaggacgagtctgctgtcggctaaggttattgatctgaatgagtggagaaaaacactatgaaaagagataagttccccattgatctgtccatgctgacccaagaggaaattgaccaa

SEQ ID NO: 15150 - DNA, 260 bp, Unknown
  Description of Unknown: LeftRegion for integrase B2151 sequence
agaagatgataagccgatggtaaaagtagacttgtcccactcatacaatccatctaaataaatatttaataattatatgaaatggccgaacagagttttttcagtcggcctttccttttcgcctcaaaaccgaacatacgtaccattttagattaatttcgttgtgaaaatcacttatatttaatcaggctggtgactttatgaaaataaatatgcgtgtcgcaatatatgttcgtgtcagcaccgatgagcaagccgat

SEQ ID NO: 15151 - DNA, 260 bp, Unknown; identical to SEQ ID NO: 13421
  Description of Unknown: LeftRegion for integrase B2152 sequence

SEQ ID NO: 15152 - DNA, 260 bp, Unknown; identical to SEQ ID NO: 15140
  Description of Unknown: LeftRegion for integrase B2153 sequence

SEQ ID NO: 15153 - DNA, 260 bp, Unknown
  Description of Unknown: LeftRegion for integrase B2154 sequence
tggacattagcaacatggattttggctttttcaccgccgaaaaccgcgtggaaaggcttggactgcttgctgccgcggcgattgcggtcatcctaacggcaatgcaatttatagaaaaggccagaacgaaaagaaagaaggataaagagaacgacaacttaatataatcaaacaataacccacgaaagaagctgatcgttttgtattatcaaccgaagatagattttaagccggaagaagtcattgattatttaaggaaa

SEQ ID NO: 15154 - DNA, 260 bp, Unknown
  Description of Unknown: LeftRegion for integrase B2155 sequence
atcgcgctggatataagcgacatggaacatggtttttttactgagaatggcctttccgtcatgggtggtgtactgtgcatttttcttgtgtccgttgtcctcgcgctgttgcactttgccgcaaaggccaaaagaaagaaggataatgagaaagacaacttaatataatcaaaccataacctaagaaagaagttgattttttgtattatcaaccgaagatagatttcaagcccgaagaagtcattgactatttgagaaag

SEQ ID NO: 15155 - DNA, 260 bp, Unknown
  Description of Unknown: LeftRegion for integrase B2156 sequence
tggacattagcaacatggattttggctttttcaccgccgataaccgcttggaaaggctcggactgcttgcttccgcggtgattgcggtcatcctaacggcaatgcaatttatagaaaaggccagaacgaaaagaaagaaggataaagagaacgacaacttaatataatcaaacaataacccacgaaagaagctgatcgttttgtattatcaaccgaagatagattttaagccggaagaagtcattgattatttaagaaaa

SEQ ID NO: 15156 - DNA, 260 bp, Unknown
  Description of Unknown: LeftRegion for integrase B2157 sequence
tcccggatgattggcaaaagaaaattcaaaagctgccataacttcgggaatacatacttcgaacaaaataatgatccccttatcgtaacagtcacatgctaaccatgctgttacactcttcctctcgttctccggtgacgtttactgtacagaaccgcaataatatagaaccttgcacagcctttgaaaggagtgaaactatgtaccgcccgccagagctgaccctcaacccggatgaggtcctcatctacctgcgaaag

SEQ ID NO: 15157 - DNA, 260 bp, Unknown; identical to SEQ ID NO: 14965
  Description of Unknown: LeftRegion for integrase B2158 sequence

SEQ ID NO: 15158 - DNA, 260 bp, Unknown
  Description of Unknown: LeftRegion for integrase B2159 sequence
tagacattagcaacatggattttggctttttcaccgccgaaaaccgcgtggaaaagcttggactgcttgcttccgtggtgattgcggtcatcctaacagcaatgcaatttatagaaaaggccagaacgaaaagaaagaaggataaagagaacgacaacttaatataatcaaacaataacccacgaaagaagctgatcgttttgtattatcaaccgaagatagattttaagccggaagaagtcattgattatttaagaaaa

SEQ ID NO: 15159 - DNA, 260 bp, Unknown
  Description of Unknown: LeftRegion for integrase B2160 sequence
atcgcgctggacatcagcgatagggagcacggcatttttactgagaatggcctttccgtcatgggtggtgtgctgtgcatttttcttgtgtccgttgtcctcgcgctgttgcactttgccgcaaaggccaaaagaaagaaggataatgagaaagacaacttaatataatcaaaccataacctaagaaagaagttgattttttgtattatcaaccgaagatagatttcaagcccgaagaagtcattgactatttgagaaag

SEQ ID NO: 15160 - DNA, 260 bp, Unknown; identical to SEQ ID NO: 13534
  Description of Unknown: LeftRegion for integrase B2161 sequence

SEQ ID NO: 15161 - DNA, 260 bp, Unknown
  Description of Unknown: LeftRegion for integrase B2162 sequence
gtgcgtcgcttttgcgttttagcggtgatggcggtgcaggcaaagatgctttgactggaacgatggttgatacgagatctggggaaactgtttcaacaaagatcgaaagcctagaagatctttgcaagctgtttcctgcggtgaagttatacgtggcaggataatattcgtatttgtgaacagaaagagggcgggcagcattgtcaaagcgcgaatcgaaaagcggccagaagtgtttggcagcggagcagatcggcgtg

SEQ ID NO: 15162 - DNA, 260 bp, Unknown
  Description of Unknown: LeftRegion for integrase B2163 sequence
gaaaccgtagactcagacggttctattacgcaaaaaatcgccgactgcgttcccgagcctatccgttcaaggctcgacgttgttttcgtcctgcagcatatcagtgaccccgcgaaacttcaagccctataccaaacagcgcggctttactcggcgcaggcggacttcgtcgttccttatgactcggaggacggtgtaaaatgattgtcgttgcttatgctcgttattcctccgaagcccagcgcgacggctactctatc

SEQ ID NO: 15163 - DNA, 260 bp, Unknown
  Description of Unknown: LeftRegion for integrase B2164 sequence
ctgatgaagttatcaaagatagcaaagaaaggattgactatctaaaaaagatagcagatggaaggctgaaggtaatcactatattaggttttgcacttggaataaccctgcttataattattattgctttacttatggataaagtaaatcctgatcttgggttcttttggaaaaaaccctaatcgaaaggaagatgaaatgtgtattatcaaccgaaaatagattttacgcctgatgaagttatagattatttgaggaaa

SEQ ID NO: 15164 - DNA, 260 bp, Unknown
  Description of Unknown: LeftRegion for integrase B2165 sequence
ccaccccttcttctgctccaacacaatcacaattagacacgctggttaagtatttctctctgtgcaacgaagaaggacggtttcgcatcatacagtttgccatgaacgaatacgaccgagcggcaaaaggaaaaacagactcgtctaaagagtctgctgtctaagaaattgatagacttgtctgaggtgagaaagctactatgaaaacgaagaaactgcctatcgacctatctatgcttaccgtagaggaacagcaacag

SEQ ID NO: 15165 - DNA, 260 bp, Unknown
  Description of Unknown: LeftRegion for integrase B2166 sequence
tggctcgtcgggaaggcattgactttatccttgatccaatgtgggcaaacatccgagatgaattggttgagcatatcgatggattaaagtctcagtggaaaaagcgtgacacaaaagtaatacagggacatgttgcagaataaaaaatcgccaagcccaataatagagaaccttgcatagcctttgaaaggagtgaaactatgtaccgtccgccagagctgaccctcaacccggatgaggtcctcgtctacctgcgaaag

SEQ ID NO: 15166 - DNA, 260 bp, Unknown
  Description of Unknown: LeftRegion for integrase B2167 sequence
tagacattagcaacatggattttggctttttcaccgccgaaaaccgcgtggaaaagcttggactgcttgcttccgtggtgattgcggttatcctaacagcaatgcaatttatagaaaaggccagaacgaaaagaaagaaggataaagagaacgacaacttaatataatcaaacaataacccacgaaagaagctgatcgttttgtattatcaaccgaagatagattttaagccggaagaagtcattgattatttaagaaaa

SEQ ID NO: 15167 - DNA, 260 bp, Unknown
  Description of Unknown: LeftRegion for integrase B2168 sequence
ccggtattccggtcataaaaaccccgatgccatccgcggaatcaaggaaatccttctcacaaatattgcgaaaaaggcgtaaaattttgcactatttgatgaaatatgagataataatggtgtagagatgcaccttgaaaattgaaacaaggccatatacaccgttccaaagaccgttaagaacaacaggagtgatgtatatgttagagaacttgatagccgatttgcggcgcgtgtattgcctgtaccgtgtttcgacg

SEQ ID NO: 15168 - DNA, 260 bp, Unknown
  Description of Unknown: LeftRegion for integrase B2169 sequence
cggacattagcaacatggattttggctttttcaccgccgaaaaccgcgtggaaaggcttggactgcttgcttccgcggtgattgcggtcatcctaacggcaatgcaatttatagaaaaggccagaacgaaaagaaagaaggataaagagaacgacaacttaatataatcaaacaataacccacgaaagaagctgatcgttttgtattatcaaccgaagatagattttaagccggaagaagtcattgattatttaagaaaa

SEQ ID NO: 15169 - DNA, 260 bp, Unknown
  Description of Unknown: LeftRegion for integrase B2170 sequence
cgtgaagtagacattgaagacggagatattgtcgtggccgttgtagatcggcaagacggctttatcaaacaagtccactttgaagagaatgtccttaccctgcattctttcaacccctactatcctgatatggtctttagagggaatgagatcaagcaagttcggtttgtaggtaaagcccgagaggtgaagagaattctatgaagaagttcaaattccccattgatctgtctatgctgacagaggaagaaattaaccaa

SEQ ID NO: 15170 - DNA, 260 bp, Unknown; identical to SEQ ID NO: 13129
  Description of Unknown: LeftRegion for integrase B2171 sequence

SEQ ID NO: 15171 - DNA, 260 bp, Unknown
  Description of Unknown: LeftRegion for integrase B2172 sequence
attgcgctggacatcagcgatagggatcacggcctttttgttgcaaacagattccccgtcattgggtgtgcgctgtgcattctcattggtgccgccgtctttgggttcctatactatattgcaaaaaacagaagaaaaaaggataaatagaaagacagtttaatataatcgaacaataacctaagaaagaagttgattttttgtattatcaaccgaagatagattttaagcccgaagaagtcattgactatttgagaaag

SEQ ID NO: 15172 - DNA, 260 bp, Unknown
  Description of Unknown: LeftRegion for integrase B2173 sequence
cgtgaagtagacattgaggatggagatattgtcgtggccgtagtagatcggcaagacggctttatcaaacaagttcattttgaagaaaatgttattaccctacactctttcaatccctattaccctgatatggtctttagagggaacgagattaaacaagtccggtttgtaggtaaagcccgagaggtgaagagaattctatgaagaagttcaaattccccattgacctatccatgctgacagaagaagagatcaaccaa

SEQ ID NO: 15173 - DNA, 260 bp, Unknown
  Description of Unknown: LeftRegion for integrase B2174 sequence
ccgtcgtaattattgaggatgaagcttcgctgaaacgtgtcaattatttcccggaaaagaacttgctgatactgaaggcagaaaacgcaaaatatgaagatctggtttataccggtgaggaactgaatcatattcgaattctgggccgtgctgttgcctttcaaagcgatatccgctaacgtgcaatgaggtgattttatttgtactaccagccaaagattaatttctctcccaacgaagttatagcatatttgcgcaag

SEQ ID NO: 15174 - DNA, 260 bp, Unknown
  Description of Unknown: LeftRegion for integrase B2175 sequence
gtagtggttcgtgagttttctggggacaaaaccatgcgggaagcctttgagcagctgatcgagcgtcagacctgcgaacacttcgaggaatggttagagcatcaggaaatggcacgaaaagcggcgtaaagcagttgaatcatggacaggggcatggtattataatggtatcgtgtccctgttcatagaaggagaacactatgagcaggaaaaaacaagtgaatcagaaaatcacagccctttattgccgtatctctctg

SEQ ID NO: 15175 - DNA, 260 bp, Unknown; identical to SEQ ID NO: 15132
  Description of Unknown: LeftRegion for integrase B2176 sequence

SEQ ID NO: 15176 - DNA, 260 bp, Unknown; identical to SEQ ID NO: 13421
  Description of Unknown: LeftRegion for integrase B2177 sequence

SEQ ID NO: 15177 - DNA, 260 bp, Unknown
  Description of Unknown: LeftRegion for integrase B2178 sequence
tggtggtgcgggagttctccggggagaagtccatgcgggaagcctttgagcagctcattgagcgccagacctgcgaacacttcgaggaatggcgtcatcagcgggaaatggcagaaaaagctgcgtaaaaacggttgattcagggacggggacatggtactataatggtatcgtgtccctgttcatagaaggagaacgctatgagcaggaaaaaacaagtctatgagaaaatcaccgctctctactgccgtatctctctg

SEQ ID NO: 15178 - DNA, 260 bp, Unknown
  Description of Unknown: LeftRegion for integrase B2179 sequence
aaaaagaaataaaaaaaattttaatagatgaaaatttaaatgtttctaaattggcaaacttacttaatacaagtagtcaaaatttaactgctaaactaaaaagaaataatctgaaattaaatgatatacaagaaattgcaaatgcattagggtatcatgttgaaatatcattcaaaaaaaataattaggaggattttcttatgaaaatagcaatttactgtagagtttcaactcatcatcaaatagataaagaatcttta

SEQ ID NO: 15179 - DNA, 260 bp, Unknown
  Description of Unknown: LeftRegion for integrase B2180 sequence
gtcgcatccctaaagctggcgagtgtcaaaacggaggaatatgaatcacaccggctccgccgcatccttggttcgcaggcaaagctgtgggagctggacgcaaacctcctgcggcagagcatccgaaaaatcacctatgacagtaagacagtcaaagtcctgctgaaaaacaatcaagtcttagaggagtgtgatgatacatgacgcagtcccgccctgaaccgaaggtcatcgtgattcccgcaaaggaggaatcgccg

SEQ ID NO: 15180 - DNA, 260 bp, Unknown
  Description of Unknown: LeftRegion for integrase B2181 sequence
cggacattagcaacatggattttggctttttcaccgccgaaaaccgcgtggaaaggcttggactgcttgctgctgcggtgattgcggtcatcctaacggcaatgcaatttatagaaaaggccagaacgaaaagaaagaaggataaagagaacgacaacttaatataatcaaacaataacccacgaaagaagctgatcgttttgtattatcaaccgaagatagattttaagccggaagaagtcattgattatttaagaaaa

SEQ ID NO: 15181 - DNA, 260 bp, Unknown; identical to SEQ ID NO: 15140
  Description of Unknown: LeftRegion for integrase B2182 sequence

SEQ ID NO: 15182 - DNA, 260 bp, Unknown
  Description of Unknown: LeftRegion for integrase B2183 sequence
tggatgttagcgacagcaacaacggctttttcaccgccgacaatcgcataggaaatatttggttgctgaccgtcgcggcggttgctgttgtcctcacagcaacgcattttattgaaaaagccagaacgaaaagaaagaaggataaagagaccgacaacttaatataatcaaacaataacccacgaaagaagctgattgtattgtattatcaaccaaagatagatttcaagccggaagaagtaattgactatttgagaaag

SEQ ID NO: 15183 - DNA, 260 bp, Unknown
  Description of Unknown: LeftRegion for integrase B2184 sequence
ggctactggctgtaaaatgctggtagccctcattttttagttgtatctagtatataaggggtgtataatagataggaactgaaaacagcctcataaagccctctattttatagagggtaaagaagtctacacctaatatataaaagtggctgtatgaggcacacaggagctcacaggactattacaggagggtaaacaggatggcatacaggaaaataacggatataagagatactattggtatgagagcggtattctat

SEQ ID NO: 15184 - DNA, 260 bp, Unknown
  Description of Unknown: LeftRegion for integrase B2185 sequence
cgcagaactcgcaggaatctacgaaaagcaggttgccaactggaacagtaatcccgctccggcttgccagcccgatatagcggttccaacaataaatgatttgcgcgccctcaagcagctcgttgatgaaggtgtgcttaccgaagaagaatttacagccaaaaagaagcagttgctcggcatctgagcaaggaggctatatggcttcgcagaagtataaaaagaagtcagacaatttgataatcaccggtgtaatatac

SEQ ID NO: 15185 - DNA, 260 bp, Unknown
  Description of Unknown: LeftRegion for integrase B2186 sequence
ctcccgtgagtttgcaggcagccaaaccatgcagcaagcctttgagcagcttattgagcggcagacctgtgaacggtttgaggaatggatggggcaaaaagccagttaaaaggctaaaatccggcgaaaaacagttgaaaggacggcgggggcatggtactataatagtatcgtgtccctgttcgtagaaggagaacactatgaacaggaataaaaaaatagtcaaaaaagtaaccgccctctattgcaggatttccctt

SEQ ID NO: 15186 - DNA, 260 bp, Unknown
  Description of Unknown: LeftRegion for integrase B2187 sequence
tggggccgcagggcttgcggttctgttcggcatcttccttatggtatatgtctttttggatatgcaaaacccgaatcttggcctgttcaagtccggccacgcctcgccgatcgtttatgtcgcggccttttccattatcggaacatgtctgtatatcgtccgaactgtgataaagcgaaacgcaaaaaggagtaaacacgatgcaaacaataccaattgatctatcggctcttacgccggaggaaagacagcagtttgcg

SEQ ID NO: 15187 - DNA, 260 bp, Unknown
  Description of Unknown: LeftRegion for integrase B2188 sequence
ctgggctgcttcggtgcgcactatttctatgttggccgcatcggccgcggcattgttgccctttttaccatgaatttcttctttatcggctctattattgacattatccacattttgaccggcaaatttaaagacaacaccggcgcaccgctgcgccagtgatcggctgcacttgactgcaaaacaggggaggcgttacgatgtacagcactgtgtccggccctatacatccacccttggcgttcggctattgccgcaaa

SEQ ID NO: 15188 - DNA, 260 bp, Unknown; identical to SEQ ID NO: 13291
  Description of Unknown: LeftRegion for integrase B2189 sequence

SEQ ID NO: 15189 - DNA, 260 bp, Unknown; identical to SEQ ID NO: 14155
  Description of Unknown: LeftRegion for integrase B2190 sequence

SEQ ID NO: 15190 - DNA, 260 bp, Unknown
  Description of Unknown: LeftRegion for integrase B2191 sequence
ggtagccctcattttttagttgtatctagtatataaggggtgtataatagataggaactgaaaacagcctcataaagccctctattttatcgagggtaaagaagtctacacctaatatataaaagtgactgtacgaggcacacaggagctcacaggactattacaggagctcacaggactattacaggagggtaaacaggatggcatacaggaaaataacggatataagagatactattggtatgagagcggtattttat

SEQ ID NO: 15191 - DNA, 260 bp, Unknown; identical to SEQ ID NO: 13291
  Description of Unknown: LeftRegion for integrase B2192 sequence

SEQ ID NO: 15192 - DNA, 260 bp, Unknown
  Description of Unknown: LeftRegion for integrase B2193 sequence
ggctactggctgtaaaatgctggtagccctcattttttagttgtatctagtatataaggggtgtataatagatagaaactgaaaacagcctcataaagccatctattttatcgagggtaaagaagtctacacctaatatataaaagtggctgtatgaggcacacaggagctcacaggactattgcaggaggataaacaggatggcatacaggaaaataacggatataagagatactattggtatgagagcggtattttat

SEQ ID NO: 15193 - DNA, 260 bp, Unknown; identical to SEQ ID NO: 14199
  Description of Unknown: LeftRegion for integrase B2194 sequence

SEQ ID NO: 15194 - DNA, 260 bp, Unknown
  Description of Unknown: LeftRegion for integrase B2195 sequence
gcaaggtcagtgtttccaaagcgtctgaattggaagaacgcttactccgttatttttcattttgtgacgcagaaggaaagctgcgtattatccaatgtgccatgaacgaatttgaccgaaccgcaaaagaaaaaacagactcttcggaagagcctgctgttggctaaggtcgttgacctggaagaatggagaaagacactatgatgaaatttccaatagacttgtccatgctgacagaggaagagattgaccagttccgg

SEQ ID NO: 15195 - DNA, 260 bp, Unknown
  Description of Unknown: LeftRegion for integrase B2196 sequence
ttaaatgatagtttgtaaaataaaaatttaagaaataatttgtatgtaattatttctttttttgtgtaataagattaattggtgatataaatgattgatactgaacttgctataattttaaatgagtacttatataagagaaaaataattaattttgatttatataatgatgctttaaaaaaattaggagttgatagttgatggacttatgtaaaatcagaaatgaaatatcaagaggagaaagtatatataacatacca

SEQ ID NO: 15196 - DNA, 260 bp, Unknown; identical to SEQ ID NO: 13709
  Description of Unknown: LeftRegion for integrase B2197 sequence

SEQ ID NO: 15197 - DNA, 260 bp, Unknown
  Description of Unknown: LeftRegion for integrase B2198 sequence
ctaatgaacaatatgtaaggcatgtagaggcttggcataaaatgtttggtatggatccatttacagatgaagaacacgagaagctaatggaatatggtaagttcctgatttcaatgaggaaaaataaaggaggtgatgcctaaaactcttgccgagcagtaccaaaaatataaaaaacatcttagaggagagatcatccaatgtactacaaagaataccctaaaatttattattacgaaactaaagaatatggaagaaag

SEQ ID NO: 15198 - DNA, 260 bp, Unknown; identical to SEQ ID NO: 14115
  Description of Unknown: LeftRegion for integrase B2199 sequence

SEQ ID NO: 15199 - DNA, 260 bp, Unknown
  Description of Unknown: LeftRegion for integrase B2200 sequence
ccatgggcggcttatccgtgtggtgtctgtgttcccgcagcagggcagcgccaccccggaggacaagctgaaagccctcatcgacctggacgcacagcagggaaagctgtgcgcctaaagggctggacattccccaggctttggggtattgtgtagacgcgatgcgctgaatcggtttgacgagaaaaaaggagggctgtatgaaacagtcaaaccagaatgagatcaccgccctgtactgccgtctcagccaggatgac

SEQ ID NO: 15200 - DNA, 260 bp, Unknown; identical to SEQ ID NO: 15195
  Description of Unknown: LeftRegion for integrase B2201 sequence

SEQ ID NO: 15201 - DNA, 260 bp, Unknown; identical to SEQ ID NO: 14115
  Description of Unknown: LeftRegion for integrase B2202 sequence

SEQ ID NO: 15202 - DNA, 260 bp, Unknown
  Description of Unknown: LeftRegion for integrase B2203 sequence
ctaatgtttcatgaaaaaaaccgcccagtggatgacagcactgggcggttcgaacagggttacaggggatcgatgcagacgaaagagatgtgattgatgctcgacgcttacgtatcgggctggagagcaatcatatcaaccctgtgcccttattatagcatagcaagataggggaatacaatgtgagattgaatacattgatgccggacgattgtgcggtcatctatgcgcgctactcatcacacgcgcagcgtgatgtg

SEQ ID NO: 15203 - DNA, 260 bp, Unknown; identical to SEQ ID NO: 13291
  Description of Unknown: LeftRegion for integrase B2204 sequence

SEQ ID NO: 15204 - DNA, 260 bp, Unknown; identical to SEQ ID NO: 15063
  Description of Unknown: LeftRegion for integrase B2205 sequence

SEQ ID NO: 15205 - DNA, 260 bp, Unknown
  Description of Unknown: LeftRegion for integrase B2206 sequence
cccgcacgatctgaggggaaaacatgaatacaccgccaataagagatcgtaccaaatcctcattccccacgccgaactgaaagccgccgtgaagaagggcttgactgagatttgggaactggctgaatactatgatgtaccgtgtgagttcatgcaaagagccgccgagtattggcagagggtagaaatggcaggataatatgaaaaagaagtttcccattgatctgtctatgctcacccctgaggaaatcgaccagttt

SEQ ID NO: 15206 - DNA, 260 bp, Unknown
  Description of Unknown: LeftRegion for integrase B2207 sequence
agggctactggctgtaaaatgctggtagccctcatttttagttgtatctagtatataagggatgtataatagataggaactgaaaacagcctcataaagccctctattttatcgagggtaagaagtctacacctaatatataaaagtggctgtatgaggcacacaggagctcacaggactattacaggagggtaaacaggatggcatacaggaaaataacggatataagagatactattggtatgagagcggtattttat

SEQ ID NO: 15207 - DNA, 260 bp, Unknown; identical to SEQ ID NO: 14983
  Description of Unknown: LeftRegion for integrase B2208 sequence

SEQ ID NO: 15208 - DNA, 260 bp, Unknown
  Description of Unknown: LeftRegion for integrase B2209 sequence
tggtggtgcgggagttctccggggagaagtccatgcgggaagcctttgagcagctcattgagcgccagacctgcgaacacttcgaggaatggcgtcatcagcgggaaatggcagaaaaagctgcgtaaaaacggttgattcagggacagggacatggtactataatggtatcgtgtccctgttcatagaaggagaacgctatgagcaggaaaaaacaagtctatgagaaaatcaccgctctctactgccgcatctctctg

SEQ ID NO: 15209 - DNA, 260 bp, Unknown; identical to SEQ ID NO: 13434
  Description of Unknown: LeftRegion for integrase B2210 sequence

SEQ ID NO: 15210 - DNA, 260 bp, Unknown
  Description of Unknown: LeftRegion for integrase B2211 sequence
atatcgccaactggtcggccgctcaaggtgcagctaccgcaccgcagcccgttcatcaggtagtggagcagaaaccgtctcccgccgatgaaatccgcaaatacaagggcctgctggatgacggtatcatcacgcaggaagaatttgaagctaagaaaaagcaactgctgggcctgtaaatttgaaaggagcgtgacggcatgagaaaaaaatccaacctcaatgcggctactcgtgccgtcatctatgccaggtattcc

SEQ ID NO: 15211 - DNA, 260 bp, Unknown
  Description of Unknown: LeftRegion for integrase B2212 sequence
tgaaatgttaatttatgtgcttgaaatgttaatttttaactaaaaaatgtttaaaagtgcaattttaaacaaaaaaagtccccgttggtgcaacaacgaggaccgagtacagaaaataaaattacctaccacagcaattctttttctgtactctcattataccatattgcaagaaaatatgctagaaagagagtgaatttatggaagaattttacgatgtaattgactataacacaatattagaaaaaattaataatgat

SEQ ID NO: 15212 - DNA, 260 bp, Unknown
  Description of Unknown: LeftRegion for integrase B2213 sequence
ctgggctgcttcggtgcgcactatttctatgttggccgcatcggccgcggcattgttgccctttttaccatgaatttcttctttatcggctctattattgacattatccacattttgaccggcaaatttaaagacaacaccggcgcaccgctgcgccagtgatcggctgcacttgactgcaaaacaggggaggcgttacgatgtacagcactgtgtccggccctatgcatccacccttggcgttcggctattgccgcaaa

SEQ ID NO: 15213 - DNA, 260 bp, Unknown
  Description of Unknown: LeftRegion for integrase B2214 sequence
gctactggctgtaaaatgctggtagccctcattttttagttgtatctagtatataaggggtgtataatagatagaaactgaaaaacagcctcataaagccctctattttatcgagggtaaagaagtctacacctaatatataaaagtggctgtatgaggcacacaggagctcacaggactattacaggagggtaaacaggatggcatacaggaagataacggatataagagatactattggtatgagagcggtattttat

SEQ ID NO: 15214 - DNA, 260 bp, Unknown
  Description of Unknown: LeftRegion for integrase B2215 sequence
cggaacaatgccccgcatgaaagcgaggaagatcttttgaagaagcggctgctcttggcttgcgatgccttgaacagtgcggcggttgaaaaggtcattacatacgcagaagatctcgcatataatccatacaatagaaaacccagcaatggctgagggtcccccggtgaagccaaaaaagaaaagggagggccgtccgggtggacagctctccctttttaatgcaggaaaggatgggtattgaactcatggcaaaaaat

SEQ ID NO: 15215 - DNA, 260 bp, Unknown
  Description of Unknown: LeftRegion for integrase B2216 sequence
gagggctactggctgtaaaatgctggtagccctcattttttagttgtatctagtatataaggggtgtataatagataggaactgaaaacagcctcataaagccctctattttatagagggtaaaaagtctacataatatataaaagtggctgtatgaggcacacaggagctcacaggactattacaggagggtaaacaggatggcatacaggaaaataacggatataagagatactattggtatgagagcggtattttat

SEQ ID NO: 15216 - DNA, 260 bp, Unknown
  Description of Unknown: LeftRegion for integrase B2217 sequence
ttgaaggtgaaaacatcaatattcctgaattttgtcagactcttttattcttctttgaaaactgtgatgcacctggtcaactgcgcataatccaattagccatgaatgaatatgaccgaacacaaaaagaaaaaacaaatccaacgaaagactctgctatcggctaagatcattgacctatctgaatggagaaagacgctatgaaaatcacgaaatttcccattgacctctccatgctgaccgaagaagagatagaccag

SEQ ID NO: 15217 - DNA, 260 bp, Unknown; identical to SEQ ID NO: 13002
  Description of Unknown: LeftRegion for integrase B2218 sequence

SEQ ID NO: 15218 - DNA, 260 bp, Unknown
  Description of Unknown: LeftRegion for integrase B2219 sequence
aaacatacggctcccgcaacgcgcatacgatggactattctcaaggaggaggcctgtttatgtcaaccgatcagccggcgctcaccgtcacccgcaattttctcggtcagcagacagcggaagcgctggttctggagctgatccgcgcccacacacaggcggcttgacggctgcggcagtccacggaaaggagggagcgtatggagcagcgaccgctgcccaccgcgctgtactgccgcctgtcccgtgaggacggcgac

SEQ ID NO: 15219 - DNA, 260 bp, Unknown
  Description of Unknown: LeftRegion for integrase B2220 sequence
ggcgtcggaaccggtcaagacaatccgttaaagattggaggatgatatgggcaactatatgagcgcggacgaactggccggaagaaaaaacctgatcaacctgatcgccgaatccgtcgcacacgacatcgaacaagaaaaaaacaaccccgctgtatctgataacatcatcctgttagtgcccccagaaaaacgaaaaaatgaaatctaccatttacgcccgctacagcaccgacaaacagcgcgagtcatccatcgat

SEQ ID NO: 15220 - DNA, 260 bp, Unknown
  Description of Unknown: LeftRegion for integrase B2221 sequence
atggacggcggattaaagcattctttcgaggtaaaaaacaaggtaacttccataattggaaaatggactgtctatcaagcgcaaaagcgccttccgcttttagaattatgccaagacctgtccgaagaagaattagccgaagtaatcaactatatcaaatttgttcaatcgaaacgacaaggcgggaagggggaagaataatgcagcaagcattaaacgcggtcatatacgcccgctattcttcccatagccagcaggaa

SEQ ID NO: 15221 - DNA, 260 bp, Unknown
  Description of Unknown: LeftRegion for integrase B2222 sequence
aagggcaaagaggtaaaagggctgtatgaggcaaatagagggcttattcgtgtgagagcatgggtaggctcttttttattgcatgaaaataattatatagcccctgtataatttttccctaaaaaatgaggagggctgtgattatgtttattaaggctaagtagagccacaggataataagcataacaggaggtagcaggatgagtacagggacagaacttagagcggtattttacgccagagtatccacagaggaagaa

SEQ ID NO: 15222 - DNA, 260 bp, Unknown
  Description of Unknown: LeftRegion for integrase B2223 sequence
atttgacagcgcaaacgaccttgttttcaaaattgggcgttttgatgttgctgccgtcaagctccgtgggaaaaactttttcctgcaagtgcagtttgttcaaccgcgccgttatgtcatcgaaagcgttgcagacgtgagcgaccacttgcaagaggtcgctcggtgtggcaatggaattttgaagagaatgtcagtgtatgaataatttcggatatagtgcgccccgcgcattcggctactgccgcaaatccacgacc

SEQ ID NO: 15223 - DNA, 260 bp, Unknown
  Description of Unknown: LeftRegion for integrase B2224 sequence
tatttgaaaagctgggctgataaactagtatttgcaaatgccagccatatttttatggctggcatttgcttttcgcaagggaaaaaagagcttgaccgccgcacagagttttccacccggaagcaggcaggcgttgaaagaacggctgcatatggcgtaaaaagccctgccgggaaatccggcaggcagggagtaatatcatgtctgctacaattccatctcttatgcaagccccgcgggctttcggctactgccgtaaa

SEQ ID NO: 15224 - DNA, 260 bp, Unknown
  Description of Unknown: LeftRegion for integrase B2225 sequence
tgatagacgattttaataataatttttatatggtggactggccggacaaatacaaggaatcacgcgtagccgtgcagcgcgctatcacgccaaacaaagggcaatacgatactcatgtagtaactatttctgttgatataactaaaatagggacgcccgatttagttaaaatagagcgcataaaataaggggggtatcgggtggcaacaaaaaagaaaaagaccgtcccgcggcaggacggcgtatataatcgcgctgtt

SEQ ID NO: 15225 - DNA, 260 bp, Unknown
  Description of Unknown: LeftRegion for integrase B2226 sequence
gacacacctcctgaaacagatactcttatggttgtcattgttgatgacgaagaaggatttgttaagaaaatcagtattgatgaagatactgtgacccttcgctcttttaatccacactatcctccccgtgtttttggtggtgttgaaattggacgattgcgctttgtcggtagagtcatggagttaaaaaggagatttgtatgaaaaaatttccaatcgacctctcctgtctgacagaggaagaaatctctcaatttcag

SEQ ID NO: 15226 - DNA, 260 bp, Unknown
  Description of Unknown: LeftRegion for integrase B2227 sequence
gcataatgggcggcgaccgtattcaggcaaccatggtatttgaaaagctgggctgataagctagtatttgcaaatgccagccatatttttatggctggcatttgcttttcacaaggggaaagagcttgaccgccgcaaagaacggctgcatatggcgtaaaaagccctgccgggaaatccggcaggcagggagtaatatcatgtctgctacaattccatctcttatgcaagccccgcgggctttcggctactgccgtaaa

SEQ ID NO: 15227 - DNA, 260 bp, Unknown
  Description of Unknown: LeftRegion for integrase B2228 sequence
tcatgagtcccgttcgctcggtacaatctttcacccgggactgcgtcttaatttcaaatctgtacgtccgctatatagtctagcctatttctagtccgccttactatatagttttttctctcataaaaggggatgtaatttacgcgaaggaggtgatgccaacttaaccctggcagcacatcatagaaaggaagaacagaatgtataaagaatatccaaagttttacaattatgaggtaaaagagtatggaagaaagtcg

SEQ ID NO: 15228 - DNA, 260 bp, Unknown; identical to SEQ ID NO: 14965
  Description of Unknown: LeftRegion for integrase B2229 sequence

SEQ ID NO: 15229 - DNA, 260 bp, Unknown
  Description of Unknown: LeftRegion for integrase B2230 sequence
ggcgtcggaaccggccaagacaatccgttaaagattggaggatgatatgggcaactatatgagcgcgaacgaactggccggaagacagaacctgatcaacctgatcgccgaatccgtcgcacacgacatcgaacaagaaaaaaacgaacccgctgtatctgataacatcatcctgttagtgcccccacaaaaacgaaaaaatgaaatctaccatttacgcccgttacagcaccgacaaacagcgcgagtcatccatcgat

SEQ ID NO: 15230 - DNA, 260 bp, Unknown
  Description of Unknown: LeftRegion for integrase B2231 sequence
ttgatttatggatttttccatccattttttcgcagcctcagcgcacttgaattcagcagcatattctttttccaagatcgccattactttttcataatctgtcataaatgtcactcctttcataaaggaggttgttttttgcgcgaaggaggtgatgccaacttaacccctggcaccatatcatagaaaggaagaacggaatgtataaagaatacccaacattttattattatgacacacgagaatatggtcgaaagtcg

SEQ ID NO: 15231 - DNA, 260 bp, Unknown
  Description of Unknown: LeftRegion for integrase B2232 sequence
cgcctgcatactatctccaccacaagcagcggcagcaaaggcataatgggcggcgaccgtattcaggcaaccatggtatttgaaaagctgggctgataaactagtatttgcaaattccagccatatttttatggctggaatttgcttttcacaaggggaaagagccctgccgggaaatccggcaggcagggagtaatatcatgtctgctacaattccatctcttatgcaagccccgcgggctttcggctactgccgtaaa

SEQ ID NO: 15232 - DNA, 260 bp, Unknown
  Description of Unknown: LeftRegion for integrase B2233 sequence
caatcatagaatcaaccattacaggcaatacagatttttacattgttggtgatatacctttagaaaaactcgacagcaattgcttgagcagcaacggacgaaagcttgaacgcctgcttgataagggtgagtgctatgcaacggagctggatgaagataaactgttagccctgcttgcggaagaataaccgaggtatcgcatgaaattcaagtatcccgccatgggaacaacaaaaaacgcggttatctatgcccgatac

SEQ ID NO: 15233 - DNA, 260 bp, Unknown
  Description of Unknown: LeftRegion for integrase B2234 sequence
gacacacctcctgaaacagatactcttatggttgtcattgttgatgacgaagaaggatttgttaagaaaatcagtattgatgaagatactgtgacccttcgctcttttaatccatactatcctccccgtgtttttggtggtgttgaaattggacgattgcgctttgtcggtagagtcatggagttaaaaaggagatttgcatgaaaaaatttccaatcgacctctcctgtctgacagaggaagaaatctctcaatttcag

SEQ ID NO: 15234 - DNA, 260 bp, Unknown
  Description of Unknown: LeftRegion for integrase B2235 sequence
aagtgtagtcttgtacagttcatttcctgcccgagagtcgctcggtcttatttcttatgtgacagcatctcagctgctgggactctcacccaggactcacttctgctacttctttctctcataaaagagcatgtaaaattagcgaaggaggtgatgccaacttatccccctggcagtacatcatagaaaggaagaacagaatgtataaagaatgtccaaagttttacaattatgaagtaaaagagtatggaagaaagtcg

SEQ ID NO: 15235 - DNA, 260 bp, Unknown
  Description of Unknown: LeftRegion for integrase B2236 sequence
tatagctggagtatttcaagaattaagacgaactgaattaaaaatgtaaaaaagagaattatgttcctatttggcgatacgacacataattctctatatcaaagaaccttgaaagaaggtatctttatgctacatattatagcataacataaagccttttttcaagaaaattttaaaattttagaaagaaggtattttttatgaaatatgcagcttgttattgccgtgtaagcactgacgaacaggcaagatttggcttt

SEQ ID NO: 15236 - DNA, 260 bp, Unknown
  Description of Unknown: LeftRegion for integrase B2237 sequence
aagggtaaagaggtaaaagggctgtaagaggcaaatagagggcttattcatgtgagagcatgggtaggctcttttttagtgcgtaaaaataattatacagcccctgtataattttcccctaaaaaatgaggagggctgtgattatgtttattaaggctaagtagagccacaggataataagcataacaggaggtagcaggatgagtataggaacagaacttagagcggtattttacgccagagtatccacagaggaagaa

SEQ ID NO: 15237 - DNA, 260 bp, Unknown
  Description of Unknown: LeftRegion for integrase B2238 sequence
agcaaataagacaatttattatagaattattagatgacataattctataaagtaaattgcccattgttatagagttcttttactcggcccttcctacatattttaaagttatttcggcccccttatatatctctagtaatattctatactagggatattattttatctttatttatatactaattgtggaggtgaaccatatgaaggttgctatatatagtagaaaatccgtattcactggtaaaggtgaaagtatagaa

SEQ ID NO: 15238 - DNA, 260 bp, Unknown
  Description of Unknown: LeftRegion for integrase B2239 sequence
cgcctgcatactatctccaccacaagcagcggcagcaaaggcataatgggcggcgaccgtattcaggcaaccatggtatttgaaaagctgggctgataaactagtatttgcaaatgccagccatatttttatggctggcatttgcttttcacaaggggaaagagccctgccgggaaatccggcaggcagggagtaatatcatgtctgctacaattccatctcttatgcaagccccgcgggcttttggctattgccgtaaa

SEQ ID NO: 15239 - DNA, 260 bp, Unknown
  Description of Unknown: LeftRegion for integrase B2240 sequence
cgcctgcatactatctccaccacaagcagcggcagcaaaggcataatgggcggcgaccgtattcaggcaaccatggtatttgaaaagctgggctgataaactagtatttgcaaatgccagccatatttttatggctggcatttgcttttcgcaaggggaaagagccctgccgggaaatccggcaggcagggagtaatatcatgtctgctacaattccatctcttatgcaagccccgcgggctttcggctactgccgcaag

SEQ ID NO: 15240 - DNA, 260 bp, Unknown
  Description of Unknown: LeftRegion for integrase B2241 sequence
ccttgcggtctgcgtcgtgtcgttcccggtcggcttgatcattgcgtccgttggagtgtaccgggcggtaaaggccggggatatttatgacgctgcggttgctcggtacgagcagcaaatctcggactatgttgactggctggatgaagtcaacgcaaaataaaaagccgccctcggtgggcggcgggaggttgctctgaatgtgcgcaaaaaagaaaccggccatgcttgagccggatatgcaggatgccgtgatctac

SEQ ID NO: 15241 - DNA, 260 bp, Unknown; identical to SEQ ID NO: 14558
  Description of Unknown: LeftRegion for integrase B2242 sequence

SEQ ID NO: 15242 - DNA, 260 bp, Unknown; identical to SEQ ID NO: 14519
  Description of Unknown: LeftRegion for integrase B2243 sequence

SEQ ID NO: 15243 - DNA, 260 bp, Unknown
  Description of Unknown: LeftRegion for integrase B2244 sequence
gcataatgagcggcgaccgtattcaggcaaccatggtatttgaaaagctgggctgataagctagtatttgcaaatgccagccatatttttatggctggcatttgctttttacaagggaaaagagcttgaccgccgcaaagaacggctgcatatggcgtaaaaagccctgccgggaaatccggcaggcagggagtaatatcatgtctgctacaattccatctcttatgcaagccccgcgggctttcggctactgccgcaag

SEQ ID NO: 15244 - DNA, 260 bp, Unknown
  Description of Unknown: LeftRegion for integrase B2245 sequence
aatatgtattcacagacgaagaacataacaaacttgtagaatatgccgagttcttaatccatcaaagagaaaaataaaagaaatagtttttgctcttggagcagagccgtatcagcatacgggagactgtttttatgtgaaggaggtgatgccaacttattccccccccctggcaccatatcatagaaaggaagagcaaaatgtataaagaatatccaacgttttattattacgacacaagagaatatggtcgaaagtcg

SEQ ID NO: 15245 - DNA, 260 bp, Unknown
  Description of Unknown: LeftRegion for integrase B2246 sequence
tcaatgaatgaagaatatgtgaggcatgtggaaatgtggcataaagtattcggtatggacccgttcacagatgaagaacatgagaagctgatcgaatatggaaagttcttaatttctatgcgtaaaggaggtgatgtctaaagttattcgggcagtacacatcttttataaaacacacatcatagaaaggaagaacaccaatgtacaaagaatatccgaagttttattattacgaatcgttagaatatggaagaaagtca

SEQ ID NO: 15246 - DNA, 260 bp, Unknown
  Description of Unknown: LeftRegion for integrase B2247 sequence
tctatgaatgaacaatatgtgaagcatgtggaagcatggcataaggtattcggtatggacccgttcacagatgaagaacatgagaagttaatggagtatggaaagttcttaatttctatgcgtaaaggaggtgatgtctaaagttattcgggcagtacacatcttttataaaacacacatcatagaaaggaagaacaccaatgtacaaagaatatccgaagttttattattacgaatcgttagaatatggaagaaagtca

SEQ ID NO: 15247 - DNA, 260 bp, Unknown
  Description of Unknown: LeftRegion for integrase B2248 sequence
atgcaccccgacgtcgggatcatggggtaaataaaaaagaccgtcccggcggtgggcgccgaaacggtctatacagtgcgatgtcggggagacattcagatgatatttcattctctggaggagccagccgaaatatcatccgcgaactgtaagtatattttaacgtggctcctccagaatgtcaagtatagaggtgtaaaatgatacatggagcgtttattctcgcacgctactccaccgagaaccagtccgaggccagt

SEQ ID NO: 15248 - DNA, 260 bp, Unknown
  Description of Unknown: LeftRegion for integrase B2249 sequence
gctactggctgtaaaatgctggtagccctcattttttagttgtatctagtatataaggggtgtataatagatagaaactgaaaaacagcctcataaagccctctattttatcgaggataaagaagtctacacctaatatataaaagtggctgtatgaggcacacaggagctcacaggactattacaggagggtaaacaggatggcatacaggaagataacggatataagagatactattggtatgagagcggtattttat

SEQ ID NO: 15249 - DNA, 260 bp, Unknown
  Description of Unknown: LeftRegion for integrase B2250 sequence
aaagctcttaacagacataaagttatatgttaagcagaaatatacatttaaaaaatattctaatccaattgatgaagaacttgagaattatagacgagaacttgaagctgaacaaaaggaacaaatattatcagtttcagaagagcaaagcgaaaaaaagaaaaacgcttaaaataaacacatatatagaggtgataagtatgatagctgctatttatagtagaaaatctaaatttacgggcattggagaatctatcgat

SEQ ID NO: 15250 - DNA, 260 bp, Unknown; identical to SEQ ID NO: 15232
  Description of Unknown: LeftRegion for integrase B2251 sequence

SEQ ID NO: 15251 - DNA, 260 bp, Unknown; identical to SEQ ID NO: 14519
  Description of Unknown: LeftRegion for integrase B2252 sequence

SEQ ID NO: 15252 - DNA, 260 bp, Unknown
  Description of Unknown: LeftRegion for integrase B2253 sequence
agatgattgttcggcttttagtttaccggatctaatccatcgtctaactgtttcctcgttaacatctaataactcagaaagttctttagtgttatacatgctcatacaatcactcctttcattaaaggatatgtaaaatcagcgaaggaggtgatgccaacttatccccctggcagcacatcatagaaaggaagaacagaatgtataaagaatatccaaagttttacaattatgaagtaaaagagtatggaagaaagtcg

SEQ ID NO: 15253 - DNA, 260 bp, Unknown
  Description of Unknown: LeftRegion for integrase B2254 sequence
aagggtaaagaggtaaaagggctgtatgaggcaaatagagggcttattcgtgtgagagcatgggtaggcttttttttagtgcatgaaaataattatatagcccctgtataatttttccctaaaaaatgaggagggctgtgattatgtttattaaggctaagtagagccacaggataataagcataacaggaggtagcaggatgagtacaggaacagaacttagagcggtattttacgccagagtatccacagaggaagaa

SEQ ID NO: 15254 - DNA, 260 bp, Unknown
  Description of Unknown: LeftRegion for integrase B2255 sequence
ggacaataaaccaatctcagcgatggatacaatcactgactactatcgactgtccattggccgtgaggataatatacgagttaaacgatttgatacttgggccaaaaaatttaacaaatacgtatttacagacgaggagcacaataaactcgtggaatatgcagaatttttgattcatcaacgagagaggaagaacgacaatgtataaagaatacccacatttttattactatgacacgcgagaatatggtagaaagtcg

SEQ ID NO: 15255 - DNA, 260 bp, Unknown
  Description of Unknown: LeftRegion for integrase B2256 sequence
ccttgcggtctgcatcgtgtcgctcccggtcggcttgatcattgtagccgtaggagcgtaccgggcggtaaaagccggggatatttatgatgctgcagttgctcggtacgagcagcaaatctcggactatgttgactggctggatgaagtcaacgcaaaataaaaagccgccctctgtgggcggcgggaggttgctctgaatgcgcgcaaaaaagaaaccggccatgcttgagccggatatgcaggatgccgtgatctac

SEQ ID NO: 15256 - DNA, 260 bp, Unknown
  Description of Unknown: LeftRegion for integrase B2257 sequence
caatcatagaatcaaccattacaggcaatacagatttttacattgttggtgatatacctttagaaaaactcgacagcaattgcttgagcagcaacggacgaaagcttgaacgcctgcttgataagggtgagtgctatgcaacggagctggatgaagataaactgttagccctgctcgcggaagaataaccgaggtatcgcatgaaatttaagtatcccgccatgggaacaacaaaaaacgcggttatctatgcccgatac

SEQ ID NO: 15257 - DNA, 260 bp, Unknown
  Description of Unknown: LeftRegion for integrase B2258 sequence
ggctactggctgtaaaatgctggtagccctcattttttagttgtatctagtatataaggggtgtataataaatagaaactgaaaacagcctcataaagccctctattttatcgagggtaaagatgtctacacctaatatataaaagtggctgtatgaggcacacaggagctcacaggactattacaggagggtaaacaggatggcatacaggaaaataacggatataagagatactattggtatgagagcggtattttat

SEQ ID NO: 15258 - DNA, 260 bp, Unknown
  Description of Unknown: LeftRegion for integrase B2259 sequence
ctggatcattgacatggttatgatctgttgtaacaaattcaccgacagcaccggcgcggtggttggtctgaaggttgccgagtataccagacagccggatcctgatcttgcagaggcttctctggaggagcagcgggaggcagcggccgagactgccagagcttacggctataccgtaatagagtcaggcgctcaggataatgccgacaagtaaaaacacggctcgaaaatatgccgcaggaggtagctcggataattcc

SEQ ID NO: 15259 - DNA, 260 bp, Unknown
  Description of Unknown: LeftRegion for integrase B2260 sequence
cgcctgcatactatctccaccacaagcagcggcagcaaaggcataatgggcggcgaccgtatttaggcaaccatggtatttgaaaagctgggctgataaactagtatttgcaaatgccagccatatttttatggctggcatttgcttttcacaaggggaaagagccctgccgggaaatccggcaggcagggagtaatatcatgtctgctacaattccatctcttatgcaagccccgcgggctttcggctactgccgtaaa

SEQ ID NO: 15260 - DNA, 260 bp, Unknown
  Description of Unknown: LeftRegion for integrase B2261 sequence
aagggtaaagaggtaaaagggctgtatgaggcaaatagagggcttattcgtgtgagagcatgggtaggctcttttttagtgcatgaaaataattatatagcccctgtataatttttccctaaaaaatgaggagggctgtgattatgtttattaaggctaagtagagccacaggataataagcataacaggaggtagcaggatgagtacaggaacagaacttagagcggtattttacgccagagtatccacagaggaagaa

SEQ ID NO: 15261 - DNA, 260 bp, Unknown
  Description of Unknown: LeftRegion for integrase B2262 sequence
ggaaatacaaagccagccttattatgcagagcagatggcagaaatcctgtgcagaggtggaaaacaggaacaatttaatgaaggatgttttcaaaagacggtggagaaaatcatggtttttaagaatggaaccatggatgtacatatgagaaacggagtcataatccagattaaagagaatggagaggagggaagcagcgatgcaggcaagtgtaaaaaagaacatatctgtcataccggcaaagccagcttatgaccgg

SEQ ID NO: 15262 - DNA, 260 bp, Unknown
  Description of Unknown: LeftRegion for integrase B2263 sequence
ttgggaaagtaagccggtctcagtgcttgatacaattacagactattatcggctgtcggttggtaatgaagacaatgtacgaatcgagcgctttaaagtgtgggctaagaaattcgataaatatgtattcacagatgaggagcacaataaacttgtagaatacgctgagtttttaatttatcaaagaaagggagaacaaaatgtataaagaatacccaacgttttactattacgacacgcgagaatacggtagaaagtca

SEQ ID NO: 15263 - DNA, 260 bp, Unknown
  Description of Unknown: LeftRegion for integrase B2264 sequence
gttaggcatgtgcaaacctggcatagaatgtttggtatggacccatttactgacgaggagcatgagaagttgatcgagtatggcaagtttctaatctctttgaggaaaaaataaaagaaaatgttttataaaggaggtgatgctgacctaaatgccggcagtaccaaaaaatataaacaacctagagaggaagaacaccaatgtataaagaatatccgaagttttattattatcaaacgaaagaatatggtcgaaagtct

SEQ ID NO: 15264 - DNA, 260 bp, Unknown
  Description of Unknown: LeftRegion for integrase B2265 sequence
tcaatgaatgaagaatatgtgaggcatgttgaaacttggcataaagtattcggcatggatccatttaccgatgaagaacacgaaaaattgatagagtatggaaagttcttaatttctatgcgtaaaggaggtgatgtctaaagttattcgggcagtacacatcttttataaaacacacatcatagaaaggaagaacaccaatgtacaaagaatatccgaagttttattattacgaatcgttagaatatggaagaaagtca

SEQ ID NO: 15265 - DNA, 260 bp, Unknown
  Description of Unknown: LeftRegion for integrase B2266 sequence
tgcatcccgatgttgggatcatggggtaaataaaaaagaccgtcccggcggtgggcgccgaaacggtctatacagtgcgatgtcggggagacattcagatgatatttcattctctggaggaaccagccggaatatccatctgcgaactgtaggtatattttaacgtggttcctccagaatgtcaagtatagaggtgtaaaatgatacatggagcttttattctcgcccgctattccactgaaaaccagtctgaggccagt

SEQ ID NO: 15266 - DNA, 260 bp, Unknown; identical to SEQ ID NO: 13335
  Description of Unknown: LeftRegion for integrase B2267 sequence

SEQ ID NO: 15267 - DNA, 260 bp, Unknown; identical to SEQ ID NO: 13516
  Description of Unknown: LeftRegion for integrase B2268 sequence

SEQ ID NO: 15268 - DNA, 260 bp, Unknown
  Description of Unknown: LeftRegion for integrase B2269 sequence
aagggtaaagaggtaaaagggctgtatgaggcaaatagagggcttattcgtgtgagagcatgggtaggctcttttttagtgcatgaaaataattatatagcccctgtataatttttccctaaaaaatgaggagggctgtgattatgtttattaaggctaagtagagccacaggataataagcataacaggaggtagcaggatgagtacaggaacagaacttagagcggtattttatgccagagtttccacagaggaagaa

SEQ ID NO: 15269 - DNA, 260 bp, Unknown
  Description of Unknown: LeftRegion for integrase B2270 sequence
aaagccttcgaccgaggccttataactatcactccttccatgaaaatctatgtttctccaataattttggatagccctcaggacgcttttacagcccgctggctggcttctcttgacggaatggttttaccccccccccgatttccgccgcgtagagagcttctggagtaccataacgacgaaatttttaggagggtcacatgaatacagtaatctatgctcggtattctgccggcccgagacagaccgaccagagtatc

SEQ ID NO: 15270 - DNA, 260 bp, Unknown
  Description of Unknown: LeftRegion for integrase B2271 sequence
caatcatagaatcaaccattacaggcaatacagatttttacattgttggtgatatacctttagaaaaactcgacagcaattgcttgagcagtaacggacgaaagcttgaacgcctgcttgataagggtgagtgctatgcaacggagctggatgaagataaactgttagccctgcttgcggaagaataaccgaggtatcgcatgaaattcaagtatcccgccatgggaacaacaaaaaacgcggttatctatgcccgatac

SEQ ID NO: 15271 - DNA, 260 bp, Unknown
  Description of Unknown: LeftRegion for integrase B2272 sequence
cgcctgcatactatctccaccacaagcagcggcagcaaaggcataatgggcggcgaccgtattcaggcaaccatggtatttgaaaagctgggctgataaactagtatttgcaaatgccagccatatttttatggctggcatttgcttttcacaaggggaaagagccctgccgggaaatccggcaggcagggagtaatatcatgtctgctacaattccatctcttatgcaagccccgcgggctttcggctactgccgtaaa

SEQ ID NO: 15272 - DNA, 260 bp, Unknown
  Description of Unknown: LeftRegion for integrase B2273 sequence
tcgatgaatgagcaatatgtaaggcatgttgaaatgtggcataaagtatttggtatggatccattcactgatgaagagcacgaaaaattgatagagtatggaaagttcttaatttctatgcgtaaaggaggtgatacctaaatttattcgggcagtacacatcttttataaaatacacatcttagagaggaaaaacgccaatgtacaaagaatatccgaagttttattattacgaatcgttagaatatggaagaaaatca

SEQ ID NO: 15273 - DNA, 260 bp, Unknown
  Description of Unknown: LeftRegion for integrase B2274 sequence
aaaggcacttacgcaagttattgcgtgggtgtcttttactttatactgaatttataaaaacaaaagccccaccgaagtgaggctaatgctatcaggttgcaatgatacaacccgaaactcgcaatttcattgtatcatcgtcaccctgaaaaatcaatattcagggtatttttatacccatttttaaggagatgatacatatgactatcgcatgggcatactgccgcttcagcagcgatcaccagagagaagaatccatt

SEQ ID NO: 15274 - DNA, 260 bp, Unknown
  Description of Unknown: LeftRegion for integrase B2275 sequence
ccttgttaggactcaatcttcttgtttttattaatcgtgtaagtaaccgatcttgtacaaaaattttccgactaatgtccagaacttttgttcgatagtcatataaatcactcctttcttcataataggagttgtaaatttagcgaaggaggtgatgtcaacttaacccctagcagtacatcatagaaaggaagaacagaatgtataaggaatatccaaagttctacaattacgaaacaaaagagtacggaaggaagtct

SEQ ID NO: 15275 - DNA, 260 bp, Unknown
  Description of Unknown: LeftRegion for integrase B2276 sequence
gatacacctcccgaaacagatactcttatggttgtcattgttgatgacgaagaaggatttgttaagaaaatcagtattgatgaagatactgtgacccttcgttcttttaacccacactatcctccccgtgtttttggcggtgttgaaattggacgattgcgctttgtcggtagagtcatggagctaaaaaggagatttgcatgaaaaaatttccaatcgacctctcctgtctaacagaggaagaaatctctcaatttcag

SEQ ID NO: 15276 - DNA, 260 bp, Unknown
  Description of Unknown: LeftRegion for integrase B2277 sequence
aagggtaaagcggtaaaagggttgtatgaggcaaatagagggcttattcatgtgagagcatgggtaggctcttttttagtgcatgaaaataattatatagcccctgtataattttcccctaaaaaatgaggagggctgtgattatgtttattaaggctaagtagagccacaggataataagcataacaggaggtagcaggatgagtacaggaacagaacttagagcggtattttacgccagagtatccacagaggaagaa

SEQ ID NO: 15277 - DNA, 260 bp, Unknown
  Description of Unknown: LeftRegion for integrase B2278 sequence
atgcaccccggtattgggatcatgcagtaaataaaaaaagaccgtcccggcggtgggcgccgaaacggtctatacagtacgatgtcggggagacattcagatgatatttcatcctctggaggagccagcggaatatcatctgcgaactgtaagtatattttaacgtggctcctccagaatgtcaagtatagaggtgtaaaatgatacatggagcgtttattcttgcacgctactccacagagaaccagtccgaggccagt

SEQ ID NO: 15278 - DNA, 260 bp, Unknown; identical to SEQ ID NO: 14983
  Description of Unknown: LeftRegion for integrase B2279 sequence

SEQ ID NO: 15279 - DNA, 260 bp, Unknown
  Description of Unknown: LeftRegion for integrase B2280 sequence
tatttgaaaagctgggctgataaactagtatttgcaaatgccagccatatttttatggctggcatttgcttttcacaaggggaaaaagagcttgaccgccgcacagagttttccacccggaagcaggcaggcgttgaaagaacggctgcatatggcgtaaaaagccctgccgggaaatccggcaggcagggagtaatatcatgtctgctacaattccatctcttatgcaagccccgcgggctttcggctactgccgtaaa

SEQ ID NO: 15280 - DNA, 260 bp, Unknown
  Description of Unknown: LeftRegion for integrase B2281 sequence
tgcaccctgacgtcgggatcatggggtaaataaaaaaagaccgtcccggcggtgggcgccgaaacggtctatacagtacgatgtcggggagacattcagatgatatttcattctctggaggagccagccggaatatcatctgcgaactgtaagtatattttaacgtggctcctccagaatgtcaagtatagaggtgtaaaatgatacatggagcttttattctcgcccggtattccaccgaaaaccagtctgaggccagt

SEQ ID NO: 15281 - DNA, 260 bp, Unknown
  Description of Unknown: LeftRegion for integrase B2282 sequence
aagggtaaagcggtaaaaggtttgtatgaggcaaatagagggcttattcatgtgagagcatgggtaggctcttttttagtgcatgaaaataattatatagcccctgtataattttcccctaaaaaatgaggagggctgtgattatgtttattaaggctaagtagagccacaggataataagcataacaggaggtagcaggatgagtacaggaacagaacttagagcggtattttacgccagagtatccacagaggaagaa

SEQ ID NO: 15282 - DNA, 260 bp, Unknown
  Description of Unknown: LeftRegion for integrase B2283 sequence
gggcgccgaaacggtcttgctttccagtcgtcggggaggacggcccaaaacacagcctgttgaaaaccatgtcttggaggaatcagcatctttattgtatacaatgtcctccggtttgtcaatgaaaaaaagtagaatctggatacatcatccaaaatgatgtacatgatcgcgtgataattttaggaggcttgtatgctatgacgcatggcgcttatattttagcccggtactccaccgagaaccagtccgaggccagt

SEQ ID NO: 15283 - DNA, 260 bp, Unknown; identical to SEQ ID NO: 13476
  Description of Unknown: LeftRegion for integrase B2284 sequence

SEQ ID NO: 15284 - DNA, 260 bp, Unknown
  Description of Unknown: LeftRegion for integrase B2285 sequence
tcaatgaatgaagaatatgtgaggcatgttgaaacttggcataaagtattcggcatggatccatttaccgatgaagaacacgaaaaattgatagagtatggaaagttcttaatttctatgcgtaaaggaggtgatgtctaaagttattcgggcagtacacatcttttataaaacacacatcatagaaaggaagaacaccaatgtacaaagaatatccgaagttttattattacgaatcgttagaatatggaagaaagtcg

SEQ ID NO: 15285 - DNA, 260 bp, Unknown
  Description of Unknown: LeftRegion for integrase B2286 sequence
cgtcttctccgcagaaaagacagggcgttttggaacgagttgaacccaaacgtgcaactctacttatataaatggctcccagatatgatatttcggaaatgaatttaactttttgactgttgaaagtgtggaaagatttattttccccagaacttgcaacggcttgcaacaaacttaaaactacttgaaaggtggtatttatgcctcgcaaaaagaaactgcaagaggtgggcggactgcggctggtggcgtactatcgc

SEQ ID NO: 15286 - DNA, 260 bp, Unknown
  Description of Unknown: LeftRegion for integrase B2287 sequence
agcaaataagacaatttattatagaattattagatgacataattctataaagtaaattgcccattgttatagagttcttttactcggcccttcttacatattttaaagttatttcggcccccctatatatctctagtaatcttatatactagggatattattttatctttatttatatactaattgtggaggtgaaccatatgaaggttgctatttatagcagaaaatctgtattcactggtaaaggtgaaagtatagaa

SEQ ID NO: 15287 - DNA, 260 bp, Unknown; identical to SEQ ID NO: 15249
  Description of Unknown: LeftRegion for integrase B2288 sequence

SEQ ID NO: 15288 - DNA, 260 bp, Unknown
  Description of Unknown: LeftRegion for integrase B2289 sequence
tctatgaatccgtcgtatgtaaagcacgttgaaatgtggaataagacgttcggaatggacccgtttacggacgaagaacatgaaaaactaatggagtatggtaagttcttaatttctatgaggggtaagtaataatatctcttgaaaggaggtgatgccaaagatacccctggcaccacagcatagaaaggaagaacaaaatgtataaagaatacccaacgttttactattacgacacacgagaatatggtcgaaagtca

SEQ ID NO: 15289 - DNA, 260 bp, Unknown; identical to SEQ ID NO: 14596
  Description of Unknown: LeftRegion for integrase B2290 sequence

SEQ ID NO: 15290 - DNA, 260 bp, Unknown
  Description of Unknown: LeftRegion for integrase B2291 sequence
gacacacctcctgaaacagatactcttatggttgtcattgttgatgacgaagaaggatttgttaagaaaatcagcattgatgaagatactgtaacccttcgctcttttaatccacactatcctccccgtgtttttggcggtgttgaaattggacgattgcgctttgtcggtagagtcatggagttaaaaaggagatttgcatgaaaaaatttccaatcgacctttcctgtctgacagaggaagaaatctctcaatttcaa

SEQ ID NO: 15291 - DNA, 260 bp, Unknown
  Description of Unknown: LeftRegion for integrase B2292 sequence
gctactggctgtaaaatgctggtagccctcattttttagttgtatctagtatataaggggtgtataatagataggaattaaaaaacagcctcataaagccctttgttttatcgagggtaaagaagtctacacctaatacataaaagtggctgtatgaggcacacaggagctcacaggactattacaggagaataaacaggatggtaaaaaagaaattgagagcggtattttatgccagagtatccacagaggaagaaaaa

SEQ ID NO: 15292 - DNA, 260 bp, Unknown
  Description of Unknown: LeftRegion for integrase B2293 sequence
ggagaaggaaccgtcgttccatactgaagaaggaggaacaggctatggccgcttctgaaaacatgatagcgctggagataaatggactccatgtgcatctcactttcgcgccttttcctgctgatgatactgtggccaccgtccgagcgattctgaaaaacagctacgttcggacgctccaggcgtgagggggcgtgactttgggcaaaagagtttgctgcctgtaccgtgtttccacactgaagcaggtcgaaaaagac

SEQ ID NO: 15293 - DNA, 260 bp, Unknown
  Description of Unknown: LeftRegion for integrase B2294 sequence
ctcgaagtggatgaattctgcgcttgaaaagcagatggcagaggcaaatgagcagcttaatgaaaaagcggcggcgattggcgcggacgctatcgttggcttgcgccattctggaattggcgcaaatcatgtgtttattggtacggcagtaaggtttaagtaagctgtttccttgagaagcacttgaaatggagggtatgatggctcgatcaaagcgaaatgaatactcatctgctgaacagatcggcgtgatctatgcc

SEQ ID NO: 15294 - DNA, 260 bp, Unknown
  Description of Unknown: LeftRegion for integrase B2295 sequence
gatggatattcagaaggaagccatgtaccaggtgacgatgggcattgtaaagaagatgtttcatgcaaatctgatttcggaggatgaatatcgtcagattgatacaatgttcagggagaaatacgagccgaaaatcggcacattattcgttgacttagagcctgaacagcggtaatatgtgtagtgaaaggagagctgttatgcgtaaaatcatcaaaatagaacctacggagcccgtattgccaaggcgaaagcgagtg

SEQ ID NO: 15295 - DNA, 260 bp, Unknown
  Description of Unknown: LeftRegion for integrase B2296 sequence
atggctctcattttacagggggcagccgcacgatatgactgctgcccccagcctatttctgaatatgaaccctcagaccgcccagtggacgtggattggcaccgctttcgccgggtggtctcttatatcaccgtcgcgtcggacgctacggtgagtctcacatttacggataataacttcactggaaaggacaaataaccatggaagcagcaacaaccactttagaacggcgtgtgcgggagatcccaccgaccaggaag

SEQ ID NO: 15296 - DNA, 260 bp, Unknown
  Description of Unknown: LeftRegion for integrase B2297 sequence
gactactttgacgtgtcgctggactacattttcggcaggacggacgacccacacggcatgatctataacaactgtgtgaagctcggcctgaacaatcccgaaatggcgcggttcgtggaaatgtgcttcgaccccggctcggctatgaacgaaagactgaaggcaacgcttgtgcagatgctctcggaggtggatacgaaatgaaagccgtgatttacgcccgctattcctcggacagccagcgagaagaaagtattgaa

SEQ ID NO: 15297 - DNA, 260 bp, Unknown
  Description of Unknown: LeftRegion for integrase B2298 sequence
gacccgtgcggaaaaacgtaactattccatactggttaaatgaaacggccaaacagaaaaatataaacttttctaaagtattgcaaaacgccttacttgcagagctgaacttgaaaaataagtaaggaaatgaaacagttacaaattgtaaccgtttgaactatttgcctatgacgaaaatgtataaaggggtctttattatggcgaaaaagaaagcgacagccaatacctcatacagcgcaggaactcgtgccgttatc

SEQ ID NO: 15298 - DNA, 260 bp, Unknown
  Description of Unknown: LeftRegion for integrase B2299 sequence
ccctcatgcatacgcgtacttggaagacgcgcacaggattaaggagtacgtggcgaaccacgcaaagcacagcaatacactgtctcctatctctgtggctgacgagatcaagaagtacaaggaactcttagattgcggagcaataactgaagatgagtataccaaggccaaaaacaagcttttgaagtaggggtttcacgatgcgagattctatgcgcggtcgaattaaatattgtgatgcatcagatggggactcgact

SEQ ID NO: 15299 - DNA, 260 bp, Unknown; identical to SEQ ID NO: 13421
  Description of Unknown: LeftRegion for integrase B2300 sequence

SEQ ID NO: 15300 - DNA, 260 bp, Unknown; identical to SEQ ID NO: 13476
  Description of Unknown: LeftRegion for integrase B2301 sequence

SEQ ID NO: 15301 - DNA, 260 bp, Unknown
  Description of Unknown: LeftRegion for integrase B2302 sequence
gttattttttaatgaaataacttttcaggtaacgataaatctggcaaggaaaatgttgaatgataaacttattactaagaaggagtaccagtccttcaagaaggaaatgattcataaatatcaagcgtttttcggggatttatacacttgataattctactggttagagtgatatatatagttggaaggagggttcaactatggaaaagaaaatgtggaaaatagaacagaaggttaccgaaatttccaaacggaggcgg

SEQ ID NO: 15302 - DNA, 260 bp, Unknown; identical to SEQ ID NO: 13018
  Description of Unknown: LeftRegion for integrase B2303 sequence

SEQ ID NO: 15303 - DNA, 142 bp, Unknown
  Description of Unknown: LeftRegion for integrase B2304 sequence
aaagcactagtattcttgccttaacactcatatcattgttctcctgttcaatgaaccacttagataagcatagtccgaagatatgaagctgctagtgacatacatcaggtggagtactaaagagcaagactcaggagactcc

SEQ ID NO: 15304 - DNA, 260 bp, Unknown
  Description of Unknown: LeftRegion for integrase B2305 sequence
tttccccagtgaattggatactgaagagggaggaggaacaggctatggccgcttctaaaaacatgatagcgctggagataaatggactccatgtgcatctcacctttacaccatttcctgcggatgataccgtggccgccgtccgagcaattttgaagaatagctacgttcggacgctccagacgtaaggaggcgtgaccttgggtaaaagagtttgctgcctgtatcgcgtttccacgctgaagcaggtcgaaaaggat

SEQ ID NO: 15305 - DNA, 260 bp, Unknown; identical to SEQ ID NO: 14676
  Description of Unknown: LeftRegion for integrase B2306 sequence

SEQ ID NO: 15306 - DNA, 260 bp, Unknown
  Description of Unknown: LeftRegion for integrase B2307 sequence
aattcattttatgaattattttgagaaaggctaccagagtaaaggctggtagccttatttttttttgtctaaatttgaggagtatctgaggttaatacttacataaaaaataatgggtttacatagtatcaaaaaggtgtataataagagtgagatattgtgataaacctgtacaatttctattaacaggaggaaacaggatggtacaggaaaaattaagagcggtattctatgcaagagtatcaacagaggaggagaaa

SEQ ID NO: 15307 - DNA, 260 bp, Unknown; identical to SEQ ID NO: 13516
  Description of Unknown: LeftRegion for integrase B2308 sequence

SEQ ID NO: 15308 - DNA, 260 bp, Unknown; identical to SEQ ID NO: 13018
  Description of Unknown: LeftRegion for integrase B2309 sequence

SEQ ID NO: 15309 - DNA, 260 bp, Unknown
  Description of Unknown: LeftRegion for integrase B2310 sequence
accccgctattcacacaaatgatggtggtcttactaagcaattacttcaatggtttaatctctgtgacatggagggtaaactaacgattatacaatgtgcttctcaagagtttaagagaactcaaaaagaaaaaaatgaaaatgcggaacaggttgctgtcagctaaagtcattgacctcgaaaagtggaggaaaacattatgaaatcccctatcgacctctcctgtctgacagaagaagaaatctctcaatttcaagaa

SEQ ID NO: 15310 - DNA, 260 bp, Unknown
  Description of Unknown: LeftRegion for integrase B2311 sequence
atggctctcattttacagggggcagccgcacgatatgactgctgcccccagcctatttctgaatgtgaaccctcagactgcccagtggaagtggattggctccgctttcgccgggtggtctcttatatcaccgtcgcgtctgacgctacggtgagcctcacatttacggatgataacttcactggaaaggacaaataaccatggaagcagcaacaaccactttagaacggcgtgtgcgggagatcccaccgaccaggaag

SEQ ID NO: 15311 - DNA, 232 bp, Unknown
  Description of Unknown: LeftRegion for integrase B2312 sequence
gcttaacgacaacttctgcgccatccactttgcttgcaccctcagcaactgcgcgtgccatcgtttcaatatgtccgtacatggaataataaagcactagtattcttgccttaacactcatatcattgttctcctgttcaatgaaccacttagataagcatagtccgaagatatgaagctgctagtgacatacatcaggtggagtactaaagagcaagactcaggagactcc

SEQ ID NO: 15312 - DNA, 260 bp, Unknown
  Description of Unknown: LeftRegion for integrase B2313 sequence
tgaggggcttgtacctctttttttgtttttctgttgcaatctttatataggtagtatataatagatacagactgaaaaatatagccgttttaagggcttgtttggtttgggggtatagagatataccctaacaggattaaagccgctcagaggggctctgggttgctcagcgaggcattataaaataaggagtgtgcaggatggcatttagaagtattttagattacagaaatgttttagctacagagggattaagggct

SEQ ID NO: 15313 - DNA, 260 bp, Unknown
  Description of Unknown: LeftRegion for integrase B2314 sequence
ggctactggctgtaaaatgctggtagccctcattttttagttgtatctagtatataaggggtgtataatagataggaactgaaaacagcctcataaagccctctattttatcgaggataaagaagtctacacctaatatataaaagtggctgtatgaggcacacaggatctcacaggactattacaggagggtaaacaggatggcatacaggaaaataacggatataagagatactattggtatgagagcggtattttat

SEQ ID NO: 15314 - DNA, 141 bp, Unknown
  Description of Unknown: LeftRegion for integrase B2315 sequence
aagcactagtattcttgccttaacactcatatcattgttctcctgttcaatgaaccacttagataagcatagtccgaagatatgaagctgctagtgacatacatcaggtggagtactaaagagcaagactcaggagactcc

SEQ ID NO: 15315 - DNA, 260 bp, Unknown
  Description of Unknown: LeftRegion for integrase B2316 sequence
gataaagctgaacatacagacaaccgcatttcttcggatttctataatgtaataatagatgtcctcatcgaaatgcttaatatagattaaaatataaactttgaaaatcatctgtgcagttgcttttcagtgactgcactttattaaattataaatacatattattaaaatgaagaattattcttataggagtggtatatatggaagaaacaataaaagcagtcggatatgcacgattttcttcttcaatgcaacgagaa

SEQ ID NO: 15316 - DNA, 260 bp, Unknown; identical to SEQ ID NO: 15315
  Description of Unknown: LeftRegion for integrase B2317 sequence

SEQ ID NO: 15317 - DNA, 260 bp, Unknown
  Description of Unknown: LeftRegion for integrase B2318 sequence
tataatccaaaagggttattttgagagggctatcagtgtaagggctgatagccctatttttttttgtctaaatttcaggagatttctggttattactcaaataataagtaatgggtttacatagtatcaaaaagatgtataataagtatgagatattatgacaaacctgtacaaattctaatcaacaggaggaaaacaggatggtacaggagaaattaagagcggtattttatgcaagggtatctacagaggaagagaga

SEQ ID NO: 15318 - DNA, 260 bp, Unknown
  Description of Unknown: LeftRegion for integrase B2319 sequence
taatcttaatagattattgaataataatttaatatcgaataatgaatacataaaggcttgtgcaatattagatgcacaatttaaaaaatcacacacataaataactaattgggtgcatatttattgcacccttttggcatttatgatataatcaaaagtaatagcaaagaatattacagaaagcgaggaatcgaggaattatgaatgaaatagtaacgggtttagacacaaataaaatatataaagttgtgttttatgct

SEQ ID NO: 15319 - DNA, 260 bp, Unknown
  Description of Unknown: LeftRegion for integrase B2320 sequence
actaaggtcgaaagaaaaaaggagctattttttatattcgatacgttaaaaacaactggaaaaataacagaagaagactatgaaagttgtattgaagcaattcgcctgaaatataaataaacagatacaaacccacttaatggtatcatttcctgcaaagatatgttataattaagtgggatttttgtgaatggaggagtatgtatagtagcaagcgagcagttatttactgccgagtcagtaccgaggaagaatctcag

SEQ ID NO: 15320 - DNA, 260 bp, Unknown
  Description of Unknown: LeftRegion for integrase B2321 sequence
tgatcgttcggcttttaatttaccagatctaatccatcgcctaactgtttcttcgttaatattcaatagctccgcgatttctttagtgttatatatactcatacatttcactcctttcttcataataggagttgaaaattacgcgaaggaggtgatgccaacttaacccctggcagtacatcatagaaaggaagaacggaatgtataaagaatatccaacgttttacaattacgaaacaaaagagtacggcagaaagtct

SEQ ID NO: 15321 - DNA, 260 bp, Unknown; identical to SEQ ID NO: 13002
  Description of Unknown: LeftRegion for integrase B2322 sequence

SEQ ID NO: 15322 - DNA, 260 bp, Unknown
  Description of Unknown: LeftRegion for integrase B2323 sequence
gcattcttcctgttctttcctgtattgagattgtccagaaacaaaaacttcgttctggtaagtagtgcttatatttcgtttcgttccgttatcgtctaacagcctgcatctttcgtctaaaagcgcaggttgttagacgatactcaggtattcaacgtttcagctgtggaagcattctaattttctgaaaggtggtatttatgcctcacaaaaagaaactacaagaggtaggcggtcggcgtctggtggcctactatcgc

SEQ ID NO: 15323 - DNA, 260 bp, Unknown; identical to SEQ ID NO: 14094
  Description of Unknown: LeftRegion for integrase B2324 sequence

SEQ ID NO: 15324 - DNA, 260 bp, Unknown
  Description of Unknown: LeftRegion for integrase B2325 sequence
cctgcatcctggcaccgaaattattaagacctaccttggccggcagtataaggttactatcgcggaaattaatgattttatttacaacggacagcattataaaactctgtccgctatagccaaagaaatctgcggtataaaggtctccggttatgactttttcggattaaataacaaacgggtattaaaggagacagctcatggttagaataaactgcgcgatctatgtccgcaaatccaccgaaaagggcttggagctt

SEQ ID NO: 15325 - DNA, 260 bp, Unknown
  Description of Unknown: LeftRegion for integrase B2326 sequence
gatatatcctctgaatggttggaaaactcatacacatacacgccaaagccgtataagccttcaaagcgcgccctccaaatggaggcggacatcaaagaaactgctcacaaatacataacaagcgaaaaagccctcctgctgggcgcagaagggcgtaacgggtaacagatatgtcgatagatattaaatggcaagtgccaatggcaaagccggaggtcagcgaactggccgtcgtatatgcccggtattcaagccacagt

SEQ ID NO: 15326 - DNA, 260 bp, Unknown; identical to SEQ ID NO: 15315
  Description of Unknown: LeftRegion for integrase B2327 sequence

SEQ ID NO: 15327 - DNA, 260 bp, Unknown
  Description of Unknown: LeftRegion for integrase B2328 sequence
ccttgttaggactcaatcttcttgttttcattaatcgtgtaagtaaccgatcttgtacaaaaattttccgactaatgtccagaacttttgtttgatggtcatacaaatcactcctttcttcataataggagttgaaaattacgcgaaggaggtgatgccaacttaacccctggcagtacatcatagaaaggaagaacggaatgtataaagaatatccaatgttttacaattacgaaacaaaagagtacggcagaaagtct

SEQ ID NO: 15328 - DNA, 260 bp, Unknown
  Description of Unknown: LeftRegion for integrase B2329 sequence
ttttgaggggcttgtaccccttttttttgtttttctgttgctatttttatatagctggtgtataatagatacagactgaaaataaagccacttagagagcctcaagagttaggggtaggcagttatacccctgagcgattaaaacggctctgagaggctctcaagggctcaggatatgattttataaaggagtgtacaggatggcttacaggagagcacaggatactaaaggattaagggcggttttctatgctagggta

SEQ ID NO: 15329 - DNA, 260 bp, Unknown
  Description of Unknown: LeftRegion for integrase B2330 sequence
tataatccaaaagggttattttgagagggctatcagtgtaagggctgatagccctatttttttttgtctaaatttcaggagatttctggttattactcaaataataagtaatgggtttacatagtatcaaaaaggtgtataataagtatgagatattatgacaaacctgtacaaattctaatcaacaggaggaaaacaggatggtacaggagaaattaagagcggtattttatgcaagggtatctacagaggaagagaga

SEQ ID NO: 15330 - DNA, 260 bp, Unknown
  Description of Unknown: LeftRegion for integrase B2331 sequence
gtaacaagtaatcttaatagattattgaataataatttaatatcgaataatgaatacataaaggcttgtgcaatattagatgcacaatttaaaaaatcacacacataaataactaattgggtgcatatttattgcacccttttggcatttatgatataatcaaaagtaatagcaaagaatattacagaaagcgaggaattatgaatgaaatagtaacgggtttagacacaaataaaatatataaagttgtgttttatgct

SEQ ID NO: 15331 - DNA, 260 bp, Unknown; identical to SEQ ID NO: 15317
  Description of Unknown: LeftRegion for integrase B2332 sequence

SEQ ID NO: 15332 - DNA, 260 bp, Unknown
  Description of Unknown: LeftRegion for integrase B2333 sequence
attataaatgctttggtaaagtgttgggaaaagctaaagttttaattaaggtttaaagttacatatagagtatcgataacaaataaaaatcccgctcagtgctaccaacaccgaacgggaaagagctgcggtataaccacaaccttaagcaagtttaattgtaccacagcttcttgaaaatgtcaaggagtgataaaaaaatgaaaagaactgcaatatatgctcgttacagctctgataatcaacgggcggagagtatt

SEQ ID NO: 15333 - DNA, 260 bp, Unknown
  Description of Unknown: LeftRegion for integrase B2334 sequence
ggacggcagcttaaaacattcctttgaagtaaaaaatagagtaactgctattatcggaaaatggactgcgtaccaagccgaaaaacgcctgccgctgctggaactctgtcaagacttgtccgaagatgaattaaccgaagttataaactatatcaaatacgttcaatcaaagcgcgattgaacaggaagggggaataataatgccggaagcattaaacgcggtcatatacgcccgctattcctccgatcgtcagacagaa

SEQ ID NO: 15334 - DNA, 260 bp, Unknown; identical to SEQ ID NO: 15077
  Description of Unknown: LeftRegion for integrase B2335 sequence

SEQ ID NO: 15335 - DNA, 260 bp, Unknown; identical to SEQ ID NO: 15315
  Description of Unknown: LeftRegion for integrase B2336 sequence

SEQ ID NO: 15336 - DNA, 260 bp, Unknown
  Description of Unknown: LeftRegion for integrase B2337 sequence
gctgcagcccgctatgacgtcctcggatcggaagagtatgaaaccttacggattcgcgacctcttaacgaagaccgaaaagtctgaagaacttgataccacagtcctacggagtatagctacagagatagtcattcaccccgatggcaaaatcggattaaagatgaaaaacggacaaatcattgaaaggaatgaaagcacatgagccgagcatcccctaaagtcataacgatccctgcaaatccgaaccttgtgaaagat

SEQ ID NO: 15337 - DNA, 260 bp, Unknown; identical to SEQ ID NO: 13002
  Description of Unknown: LeftRegion for integrase B2338 sequence

SEQ ID NO: 15338 - DNA, 260 bp, Unknown; identical to SEQ ID NO: 15315
  Description of Unknown: LeftRegion for integrase B2339 sequence

SEQ ID NO: 15339 - DNA, 260 bp, Unknown
  Description of Unknown: LeftRegion for integrase B2340 sequence
tatagataaagctgaacatacagacaaccgcatttcttcagatttctataatgtaataatagatgtcctcattgaaatgcttaatatagattaaaacataaactttgaaaatcatctgtgcagttgcttttcagtgactgcactttattaaattttaaatatatattatatacttgaataatactttaggagtgataataatgaatgaaacaataaaagtagtcggatatgcacgattttcttcttcaatgcaaagagag

SEQ ID NO: 15340 - DNA, 260 bp, Unknown
  Description of Unknown: LeftRegion for integrase B2341 sequence
taaaactgaacatacagataattgcatttcttctgatttctacaatgctttagtagatttactgatagaaatagttgatatagatataaaataaatcataaattttgaaaatcatctgtgcagttgcttttcagtgactgcactttattaaattttaaatatatattatatacttgaataatactttaggagtgataataatgaatgaaacaataaaagtagtcggatatgcacgattttcttcttcaatgcaaagagag

SEQ ID NO: 15341 - DNA, 260 bp, Unknown
  Description of Unknown: LeftRegion for integrase B2342 sequence
aattcgtcagcggcacattcccgaacggcagtatcagggttgtttccgtagagcttacagcaatccgcttccaagtctgcattgacgcacttacgacaatcaatttcaatcatgccttatcctccccgtgtttttggcggtgttgaaattggacgattgcgctttgtcggtagagtcatggagctaaaaaggagatttgcatgaaaaaatttccaatcgacctctcctgtctgacagaggaagaaatctctcaatttcag

SEQ ID NO: 15342 - DNA, 260 bp, Unknown
  Description of Unknown: LeftRegion for integrase B2343 sequence
cattcgcttactgcatttaccaatttcagtctctaatttgcgtttgctcatttctctggtttccataattgtaaagtttttattcataataaacctccttaaaatttttgtttatggtgtcataataggagttgaaaattacgcgaaggaggtgatgctaacttaacccctggcagtacatcatagaaaggaagaacggaatgtataaagaatatccaacgttttacaattatgaagtaaaagagtacggaagaaagtct

SEQ ID NO: 15343 - DNA, 260 bp, Unknown
  Description of Unknown: LeftRegion for integrase B2344 sequence
agcccttgctagagctcaatcttcttgttttcattaatcgtgtaaataaccgatcttgtacaaaaattttccgactaatgtccagaacttttgtttgatggtcatacaaatcactcctttcatgataggagttgaaaattacgcgaaggaggtgatgccaacttaacccctggcagtacatcatagaaaggaagaacggaatgtataaagaatatccaacgttttacaattacgaaacaaaagagtacggcagaaagtct

SEQ ID NO: 15344 - DNA, 260 bp, Unknown
  Description of Unknown: LeftRegion for integrase B2345 sequence
gacacacctcccgaaacagatactcttatggttgtcattgttgatgacgaagaaggatttgttaagaaaatcagcattgatgaagatactgtgacccttcgctcttttaatccacactatcctccccgtgtttttggcggtgttgaaattggacgattgcgctttgtcggtagagtcatggagttaaaaaggagatttgcatgaaaaaatttccaatcgacctctcctgtctgacagaggaagaaatctctcaatttcaa

SEQ ID NO: 15345 - DNA, 260 bp, Unknown
  Description of Unknown: LeftRegion for integrase B2346 sequence
ttgtcagcgtttcggtagatttttccgtttttcagcaaaataaaaacgcccacggtgttaccagcaacgcaggcgtttcagatcagcttactcagagagatggtacagggataaaacctgtccagagcaatagcagacctcgcagatgttattgtaccacctccgggcaggcttgtcaaagtgtacccggaggtatttttatgggcaaaaaacaaaaggcaaccggcggcgatgcggtcatctacgcccgctattcttcc

SEQ ID NO: 15346 - DNA, 260 bp, Unknown
  Description of Unknown: LeftRegion for integrase B2347 sequence
aatcccgttgcgtctccgcttttctagcgtagcgctcttttggactgtacgcaacatggaaaaataaaagcgcccggcagctggtacgatcagccgtcgggcatggatgaatgcttcgcagaatgaaaggaaatcaatcttgcgcctgctccatgagtgtaccacacttttggcaggtacgcaatcatgggaggattgctatgccccgcacatcacgcaaagccaaaacatcgccttctgccgctatgcggctcgtggcc

SEQ ID NO: 15347 - DNA, 260 bp, Unknown
  Description of Unknown: LeftRegion for integrase B2348 sequence
ggcatgaacatattttactatattttagcacaatgttgcttgcagaagaagatttcaaacaaaataaaaaacgcccacggtgttaccagcaccgcaggcgttccagatcagcttacccagagggcaataacagccaacctcacagatgttattgtaccacctccgggcaggcttgtcaaagtgtacccggaggtatttttatgggcaaaaaacaaaaggcaaccggcggcgatgcggtcatctacgcccgctattcttcc

SEQ ID NO: 15348 - DNA, 260 bp, Unknown
  Description of Unknown: LeftRegion for integrase B2349 sequence
cttcgatcaagggcttatgacggtcttgcctgatcttacaattcaggtctcgaactacgtgaaggacggctacgacgaccaaaatacgagagactggctactcggcgtagagggtacaaaaatcatcaggccgaagaggttcgcaccaaatcgcgacatgctggcctaccacaatgagtttgtattcctgaggtgattccatgcagcgagcagtgatatatgccaggtacagccctggaccaaatcagacagagcagtcg

SEQ ID NO: 15349 - DNA, 260 bp, Unknown; identical to SEQ ID NO: 14904
  Description of Unknown: LeftRegion for integrase B2350 sequence

SEQ ID NO: 15350 - DNA, 260 bp, Unknown
  Description of Unknown: LeftRegion for integrase B2351 sequence
gatacacctcccgaaacagatactcttatggttgtcattgttgatgacgaagaaggatttgttaagaaaatcagtattgatgaagatactgtgacccttcgctcttttaatccacactatcctccccgtgtttttggtggtgttgaaattggacgattgcgctttgtcggtagagtcatggagttaaaaaggagatttgcatgaaaaaatttccaatcgacctctcctgtctgacagaggaagaaatctctcaatttcag

SEQ ID NO: 15351 - DNA, 260 bp, Unknown; identical to SEQ ID NO: 15315
  Description of Unknown: LeftRegion for integrase B2352 sequence

SEQ ID NO: 15352 - DNA, 260 bp, Unknown
  Description of Unknown: LeftRegion for integrase B2353 sequence
acccgctcgccggcgtcacttccgccgcgccggcggctctgtccccccagctccaggccctggccgacgccctcgatcagctgaatgaagagggacaggaaaagctgcttgactacgcggccgacctggtagccggtggccgatatataaaaacttgtgcgcctggactggatcaggcgcaggcgtgacgggcggaccccatgaaaaagcgcatgattcccatggcggtcagctccgccgacttcgacccctccatgaac

SEQ ID NO: 15353 - DNA, 260 bp, Unknown; identical to SEQ ID NO: 15315
  Description of Unknown: LeftRegion for integrase B2354 sequence

SEQ ID NO: 15354 - DNA, 260 bp, Unknown
  Description of Unknown: LeftRegion for integrase B2355 sequence
agtcccgttgcgtctctgcttttctattgtagcgctcttttggactgtacgcaacatggaaaaataaaagcgcccggcagctggtacgatcagccgtcgggcatggatgaatgcttcgcagaatgaaaggaaatcaatcttgcgcctgccccatgagtgtaccacacttttggcaggtacgcaatcatgggaggattgctatgccccgcacatcacgcaaagccaaaacatcgccttctgccgctatgcggctcgtggcc

SEQ ID NO: 15355 - DNA, 260 bp, Unknown; identical to SEQ ID NO: 13096
  Description of Unknown: LeftRegion for integrase B2356 sequence

SEQ ID NO: 15356 - DNA, 260 bp, Unknown
  Description of Unknown: LeftRegion for integrase B2357 sequence
ttattatagatatcatggactttaataaagtaacttatatatgatgcaatttagatatattaaataaaattaattttctatttgcatcatatatttttatatacagattttactttttgaaatataagtaatgtgtttacatattggaaatactatatttaagggtattttcaatataaaaccttagggaggtttgacttatgaaggctgcaatttattcaagaaaatcaaagtttactggaaaaggagactctatagaa

SEQ ID NO: 15357 - DNA, 260 bp, Unknown
  Description of Unknown: LeftRegion for integrase B2358 sequence
taaggcatgttgaagcttggcataaagcgttcggcatggacccgtttaccgatgaggaacatgagaagttaatggagtatggtagattcttaatttcgcagagacaaaaataaaagaaagagaataggagttgtaacttacgcgaaggaggtgatgccaacttattcccctggcagtacatcatagaaaggaagaacagaatgtataaagaatatccaaagttttacaattatgaagtaaaagagtatggcagaaagtcg

SEQ ID NO: 15358 - DNA, 260 bp, Unknown
  Description of Unknown: LeftRegion for integrase B2359 sequence
ttcatatcaatcacctttcttcaaacccaactaagcccggacacacaacattatggccacatttctttaaaagtaaaacgtgcacataggcgttttagttctttttttagatagatatgatgaattgtaaaactctataaactaaattatggcaatttataggcgtacaaagtaaaatatgtttacataaaggaagttttatgtttgaaacagaagatttaacaggtcaatacgtaaatatttatatccgtgtcagtact

SEQ ID NO: 15359 - DNA, 260 bp, Unknown
  Description of Unknown: LeftRegion for integrase B2360 sequence
attacgacaagagtatagataaagctgaacatacagacaaccgcatttcttcggatttctataatgtaataatagatgtcctcatcgaaatgcttaatatagattaaaatataaactttgaaaatcatctgtgcagttgcttttcagtgactgcactttattaaattttaaatatatattatactttaggagtgataataatgaatgaaacaataaaagtagtcggatatgcacgattttcttcttcaatgcaaagagaa

SEQ ID NO: 15360 - DNA, 260 bp, Unknown
  Description of Unknown: LeftRegion for integrase B2361 sequence
gcttagaaaatggtcaaataggtgttataagaattgatggtatggaagctacggttaagaaagtagttattagtggctctatgattactctaattccaatgtcaagtaataaagagcatataccacatatgtacaatttagaaactgatgatatagaaataatagggagagtaattcaagcaataaaaacttattaggaggtgttcgaaattaaggcagcgatatatacaagaaagtccaagtacaccgaagaaggagaa

SEQ ID NO: 15361 - DNA, 260 bp, Unknown
  Description of Unknown: LeftRegion for integrase B2362 sequence
ggcaaatttgatcaccttaacggcacagatgcagatgtaataaataaataaaatctcccgccctgttccagcagagcgagagataaatgcaggcctccagattataagctttccagatataagctttccagaccgcctacgccattagctaaattatagcatatctggagtcctccatgttaagcataggaggtttttttatgtcattttttggaaataagttgcccgaacggaacgaaatcgccgttgtttactgtcgc

SEQ ID NO: 15362 - DNA, 260 bp, Unknown
  Description of Unknown: LeftRegion for integrase B2363 sequence
aaacagccctctatctgttatcaggaggaacaaccggtgtgccaaaggtgattccaaaatcccatgccggatatatttgtaatacaggctcataaagcagatagtggtgtacaaggacgattccgtaagagtgatttttcctaacaataacagtataaagataggctaccgggatttataggagccggaaaggagcagatatgccacagacagcggtaaagaagaaagtatccatgatacctgcaaaaccgcagtatgac

SEQ ID NO: 15363 - DNA, 260 bp, Unknown; identical to SEQ ID NO: 13002
  Description of Unknown: LeftRegion for integrase B2364 sequence

SEQ ID NO: 15364 - DNA, 260 bp, Unknown
  Description of Unknown: LeftRegion for integrase B2365 sequence
agtccttgttaggactcaatcttcttgttttcattaatcgtgtaagtaaccgatcttgtacaaaaattttccgactaatgtccagaacttttgtttgatggtcatacaaatcgctcctttcataataggagttgaaaattacgcgaaggaggtgatgccaacttaacccctggcagtacatcatagaaaggaagaacggaatgtataaagaatatccaacgttttacaattatgaaacaaaagagtacggcagaaagtct

SEQ ID NO: 15365 - DNA, 260 bp, Unknown
  Description of Unknown: LeftRegion for integrase B2366 sequence
tggtggtgcgggagttctccggggagaagtccatgcgggaagcctttgagcagctgattgagcgtcagacctgcgaacacttcgaggaatggcgtcagcagcgggaaatggccgaaaacgctgcgtaaaaacggttgattcaggggcagggacatggtactataatggtatcgtgtccctgttcatagaaggagaacgctatgagcaggaaaaaacaagtctatgagaaaatcaccgctctctactgccgcatctctctg

SEQ ID NO: 15366 - DNA, 260 bp, Unknown
  Description of Unknown: LeftRegion for integrase B2367 sequence
acatatgttaggcatgtagaagcttggcacaatatgtttggtatggaccctttttcagacgaggagcatgaaaagctaatggagtacgggaagttcttaatctcgttgaggaaaaaataaaagaaaagagtcatgatctatgcgaaaggaggtgatgccaacttaacccccggcagtacatcatagaaaggaagaatagaatgtataaagaatacccaacatttcattattacgaaacaaaagaatatggaagaaagtca

SEQ ID NO: 15367 - DNA, 260 bp, Unknown
  Description of Unknown: LeftRegion for integrase B2368 sequence
accagcgagccgtcctgctcgccttgcagcgtcaaggggttcttaacgaaatgcagtgtaggaactgcgtacaaaaattagaagaacagaaaagaaatacaggaaaatcaaaatctgtaaaggaatagtgcctttcagtattcacacaattgcaaatgcacattctgtatcgtatgataccacgaaaaggagggatttttatgttacaagtagcagcgtattgtcgcgtatccacagataaggaagaccaggcaaattcc

SEQ ID NO: 15368 - DNA, 260 bp, Unknown; identical to SEQ ID NO: 13018
  Description of Unknown: LeftRegion for integrase B2369 sequence

SEQ ID NO: 15369 - DNA, 260 bp, Unknown
  Description of Unknown: LeftRegion for integrase B2370 sequence
gtaacatacgaatcgaaaggtttaagatttgggctaagaaatttgataaatatgtatttacagacgaagaacataacaaacttgtagaatatgctgagttcttgctttatcaaagagaaaaataaaagagaaaatgtatttttataaggaggtgatgccaactacaaacctggcaccacaaattagaaaggatgaatagaatgtataaggattatccagtgttttacaattatgaagtgaaagagtacggacgtaagtca

SEQ ID NO: 15370 - DNA, 260 bp, Unknown
  Description of Unknown: LeftRegion for integrase B2371 sequence
accagcgagccgtcctgctcgccttgcagcgtcaaggggttcttaacgaaatgcagtgtaggaactgcgtacaaaaattagaagaacagataagaaatacaggaaaatcaaaatctgtaaaggaatagtgcctttcagtattcgcacaattgcaaagacacattctgtatcgtatgataccacgaaaaggaggagtttttatgttacaagtagcagcgtattgccgtgtatccacggataaggaagaccaggcaaattcc

SEQ ID NO: 15371 - DNA, 260 bp, Unknown
  Description of Unknown: LeftRegion for integrase B2372 sequence
attctaaagaaaagtttgagattgcagctaatacttttgcagctgaattacttattgaggattcattgtttcatgaatataagcatcatacaattgaagaaatggctgctatggaaaatttacctatagaacttatcaagataaagctaaaatatatttaatttgtaataaaattgcatatactaaaacgaggtgattagatgaagattgctatttactcaagaaaaagtaaatatacaggtaaaggtgattccataggt

SEQ ID NO: 15372 - DNA, 260 bp, Unknown
  Description of Unknown: LeftRegion for integrase B2373 sequence
accagcgagccgtcctgctcgccttgcagcgtcaaggggttcttaacgaaatgcagtgtaggaactgcgtacaaaaattagaagaacagataagaaatacaggaaaatcaaaatctgtaaaggaatagtacctttcagtattcacacaattgcaaaggcccattctgtatcgtatgataccatgaaaaggagggatttttatgttacaagtagcagcgtattgccgtgtatccacggataaggaagaccaggcaaattcc

SEQ ID NO: 15373 - DNA, 260 bp, Unknown
  Description of Unknown: LeftRegion for integrase B2374 sequence
ccgtcgaggcttggctgaccggttcccgctcttgcccgctcagcacgagaatgatgtttcagcagttactcggccttctgccggtcgccgttgagttaggaggcggcaatggctgaggagttcaaaagctcccagcccttgacaaaaaacccgtttgcggttactatagccgcaaacgggttttttgtgaggtggttttgatgcatggcgcatatatccttgcgcgctactccacggacaggcaaaacgaggacagcata

SEQ ID NO: 15374 - DNA, 260 bp, Unknown
  Description of Unknown: LeftRegion for integrase B2375 sequence
accagcgagccgtcctgctcgccttgcagcgtcaaggggttcttaacgaaatgcagtgtaggaactgcgtacaaaaattagaagaacagataagaaatacaggaaaatcaaaatctgtaaaggaatagtgcctttcagtattcacacaattgcaaaggcacattctgtatcgtatgataccacgaaaaggaggagtttttatgttacaagtagcagcgtattgccgtgtatccacggataaggaagaccaggcaaattcc

SEQ ID NO: 15375 - DNA, 260 bp, Unknown
  Description of Unknown: LeftRegion for integrase B2376 sequence
caccgacgaggccggctggcttgctctgctggatgcccgtaatcagacctcgcatctttacgatgacgcggtggccgacgccgtgtatcaggccatcggaaatacctatttgcccctattgcgcgaactgagcgaaaagctgtctgccgctgtctgacttttcctgcccggttgttatcttctagccagggaggcacgccgtgaacatcgccatctacccgcgcaaaagcaagttttcgcccaccagcgaatccatcgcc

SEQ ID NO: 15376 - DNA, 260 bp, Unknown
  Description of Unknown: LeftRegion for integrase B2377 sequence
ctggatcattgacatggttatgatctgttgcaacaaattcaccgacagcaccggcgcggtggttggtctgaaggttgctgagtataccagacagccggatcctgatcttgcagaggcttctctggaggagcagcgggaggcagcggccgagactgccagagcttacggctatactgcaatagagtcaggcgctcaggataatgccgacaagtaaaaacacggctcgaaaatatgccgcaggaggtagctcggataattcc

SEQ ID NO: 15377 - DNA, 260 bp, Unknown
  Description of Unknown: LeftRegion for integrase B2378 sequence
ataatccaaaagggttattttgagagggctatcagtgtaagggctgatagccctattttttttttgtctaaatttcaggagatttctggttattactcaaataataagtaatgggtttacatagtatcaaaaagatgtataataagtatgagatattatgacaaacctgtacaaattctaatcaacaggaggaaaacaggatggtacaggagaaattaagagcggtattttatgcaagggtatctacagaggaagagaga

SEQ ID NO: 15378 - DNA, 260 bp, Unknown
  Description of Unknown: LeftRegion for integrase B2379 sequence
ctggatcattgacatggttatgatctgttgtaacaaattcaccgacagcaccggcgcggtggttggtctgaaggttgctgagtataccagacagccggatcctgatcttgcagaggcttctctggaggagcagcgggaggcagcggccgagactgccagagcttacggctataccgtaatagagtcaggcgctcaggataatgccgacaagtaaaaacacggctcgaaaatatgccgcaggaggtagctcggataattcc

SEQ ID NO: 15379 - DNA, 260 bp, Unknown
  Description of Unknown: LeftRegion for integrase B2380 sequence
ctgagccacggacggctgatccatgtggtttccgtgttccccgcggacggcgcctgttcgccggaggagaaactgaaaacactcattgacatggacctcaaaaattcccgcacagttgcggaaaggggtggacaaaccgccccggcagaggtaacatcacacaaactctggacggtttgactggagaaaaggaggattgcatgagtcagtcaaaccaaatgaaaatcaccgccctgtactgccgtctgagtcaggatgac

SEQ ID NO: 15380 - DNA, 260 bp, Unknown; identical to SEQ ID NO: 13018
  Description of Unknown: LeftRegion for integrase B2381 sequence

SEQ ID NO: 15381 - DNA, 260 bp, Unknown
  Description of Unknown: LeftRegion for integrase B2382 sequence
acaggtcttttgattgtgtgtagtgatccggcgcaaaagaaaattgacagagccgatgccttgaatattccaatcatttcagagcagcaatggtatgaactcatgccagaacttgaagccgttggaatgtggaacggaaagcaaattctgtttgcggacaatgatggcatctaccgtgttgaagtggacggtgaaagctgatgaccagaaaaaagaatattgctgctggcctcgatgccgtcatctatgcccggtactcg

SEQ ID NO: 15382 - DNA, 260 bp, Unknown
  Description of Unknown: LeftRegion for integrase B2383 sequence
tatatggtatcgcacgcaaacttttctttaaaatcatcggagcataccatagcgatacctcgcgtgcgcgcgtgcgtgtgcgcgcgatcgtgcgcgcactgtttctgtacctgtatctgtatctgagactgtatctgtaatctgtttctgattctgaatatctactactgcaaatctatcgttagaagggggtggcgctgttgccgagaaaacctgcaaagcacccggcgaagccgaagcggggcaagaagctggaaatc

SEQ ID NO: 15383 - DNA, 260 bp, Unknown
  Description of Unknown: LeftRegion for integrase B2384 sequence
aagctgccgctgggcgtaaggcgcgcgagcgcattatcaacggtgaggacggctccgaggcgttggccgatgccgaggctgagtgggcagcgtattgcgccgagcatatatgggactaatgccgcatccggctgtagcccttgacaaaaaacccgtttgcggttactatagccgcaaacggtttttttgaggtggttttgatgcatggcgcatatatccttgcgcgctactccacggacaggcaaaacgaggacagcata

SEQ ID NO: 15384 - DNA, 260 bp, Unknown
  Description of Unknown: LeftRegion for integrase B2385 sequence
attctagttaccgaactagaaaaagatttaaataatagttaaggtagttttgctacctttttattttaggcaaattattgacacgttattttttaatgaatcccctgcttaatatattattatgtaggggaatatttttatgtatatttttaacatagaagtctattatataaatataaataaacccaaaggagttaataatgaaaatagcaatatattcgagaaaatcaaaatacactggtgttggtgattcaatagag

SEQ ID NO: 15385 - DNA, 260 bp, Unknown
  Description of Unknown: LeftRegion for integrase B2386 sequence
cgccttgtgctatcaacagatcggcaacgaggcatatattgaaaatcagctaagatgcattcttgaacaggccgaatgcttggaatccttcgacgcagagctgacaaacaagatcgtcaagcagatcaggctctcggaagacggtcccgtaagaatcatactgatcaatgatcaagaagtacgaaaggagcagacggagcatgcaagcagcaacccaagcgacgccacctaaagtggtacatacgatccccgccaaaatc

SEQ ID NO: 15386 - DNA, 260 bp, Unknown
  Description of Unknown: LeftRegion for integrase B2387 sequence
aatctgcttttgttgatctacgctgagtgcttcaaacatggttaaggcttccttgtcagaaaccttaccttctttgttagtgatatgacatattctactccaatcttaggaagttcttcctatgtattagcgccaagtgatattatagcactttatctttcgtttgccattggtaaatagaggaaaggataacggacattatgacagttaaaaaatttccaatcgacctctcctgtctgacagaggaagaaatctctcaa

SEQ ID NO: 15387 - DNA, 260 bp, Unknown
  Description of Unknown: LeftRegion for integrase B2388 sequence
ctggatcattgacatggttatgatctgttgcaataaattcaccgacagcaccggtgcggtggtcggtctgaaggttgcggagtataccagacagccggatcctgatcttgcagaggcttctctggaggagcagcgggaggcagcggccgagactgccagagcttacggctataccgtaatagagtcaggcgctcaggataatgccgacaagtaaaaatacggctcgaaaatatgccgcaggaggtagctcggataattcc

SEQ ID NO: 15388 - DNA, 260 bp, Unknown
  Description of Unknown: LeftRegion for integrase B2389 sequence
cgcagaactcgcaggaatctacgaaaagcaggttgccaactggaacagcaatcccgctccggcttgccagcccgatatagcggttccaacaataaatgatttgcgcgccctcaagcagctcgttgatgaaggtgtgcttaccgaagaggaatttacagccaaaaagaagcagttgctcggcatctgagcaaggaggctatatggcttcgcagaagtataaaaagaagtcagacaatttgataatcaccggtgtaatatac

SEQ ID NO: 15389 - DNA, 260 bp, Unknown
  Description of Unknown: LeftRegion for integrase B2390 sequence
ttcccttggctacttgcaagttggagatgaggcatacgtcgagcacaagctgaagaacactcttgaacagcacgacatcctggactgcttcgattcagaactgaccaataaaatcgtcaaacggatcaggctcgcagagagtggttccgtcagcatcatactgatcaatgaccaagaaatacgaaaggagcagactgaccatgcaagcagcaacacaagtgatgccacctaaagtggtacatacgatccccgcaacaata

SEQ ID NO: 15390 - DNA, 260 bp, Unknown
  Description of Unknown: LeftRegion for integrase B2391 sequence
ctggatcattgacatggttatgatctgttgcaacaaattcaccgacagcaccggcgcggtggttggtctgaaggttgctgagtataccagacagccggatcctgatcttgcagaggcttctctggaggagcagagggaggcagcggccgagactgccagagcttacggctatactgcaatagagtcaggcgctcaggataatgccgacaagtaaaaacacggctcgaaaatatgccgcaggaggtagctcggataattcc

SEQ ID NO: 15391 - DNA, 260 bp, Unknown
  Description of Unknown: LeftRegion for integrase B2392 sequence
aagtaagcaccatgcgccggttcgcgtcgctcagctctcggaacttgctcaatactttaaataggtgaccctcgttatagttgaccataccacagcctcccaacattcgatttcggtatcttcggtatcattataccacgcttgaccggcaattgatagatgttgaaaaatcatttacgatatctatacaggtgatgcacatgcagaagtttggaatcttaacggaatctgagcggcaaatccttgatggagcgtccact

SEQ ID NO: 15392 - DNA, 260 bp, Unknown
  Description of Unknown: LeftRegion for integrase B2393 sequence
tcccctcgtctggatccccagatccggcagcaagtatcacagcaaaagtacctgctcaaacatgaaaaatcccattcaggtcactctttcggaagcaaagaaaagcggctatgatccctgtaaaaagtgccatccgccgacataagtctatggattgcaggtgtccccattcaacgacatcaaagggggggaggcacgccgtgaacatcgccatctacccgcgcaaaagcaagttttcgcccaccagcgaatccatcgcc

SEQ ID NO: 15393 - DNA, 260 bp, Unknown
  Description of Unknown: LeftRegion for integrase B2394 sequence
ctggatcattgacatggttatgatctgttgcaacaaattcaccgatagcaccggtgcggtggtcggcctgaaggttgccgagtataccagacagccggatctcgatcttgcagaggcttctctggaggagcagcgggaggcagcggccgagactgccagagcttacggctataccgtaatagagtcaggcgctcaggataatgccgacaagtaaaaccgtggctcgaaaatatgccgcaggaggtggctcggataattcc

SEQ ID NO: 15394 - DNA, 260 bp, Unknown
  Description of Unknown: LeftRegion for integrase B2395 sequence
ttcccttggctacttgcagattggcgatgaggcatacgtcgagcacaagctgaaaaacacgcttgaacagcacgacaccctggacagcttcgattcagaactgaccaataaaactgtcaagctgatcaagctcgcagagaatggttccgtcagcatcatactgatcaatgaccaagaaatacgaaaggagcagactgaccatgcaaacagcaatccaagcgacgccacctaaagtggtacatacgatccccgcaacaata

SEQ ID NO: 15395 - DNA, 260 bp, Unknown
  Description of Unknown: LeftRegion for integrase B2396 sequence
caccgacgaggacggctggcttgctctgctggatgcccgcaatcagacctcccacctctacgatgacgcggtggccgacgccgtgtatcaagccatcggaaatacctatttgcccctattgcgcgaactgagcgaaaagctgtctgccgctgtctgacttttcctgcccggttgttatcttctagccagggaggcacgccgtgaacatcgccatctacccgcgcaaaagcaagttttcgcccaccagcgaatccatcgcc

SEQ ID NO: 15396 - DNA, 260 bp, Unknown
  Description of Unknown: LeftRegion for integrase B2397 sequence
tcttgcggtctgcgtcgtgtcgctcccggtcggcttgatcgttgtggccattggagcgtaccgggtggcaaaggccggggatatttatgacgctgcggtcgctcggtacgagcagcaaatctcggactatgttgactggctggatgaagtcaacgcaaaataaaaagccgccctcggtgggcggcgggaggttgctctgaatgtgtgcaaaaaagaaaccggccatgcttgagccggatatgcaggatgccgtgatctac

SEQ ID NO: 15397 - DNA, 260 bp, Unknown
  Description of Unknown: LeftRegion for integrase B2398 sequence
ctcattatagaaaatatcgctcggcaggaagaacttcggaaaatgaagaatattttacgttggcaatttagttctcacgaagcaacacagtgaaatatcttttgcaatcaataagctgtaaagcaatagtgcctttcagtatccgcacagttgcaaaggcatgagattcgccgtatgatacccgcaaaggaggcggttttatgttacaagtagcggcgtactgccgcgtatccacggataaggaggatcaggcgaactcg

SEQ ID NO: 15398 - DNA, 260 bp, Unknown
  Description of Unknown: LeftRegion for integrase B2399 sequence
tcattatagaaaatatcgctcggcaggaagaacttcggaaaatgaagaatattttacgttggcaatttagttctcacgaagcaacacagtgaaataccttttgcaatcaataagctgtaaagcaatagtgcctttcagtattcacacaattgcaaaggcacattctgtatcgtatgataccacgaaaaggaggagtttttatgttacaagtagcagcgtattgccgtgtatccacggataaggaagaccaggcaaattcc

SEQ ID NO: 15399 - DNA, 260 bp, Unknown
  Description of Unknown: LeftRegion for integrase B2400 sequence
ctggatcattgacatggttatgatctgttgcaacaaattcaccgatagcaccggtgcggtggtcggcctgaaggttgccgagtataccagacagccggatcccgatcttgcagaggcttctctggaggagcagcgggaggcagcgaccgagactgccagagcttacggctataccgtaatagagtcaggcgctcaggataatgccgacaagtaaaaccgcggctcgaaaatatgccgcaggaggtggctcggataattcc

SEQ ID NO: 15400 - DNA, 260 bp, Unknown; identical to SEQ ID NO: 13224
  Description of Unknown: LeftRegion for integrase B2401 sequence

SEQ ID NO: 15401 - DNA, 260 bp, Unknown
  Description of Unknown: LeftRegion for integrase B2402 sequence
gaacgctccgcaggagtgagggaatcatacagcgcaagggccaattgcagatcttcggttcgggacatggctgatacctccttcgtgttgttgtctttatatattacgaaattattacatcacaaattcgacattgatagagaatatcattttgcgatattacaactatactttgagtattttccaggagttttgaagaaatgggggcggattcttgcatggctgcgtctgcgaaaaaggtttcagcgaacataatgatt

SEQ ID NO: 15402 - DNA, 260 bp, Unknown
  Description of Unknown: LeftRegion for integrase B2403 sequence
ggataatgtacgaattgaacgattcaaggtttgggctaagaaatttgataaatatgtatttacagacgaagaacatagcaagcttgtagagtatgctgagttcttattacatcgaagagaaaaataaaagaaaaagttctcgtaaaggaggtgatgccaactatacccctggcaccacaaattagagaggatggaatgtaatgtataaagattatccagtgttttacaactacgagacgatggagtacggacggaagtcg

SEQ ID NO: 15403 - DNA, 260 bp, Unknown
  Description of Unknown: LeftRegion for integrase B2404 sequence
aaatacatgtaatcgtcactatcctgccccctataaattaataatctatactatgcttgtacacttcttttagttacacttagtaatactttctactctaaagaaaagattgatattttttacctaaagaacttatcaggataaatctaaaatatatttattttaaaataatgttgcatatattaaactgaggtgattagatgaagattgctatttattcaagaaagagcaaatacacaggaaaaggtgattccataggt

SEQ ID NO: 15404 - DNA, 260 bp, Unknown; identical to SEQ ID NO: 13019
  Description of Unknown: LeftRegion for integrase B2405 sequence

SEQ ID NO: 15405 - DNA, 260 bp, Unknown
  Description of Unknown: LeftRegion for integrase B2406 sequence
tcgatgaagattataaaaagttcaataacggagaaattgggtctatagcggcaacagtaatattcggcattttgtttattgcggttttgggtttcctaaaatagcaatcatttttcaattctgacttggctttttaagcacaaaatcaaagccttaattgcaaatttaagcctattttcgttaaatgggggtgtggtattttgagctcagtagataaaacagccgtaatttatgcgcggtattcgtcccatggacagacc

SEQ ID NO: 15406 - DNA, 260 bp, Unknown
  Description of Unknown: LeftRegion for integrase B2407 sequence
gataacatattataaagtgccgtattattcaaaatgaatatgcggtattttttatttagttcgcaattcaaatatattgtgagcatattaaaataataaaacaggaattttaaaaggattagttttcgtctaagttggcgattactagtccttattttttttatttatggtataatattatgtaaagcgaggtggagaaagtgggaaaagtagcatattgtagagtgtcagataaaaaaggtatagattcattcgagaat

SEQ ID NO: 15407 - DNA, 260 bp, Unknown
  Description of Unknown: LeftRegion for integrase B2408 sequence
atgcatgtaatcgtcactatcctgccccctataaattaataatctatactatgcttgtacacttcttttggttacactgagtaacactttctactctaaagaaaaaattgagattgtatttatctaaagaacttattaggataaatataaaatatatttattttaaaataatgttgcatatattaaactgaggtgattagatgaagattgctatttactcaagaaagagcaaatacacaggaaaaggtgattccataggt

SEQ ID NO: 15408 - DNA, 260 bp, Unknown; identical to SEQ ID NO: 15232
  Description of Unknown: LeftRegion for integrase B2409 sequence

SEQ ID NO: 15409 - DNA, 260 bp, Unknown
  Description of Unknown: LeftRegion for integrase B2410 sequence
ctgccgctgggcgtaaggcgcgcgagcgcattatcaacggtgaggacggctccgaggcgttggccgatgccgaggctgagtgggcagcgtattgcgccgagcatatatgggactaatgccgcatccggctgtagcccttgacaaaaaacccgtttgcggttactatagccgcaaacgggtttttttgtgaggtggttttgatgcatggcgcatatatccttgcgcgctactccacggacaggcaaaacgaggacagcata

SEQ ID NO: 15410 - DNA, 260 bp, Unknown
  Description of Unknown: LeftRegion for integrase B2411 sequence
cggagagcgcaacgacaccgtctacattgtagagtatgccaccggcagcagtgccagggagtccgtatacgagaaggtcaagcggctcattctggaggacacaaaaagttatcttgtaaaatccgcataaacgcttgatatatccgcagttcagagccataatacagtaccgcttgaagactgtcgggaaggaggagcatatgaacaacaacagacagtcttacaacgccgaggagaaaataaccgctctgtactgccgc

SEQ ID NO: 15411 - DNA, 260 bp, Unknown
  Description of Unknown: LeftRegion for integrase B2412 sequence
tcgatgaagagtataaaaagttcaataacggagaaattgggtctatagcggcaacagtaatattcggcattttgtttattgcggttttgggtttcctaaaatagcaatcattttccaattctgacttggctttttaagcacaaaattaaagccttaattgcaaatgtaagcctattttcgttaaatgggggtgtggtattttgagctcagtagataaaacagccgtaatttatgcgcggtattcgtcccatggacagacc

SEQ ID NO: 15412 - DNA, 260 bp, Unknown
  Description of Unknown: LeftRegion for integrase B2413 sequence
ttttacgttgattatcttttattcttcattttcgtaaaatttgcaaaaagaaaaagcccgccgggccgaagcctgacgggctatagatgaaactgtatttatataattcagcagcgatttatgatttttcgtctcacacgttgtgctttcgtctaatctgctggtcaaatgagacgattacttgaaaggacgctcaaggtatggcaaaaagaaaattcaacaagggcggcgaggttcggcttgtcgcctattacagatac

SEQ ID NO: 15413 - DNA, 260 bp, Unknown
  Description of Unknown: LeftRegion for integrase B2414 sequence
accagcgagccgtcctgctcaccttgcagcggcaaggcttccttaacgaaatgcagtgtaggaactgcgtacaaaaattagaagaacagataagaaatacaggaaaatcaaaatctgtaaaggaatagtgcctttcagtattcacacaattgcaaaggcacattctgtatcgtatgataccacgaaaaggaggaatttttatgttacaagtagcggcgtattgccgtgtatccacggataaggaagaccaggcaaattcc

SEQ ID NO: 15414 - DNA, 260 bp, Unknown; identical to SEQ ID NO: 13018
  Description of Unknown: LeftRegion for integrase B2415 sequence

SEQ ID NO: 15415 - DNA, 260 bp, Unknown; identical to SEQ ID NO: 13002
  Description of Unknown: LeftRegion for integrase B2416 sequence

SEQ ID NO: 15416 - DNA, 260 bp, Unknown; identical to SEQ ID NO: 14224
  Description of Unknown: LeftRegion for integrase B2417 sequence

SEQ ID NO: 15417 - DNA, 260 bp, Unknown; identical to SEQ ID NO: 14186
  Description of Unknown: LeftRegion for integrase B2418 sequence

SEQ ID NO: 15418 - DNA, 260 bp, Unknown; identical to SEQ ID NO: 13002
  Description of Unknown: LeftRegion for integrase B2419 sequence

SEQ ID NO: 15419 - DNA, 260 bp, Unknown
  Description of Unknown: LeftRegion for integrase B2420 sequence
tattgccatgaaaatagcaatatctgagactgttttgcggaacaatttaatcatattgcttaccatgacaatacacctcctttgtatttattatatcagaggtcggaacaattttccactaaaatcgttttattgtccttgacaatttaatgaaaatatagtatagaaaatcccgcctcctggaccaacaggaaacgggaatgccagcagcattggcgtactgcatggccagtgtaaatcttgtgtttgcttgggctgat

SEQ ID NO: 15420 - DNA, 260 bp, Unknown; identical to SEQ ID NO: 15271
  Description of Unknown: LeftRegion for integrase B2421 sequence

SEQ ID NO: 15421 - DNA, 260 bp, Unknown; identical to SEQ ID NO: 13396
  Description of Unknown: LeftRegion for integrase B2422 sequence

SEQ ID NO: 15422 - DNA, 260 bp, Unknown
  Description of Unknown: LeftRegion for integrase B2423 sequence
gctgtctgatgaattaccacaaaatacaatgaatgctgtacttattaaattagggttttctaaaaactggaaatcagacctcattctcccttaaaaattgaaatagctgaaatcgttatcgtcaactattacccggccgcataatccactaaatatctaaataaaaaaatccccgtctcctggaccaacaggaaacgggaatgccagcagcattggcgtactgcatggcaagtgtaaatcttgtgtttgcttgggctgat

SEQ ID NO: 15423 - DNA, 260 bp, Unknown; identical to SEQ ID NO: 13002
  Description of Unknown: LeftRegion for integrase B2424 sequence

SEQ ID NO: 15424 - DNA, 260 bp, Unknown
  Description of Unknown: LeftRegion for integrase B2425 sequence
tgtaaaatgctggtagccctcattttttagttgtatctagtatataaggggtgtataatagataggaactgaaaacagcctcataaagccctctattttatcgagggtaaagaagtctacacctaatatataaaagtggctgtatgaggcacacaggagctcacaggagctcacaggactattacaggagggtaaacaggatggcatacaggaaaataacggatataagagatactattggtatgagagcggtattttat

SEQ ID NO: 15425 - DNA, 260 bp, Unknown
  Description of Unknown: LeftRegion for integrase B2426 sequence
ccatccgcgggcaaagtgctggacagaatccatgagattctgcttgcctcaaggcttaaaaaatagccgccgcacatttgcatctttgttacctcgatgcaataatgatgatgtacttgtaccttgaaaatcgaaaataaagaaaacggaccggatacatcatctttcagacgatctaagacagaaacgaggtatgtataatggaaaagacagtctatgaatccaacgttccgcgtgtttacacgctttacagagtttct

SEQ ID NO: 15426 - DNA, 260 bp, Unknown
  Description of Unknown: LeftRegion for integrase B2427 sequence
cgatgaaggacgctacgacatagtgctggtcgcatcaatttcaagcctttcgagagaccgtaggcggtttttaagactggctaagcatatcacccgcaacgggcggcgactcgtatttctgaaagaaggatatgcgctcgacacggaatccatagaaacgcaactccaactcctgcgcgccattgaaagaagtgtgcgccatgcctgaaacgccagccaaaaccgtaacggtcatacctgcaactataaccggcccgcag

SEQ ID NO: 15427 - DNA, 260 bp, Unknown
  Description of Unknown: LeftRegion for integrase B2428 sequence
tattcgctgcaatacatcaacggtggcgaggaaaacccagaggttgaagtcgtttacctgatcgctgaatgtaaataaaaaatccgcccaggctgctacctgtgcggatcaaacgcaaggaaaatgcaaacaccactaagcactttccgcagttagtatatcacaagctgcctgcgttgtaaagtcggaaaggattaagattgaacgctgtaatctatgcccgtttctcgtcgcacagccagcgggagcagtccatcgaa

SEQ ID NO: 15428 - DNA, 260 bp, Unknown; identical to SEQ ID NO: 13335
  Description of Unknown: LeftRegion for integrase B2429 sequence

SEQ ID NO: 15429 - DNA, 260 bp, Unknown
  Description of Unknown: LeftRegion for integrase B2430 sequence
agggctactggctgtaaaatgctggtagccctcattttttagttgtatctagtatataaggggtgtataatagataggaactgaaaacagcctcataaagccctctattttatcgagggtaaaagtctacacctaatatataaaagtggctgtatgaggcacacaggagctcacaggactattataggagggtaaacaggatggcatacaggaaaataacggatataaaagatactattggtatgagagcggtattttat

SEQ ID NO: 15430 - DNA, 260 bp, Unknown; identical to SEQ ID NO: 13005
  Description of Unknown: LeftRegion for integrase B2431 sequence

SEQ ID NO: 15431 - DNA, 260 bp, Unknown
  Description of Unknown: LeftRegion for integrase B2432 sequence
ggctactggctgtaaaatgctggtagccctcattttttagttgtatctagtatataaggggtgtataatagataggaactgaaaacagcctcataaagccatctattttatcgaggataaagaagtctacacctaatatataaaagtggctgtatgaggcacacaggagctcacaggactattacaggagggtaaacaggatggcatacaggaaaataacggatataagagatactattggtatgagagcggtattttat

SEQ ID NO: 15432 - DNA, 260 bp, Unknown
  Description of Unknown: LeftRegion for integrase B2433 sequence
gcggctctcagaaaccctccgaggttttaaaacgagtaatcaccgaccaaatcgaaaagaaactgaacaagaatgaaaacaagccaaacaatgccgcaaattaagagaaattacacccaaaaagcacttgaaataaacggataattgatgtataatgatgatagtcgaaatcggttgtccgtgcattaaaggaggttaaaatgacaaacggacagacccgatacaacacagcattatatcttcgtttatccaaagacgac

SEQ ID NO: 15433 - DNA, 260 bp, Unknown; identical to SEQ ID NO: 13548
  Description of Unknown: LeftRegion for integrase B2434 sequence

SEQ ID NO: 15434 - DNA, 260 bp, Unknown; identical to SEQ ID NO: 13002
  Description of Unknown: LeftRegion for integrase B2435 sequence

SEQ ID NO: 15435 - DNA, 260 bp, Unknown
  Description of Unknown: LeftRegion for integrase B2436 sequence
aaagataaaagaacaagaaactctcataaaaaatctacgaatgagagatatggtaaaagggaaatataagaaatcggatgagctgacggaacaaatggcggagttccttgtaaaggcaacagtaaaagactggacgattacattcgagttccaaaatggatataagacaacgaaagaatatacaaacgggagggcaggaaatgtcaatggaaaactgtgcaaacactaaacccaaaattacgattatcccagccaagacg

SEQ ID NO: 15436 - DNA, 260 bp, Unknown; identical to SEQ ID NO: 13002
  Description of Unknown: LeftRegion for integrase B2437 sequence

SEQ ID NO: 15437 - DNA, 260 bp, Unknown
  Description of Unknown: LeftRegion for integrase B2438 sequence
taaggatgcagaaatatctactagtttgcaacgtgttgaaacaaaagtagataaacttgaattaagagtcctaagaaataacattaatctaccctcaacaaatgaaaactaaaaagacctagtgattgtaacgctaggtctttttataaatcacatattattcattttattttttgaaaatactataggaggtgtctactgtgaaagtagctatctattcaagaaagtctaaattcaccggtaaaggtgattcaatcgaa

SEQ ID NO: 15438 - DNA, 260 bp, Unknown
  Description of Unknown: LeftRegion for integrase B2439 sequence
ggctactggctgtaaaatgctggtagccctcattttttagttgtatctagtatataaggggtgtataatagataggaactgaaaacagcctcataaagccctctattttatcgagagtaaagaagtctacacctaatatataaaagtggctgtatgaggcacacaggagctcacaggactattacaggagggtaaacaggatggcatacaggaaaataacggatataagagatactattggtatgagagcggcattttat

SEQ ID NO: 15439 - DNA, 260 bp, Unknown; identical to SEQ ID NO: 13002
  Description of Unknown: LeftRegion for integrase B2440 sequence

SEQ ID NO: 15440 - DNA, 260 bp, Unknown
  Description of Unknown: LeftRegion for integrase B2441 sequence
atttgactgctgcacattagatacagctaaggcttttaataccgtgcttgcctattatttcggtaaaaagcaaataaccgaagaaatcaatcttcaggtacttcgcgacacggtagataaaatcatagtaagtaaggacggcaccgtaaacgtaaggttcctaaacggtgcggaaatttcaaaggataaggagaatagcaatggaaacggctgtgacggcaccgagacagaaaacagtaactaaaatagaagcgaatccg

SEQ ID NO: 15441 - DNA, 260 bp, Unknown
  Description of Unknown: LeftRegion for integrase B2442 sequence
tgcatcggttggtggtggtggatgattgacatgctcttttggtgtgttgcttttatcccgcgcctcataattcaatcccttaaagggcgaaaggataaaacgcgatccacaacaaaaactgtctccaatgaaaagatacataccgtgtatcgttccatgtgtatatgccacgactgtggacatcattgggagaaataattatgcccgctgaaatcaacttcaaccttcccggaaataaaaaatccgaacataacagccgt

SEQ ID NO: 15442 - DNA, 260 bp, Unknown; identical to SEQ ID NO: 14046
  Description of Unknown: LeftRegion for integrase B2443 sequence

SEQ ID NO: 15443 - DNA, 260 bp, Unknown; identical to SEQ ID NO: 13552
  Description of Unknown: LeftRegion for integrase B2444 sequence

SEQ ID NO: 15444 - DNA, 260 bp, Unknown
  Description of Unknown: LeftRegion for integrase B2445 sequence
ggctactggctgtaaaatgctggtagccctcattttttagttgtatctagtatataaggggtgtataatagataggaactgaaaacagcctcataaagccatctattttatcaagggtaaagaagtctacacctaatatataaaagtggctgtatgaggcacacaggagctcacatgactattacaggagggtaaacaggatggcatacaggaaaataacggatataagagatactattggtatgagagcggtattttat

SEQ ID NO: 15445 - DNA, 260 bp, Unknown; identical to SEQ ID NO: 15223
  Description of Unknown: LeftRegion for integrase B2446 sequence

SEQ ID NO: 15446 - DNA, 260 bp, Unknown; identical to SEQ ID NO: 14344
  Description of Unknown: LeftRegion for integrase B2447 sequence

SEQ ID NO: 15447 - DNA, 260 bp, Unknown
  Description of Unknown: LeftRegion for integrase B2448 sequence
gctactggctgtaaaatgctggtagccctcattttttagttgtatctagtatataaggggtgtataatagatagaaactgaaaacagcctcataaagccctctgttttatcgagggtaaagaagttctacacctaatatataaaagtggctgtatgaggcacacaggagctcacaggactattacaggagggtaaacaggatggcatacaggaaaataacggatataaaagatactataggtatgagagcggtattttat

SEQ ID NO: 15448 - DNA, 260 bp, Unknown
  Description of Unknown: LeftRegion for integrase B2449 sequence
aaagataaaagaacaagaaactctcataaagaatctacgaacgagagatatggtaaaagggaaatataagaaatcggatgagatgacggaacaaatggcggagttccttgtaaaagcaacagtaaaagactggaagattacattcgagttccaaaatggatataagacaacgaaagaatatacaaacgggagggcaggaaatgtcaatggaaaactgtgcaaacactaaacccaaaattacgattatcccagccaagacg

SEQ ID NO: 15449 - DNA, 260 bp, Unknown; identical to SEQ ID NO: 14511
  Description of Unknown: LeftRegion for integrase B2450 sequence

SEQ ID NO: 15450 - DNA, 260 bp, Unknown; identical to SEQ ID NO: 14251
  Description of Unknown: LeftRegion for integrase B2451 sequence

SEQ ID NO: 15451 - DNA, 260 bp, Unknown; identical to SEQ ID NO: 13002
  Description of Unknown: LeftRegion for integrase B2452 sequence

SEQ ID NO: 15452 - DNA, 260 bp, Unknown; identical to SEQ ID NO: 13548
  Description of Unknown: LeftRegion for integrase B2453 sequence

SEQ ID NO: 15453 - DNA, 260 bp, Unknown
  Description of Unknown: LeftRegion for integrase B2454 sequence
ggctactggctgtaaaatgctggtagccctcattttttagttgtatctagtatataaggggtgtataatagatagaaactgaaaacagcctcataaagccctctattttatcgagggtaaagaagtctacacctaatatataaaagtgactgtacgaggcacacaggagctcacaggactattacaggagggtaaacaggatggcatacaggagaataacggatataagagatactattggtatgagagcggtattttat

SEQ ID NO: 15454 - DNA, 260 bp, Unknown; identical to SEQ ID NO: 13007
  Description of Unknown: LeftRegion for integrase B2455 sequence

SEQ ID NO: 15455 - DNA, 260 bp, Unknown; identical to SEQ ID NO: 15448
  Description of Unknown: LeftRegion for integrase B2456 sequence

SEQ ID NO: 15456 - DNA, 260 bp, Unknown
  Description of Unknown: LeftRegion for integrase B2457 sequence
ggctactggctgtaaaatgctggtagccctcattttttagttgtatctagtatataagaggtgtataatagataggaactgaaaacagcctcataaagccctctattttatagagggtaaagaagtctacacctaatatataaaagtggctgtatgaggcacacaggagctcacaggactattacaggagggtaaacaggatggcatacaggaaaataacggatataagagatactattggtatgagagcggtattttat

SEQ ID NO: 15457 - DNA, 260 bp, Unknown
  Description of Unknown: LeftRegion for integrase B2458 sequence
aaagataaaagaacaggaaactctcataaaaaatctacaaacgagagatatggtaaaagggaaatataagaaatcggatgagctgacggaacaaatggcggagttccttgtaaaggcaacagtaaaagactggacgattacattcgagttccaaaatggatataaggcaacgaaagaatatacaaacgggagggcaggaaatgtcaatggaaaactgtgcaaacactaaacccaaaattacgattattccagcgaaaaca

SEQ ID NO: 15458 - DNA, 260 bp, Unknown
  Description of Unknown: LeftRegion for integrase B2459 sequence
aaagataaaagaacaggaaactctcataaaaaatctacaaacgagagatatggtaaaagggaaatataagaaatcggataagctgacggaacaaatggcggagttccttgtaaaggcaatagtaaaagaatggactattacattcgagttccaaaatggatataaggcaacgaaagaatatacaaacgggagggcgggaaatgtcaatggaaaactgtgcaaacactaaacccaaaattacgattataccagcgaaaaca

SEQ ID NO: 15459 - DNA, 260 bp, Unknown; identical to SEQ ID NO: 13002
  Description of Unknown: LeftRegion for integrase B2460 sequence

SEQ ID NO: 15460 - DNA, 260 bp, Unknown; identical to SEQ ID NO: 13002
  Description of Unknown: LeftRegion for integrase B2461 sequence

SEQ ID NO: 15461 - DNA, 260 bp, Unknown
  Description of Unknown: LeftRegion for integrase B2462 sequence
ggctactggctgtaaaatgctggtagccctcattttttagttgtatctagtatataaggggtgtataatagataggaactgaaaacagcctcataaagccctctattttatcgagggtaaagaagtctacacctaatatataaaagtgactgtatgaggcacacaggagctcacaggactattacaggagggtaaacaggatggcatacaggaaaataacggatataaaagatactattggtatgagagcggtattttat

SEQ ID NO: 15462 - DNA, 260 bp, Unknown; identical to SEQ ID NO: 14775
  Description of Unknown: LeftRegion for integrase B2463 sequence

SEQ ID NO: 15463 - DNA, 260 bp, Unknown
  Description of Unknown: LeftRegion for integrase B2464 sequence
aaaagatgctttgtataaaacggaagaaatcagggatattcttgctggccgggaaaagatagtggaattcgacagggaattatacaaaaagctgattcggaagatttatttatgcaacgggaatatggcagaagtagaattcctgaatggtggacgaatgaaggtagggtacacggataaaaagcccggaaaggaggcaaatgggtacaacagctaaaaaggtgtctgtaatacctgcaaaagtacagttcgataccagc

SEQ ID NO: 15464 - DNA, 260 bp, Unknown
  Description of Unknown: LeftRegion for integrase B2465 sequence
ggctactggctgtaaaatgctggtagccctcattttttagttgtatctagtatataaggggtgtataatagatagaaactgaaaaacagcctcataaagccctctattttatcgagggtaaagaagttatacctaatatataaaagtggctgtataaggcacacaggagctcacaggactattacaggagggtaaacaggatggcatacaggaaaataacggatataagagatactattggtatgagagcggtattttat

SEQ ID NO: 15465 - DNA, 260 bp, Unknown
  Description of Unknown: LeftRegion for integrase B2466 sequence
agggctactggctgtaaaatgctggtagccctcattttttagttgtatctagtatataaggggtgtataatagataggaactgaaaacagcctcataaagccctctattttatcgagggtaaaagtctacacctaatatataaaagtggctgtatgaggcacacaggagctcacaggactattacaggagggtaaacaggatggcatacaggaaaataactgatataaaagatactattggtatgagagcggtattttat

SEQ ID NO: 15466 - DNA, 260 bp, Unknown
  Description of Unknown: LeftRegion for integrase B2467 sequence
tattgccatgaaaatagcaatatctgagactgttttgcggaacaacttaatcatattgcttaccatgacaatacacctcctttgtatttattatatcagaggtcggaacaatttaccactaaaatcgttttattgtccttgacaatttaatgaaaatatagtatagaaaatcccgcttcctgaatcaacaggaaacgggaatgccagcagcattggcgtactgcatggccagtgtaaatcttgtgtttgcttgggctgat

SEQ ID NO: 15467 - DNA, 260 bp, Unknown; identical to SEQ ID NO: 14511
  Description of Unknown: LeftRegion for integrase B2468 sequence

SEQ ID NO: 15468 - DNA, 260 bp, Unknown
  Description of Unknown: LeftRegion for integrase B2469 sequence
cgccgcagaaatgtatgcggacattgaccccagagagtacgaaacccagcggctgcgaaggctgtttcaaaaggaagcgccgcgctcagagttggatgcaaatcttatcactatgagcatatccgctgttctggtggacagcaatggaaatgtaaagatcagactgaaaaacgagcagatcgtggaaaggggtgagcaaaatggatgatattcgcaggacagtaacggtcataccggcaaaaccgcagatggatcagcgg

SEQ ID NO: 15469 - DNA, 260 bp, Unknown
  Description of Unknown: LeftRegion for integrase B2470 sequence
ggctactggctgtaaaatgctggtagccctcattttttagttgtatctagtatataaggggtgtataatagataggaactgaaaacagcctcataaagccctctattttatcaagggtaaagaagtctacacctaatatataaaagtggctgtatgaggcacacaggagctcacaggactattacaggagggtaaacaggatggcatacaggaaaataacggatataagagatactattggtatgagagcggtattttat

SEQ ID NO: 15470 - DNA, 260 bp, Unknown; identical to SEQ ID NO: 14186
  Description of Unknown: LeftRegion for integrase B2471 sequence

SEQ ID NO: 15471 - DNA, 260 bp, Unknown; identical to SEQ ID NO: 14046
  Description of Unknown: LeftRegion for integrase B2472 sequence

SEQ ID NO: 15472 - DNA, 260 bp, Unknown
  Description of Unknown: LeftRegion for integrase B2473 sequence
tggaggtcagggatggggagttccggacagaggaggtcaaaaacatccttgcagggaaaaaggaactggaaacatttgatgaaaatttatatagaaaaataatcgcacgcatctgggtgcatggcggaaacatggcagaagtggagcttatcaatgggagccgtgtcacagccgggtacaaggattaggagggagagcagatggcagaaacagcaaaaaagatcagcatgatacctgccaaggtgcagtatgaccggaat

SEQ ID NO: 15473 - DNA, 260 bp, Unknown; identical to SEQ ID NO: 13521
  Description of Unknown: LeftRegion for integrase B2474 sequence

SEQ ID NO: 15474 - DNA, 260 bp, Unknown
  Description of Unknown: LeftRegion for integrase B2475 sequence
taaagccttcgaccgaggccttataactatcactccttccatgaaaatctatgtttctccgataattttggatagccctcaggacgcttttacagcccgctggctggcttctcttgacggaatggttttacccccccccgatttccgccgcgtagagagcttctggagtaccataacgacgaaatttttaggagggtcacatgaatacagtaatttatgctcggtattctgccggcccgagacagaccgaccagagtatc

SEQ ID NO: 15475 - DNA, 260 bp, Unknown; identical to SEQ ID NO: 13002
  Description of Unknown: LeftRegion for integrase B2476 sequence

SEQ ID NO: 15476 - DNA, 260 bp, Unknown; identical to SEQ ID NO: 13552
  Description of Unknown: LeftRegion for integrase B2477 sequence

SEQ ID NO: 15477 - DNA, 260 bp, Unknown; identical to SEQ ID NO: 15448
  Description of Unknown: LeftRegion for integrase B2478 sequence

SEQ ID NO: 15478 - DNA, 260 bp, Unknown; identical to SEQ ID NO: 15271
  Description of Unknown: LeftRegion for integrase B2479 sequence

SEQ ID NO: 15479 - DNA, 260 bp, Unknown; identical to SEQ ID NO: 13548
  Description of Unknown: LeftRegion for integrase B2480 sequence

SEQ ID NO: 15480 - DNA, 260 bp, Unknown
  Description of Unknown: LeftRegion for integrase B2481 sequence
tcattatcagtatctttacaatctttgtctgataaatatgctgctgaattctaaccatccaaatattcgcaagataccaccgaaaataatttatcttgcgaaattcgggtaactatcaacagataagcaaaagaaaggatgaataatctactaaatatctaaataaaaaatcccgtctcctggatcaacaggaaacgggaatgccagcagcattggcgtactgcatggcaagtgtaaatcttgtgtttgcttgggctgat

SEQ ID NO: 15481 - DNA, 260 bp, Unknown
  Description of Unknown: LeftRegion for integrase B2482 sequence
tggaggtcagggatggggagttccgggcagaggagatcaaaaacatccttgcagagaaaaagaaactggaaacatttgatgaaaatttatatagaaaaataatcgcacgcatctgggtgcatggtggaaacatggcagaagtggagcttatcaatgggagccgtgtcacagccgggtacaaggattaggagggagagcagatggcagaaacagcaaaaaagatcagcatgatacctgccaaggtgcagtatgaccggaat

SEQ ID NO: 15482 - DNA, 260 bp, Unknown
  Description of Unknown: LeftRegion for integrase B2483 sequence
tgctttgtagatatggtatctataccgtatctataccgtatccataccgtaccgatacctcgcgtgcgcgcgtgcgtgtgcgcgcgatcgtgcgcgcactgtctctgtacctgtatctgtatctgagactgtatctgtaatctgtttctgattctgaatatctactactgcaaatctatcgttagaagggggtggcgctgttgccgagaaaacctgcaaagcacccggcgaagccgaagcggggcaagaagctggaaatc

SEQ ID NO: 15483 - DNA, 260 bp, Unknown
  Description of Unknown: LeftRegion for integrase B2484 sequence
ttcccctctgttcacattgatagatgcaacaaccatctcttcaatgccatcaatgaaagccccaacgcaactctcaacatcaacggtacagaaggatttacggctcaggagcttgaattgattgacttgtatcggaacttcccgctgagaaagcaaatggaactgctaaactatgctttcagcctgaaagaaggtaagcaatgagagtagttctttacatgaggtatagcagcgaccgtcaaaccgagcaatccatagag

SEQ ID NO: 15484 - DNA, 260 bp, Unknown; identical to SEQ ID NO: 13007
  Description of Unknown: LeftRegion for integrase B2485 sequence

SEQ ID NO: 15485 - DNA, 260 bp, Unknown; identical to SEQ ID NO: 13552
  Description of Unknown: LeftRegion for integrase B2486 sequence

SEQ ID NO: 15486 - DNA, 260 bp, Unknown
  Description of Unknown: LeftRegion for integrase B2487 sequence
ggctactggctgtaaaatgctggtagccctcattttttagttgtatctagtatataaggggtgtataatagataggaactgaaaacagcctcataaagccatctattttatcgagggtaaagaagtctacacctaatatataaaagtgactgtacgaggcacacaggagctcacaggactattacaggagggtaaacaggatggcatacaggaaaataacggatataagagatactattggtatgagagcggtattttat

SEQ ID NO: 15487 - DNA, 260 bp, Unknown; identical to SEQ ID NO: 15384
  Description of Unknown: LeftRegion for integrase B2488 sequence

SEQ ID NO: 15488 - DNA, 260 bp, Unknown
  Description of Unknown: LeftRegion for integrase B2489 sequence
atacggattacacagtagcgcaaaagacaggcccgtctctgccagaggatgtcaccactatgctttctgggcttgacagcgcggacctcgaaaaagttatgatctacgcccgcggtctgctggacggggacaagtatcagaaacgccgtccgcggtaaagcaggaagtgcttctggcaatgaaatagaaaggggcagacaatgagagtatccgtaaacttaaacgcacaaaagccggataccacgacaaacgccgtcatt

SEQ ID NO: 15489 - DNA, 260 bp, Unknown
  Description of Unknown: LeftRegion for integrase B2490 sequence
aggactcttatgaatacaaaaaagacgatggagggacaggcaagatacataaagaaaactcgggaatgtataagattattttgccagacgaacttccatctgcagaaaccataccagagccgctgtatgggtatattgtaaagtggcttgctgccaaagctgaagcttataaatgaaaagcgatttatgaggtctattctatggcacgttccacaaagaaaactgaatgcttgccgcttgagcggattggcgtaatctat

SEQ ID NO: 15490 - DNA, 260 bp, Unknown; identical to SEQ ID NO: 13005
  Description of Unknown: LeftRegion for integrase B2491 sequence

SEQ ID NO: 15491 - DNA, 260 bp, Unknown; identical to SEQ ID NO: 14511
  Description of Unknown: LeftRegion for integrase B2492 sequence

SEQ ID NO: 15492 - DNA, 260 bp, Unknown; identical to SEQ ID NO: 14511
  Description of Unknown: LeftRegion for integrase B2493 sequence

SEQ ID NO: 15493 - DNA, 260 bp, Unknown
  Description of Unknown: LeftRegion for integrase B2494 sequence
taccaattggctataaagttgaactagcaaaggcagctaaaagcaaaatattaaaattaaaagaaaatgatgatgtagaaaaacagaatatttggttagctattttcaatcaaattaatcactaataaaatttgcagctctttcggagctgcaaattttgacctactatatacaaacatacgtttaaggagagatcgccaatgccagtagctgtctattgtcgtgtcagctctgaagaacaagctgaacgtggagcaatc

SEQ ID NO: 15494 - DNA, 260 bp, Unknown
  Description of Unknown: LeftRegion for integrase B2495 sequence
atttcagaggatttaaaaaaagagttccaggaagtgtacaaaagaggaatatacaaagaactccataagagaaacttcttatcagataaacaattaaacgaattacttaaatcaaaataaaaagtaagttgttcagcacaccgtttagtggtataataaatatcattattgcggtgtgctattttttttggaggtagcacatgaagaaattaaaagtagcagcatatgcgagggtatcaacagacaaagatgatcaagcc

SEQ ID NO: 15495 - DNA, 260 bp, Unknown
  Description of Unknown: LeftRegion for integrase B2496 sequence
gattgcgtagaagcaggcattaaagaaataaatgacgaggagagattgcctgcgcagacggtacttagaagacaagcgtcaaatggctgttaggtaaccatgcatttccgtgagcagagagacgagaaaattgaaagtagcgtagcggacatgtagttggcagtctttcagagaatgcataacaagggggaaaagctgttatgaaaagagttatttgtctgtacagagtatcgacgaaaggacaggtcgataaggatgat

SEQ ID NO: 15496 - DNA, 260 bp, Unknown
  Description of Unknown: LeftRegion for integrase B2497 sequence
ccagctttacagagagacaaacgcaaaggagcaaatcgccgcccgcatcgctcagaagcgggtcatgctcatgaaccctcaaacagagttcaactcagtctacttcaccgatcttgttgagaatgtgatcctcgaggctcccgccagagtgtcccttctcacaaagaccgatgttcaaataagcgaaggagaacccgatcatggaagtcaagaaaataccgaagaagacggtgacgctgattgagccgaagcggtcaatc

SEQ ID NO: 15497 - DNA, 260 bp, Unknown
  Description of Unknown: LeftRegion for integrase B2498 sequence
taccaattggctataaagttgaactagcaaaggcagctaaaagcaaaatattaaaattaaaagaaaatgatgatatagaaaaacagaatatttggttagacattttcaatcaaattaatcactaataaaatttgcagctccgaaagagctgcaaattttaacttactctatacaaacatacgtttaaggagagattgccaatgccagtagctgtttattgtcgtgtcagctctgaagaacaagctgaacgtggaacaatc

SEQ ID NO: 15498 - DNA, 260 bp, Unknown
  Description of Unknown: LeftRegion for integrase B2499 sequence
tcagcattcctaatatgcaaatacttcgagttgagtataccacacaaaaactatccagctgagtctttttacagcacgatgaaaaaaacaagtcaagagtccacaccaataagtgtttggaagtaataatttgcagcccttaataggctgcaaattttagcccactctatgcaaacatatgttcaaaaggagtgttatatatgcctgtagccgtatattgccgtgtcagctcagaagaacaagctgaacgtggaacaatc

SEQ ID NO: 15499 - DNA, 260 bp, Unknown; identical to SEQ ID NO: 13018
  Description of Unknown: LeftRegion for integrase B2500 sequence

SEQ ID NO: 15500 - DNA, 260 bp, Unknown
  Description of Unknown: LeftRegion for integrase B2501 sequence
ggatttatatatctattctgttgatggagctaaagcgaaagggtatgaaccatgtagcgtttgtcatccatctaaaagcccctactccgcagcccaacaagatgggtacactgcacaagatatagcagacatactttcgtctaattatcctcaatgaatttctaaattttttcggtaccatacccaaggaggagtaataaatgtctttttcgccccctcgcaaagctgctctttatgcaaggttctctactgagcatcaa

SEQ ID NO: 15501 - DNA, 260 bp, Unknown
  Description of Unknown: LeftRegion for integrase B2502 sequence
attggtgttttggttgcgtgcagcaatccaatgcagaagaaaatcgatcaggccaaagctctaaatattccggtcatttcagaacagcagtggtttgagcttatgccagagctggaagcactcggaatgtggaacggaaagccaattccgtttgcagatgataatggaatttaccatattgatgtgggcggtgatggttgatggcccgaaaaaagaatattgctgctggcctcgatgccgtcatctatgcccgctattcc

SEQ ID NO: 15502 - DNA, 260 bp, Unknown
  Description of Unknown: LeftRegion for integrase B2503 sequence
gcggtaaaattgccggtgatgcacgtaaggcgctggagaaaaaaaccgggcgtacagttatatcaaaaaccaattataaagaacttcaagaaaaagacgttagaaaacaactaaaagaaacagacaaataaaaagcagcccacatgggctgcaaattttagcctgctctatacaaacatacgtttaaggagagattgccaatgccagtagctgtttattgtcgtgtcagttctgaagaacaagctgaacgtggaacaatc

SEQ ID NO: 15503 - DNA, 260 bp, Unknown; identical to SEQ ID NO: 15498
  Description of Unknown: LeftRegion for integrase B2504 sequence

SEQ ID NO: 15504 - DNA, 260 bp, Unknown
  Description of Unknown: LeftRegion for integrase B2505 sequence
cctgcatcccggcaccgaaatcattaagacctatcttggcaggcaatataaggttatcatagctgagattaacgattttatctatgaaaggcagcattataaaaccttatcggccatcgctaaagaaatctgcggcataaaggtctccggttatgacttcttcggattaaataacaaacgggcattaaaggaggcgattcatggctaaagtaaactgcgcgatctatgtccgcaaatctaccgaaaaaggcttggagctt

SEQ ID NO: 15505 - DNA, 260 bp, Unknown; identical to SEQ ID NO: 13821
  Description of Unknown: LeftRegion for integrase B2506 sequence

SEQ ID NO: 15506 - DNA, 260 bp, Unknown
  Description of Unknown: LeftRegion for integrase B2507 sequence
taccaattggctataaagttgaactagcaaaggcagctaaaagcaaaatattaaaattaaaagaaaatgatgatgtagaaaaacagaatatttggttagacattttcaatcaaattaataactaataaaatttgcagctccgaaagagctgtaaattttaacttaatctatgcaaacatatgtttaaggagagattgccaatgccagtagctgtttattgtcgtgtcagctctgaagaacaagctgaacgtggaacaatc

SEQ ID NO: 15507 - DNA, 260 bp, Unknown; identical to SEQ ID NO: 13442
  Description of Unknown: LeftRegion for integrase B2508 sequence

SEQ ID NO: 15508 - DNA, 260 bp, Unknown
  Description of Unknown: LeftRegion for integrase B2509 sequence
gatggcagcgctcatgtacgagcagagcaatgccaagttgaacctcacagtatcgctcgcaagaaagctggcacaaacgatggtcacgcaggatgaattcaatcgagattactttaccgccctcgcctcatacatcacactcggtgaacaaggcaaggtggtacttcatactaagacagaaacggaggttacgctggacgatggaagtagcgaaaattcctaaaaaaatcgtcactgtcatagagccaaaacgctccatg

SEQ ID NO: 15509 - DNA, 260 bp, Unknown
  Description of Unknown: LeftRegion for integrase B2510 sequence
atccgacagttttttgactttggcaaagatgtccgaccattcgctcgtagtcatacggcatggctcctttctcaaatttactgtcggcagcaactgaattatatcaaatacgcacccgcttttcagggattcgtagaattataccgaaaatcggaaaaatattgcgaattttgaagaagataatcgtgaggtgatggttgatggcccgaaaaaagaatattgctgcgggtcagaatgccgtcatttatgcccgctattcc

SEQ ID NO: 15510 - DNA, 260 bp, Unknown
  Description of Unknown: LeftRegion for integrase B2511 sequence
gcggttcgggcgttacccaagaaacgaatctgctgatccttggtaataacgattattgcaaagcgataaaaggcggcaaaagcagtaaacaaaaaaaggcggaagcatataaactcaaggggtatgacattgacataattcccgagagcgttttccgcgacatgataaatatctgaggataaccccgaaaggatcccgccatgagccttgcgtcaagaaccgtcaccgtcccggatgaaaaccggctgaacgccgtgata

SEQ ID NO: 15511 - DNA, 260 bp, Unknown; identical to SEQ ID NO: 13421
  Description of Unknown: LeftRegion for integrase B2512 sequence

SEQ ID NO: 15512 - DNA, 260 bp, Unknown; identical to SEQ ID NO: 13377
  Description of Unknown: LeftRegion for integrase B2513 sequence

SEQ ID NO: 15513 - DNA, 260 bp, Unknown
  Description of Unknown: LeftRegion for integrase B2514 sequence
gcagccaatcatgtaaaacagatacttctgtcctcattcgcggcgaacacgccgaaactccaatcccttggcatccttgcaatacccattgcgcgaagatatgataatggagggaaacccaatgaaccttgaaaacttcatattgacgcatggattcacgctctcaatttttatgaattgagaaaggatggatcgatacaatggaaaatacttttatggattttacggaaatgattcgcgtcgattgcctgtaccgtgtg

SEQ ID NO: 15514 - DNA, 260 bp, Unknown
  Description of Unknown: LeftRegion for integrase B2515 sequence
gatggcagcgctcatgtacgagcagagcaatgccaagttgaacctcacagtatcgctcgcaagaaagctggcacaaacgatggtcacgcaggatgaattcaatcgagattactttaccgccctcgcctcatacatcacactcggtgaacaaggcaaggtggtacttcatactaagacagaaacggaggttacgctggacgatggaagtaacgaaagttcctaaaaaaatcgtcactgtcatagagccaaaacgctccatg

SEQ ID NO: 15515 - DNA, 159 bp, Unknown
  Description of Unknown: LeftRegion for integrase B2516 sequence
tatcaaatatgcacccgcttttcagggattcgtagaattataccgaaaatcggaaaaatattgcgaattttgaagaagataatcgtgaggtgatggttgatggcccgaaaaaagaatattgctgcgggtcagaatgccgtcatttatgcccgctattcc

SEQ ID NO: 15516 - DNA, 260 bp, Unknown
  Description of Unknown: LeftRegion for integrase B2517 sequence
cgtatttgtcaatataaatatacgtgttttacgtaatataaattcaaaaggcgcaataaccacaaaaaaacgcccccggtgctaccaacaccgagagcgtttccgaatcagattgccccataaggtgatatggtaacaaccgaccaacagccatattgtaccaccttgcgggcaggattgcaaacccaaaaggtgataccatgaaaaagaagcaaccaaatacccgccatggccgggctgcgatctatgcgcgctattct

SEQ ID NO: 15517 - DNA, 260 bp, Unknown
  Description of Unknown: LeftRegion for integrase B2518 sequence
gatggcagcgctcatgtacgagcaaaacaacgccaagttgaacctcacagtatcactcgtaagaaaactggcacatacgatggtcacgcaggatgaattcaatcgagattactttaccgcccttgcctcatacatcacgctcggcgaacaaggcaaggtggtacttcatactaagacagaaacggaggtcacgctggacgatggaagtaacgaaagtccctaagaaaatcgtcactgtcatagagccaaaacgctccatg

SEQ ID NO: 15518 - DNA, 260 bp, Unknown; identical to SEQ ID NO: 13421
  Description of Unknown: LeftRegion for integrase B2519 sequence

SEQ ID NO: 15519 - DNA, 260 bp, Unknown
  Description of Unknown: LeftRegion for integrase B2520 sequence
tatcagcattcctaatatgcaaatacttcgaattaagtataccacacaaaaactatccaactgagtcttttttcagcacaatgaaaaagacaagtcaagagtccacccccataagtatttggaagtaataatttgcagcccacatgggctgcaaattttaccccactctatacaaacatacgttttaggagagatgcaaaatgtcagtcgctgtatattgccgtgtcagctctgaagaacaagctgaacgtggaacaatc

SEQ ID NO: 15520 - DNA, 260 bp, Unknown
  Description of Unknown: LeftRegion for integrase B2521 sequence
gatggcagcgctgatgtacgagcaaagcaatgccaagttgaacctcacagtatcgctcgcaaggaaactggcacatacgatggtcacgcaggatgaattcaatcgagattactttaccgccctcgcctcatacatcacgctcggcgaacaaggcagagtggtgcttcatactaagacagaaacggaggtcacgctggacgatggaagtaacgaaagtccctaagaaaattgtcactgtcatagagccgaaacgctccatg

SEQ ID NO: 15521 - DNA, 260 bp, Unknown; identical to SEQ ID NO: 13495
  Description of Unknown: LeftRegion for integrase B2522 sequence

SEQ ID NO: 15522 - DNA, 260 bp, Unknown; identical to SEQ ID NO: 13018
  Description of Unknown: LeftRegion for integrase B2523 sequence

SEQ ID NO: 15523 - DNA, 260 bp, Unknown
  Description of Unknown: LeftRegion for integrase B2524 sequence
gatggcagcgctcatgtacgagcaaaacaacgccaagttgaacctcacagtatcactcgcaagaaaactggcacaaacgatggtcacgcaggatgaattcaatcgagattactttaccgccctcgcctcatacatcacactcggtgaacaaggcaaggtggtacttcatactaagacagaaacggaggttacgctggacgatggaagtaacgaaagttcctaaaaaaatcgtcactgtcatagagccaaaacgctccatg

SEQ ID NO: 15524 - DNA, 260 bp, Unknown
  Description of Unknown: LeftRegion for integrase B2525 sequence
tcagcattcctaatatgcaaatacttcgagttgagtataccacacaaaaactatccagctgagtctttttacagcacgatgaaaaaaacaagtcaagagtccacaccaataagtgtttggaagcaataatttgcagcccttaataggctgcaaattttagcccactctatgcaaacatatgttcaaaaggagtgttatatatgcctgtagccgtatattgccgtgtcagctcagaagaacaagctgaacgtggaacaatc

SEQ ID NO: 15525 - DNA, 260 bp, Unknown
  Description of Unknown: LeftRegion for integrase B2526 sequence
tttttgtaatcgtcaaagaataatttagcttgaataccgacaaaaacagcagaaatgcaaacacaaatattagcaattgaagttatccatttactattatctgataaccaacacaaaatataatccattattacatctccatcttttagaaattccaataaatacataataaattataaataaaaggaggcaattttgcaatgttaaaatatttaaaaaacgataatgaaatagttgccgtatactgtcgtgtatcttct

SEQ ID NO: 15526 - DNA, 260 bp, Unknown
  Description of Unknown: LeftRegion for integrase B2527 sequence
gatggcatcgctcatctatgagcagagcagtgccaaacttgaccttgcagtgtctatcgcaaggaaactggcacaaacgatggttactcaggaggagtttaatcaggattactttaccgccctcgctgcatatgtcacccttggagcacagggcagggtcgtacttcatactaaaacagaaacggaggtcgcgttagacgatggaagtaactaaaattccaaagaaaatcgtcactgtcatcgagccaaaacgctctatg

SEQ ID NO: 15527 - DNA, 260 bp, Unknown
  Description of Unknown: LeftRegion for integrase B2528 sequence
gattgaacacgaaattgctaaagagtatggaattaaagttatagaagaataattcacaattcaaaaatattgtgagcatattaaaataataaaacaggaattttaaaaggattgacggtcacaaaagtgtgattgttagtccttatttttttcaattttatatgatataattatttattatgtaaagtgaggtggttattttgagaaaatgtgcatatgtgagggtttctaccgacaaggatgaacaggcagaatctttg

SEQ ID NO: 15528 - DNA, 260 bp, Unknown
  Description of Unknown: LeftRegion for integrase B2529 sequence
tacttttattaaagatttccttttaattttgaacaaagaagagttttacaaggacatgtattataaatacgcaaaaataacagatatgcctattaatataggagatagattcaatcagttctaccaacagctcttctgtcagtaattcctcattaaaaaagaaattaaaaatcccgtctcctggaccaacaggaaacgggatgccagcagcattggcgtactgcatggccagtgtaaatcttgtgtttgcttgggctgat

SEQ ID NO: 15529 - DNA, 260 bp, Unknown; identical to SEQ ID NO: 15240
  Description of Unknown: LeftRegion for integrase B2530 sequence

SEQ ID NO: 15530 - DNA, 260 bp, Unknown; identical to SEQ ID NO: 13018
  Description of Unknown: LeftRegion for integrase B2531 sequence

SEQ ID NO: 15531 - DNA, 260 bp, Unknown
  Description of Unknown: LeftRegion for integrase B2532 sequence
ccaaagatacaactactcgtccctatcgttataaattaaatcctatattcctaaaaaattaaaaaagccctacatccataggtacaatttgtctctatggatgcttacaattaaaaggaacaaacaaataaaaagcagcccacatgggctgcaaattttaacctactctatacaaacatacgtttaaggagagattgccaatgccagtagctgtttattgtcgtgtcagctctgaagaacaagctgaacgtggaacaatc

SEQ ID NO: 15532 - DNA, 260 bp, Unknown
  Description of Unknown: LeftRegion for integrase B2533 sequence
acggaattccaaaagtagaaaaaacttccgaatcgcttttggattcggaattctatgagtcggcaagccatttaatatatgagattataaaaaattagtatataaggctgtcaatcaaccctgttttttgacagcctttaaatcccaaaaggaaggagaatatttattatggacggaaaaaaataacagccgcttgctatatgagatacagttcacacgcacaggatgacggcttttctattgaagcacaggaaaaggcg

SEQ ID NO: 15533 - DNA, 260 bp, Unknown
  Description of Unknown: LeftRegion for integrase B2534 sequence
tattctgtttatctgattcaccttacccgaaagtagagatttccctaacggaaaaagagaaaatccttattgacgcataccgtgctgctgatgacatgggacagttgaacataatctatgtctgcctggatgaaatgaaaaaagcaaaaggaaacaacgaaagtgccgtgtgattgattttgtagagtggaggaagaaccatgtatgaggatataaaaacagcctgcctatacgttagattctcaagccataaccagact

SEQ ID NO: 15534 - DNA, 260 bp, Unknown
  Description of Unknown: LeftRegion for integrase B2535 sequence
caagccagagcaaacgatatagttggctggaacacagattcaatcgttggggctatccgtacattagtataacaaaaacgccccacagctgcaactgtaaggcgtttccatagatcagcttgcccaaagatggaacaatcgacccgacaatcgtattgtaccaccttgcgggcaggattgcaaacccaaaaggtgataccatgaaaaagaaacaaccaaatgcccgccatggccgggcggcagtttacgcccggtattca

SEQ ID NO: 15535 - DNA, 260 bp, Unknown; identical to SEQ ID NO: 13821
  Description of Unknown: LeftRegion for integrase B2536 sequence

SEQ ID NO: 15536 - DNA, 260 bp, Unknown
  Description of Unknown: LeftRegion for integrase B2537 sequence
tcgtatatgccgctattccagagagaacttgatatatcctccgaatggttggaaaactcatacacatacacgccaagaccatataagccttcaaagcgcgccctccaaatggaagtggacatcaaagaaactgctcacaagtacataacaaacgaaaaagccctcctgctggacgcagaagggcgtaacgggtaacagatatgtcagtagatattaaatggcaggtgccaaaggcacagccggaggccagcgaactggcc

SEQ ID NO: 15537 - DNA, 260 bp, Unknown
  Description of Unknown: LeftRegion for integrase B2538 sequence
atccgacagttttttgattttggcaaagatatccgaccattcgctcgtagtcatacggcatggctcctttctcaaatttactgtcggcagcaactgaattatatcaaatacgcacccgcttttcagggattcgtagaattataccgaaaatcggaaaaatattgcgaattttgaagaagataatcgtgaggtgatggttgatggcccgaaaaaagaatatcgctgcgggtcaagatgccgtcatttacgcccgctactct

SEQ ID NO: 15538 - DNA, 260 bp, Unknown
  Description of Unknown: LeftRegion for integrase B2539 sequence
tctttccatgcgtcgcctgcccttacagcatagcacgctttttggatatgggcaagcaaaaaccccggcactggtacgatgcagcgccggggaaacatggagtgcagcacaaaaccggacaaagagaattttatgcttgcaggggtcagtataccacactccctgcatatgggcaaatcgcccggaaaggaagtgttttcatgccccgcaaaaaagctcctgcggccgaggcgccgcgcctggtggcttactaccgttac

SEQ ID NO: 15539 - DNA, 260 bp, Unknown
  Description of Unknown: LeftRegion for integrase B2540 sequence
tgcgcattgattggtcttgcaatcactgttttaggtgctgcaatcgtcggtgttccaattgctatattgggcgctttgcttgccgtaggtgcaaggggaaggaaatagaaaaccctgcgcggcttcttggcagtcggcgcgcagggcaagtgcaaagaacgaagcgcattagcgcactcgctctaaggggtgattttagcatggtgaagaacagagcagccatatacgcgcgcttcagctcgcacaatcagcgctctgag

SEQ ID NO: 15540 - DNA, 260 bp, Unknown
  Description of Unknown: LeftRegion for integrase B2541 sequence
aacgatagaaatatctatgaatataaattacagtattttgccaataaaacacggaaagaaacagaattacttttttgtagtaacaacactataatccagccatttggaaatgtagaatttcctatataaatatgcagctccaaaagagctgcatatttcaccttactctatacaaacatacgttttaggagagatgagaaatgtcagttgctgtttactgtcgtgtcagttctgaagaacaagctgaacgtggaacaatc

SEQ ID NO: 15541 - DNA, 260 bp, Unknown
  Description of Unknown: LeftRegion for integrase B2542 sequence
tgttctgtttatccgattcaccttacccaaaagtagagatttccctaacagaaaaagagaaaatccttattgacgcataccgtgctgctaatgacatgggacagttgaacataatctatgtctgcctggatgaaatgaaaaaagcaaaaggggacaacgaaagtgccgtgtgattgattttgtagagtggaggaagaaccatgtatgaggatataaaaacagcctgcctatatgtcagattctcaagccataaccagact

SEQ ID NO: 15542 - DNA, 260 bp, Unknown; identical to SEQ ID NO: 14174
  Description of Unknown: LeftRegion for integrase B2543 sequence

SEQ ID NO: 15543 - DNA, 260 bp, Unknown; identical to SEQ ID NO: 13018
  Description of Unknown: LeftRegion for integrase B2544 sequence

SEQ ID NO: 15544 - DNA, 260 bp, Unknown
  Description of Unknown: LeftRegion for integrase B2545 sequence
acaggtcttttgattgtgtgcagcgactcaatgcaaaagaaaatcgacagagcggatgccctgaatattccaatcgtttcggagcagcaatggtttgaactcatgccggaacttgaggccgctggaatgtggaacggaaagccaatttcattcgcggatgacgatggtatctaccgttttgatgtgggtggtgatggataatggcaaaaaagaagaagcccgccgggggcattgccgtcatctatgcccgctactcatcc

SEQ ID NO: 15545 - DNA, 260 bp, Unknown
  Description of Unknown: LeftRegion for integrase B2546 sequence
gatggcatcgctcatgtatgaacaaagcagtgccaaactagaccttgcagtatcaatcgcaaagaaactggcacaatcgatggtcactcaggatgaatttaatccggattacttctctgccctcgttgcgtatatcacccttggggcacagggcagggtcgtactccataccaaaaccgaaacggaggtcacgatggacgatggaagtaactaagattccaaaaaaaattgtcactgtcattgagccaaaacgctctatg

SEQ ID NO: 15546 - DNA, 260 bp, Unknown
  Description of Unknown: LeftRegion for integrase B2547 sequence
tatttcagaggatttaaaaaaagagttccaggaagtatacaaaagaggagtatacaaagaactccataagagaaacttcttatcagataaacaattaaacgaattacttaaatcaaaataaaaagtaagttgttcagcacactgtttagtggtataataaatatcattattgcgctgtgctatttttttggaggtagcacatgaagaaattaaaagtagcagcatatgcgagggtatcaacagacaaggatgatcaaatc

SEQ ID NO: 15547 - DNA, 260 bp, Unknown
  Description of Unknown: LeftRegion for integrase B2548 sequence
gattgcgtagaagcaggcattaaagaaataaatgacgaggagagattgcctgcgcagacgatacttagaagacaagcgtcaaatggctgttaggtaaccatgcatttccgtgagcagagagacgagaaaattgaaagtagcgtagcggacatgtagttggcagtctttcagagaatgcataacaagggggaaaagctgttatgaaaagagttatttgtctgtacagagtatcgacgaaaggacaggtcgataaggatgat

SEQ ID NO: 15548 - DNA, 260 bp, Unknown
  Description of Unknown: LeftRegion for integrase B2549 sequence
aaaatagattcgaatctctaaaggctattctcccctattgtgacgaagctgtcttttttgataacgacaacggctttgcagaaatcgccgagtacaaaaatggagaattaattttaaaaggttctgaacatcctgaatggattaaagagtttcacgaatacattacaaaataaaaaaacgcctaaaacggaggtatatttgtgagcaagcataaattagcggtggtttatgcccgttattcaagtcatagacaaggagaa

SEQ ID NO: 15549 - DNA, 260 bp, Unknown; identical to SEQ ID NO: 15194
  Description of Unknown: LeftRegion for integrase B2550 sequence

SEQ ID NO: 15550 - DNA, 260 bp, Unknown
  Description of Unknown: LeftRegion for integrase B2551 sequence
cctgaccgccaacgtccaaaagcgggaggaggaaatgtccgccgaggctgactcctcatcccctgccccaaagcagcatccgggaaaagaaaaggtaggctgatcttctggcgccgccttttcacctgatgttcacttgaacaccaaaagccccggcaggcacacacccgccggggcttactttataaagggaatttcttatgaagaatgaacgcaccatgctccccgccgtcgcttactatcgctactcgccgggcggc

SEQ ID NO: 15551 - DNA, 260 bp, Unknown
  Description of Unknown: LeftRegion for integrase B2552 sequence
taccaattggctataaagttgaactagcaaaggcagctaaaagcaaaatattaaaattaaaagaaaatgatgatgtagaaaaacagaatatttggttagctattttcaatcaaattaatcactaataaaatttgcagctctttcggagctgcaaattttgacctactatatacaaacatacgtttaaggagagatcgccaatgccagtagctgtctattgtcgtgtcagctctgaagaacaagctgaacgtggaacaatc

SEQ ID NO: 15552 - DNA, 260 bp, Unknown; identical to SEQ ID NO: 15498
  Description of Unknown: LeftRegion for integrase B2553 sequence

SEQ ID NO: 15553 - DNA, 260 bp, Unknown; identical to SEQ ID NO: 14669
  Description of Unknown: LeftRegion for integrase B2554 sequence

SEQ ID NO: 15554 - DNA, 260 bp, Unknown
  Description of Unknown: LeftRegion for integrase B2555 sequence
cattgtacaatctggcgaaaaatctgactgcacaatcgcacgacaataattatgcggtattgccttgcaaaaaaattatccatacagaaaagtacggaaagcgagaatattgtaccttaaaaagacttgcaaagcgcgggcagctgatgtataataaagatgtcgaataatcggttgtccatgtttgaaggaggtttataatggcaggacaacccaagtacaatacagcattatatcttcgtttatcaaaggacgacggc

SEQ ID NO: 15555 - DNA, 260 bp, Unknown; identical to SEQ ID NO: 15540
  Description of Unknown: LeftRegion for integrase B2556 sequence

SEQ ID NO: 15556 - DNA, 260 bp, Unknown; identical to SEQ ID NO: 13967
  Description of Unknown: LeftRegion for integrase B2557 sequence

SEQ ID NO: 15557 - DNA, 260 bp, Unknown
  Description of Unknown: LeftRegion for integrase B2558 sequence
tattctgtttatctgattcaccttacccgaaagtagagatttccctaactgaaaaagagaaaatccttattgacgcataccgtgctgctgatgacatgggacagttgaacataatctatgtctgcctggatgaaatgaaaaaagcaaaaggggacaacgaaagtgccgtgtgattgattttgtagagtggaggaagaaccatgtatgaggatataaaaacagcctgcctatatgtcagattctcaagccataaccagact

SEQ ID NO: 15558 - DNA, 260 bp, Unknown
  Description of Unknown: LeftRegion for integrase B2559 sequence
ccgcatgatgagcctgccgagtcttccgatgccgaaaaactccgcactgagaacgcggcccttcgcgcgcagcttgcccagcagcagaaatccctgcgtatgcaccggcttgtgacgctcatcctcttgggcattctttcgctgtgtgcccttgtgcttgtggccgatgtgctcatcccatcaatcggctggattcgcacatgaaaattaccgccccggcccgatcagccagagcggtatctttggaggcttttgtggat

SEQ ID NO: 15559 - DNA, 260 bp, Unknown
  Description of Unknown: LeftRegion for integrase B2560 sequence
atttatatgcttataggcgtatgcagcattcttttgtgcgccgttgtatggtacgtcatatttgacattcagatagataccgccggtattttccgctcggctgggacaagcatttttgcgggcgtcctcgccctgatactgaacgcctccgtcgcaaccatcatttacgcgttcaaaagcattcacaagtggagaaagaaatgagactgacacacggagcgtacattcttgctcgcttctcaaccgacaatcaagaggtg

SEQ ID NO: 15560 - DNA, 260 bp, Unknown
  Description of Unknown: LeftRegion for integrase B2561 sequence
gagcctgccgagcctgctgatactgccgatgctgaaaaactccgcgccgagaccgcggcgcttcgtgcgcagcttgcccagcagcagaagtccctgcgcatgcaccggcttgtgacgctcatcctcttgggtattcttttgctgtgtgcccttgcgcttgtggccgacgtgctcatcccatcgatcggctggattcgcgcatgaaaattaccgccccggcccgatcagccggagcggtatctttggaggcttttgtggat

SEQ ID NO: 15561 - DNA, 260 bp, Unknown
  Description of Unknown: LeftRegion for integrase B2562 sequence
accttgtaagagatgctactaaaatagtaaagctccgcaggctacattttgaccagaacaaaataaaaaaaaacgcccccggtgttggcgcaccgagagcgttttcatagatcagcttgcccacaaaagtggatacaatcgacccgacaatcgtattgtaacaccttgcgggcaggattgcaaacccaaaaggtgataccatgaaaaagaagcaaccaaatgcccgccatggccgggcggcgatttacgcccggtattcg

SEQ ID NO: 15562 - DNA, 260 bp, Unknown
  Description of Unknown: LeftRegion for integrase B2563 sequence
atttatatgctcataggcgtatgcagtattcttttgtgcgccgttgtatggtacgtcatatttgacatccaggtagagaccgccggtattttccgctcagctgggacaagcatttttgcgggcgttctcgccctgatactgaacgcctccgtcgcaaccatcatttacgcgttcaaaagcatccgcaaagggagaaagaaatgagactgacacacggagcgtacattcttgctcgcttctcaaccgacaatcaagaggtg

SEQ ID NO: 15563 - DNA, 260 bp, Unknown
  Description of Unknown: LeftRegion for integrase B2564 sequence
tggatatactaatgagcggattgtacaacatcctcgacgatcaaaagcgccgcgagctttccgctgccatgaccacacttgtggagaggcagcgagaaagagaggaggcggagagcgcggaaaaggatgcagacaaagaccaagagcccacagagacgaccgacaagcaggcaagtgcatcggcagtgtaaggcgctgtaatgcgcctaaaacaacaggagccccgccgatgtgataccggtggggctcttgaatactat

SEQ ID NO: 15564 - DNA, 260 bp, Unknown; identical to SEQ ID NO: 13442
  Description of Unknown: LeftRegion for integrase B2565 sequence

SEQ ID NO: 15565 - DNA, 260 bp, Unknown
  Description of Unknown: LeftRegion for integrase B2566 sequence
gatatctcaattgcacgcatggaaaaccagatcaatcaggagctatccagaccggtgctggaaccggagcgcctccaggacatgatcttccaactggccataaagaaatatgaagcgatacggagcaataattccatacagagcaatcaagtggacgcggacagcgtccattttgatatttgaaaaaggagcgaacgaaaatggcaaaaccagtacgagtcattcccgccaagcccaaagcggagcttgaaagagagctg

SEQ ID NO: 15566 - DNA, 260 bp, Unknown
  Description of Unknown: LeftRegion for integrase B2567 sequence
ccgcatgacgagcctgccgagccttccgattctgaaaaactcctcgccgagactgcggcgcttcgtgcgcagcttgcccagcagcagaagtccctgcgcatgcaccggcttgtgacgctcatcctcttgggtattcttttgctgtgtgcccttgcgcttgtggccgacgtgctcatcccatcgatcggctggatccgcacatgaaaattaccgccccggcccgatcagccagagcggtatctttggaggcttttgtggat

SEQ ID NO: 15567 - DNA, 260 bp, Unknown
  Description of Unknown: LeftRegion for integrase B2568 sequence
atttatatgcttatcggcgtttgcagtattcttttatgtgccgttgtatggtacgtcatatttgacatccaggtagagaccgccggtattttccgctcggctgggacaagcatttttgcgggcgtcctcgccctgatactgaacgcctccgtcgcaaccatcatttacgcgttcaaaagcatccgcaaagggagaaagaaatgagactgacacacggagcgtacattcttgctcgcttctcaaccgacaatcaagaggtg

SEQ ID NO: 15568 - DNA, 260 bp, Unknown
  Description of Unknown: LeftRegion for integrase B2569 sequence
gagcctgccgagcctgccgagccttccgattctgaaaaactccgcgccgagaacgcggcccttcgtgcgcagcttgcccagcagcagaaatccctgcgtatgcaccggcttgtgacgctcatcctcttgggcattctttcgctgtgtgcccttgtgcttgtggccgatgtgctcatcccatcaatcggctggattcgcacatgaaaattaccgccccggcccgatcagccagagcggtatctttggaggcttttgtggat

SEQ ID NO: 15569 - DNA, 260 bp, Unknown
  Description of Unknown: LeftRegion for integrase B2570 sequence
accagcaaagaagtcaccgaggcagactacacggtgatcagcgaatatgatcccgaaaaagtaaagaaattcgtcacgaaggtcattgtgctaaaaggcacggtgaccttcgtgttctataacggcgtggagatcacgctggaatacagcaacggcgctccgggcaacaagcccggctggaacgtaaaggaggcataaccatggcaccggcattacgaagagtagtacgcaccatgccgcagatcgcggtcgtgcagatc

SEQ ID NO: 15570 - DNA, 260 bp, Unknown
  Description of Unknown: LeftRegion for integrase B2571 sequence
atttatatgctcataggcgtatgcagcattcttttgtgcgccgttgtatggtacgtcatatttgacattcaggtagagaccgccggtattttccgctcggctgggacaagcatttttgcgggcgtcctcgccctgatactgaacgcctccgtcgcaaccatcatttacgcgttcaaaagcatccgcaaagggagaaagaaatgagactgacacacggagcgtacattctcgcgcgcttctcaaccgacaatcaagaggtg

SEQ ID NO: 15571 - DNA, 260 bp, Unknown
  Description of Unknown: LeftRegion for integrase B2572 sequence
cttgtgtaaaaacaaaaattgaaattacaaaacattttcccgataaaggcaaaacgctgctagaggttgttgaagaattagcaattaaaatcgcaatgaaagaaaatgattttacagattcaccgacttgaaagaagcctgcatatatggtaaaattttccataggaaatgcaggcttttctaaaaaaggagggtagaggatggaaaagcctatatctgctttaaatgtcgtaagagcgggcctttatatgcgattgagt

SEQ ID NO: 15572 - DNA, 260 bp, Unknown; identical to SEQ ID NO: 13476
  Description of Unknown: LeftRegion for integrase B2573 sequence

SEQ ID NO: 15573 - DNA, 260 bp, Unknown
  Description of Unknown: LeftRegion for integrase B2574 sequence
atttatatgcttatcggcgtttgcagtattcttttgtgcgccgttgtatggtacgtcatatttgacatccaggtagagaccgccggtattttccgctcggctgggacaagcatttttgcgggcgtcctcgccctgatactgaacgcctccgtcgcaaccatcatttacgccttcaaaagcattcacaaagggagaaagaaatgagactgacacacggagcgtacattcttgctcgcttctcaaccgacaatcaagaagtg

SEQ ID NO: 15574 - DNA, 260 bp, Unknown
  Description of Unknown: LeftRegion for integrase B2575 sequence
ccgcctgccgagcctgccgagccttccgatgctgaaaaactccgcgccgagaacgcggcccttcgcgcgcagcttgcccagcagcagaagtccctgcgcatgcaccggcttgttacgctcatcctcttgggcattctttcgctgtgtgcccttgtgcttgtggccgatgtgctcatcccatcaatcggctggattcgcacatgaaaattaccgccccggcccgatcagccagagcggtatctttggaggcttttgtggat

SEQ ID NO: 15575 - DNA, 260 bp, Unknown; identical to SEQ ID NO: 15317
  Description of Unknown: LeftRegion for integrase B2576 sequence

SEQ ID NO: 15576 - DNA, 260 bp, Unknown; identical to SEQ ID NO: 15317
  Description of Unknown: LeftRegion for integrase B2577 sequence

SEQ ID NO: 15577 - DNA, 260 bp, Unknown
  Description of Unknown: LeftRegion for integrase B2578 sequence
ccgcatgacgagcctgccgagacttccgatgctgaaaaactccgtgccgagaccgcagcgcttcgcgcgcagcttgcccagcagcagaaatccctgcgcatgcaccggcttgtgacgctcatcctcttgggtattcttttgctgtgcgcccttgcgcttgtggccgacgtgctcatcccatcgatcggctggatccgcacatgaaaattaccgccccggcccgatcagccggagcggtatctttggaggcttttgtggat

SEQ ID NO: 15578 - DNA, 260 bp, Unknown; identical to SEQ ID NO: 15566
  Description of Unknown: LeftRegion for integrase B2579 sequence

SEQ ID NO: 15579 - DNA, 260 bp, Unknown; identical to SEQ ID NO: 15577
  Description of Unknown: LeftRegion for integrase B2580 sequence

SEQ ID NO: 15580 - DNA, 260 bp, Unknown
  Description of Unknown: LeftRegion for integrase B2581 sequence
atttatatgctcatcggcgtatgcagtattcttttatgtgccgttgtgtggtacgtcatttttgacattcaggtagagaccgccgggattttccgctcggcggggacaagcgtttttgcgggcgtcctcgccctgatactgaacgcagccgtcgcaactatcatttacgcgttcaaaagcatccgcaaagggagaaagaaatgagactgacacacggagcgtacattcttgcgcgcttctcaaccgacaaccaggaggta

SEQ ID NO: 15581 - DNA, 260 bp, Unknown
  Description of Unknown: LeftRegion for integrase B2582 sequence
gagcctgccgagcctgccgagccttccgatgctgaaaaactccgcgccgagaacgcggcccttcgcgcgcagcttgcccagcagcagaaatccctgcgtatgcaccggcttgtgacgctcatcctcttgggtattctttcgctgtgtgcccttgtgcttgtggccgatgtgctcatcccatcaatcggctggatccgcacatgaaaattaccgccccggcccgatcagccagagcggtatctttggaggcttttgtggat

SEQ ID NO: 15582 - DNA, 260 bp, Unknown
  Description of Unknown: LeftRegion for integrase B2583 sequence
atttatatgctcataggcgtatgcagtattcttttgtgcgccgttgtatggtacatcatatttgacatccagatagagaccgccggtattttccgctcggctgggacaagcatttttgcgggcgtcctcgccctgatactgaacgccgccgtcgcaaccatcatttacgccttcaaaagcattcacaaggggaaaaagaaatgagactgacacacggagcgtacattctcgcgcgattttcaacagacaaccaagaagtg

SEQ ID NO: 15583 - DNA, 260 bp, Unknown
  Description of Unknown: LeftRegion for integrase B2584 sequence
ccgcctgccgagcctgccgagccttccgatgctgaaaaactccgtgccgagaacgcagcccttcgcgcgcagtttgcccagcagcagaagtccctgcacatgcaccggcttgtgacgctcatcctcttgggtattcttttgctgtgtgcccttgcgcttgtggccgatgtgctcatcccatcgatcggctggatccgcacatgaaaattaccgccccggcccgatcagccggagcggtatctttggaggcttttgtggat

SEQ ID NO: 15584 - DNA, 260 bp, Unknown; identical to SEQ ID NO: 13964
  Description of Unknown: LeftRegion for integrase B2585 sequence

SEQ ID NO: 15585 - DNA, 260 bp, Unknown
  Description of Unknown: LeftRegion for integrase B2586 sequence
atttatatgctcataggcgtatgcagtattcttttatgtgccgttgtttggtacgtcatatttgacatccagatagagaccgccggtattttccgctcggctgggacaagcatttttgcgggcgtcctcgccctgatactgaacgcctccgtcgcaaccatcatttacgccttcaaaagcattcacaaggggaaaaagaaatgagactgactcacggggcgtacattctcgcccggttctctacggacaatcaagaggtg

SEQ ID NO: 15586 - DNA, 260 bp, Unknown
  Description of Unknown: LeftRegion for integrase B2587 sequence
atttatatgctcataggcgtatgcagtattcttttgtgcgccgttgtatggtacgtcatatttgacatccaggtagagaccgccggtattttccgctcggctggaacaagcatttttgcgggcgtcctcgccctgatactgaacgcctccgtcgcaaccatcatttacgccttcaaaagcattcacaaggggaaaaagaaatgagactgacacacggagcgtacattctcgcgcgattttcaacagacaaccaagaagtg

SEQ ID NO: 15587 - DNA, 260 bp, Unknown
  Description of Unknown: LeftRegion for integrase B2588 sequence
gagcctgccgagcctgccgagccttccgatgctgaaaaactccgcgccgagaacgcggcccttcgcgcgcagcttgcccagcagcagaaatccctgcgtatgcaccggcttgtgacgctcatcctcttgggcattctttcgctgtgtgcccttgtgcttgtggccgacgtgctcatcccatcaatcggctggattcgcacatgaaaattaccgccccggcccgatcagccagagcggtatctttggaggcttttgtggat

SEQ ID NO: 15588 - DNA, 253 bp, Unknown
  Description of Unknown: LeftRegion for integrase B2589 sequence
cgatccttcgtccgacgcttatctgactaccgaaaaggacggcaccgttatcatggaaggctttggctcattccctgcttatgctcacaacggcatggttcttgtgcagaccgacaaccttccccaggaagtaatcgacctgttcaatgccatgtaaacctccgcattctctttctgcaaaggtggtatctctatgaaaaaacagccgaccggtggaaaccggcttgttgcctactaccgttactccggcggt

SEQ ID NO: 15589 - DNA, 260 bp, Unknown
  Description of Unknown: LeftRegion for integrase B2590 sequence
atttatatgctcataggcgtatgcagcattcttttatgcgcggttgtatggtacgtcatatttgacatccaggtagagaccgccggtattttccgctcagctgggacaagcatttttgcgggcgtcctcgccctgatactgaacgcctccgtcgcaaccatcatttacgccttcaaaagcatccgcaaagggagaaagaaatgagactgacacacggagcgtacattctcgcgcgtttctcaaccgacaatcaagaggtg

SEQ ID NO: 15590 - DNA, 260 bp, Unknown
  Description of Unknown: LeftRegion for integrase B2591 sequence
ccgcatgacgagcctgccgagccttccgatgctgaaaaactccgcgccgagaacgcggcgcttcgtgcgcagcttgcccagcagcagaaatccctgcgtatgcaccggcttgtgacgctcatcctcttgggcattctttcgctgtgtgcccttgtgcttgtggccgatgtgctcatcccatcaatcggctggatccgcacatgaaaattaccgccccggcccgatcagccggagcggtatctttggaggcttttgtggat

SEQ ID NO: 15591 - DNA, 260 bp, Unknown; identical to SEQ ID NO: 15566
  Description of Unknown: LeftRegion for integrase B2592 sequence

SEQ ID NO: 15592 - DNA, 260 bp, Unknown; identical to SEQ ID NO: 13552
  Description of Unknown: LeftRegion for integrase B2593 sequence

SEQ ID NO: 15593 - DNA, 260 bp, Unknown
  Description of Unknown: LeftRegion for integrase B2594 sequence
catcatgtaaagcagattttactatcttcctttgccaacaatacggcaaaaaatagctccggcgacatccttgcaatccctcccgaacagagggataataatagtgggggtagtccctatgtaccttgaaaacttcatattccccgcgtattgattgcgttttttcattgacccatcgacaaatgaaaggacggatcaatatgatgatggaaaacagaatgatgacaggtaatcgagtcgattgcctataccgcgtgtcc

SEQ ID NO: 15594 - DNA, 260 bp, Unknown
  Description of Unknown: LeftRegion for integrase B2595 sequence
accaggcgtcagcggctgcaaatattaccagtatttacagccaattaacaatctccacacaaccacgcatagagagctgttattaaataattataacattatttaaacagctctgctactgcatttgcattacagagctatttttatttttatttttaaaatactacccaaattccatatgaatttcaggaggttattttatgtttaattttaaaaataatgatgaaattattgcagtatactgccgcgtatcctcggat

SEQ ID NO: 15595 - DNA, 260 bp, Unknown
  Description of Unknown: LeftRegion for integrase B2596 sequence
atacttttgatccgtcgtctgacgcttatctgactgccgaaaaggacggcaccgttatcatggaaggctttggctcattccctacttatgctcacaaaggtatggttctcatgcagaccgacaaccttcctcaggaagtaatcgacctgttcaatgccatgtaaacctccgcattctctttctgcaaaggtggtatctctatgaaaaaacagccgaccggtggaaaccggcttgttgcctactaccgctacagcggcggc

SEQ ID NO: 15596 - DNA, 260 bp, Unknown
  Description of Unknown: LeftRegion for integrase B2597 sequence
gatacacctcccgaaacagatactcttatggttgtcattgttgatgacgaagaaggatttgttaagaaaatcagtattgatgaagatactgtgacccttcgttcttttaacccacactatcctccccgtgtttttggcggtgttgaaattggacgattgcgctttgtcggtagagtcatggagctaaaaaggagatttgcatgaaaaaatttccaatcgacctttcctgtctgacagaggaagaaatctctcaatttcag

SEQ ID NO: 15597 - DNA, 260 bp, Unknown
  Description of Unknown: LeftRegion for integrase B2598 sequence
gcgcaaatcctcgataatatattgacagagcaagcggaaaacgatacttctattgatcccgaacgtgcggaaagtttaagaaatgaactgcgcgggataatgtccggttataactctcttaccgacgaagggaaagaatttgtaaaacagtccttaaaaactgcgcttgccgcttattctaaaggcgcggaggaacagtaatgccggaagcattaaacgcggtcatatacgcccgctattcctccgatcgtcagacagaa

SEQ ID NO: 15598 - DNA, 260 bp, Unknown
  Description of Unknown: LeftRegion for integrase B2599 sequence
ttcttttgggtctaagtgaacttagaaaaccgcagacttgtacactctctgaggaagaaatgcttttgctggaagcctaccgttcagccagcacccagggacgttttcatatcattcaggtttgcatgaacgaaaaaacagccgcacccaaaggggaggtagttgccgggtgattgacttagcggaatggaggaagaaccatgtatgaggatataaaaacagcctgcctttacgtcagattttccagccataatcagacg

SEQ ID NO: 15599 - DNA, 260 bp, Unknown; identical to SEQ ID NO: 13129
  Description of Unknown: LeftRegion for integrase B2600 sequence

SEQ ID NO: 15600 - DNA, 260 bp, Unknown; identical to SEQ ID NO: 15566
  Description of Unknown: LeftRegion for integrase B2601 sequence

SEQ ID NO: 15601 - DNA, 260 bp, Unknown; identical to SEQ ID NO: 15593
  Description of Unknown: LeftRegion for integrase B2602 sequence

SEQ ID NO: 15602 - DNA, 260 bp, Unknown
  Description of Unknown: LeftRegion for integrase B2603 sequence
gatacaccccctgaaacagatactcttatggttgttattgttgatgacgaagaaggatttgttaagaaaatcagcattgatgaagatactgtgacccttcgctctttcaatccacactatcctccccgtgtttttggcggtgttgaaattggacgattgcgctttgtcggtagagtcatggagttaaaaaggagatttgcatgaaaaaatttccaatcgacctctcctgtttgacagaggaagaaatctctcaatttcag

SEQ ID NO: 15603 - DNA, 260 bp, Unknown
  Description of Unknown: LeftRegion for integrase B2604 sequence
aatccaaaagggttattttgagagggctatcagtgtaagggctgatagccctattttttttttgtctaaatttcaggagatttctggttattactcaaataataagtaatatgggtttacatagtatcaaaaagatgtataataagtatgagatattatgacaaacctgtacaaattctaatcaacaggaggaaaacaggatggtacaggagaaattaagagcggtattttatgcaagggtatctacagaggaagagaga

SEQ ID NO: 15604 - DNA, 260 bp, Unknown
  Description of Unknown: LeftRegion for integrase B2605 sequence
gagcctgccgagcctgccgagccttccgatgctgaaaaactccgcgccgagaacgcggcccttcgtgcgcagcttgcccagcagcagaaatccctgcgtatgcaccggctcgtgacgctcattctcttgggcattctttcgctgtgtgcccttgtgcttgtggccgatgtgctcatcccatcgatcggctggattcgcacatgaaaattaccgccccggcccgatcagccggagcggtatctttggaggcttttgtggat

SEQ ID NO: 15605 - DNA, 260 bp, Unknown
  Description of Unknown: LeftRegion for integrase B2606 sequence
ataatccaaaagggttattttgagagggctatcagtgtaagggctgatagccctattttttttttgtctaaatttcaggagatttctggttattactcaaataatatgtaatgggtttacatagtatcaaaaagatgtataataagtatgagatattatgacaaacctgtacaaattctaatcaacaggaggaaaacaggatggtacaggagaaattaagagcggtattttatgcaagggtatctacagaggaagagaga

SEQ ID NO: 15606 - DNA, 260 bp, Unknown
  Description of Unknown: LeftRegion for integrase B2607 sequence
gcttcgcaatttggaaaacatctgcaagctaaaatccaagagcaagtgaacagcgaaagcaattcttctcttttacttgaacagatgaacgaattatttaacaatgtttccaaattgtccgaaactgaacaaaaggctttttataccggacttgtaaaagggatagagcgttgggaaaatgaacagaagggggaataataatgccggaagcattaaacgcggtcatatacgcccgctattcctccgatcgtcagacagaa

SEQ ID NO: 15607 - DNA, 260 bp, Unknown
  Description of Unknown: LeftRegion for integrase B2608 sequence
cctccagccgtttccaactggaggggtctgccccgtcgccaaaaggtaaggataaaaacaagaaggtttctttccatgcgttgcctgcccttacagcatagcacgctttttggatatgggcaagcaaaagccccggcgctggtacgatgcagcgccggggaaacatggagtacagcacaaaaccggacaaaggaaattttatgcttgcaggggtcagtataccacactccctgcatatgggcaaccgcccggaaggaagt

SEQ ID NO: 15608 - DNA, 260 bp, Unknown
  Description of Unknown: LeftRegion for integrase B2609 sequence
atttatagactcataggcgtatgcagtattcttttatgtgccgttgtatggtacgtcatcttcgacattcaggtagagaccgccgggattttccgctcggcggggacaagcatttttgcgggcgttctcgccctgatactgaacgccgccgttgcaaccatcatttacgccttcaagagcattcacaaggggaaaaagaaatgagactgacacacggagcgtacattctcgcgcgcttctcaaccgacaatcaagaggtg

SEQ ID NO: 15609 - DNA, 260 bp, Unknown
  Description of Unknown: LeftRegion for integrase B2610 sequence
gacacacctcctgaaacagatactcttatggttgtcattgttgatgacgaagaaggatttgttaagaaaatcagtattgatgaagatactgtgacccttcgctcttttaatccacactatcctccccgtgtttttggtggtgttgaaattggacgattgcgctttgtcggtagagtcatggagttaaaaaggagatttgcatgaaaaaatttccaatcgacctctcctgcctgacagaggaagaaatctctcaatttcag

SEQ ID NO: 15610 - DNA, 260 bp, Unknown
  Description of Unknown: LeftRegion for integrase B2611 sequence
ttataatccaaaagggttattttgagagggctatcagtgtaagggctgatagccctattttttttgtctaaatttcaggagatttctggttattactcaaataataagtaatgggtttacatagtatcaaaaagatgtataataagtatgagatattatgacaaacctgtacaaattctaatcaacaggaggaaaacaggatggtacaggagaaattaagagcggtattttatgcaagggtatctacagaggaagagaga

SEQ ID NO: 15611 - DNA, 260 bp, Unknown; identical to SEQ ID NO: 15585
  Description of Unknown: LeftRegion for integrase B2612 sequence

SEQ ID NO: 15612 - DNA, 260 bp, Unknown
  Description of Unknown: LeftRegion for integrase B2613 sequence
atttatatgctcataggcgtatgcagtattcttttgtgcgccgttgtatggtacgtcatatttgacatccaggtagagaccgccggtattttccgctcggctggaacaagcatttttgcgggtgtcctcgccctgatactgaacgcctccgtcgcaaccatcatttacgccttcaagagcattcacaaggggaaaaagaaatgagactgacacacggagcgtacattctcgcgcgattttcaacagacaaccaagaagtg

SEQ ID NO: 15613 - DNA, 260 bp, Unknown
  Description of Unknown: LeftRegion for integrase B2614 sequence
tgagttcctatgcaatgcttcaaaaatagatcaggttgcaaggcacatttctctccgaaaaccgatgaattccctggcaattctggccgttgtgtgagataatgggtacggcgaaaaaagccaggaaccttgaaaatcgaataggatgaattgagtgttcgccctctcacacaaaacaaaatgagaggacggatatcaaaatggctgaaagagtttattgtttgtacagagtttccaccagtaagcaggtcgatcatgat

SEQ ID NO: 15614 - DNA, 260 bp, Unknown; identical to SEQ ID NO: 13711
  Description of Unknown: LeftRegion for integrase B2615 sequence

SEQ ID NO: 15615 - DNA, 260 bp, Unknown
  Description of Unknown: LeftRegion for integrase B2616 sequence
acccaaccagaaaggaaagccagcatggagccacagctgcatccgaaatatccttaccaaccctgtttaccttggggacaaggagtttcctgctctggtgacacgggaactgtttgcacaggtacagagtaggctggaagaaaccagccggatgaaacgggaaagtcagaccagggaattagccagaaaggagggattacatgccaagggcggaacgaatcgtggaggtcatcccggccacctggaacccggcggatgag

SEQ ID NO: 15616 - DNA, 109 bp, Unknown
  Description of Unknown: LeftRegion for integrase B2617 sequence
cgattgggtgtccgccctctcacacaaaaacatgagaggacggatatcaatggctgaaagagtttattgtttatacagagtttccaccaacaagcaggtcgatcacgat

SEQ ID NO: 15617 - DNA, 260 bp, Unknown; identical to SEQ ID NO: 15377
  Description of Unknown: LeftRegion for integrase B2618 sequence

SEQ ID NO: 15618 - DNA, 260 bp, Unknown; identical to SEQ ID NO: 15566
  Description of Unknown: LeftRegion for integrase B2619 sequence

SEQ ID NO: 15619 - DNA, 260 bp, Unknown; identical to SEQ ID NO: 14974
  Description of Unknown: LeftRegion for integrase B2620 sequence

SEQ ID NO: 15620 - DNA, 260 bp, Unknown; identical to SEQ ID NO: 13013
  Description of Unknown: LeftRegion for integrase B2621 sequence

SEQ ID NO: 15621 - DNA, 260 bp, Unknown
  Description of Unknown: LeftRegion for integrase B2622 sequence
gagcctgccgagcctgccgcgcctcccgatgctgaaaaactccgcgccgagaacgcggcccttcgtgcgcagcttgctcagcatcagaagtccctgcgcatgcaccggcttgtgacgctcatcctcttgggcattcttttgctgtgtgcccttgcgcttgtggccgacgtgctcatcccatcaatcggctggattcgcacatgaaaattaccgccccggcccgatcagccagagcggtatctttggaggcttttgtggat

SEQ ID NO: 15622 - DNA, 260 bp, Unknown
  Description of Unknown: LeftRegion for integrase B2623 sequence
gagcctgccgagcctgccgatccttccgatgctgaaaaactccgcgccgagaccgcggcgcttcgtgcgcagcttgcccagcagcagaagtccctgcgcatgcaccggcttgtgacgctcatcctcttgggtattcttttgctgtgcgcccttgcgcttgtggccgacgtgctcatcccatcgatcggctggattcgcacatgaaaattaccgccccggcccgatcagccggagcggtatctttggaggcttttgtggat

SEQ ID NO: 15623 - DNA, 260 bp, Unknown
  Description of Unknown: LeftRegion for integrase B2624 sequence
aatatcattatacataatccaaacaacatggataaattcaataattattattcatctatcattattaatacaataaaaaaaatagcataaatataaaggtgtccgacaatggcaaatattgtcggacacctttatatttattgacttttttcagaaaatatgctataataaaagactatctacaaaaaggagacatataaatgagaatagcaatatattcaagaaaatcaaaatttacaggcaaaggtgaaagtattgga

SEQ ID NO: 15624 - DNA, 260 bp, Unknown
  Description of Unknown: LeftRegion for integrase B2625 sequence
aatatcattatacataatccaaacaacatggataaattcaatgattattattcatctgttattattgatacgataaaaaaaatagcataaatataaaggtgtccgacaatggcaaatattgtcggacacctttatatttattgacttttttcagaaaatatgctataatgaaagactatctacaaaaaggagacatataaatgagaatagcaatatattcaagaaaatcaaaatttacaggcaaaggtgaaagtattgga

SEQ ID NO: 15625 - DNA, 260 bp, Unknown
  Description of Unknown: LeftRegion for integrase B2626 sequence
caaaatatttaaacggtaaatttgcagtcaagccaacagataggggtatagcaatgatagcatcaatgaattaaaataaaaaattccccgctcgatgttgcagcaccgaacggggagagggatatgtataaaatacacacaccacagtaactgtattttatcatatcctgacgaaaaaatcaataggagtgataaaaaatatgcaaaccgccgtgatatacgcccggtattcgtccgacaagcagacggagcagtccatt

SEQ ID NO: 15626 - DNA, 260 bp, Unknown
  Description of Unknown: LeftRegion for integrase B2627 sequence
aatatcattatacataatccaaacaacatggataaattcaacaattattattcatctgtcattattgacacaataaaaaaaatagcataaatataaaggtgtccgacaatggcaaatattgtcggacacctttatatttattgacttttttcagaaaatatgctacaatgaaaaactatctacaaaaaggagacatataaatgagaatagcaatatattcaagaaaatcaaaatttacaggcaaaggtgaaagtattgga

SEQ ID NO: 15627 - DNA, 260 bp, Unknown
  Description of Unknown: LeftRegion for integrase B2628 sequence
aaggcatggtgcggcaaagccgataaacgagtttgatgaggaacttgtcggcaggttaataaagggagtgacgattaaagactatgtagtgaccttcgagttctataacggagttacaatcagtagggaatataccaacggaccgagcggaaaccaaaaaggatggaaagaaaaaaaacgattaaaggaggcacagacgaatggaagcagcaattgacactgtccaacaaccgagagtagtcagggtggtaagaaacgta

SEQ ID NO: 15628 - DNA, 260 bp, Unknown
  Description of Unknown: LeftRegion for integrase B2629 sequence
ccatgtcatcgctgccgataaaacgcaccatcggatggtgggccgtcaccagcgcatggacggggacttttggcttctttctttgcgcgtcgagcatcgccgggctgcgggcgacggcgctatgaaccggacggctatccaggattacacttttcttatgatacacttcttcaatctcttcataactcatcataaaccccatgccaaaagcaatctcatatatacgattttctacgaaaattcaatcagttggtgactct

SEQ ID NO: 15629 - DNA, 260 bp, Unknown
  Description of Unknown: LeftRegion for integrase B2630 sequence
ctgccatgaaagtcaatttttatgcccttattttatcaaattgttttcgtggtaccttttatctttctaattgtggataacaaaaaaagaacccaccaattgctgtcggtgagttctcataagaggttgtgataaccttaacgcaatcgtattatatcacaacctcttgttttggtataccccaaaaggaggttattattatggcattaacatacgttgtcgcctatgcgcgattttcttccgacaaccaacgcgaagaa

SEQ ID NO: 15630 - DNA, 260 bp, Unknown
  Description of Unknown: LeftRegion for integrase B2631 sequence
atacaaaagaaaaaatctatcatctgccgtttgatcagcagtatgaccgtatcgctattgatgccggaaaaggcgagtgctatacggcgaccgtcaaagaggcggaaaaactcggtttccggcgggctttccgccacagagcggccgagaaggcttgaagaaaaataagcagctttcaagcccacacgagggaataataaatgaaaaaagaaaaggcgaagacgcccgaaaataacagagcagccgtgtatgctcggtac

SEQ ID NO: 15631 - DNA, 260 bp, Unknown
  Description of Unknown: LeftRegion for integrase B2632 sequence
tattcgctgcaatacatcaacggtggcgaggaaaacccagaggttgaagtcgtttacctgatcgctgaatgtaaataaaaaatccgcccaggctgctacctgtgcggatcaaacgcaaggaaaatgcaaacaccactaagcactttccgcagtcagtatatcacaagctgcctgcgttgtaaagtcggaaaggattaagattgaacgctgtaatctatgcccgtttctcgtcgcacagccagcgggagcagtccatcgaa

SEQ ID NO: 15632 - DNA, 260 bp, Unknown
  Description of Unknown: LeftRegion for integrase B2633 sequence
atgaatgattccataatgcacgaaaagacatttaccataggtacggagataataaaaaaatataagggtgaaacttatcggttgcgagcagtttatggaggatatgagatggataatgagttttataaatctttatcagcagtggcctataaaattacgggacgaagaatatcgggtaaagaattttggggaatgtaaagatggaagagataaagtgtgccatatatacaagaaaatctacagacgaaggtttggaaaaa

SEQ ID NO: 15633 - DNA, 260 bp, Unknown
  Description of Unknown: LeftRegion for integrase B2634 sequence
tcgtggaacgccattatatcggcaatgtgccgatgaatacgctttttcagcggcttgtggaagaagaaattcgtaaaactgccgaatcgtatctcgccgctggctaattggacgttttactgcggaaaagggcttgcatcgtcacgcagcatccgctacaatgtgattgatgaggtctcttttccattatggaggtacacatggaaaaggacaaaaaagtaactgctttatactgccgactgtcaaaagatgacggttca

SEQ ID NO: 15634 - DNA, 260 bp, Unknown
  Description of Unknown: LeftRegion for integrase B2635 sequence
gcactggttctttgtgtgctgcttggatatatggggatccaccgcttttatgttggaaagataggcaccggcatcctttggttgttgactcttggatgtttcgggatcggctggatcgtcgacattgtgatgctctgctgcaataagttcgcagacaagagcggcgccatcatcggtttgccagaaacgaggtgatccggatggcaaaaaggataccagcggcagcgtcggattgtgatggaatgatcggcgtcatttat

SEQ ID NO: 15635 - DNA, 260 bp, Unknown
  Description of Unknown: LeftRegion for integrase B2636 sequence
ccatcgcggtcgcgcgcagtctgatccgccgcaaggatcggcaaatctccgtcctcgccgccctcgtcgccgtgctcaccatcgcgatcctgctcatcatcacctacgataagctcaacccggatataggatggttccgcagctccctttccatcactctgtccgctgccttcccgatttttttgtaaaggagatcaaaaatgccatttgtgaaaaccggcaccgttccacccgaaaacgccctaaacgccgttctgtat

SEQ ID NO: 15636 - DNA, 260 bp, Unknown
  Description of Unknown: LeftRegion for integrase B2637 sequence
ggcgtgtaccccattttttttgtttttcagttgctatttttatataagagatatataatagatacaaacggctagaaagcccttagagagcttttaagggttgagggtagagagttatacccctgagcgattaaagcggctcagaggggcaagagcggggctcaggcggggcaaaaaaataaactaaaggagtgtataggatggcttacaggaaagagcaggataccataggattaagagcggcgttttatgccagagta

SEQ ID NO: 15637 - DNA, 260 bp, Unknown
  Description of Unknown: LeftRegion for integrase B2638 sequence
ggctactggctataaaatgctggtagccctcattttttagttgtatctagtatataaggggtgtataatagataggaactgaaaacagcctaataaagccctctattttatcgagggtaaagaagtctacacctaatatataaaagtggctatatgaggcacacaggagctcacaggactattacaggagggtaaacaggatggcatataggaaaataacggatataagagatactattggtatgagagcggtattttat

SEQ ID NO: 15638 - DNA, 260 bp, Unknown
  Description of Unknown: LeftRegion for integrase B2639 sequence
aatatcattatacataatccaaacaacatggataaattcaatgattattattcatctgttattattgatacgataaaaaaaatagcataaatataaaggtgtccgacaatggcaaatattgtcggacacctttatatttattgacttttttcagaaaatatgctataatgaaaaactatctacaaaaaggagacatataaatgagaatagcaatatattcaagaaaatcaaaatttacaggcaaaggtgaaagtattgga

SEQ ID NO: 15639 - DNA, 260 bp, Unknown
  Description of Unknown: LeftRegion for integrase B2640 sequence
atttttatgctgctcggtgtttgcgctcttctgctcgtatcagtaattagctatatcgtcttcgacatacagatcacgaccgctgggcttttccggtcagcaaaaacaagcacgcttgcggtgttcctgggccttgtcgttctcgccgccgtcggcgccatcgggtacgccatttatacgatccacaaagggagaaagaaatgaagctgacacacggggcgtacattctcgcccggttctcgacggacaatcaagaggta

SEQ ID NO: 15640 - DNA, 260 bp, Unknown
  Description of Unknown: LeftRegion for integrase B2641 sequence
gatacacctcccgaatcagatactcttatggttgtcattgttgatgacgaagaaggatttgttaagaaaatcagcattgatgaagatactgtgacccttcgctcttttaacccacactatcctccccgtgtttttggcggtgttgaaattggacgattgcgctttgtcggtagagtcatggagctaaaaaggagatttgcatgaaaaaatttccaatcgacctttcctgtctgacagaggaagaaatctctcaatttcag

SEQ ID NO: 15641 - DNA, 260 bp, Unknown
  Description of Unknown: LeftRegion for integrase B2642 sequence
gtatctgataccctatggatagggtatctataccgtatccatatcatagcgatacctcgcgtgcgcgtgcgcgggtgcgcgcgatcgggcgcgcactgttactgtctctgtatctgtaactggtactgtatctgtaaactgttatctgtttctgtatttctatcttaggaaatctatcgttagaagaaggaggtggcgctgtgcctaaaaaacctacaaagcatccggccaagccgaaacggggcaagaaactggaaacc

SEQ ID NO: 15642 - DNA, 260 bp, Unknown
  Description of Unknown: LeftRegion for integrase B2643 sequence
aatatcattatacataatccaaacaacatggataaattcaataattattattcatctgtcattattgatacaataaaaaaaatagcataaatataaaggtgtccgacaatatttgccattgtcggacacctttatatttattgacttttttcagaaaatatgctatgataaaagactatctacaaaaaggagacatataaatgagaatagcaatatattcaagaaaatcaaaatttacaggcaaaggtgaaagtattgga

SEQ ID NO: 15643 - DNA, 260 bp, Unknown
  Description of Unknown: LeftRegion for integrase B2644 sequence
gtggcgcgcagtctgatccgccgcaaggatcgtcaaatctccgtcctcgccgccctcgtcgccgtgctcaccatcacgatcctgctctttatcacctacgacaggctcaatccgaatataggatggttccgtagctctctctccatcactctgtccaccacgttcccactgtttttgtaaatttgtaaaggagatcaaaaatgccatttgtgaaaaccggcaccgtgccgcccgaaaacgccctaaacgccgtgctgtat

SEQ ID NO: 15644 - DNA, 260 bp, Unknown
  Description of Unknown: LeftRegion for integrase B2645 sequence
atttatatgctcataggcgtatgcagtattcttttgtgcgctgttgtatggtacgtcatatttgacatccaggtagagaccgccggtattttccgctcggctgggacaagcatttttgcgggcgtcctcgccctgatactgaacgcctccgtcacaaccatcatttacgccttcaaaagcattcacaaggggaaaaagaaatgagactgacacacggagcgtacattctcgcgcgcttctcaaccgacaatcaagaggtg

SEQ ID NO: 15645 - DNA, 260 bp, Unknown; identical to SEQ ID NO: 15642
  Description of Unknown: LeftRegion for integrase B2646 sequence

SEQ ID NO: 15646 - DNA, 260 bp, Unknown; identical to SEQ ID NO: 13018
  Description of Unknown: LeftRegion for integrase B2647 sequence

SEQ ID NO: 15647 - DNA, 260 bp, Unknown
  Description of Unknown: LeftRegion for integrase B2648 sequence
aatatcattatacataatccaaacaacatggataaattcaatagttattattcatctgtcattattgatacaataaaaagaatagcataaatataaaggtgtccgacaatggcaaatattgtcggacacctttatatttattgacttttttcagaaaatatgctataataaaagactatctacaaaaaggagacatataaatgagaatagcaatatattcaagaaaatcaaaatttacaggcaaaggcgaaagtattgga

SEQ ID NO: 15648 - DNA, 260 bp, Unknown
  Description of Unknown: LeftRegion for integrase B2649 sequence
aatatcattatacataatccaaacaacatggataaattcaataattattattcatctatcattattgatacaataaaaaaaatagcataaatataaaggtgtctgacaatgacaaatattgtcggacacctttatatttattgacttctttcagaaaatatgctataataaaagactatctacaaaaaggagacatataaatgagaatagcaatatattcaagaaaatcaaaatttacaggcaaaggcgaaagtattgga

SEQ ID NO: 15649 - DNA, 260 bp, Unknown
  Description of Unknown: LeftRegion for integrase B2650 sequence
aatatcattatacataatccaaacaacatggataaattcaatgattattattcatctgttattattgatacgataaaaaaaatagcataaatataaaggtgtccgacaatggcaaatattgtcggacacctttatatttattgacttttttcagaaaatatgctatgataaaagactatctacaaaaaggagacatataaatgagaatagcaatatattcaagaaaatcaaaatttacaggcaaaggtgaaagtattgga

SEQ ID NO: 15650 - DNA, 260 bp, Unknown
  Description of Unknown: LeftRegion for integrase B2651 sequence
cgaacaatagataccctatagatatggtatctataccgtatctatagggtagcgatacatcgcgtgcgcgcgtgcgtgtgcgcgcgatcgtgcgcgcactgtctctgtacctgtatctgtatctgagactgtatctgtaatctgtttctgattctgaatatctactactgcaaatctatcgttagaagggggtggcgctgttgccaagaaaacctgcaaagcacccggcgaaaccgaagcggggcaagaagctggaaatc

SEQ ID NO: 15651 - DNA, 260 bp, Unknown
  Description of Unknown: LeftRegion for integrase B2652 sequence
cgctgacaagatgatgaaagtgctggaagcagaagccgccgccggatatttgacctgtgataagcctgattgaaaaaccgtcatttttaccgaccgtaaagaagcagatttgacgcttttgccgctatacagacagccgccccatgtggtacaatcaaggtacggaatagtggggctggctgtcggaaacggaggaatttatgttaagacagaccacccagcaactcattaccgccctttacccaagactgtcccatgag

SEQ ID NO: 15652 - DNA, 260 bp, Unknown
  Description of Unknown: LeftRegion for integrase B2653 sequence
cataatccaaacaatatgaacaaatttagcaattattattcatctgtcattattgatacaataaaaaaaatagcataaatataaaaggtgtccgacaataacaaatgctgtcggacaccttttatatccttttatatttattgactttttacagaaaatatgttataataataaactatctataaaaaggagatatataaatgagaatagcaatatattcaagaaaatcaaaatttacaggcaaaggcgaaagtattgga

SEQ ID NO: 15653 - DNA, 260 bp, Unknown
  Description of Unknown: LeftRegion for integrase B2654 sequence
aatatcattatacataatccaaacaacatggataaattcaatgattattattcatctgttattattgatacgataaaaaaaatagcataaatataaaggtgtccgacaatatttgccattgtcggacacctttatatttattgacttttttcagaaaatatgctataatgaaagactatctacaaaaaggagacatataaatgagaatagcaatatattcaagaaaatcaaaatttacaggcaaaggtgaaagtattgga

SEQ ID NO: 15654 - DNA, 260 bp, Unknown; identical to SEQ ID NO: 15328
  Description of Unknown: LeftRegion for integrase B2655 sequence

SEQ ID NO: 15655 - DNA, 260 bp, Unknown; identical to SEQ ID NO: 15647
  Description of Unknown: LeftRegion for integrase B2656 sequence

SEQ ID NO: 15656 - DNA, 260 bp, Unknown
  Description of Unknown: LeftRegion for integrase B2657 sequence
ttttaactcttaaacgaacatacattcatcaaaataggggaattaatttaaaataagtaaaataaggtaaaaaaattgccaactaaatatatatttaaagatttgtataaaccaaataaaatattaatagattctaatataaacataagtatttagaataatatatttttttatgataatactattgacgaggtgtagtaatggaaaaagtagctatatatagtagaaaatcagtctttactggtaaaggtgaatctatt

SEQ ID NO: 15657 - DNA, 260 bp, Unknown; identical to SEQ ID NO: 15624
  Description of Unknown: LeftRegion for integrase B2658 sequence

SEQ ID NO: 15658 - DNA, 260 bp, Unknown
  Description of Unknown: LeftRegion for integrase B2659 sequence
aaaatggttttttactgccagaggaatatgaaaaaattgatgctttaaaccgcctgacatttgaaccggaactttccaaagtatatgcttaaagccctggatatcctgcagaaactgtggtattgtgtggtactaacaggagagatgattataagaaaagtatatctgaatcctgaaaaatggaggaaaggagaagaaaaatgaaggcaaaaaaggaaaagaaaatcacgcggatcgagccggttcgtaccacacagtcc

SEQ ID NO: 15659 - DNA, 260 bp, Unknown
  Description of Unknown: LeftRegion for integrase B2660 sequence
cataatccaaacaatatgaacaaatttagcaattattattcatctgtcattattgatacaataaaaaaaatagcgtaaatataaaagatgtccggcaataacaaatgctgtcggacatcttttatatccttttatatttattgactttttacagaaaatatgttataataataaactatctataaaaaggagatatataaatgagaatagcaatatattcaagaaaatcaaaatttacaggcaaaggcgaaagtattgga

SEQ ID NO: 15660 - DNA, 260 bp, Unknown; identical to SEQ ID NO: 13471
  Description of Unknown: LeftRegion for integrase B2661 sequence

SEQ ID NO: 15661 - DNA, 260 bp, Unknown
  Description of Unknown: LeftRegion for integrase B2662 sequence
aatatcattatacataatccaaacaacatggataaattcaatagttattattcatctgtcattattgatacaataaaaaaaatagcataaatataaaggtgtccgacaatggcaaatattgtcggacacctttatatttattgacttttttcagaaaatatgctataataaaagactatctacaaaaaggagacatataaatgagaatagcaatatattcaagaaaatcaaaatttacaggcaaaggcgaaagtattgga

SEQ ID NO: 15662 - DNA, 260 bp, Unknown
  Description of Unknown: LeftRegion for integrase B2663 sequence
aatatcattatacataatcccaacaatatggataaattcaataattattattcatctgtcattattgatacaataaaaaaaatagcataaatataaaggtgtccgacaatgacaaatattgtcggacacctttatatttattgacttttttcagaaaatatgttataatgaaaaactatctacaaaaaggagacatataaatgagaatagcaatatattcaagaaaatcaaaatttacaggcaaaggcgaaagtattgga

SEQ ID NO: 15663 - DNA, 260 bp, Unknown
  Description of Unknown: LeftRegion for integrase B2664 sequence
aatatcattatacataatccaaacaacatggataaattcaatagttattattcatctgtcattattgatacaataaaaagaatagcataaatataaaggtgtccgacaatggcaaatattgtcggacacctttatatttattgacttttttcagaaaatatgctataataaaagactatctacaaaaaggagacatataaatgagaatagcaatatattcaagaaaatcaaaatttacaggcaaaggtgaaagtattgga

SEQ ID NO: 15664 - DNA, 260 bp, Unknown
  Description of Unknown: LeftRegion for integrase B2665 sequence
gaaggagcgtagcatgaataaagcgttattgctggcattgaacgagcacatataccttcagggattaatcagtaaagaaatgaaagagaaaattgacattgaaattctctctgaaaattagcttaaactattgagcggagatgagatagaagttataataatcttatctctgctcttccaaacagaagggagaacggggcatgaacgtttatcgcactagagaaatactgaagacttgcagtattttcgatctaaaatta

SEQ ID NO: 15665 - DNA, 260 bp, Unknown; identical to SEQ ID NO: 15661
  Description of Unknown: LeftRegion for integrase B2666 sequence

SEQ ID NO: 15666 - DNA, 260 bp, Unknown
  Description of Unknown: LeftRegion for integrase B2667 sequence
tcgccggtgacagtgattttgtcccggcctccaagctcgcccggcgtgaaggtgttgatgtcgttctcgacccgctcgaacagtctgtaaaagacgatctgtttgagcacatcgacggcctgcgctcctgtggaaaccctttcctgtccaagtgacccaacaaataaacaccgccccggcctgataagccggagcggtatatgtataaccttttatgcaagggtgagaatcttggtatgaaatttacatcaacatggcgg

SEQ ID NO: 15667 - DNA, 260 bp, Unknown
  Description of Unknown: LeftRegion for integrase B2668 sequence
gcactggttctttgtgtgctgcttgggtatatggggatccaccgcttttatgttggaaagataggcaccggcatcctttggttgttgactcttggatgtttcgggatcggctggatcgtcgacattgtgatgctctgctgcaataagttcgcagacaagagcggcgccatcatcggtttgccagaaacgaggtgatccggatggcaaaaaggataccagcggcagcgtcggattgtgatggaatgatcggcgtcatttat

SEQ ID NO: 15668 - DNA, 260 bp, Unknown
  Description of Unknown: LeftRegion for integrase B2669 sequence
ctattatttttaagaattaaacgaacatatattcgtttaaaagggtatattatttataaatgtaaaataaaacaaataaattgccaccaaaatacagatattaatttttgtataaaactaatagaatattaatagattctattagtaatataattttaagaacactagatttcttataatactatttatgaggtgaaataatggaaaaagtagctatatatagcagaaaatcaatctttacaggcaaaggcgatagtata

SEQ ID NO: 15669 - DNA, 260 bp, Unknown
  Description of Unknown: LeftRegion for integrase B2670 sequence
caatgctttaagctgcaaaatttatattagcaggataaatataaaatactgacccaacataataattgacagaagccgactacataacattccaattatagtcagtgaccatcagcgacaagctgataaagaagctataaaaaatcaagagggataagccgctcagcttatccctcatctgtatatggaaaggaaaaacgatgtcagaaagcactctgaaaaaagctgtattctacggcagatacagttctcatttacag

SEQ ID NO: 15670 - DNA, 260 bp, Unknown
  Description of Unknown: LeftRegion for integrase B2671 sequence
aatatcattatacataatccgaacaacatggataaattcaatagttattattcatctgtcattattgatacaataaaaagaatagcataaatataaaggtgtccgacaatatttgccattgtcggacacctttatatttattgacttttttcagaaaatatgctataataaaagactatctacaaaaaggagacatataaatgagaatagcaatatattcaagaaaatcaaaatttacaggcaaaggcgaaagtattgga

SEQ ID NO: 15671 - DNA, 260 bp, Unknown
  Description of Unknown: LeftRegion for integrase B2672 sequence
aatatcattatacataatccaaacaacatggataaattcaatagttattattcatctgtcattattgatacaataaaaagaatagcataaatataaaggcgtccgacaatggcaaatattgtcggacgcctttatatttattgacttttttcagaaaatatgttataataaaagactatctacaaaaaggagacatataaatgagaatagcaatatattcaagaaaatcaaaatttacaggcaaaggcgaaagtattgga

SEQ ID NO: 15672 - DNA, 260 bp, Unknown
  Description of Unknown: LeftRegion for integrase B2673 sequence
caccatgtgaagcaaattcttatatcctcatttgcggggaaaactactaaacttcaatctcggaacatccttgagatccctgatgtccagaggtataatgataatggtagaagatactatgtaccttgaaaacttcatattccccgcgtattgattgcgttttttcattgacccatcgacaaatgaaaggacggatcaatatgatggaaaacagaatgatgacaggtaatcgagtcgattgcctataccgcgtgtccacc

SEQ ID NO: 15673 - DNA, 260 bp, Unknown
  Description of Unknown: LeftRegion for integrase B2674 sequence
aatgccccggcgttttcgtgtttagctacgaattagaagaggttggcgacatggacacataccagattagcccagtttggcgcgaatatctcaacaggcaccgccgatacttggaatagatagaaaaatgccctgcgacgggtgcaaccattgcagggctgtttgtccgctaccaacgaacaaagcaaggtgattttaacatggaaaagaaacgcgccgctatatacgcccgcttttcgtcgcacaatcaacgttccgaa

SEQ ID NO: 15674 - DNA, 260 bp, Unknown
  Description of Unknown: LeftRegion for integrase B2675 sequence
ccatatcgtcgccgccaataaagcgcaccattggctgccgggcggtcatcactgcatgcaccggcaccttcggtttcttttgttgcgcgtcgatcatcgccggactggtggccgcggcgctgtggaccgggcggctgtcgaggattacacctttcttatgatacacttcttcaatctcttcatagctcatcataaaccctatgccaaaagcaatctcatacatacgattttctacaaagattcaatcagttggtgattct

SEQ ID NO: 15675 - DNA, 260 bp, Unknown
  Description of Unknown: LeftRegion for integrase B2676 sequence
atacttttgatccgtcgtctgacgcttatctgactgccgaaaaggacggcaccgttatcatggaaggctttggctcattccctgcttatgctcacaaaggtatggttctcatgcagaccgacaaccttcctcaggaagtaatcgacctgttcaatgccatgtaaacctccgcattctctttctgcaaaggtggtatctctatgaaaaaacagccgaccggtggaaaccggcttgttgcctactaccgctacagcggcggc

SEQ ID NO: 15676 - DNA, 260 bp, Unknown; identical to SEQ ID NO: 15638
  Description of Unknown: LeftRegion for integrase B2677 sequence

SEQ ID NO: 15677 - DNA, 260 bp, Unknown; identical to SEQ ID NO: 15633
  Description of Unknown: LeftRegion for integrase B2678 sequence

SEQ ID NO: 15678 - DNA, 260 bp, Unknown
  Description of Unknown: LeftRegion for integrase B2679 sequence
aatatcattatacataatccaaacaacatggataaattcaatagttattattcatctgtcattattgatacaataaaaagaatagcataaatataaaggtgtccgacaatatttgccattgtcggacacctttatatttattgacttttttcagaaaatatgctataataaaagactatctacaaaaaggagacatataaatgagaatagcaatatattcaagaaaatcaaaatttacaggcaaaggcgaaagtattgga

SEQ ID NO: 15679 - DNA, 260 bp, Unknown
  Description of Unknown: LeftRegion for integrase B2680 sequence
ctggcacaggaacagtacgatgccatcggcaacgaagaatacgaaaccgagcgcctgcggcggctgttcacgacctttgaatactcggcagagctcaacgcagagctgctgcaaagcaccgtctacgccgtcctggtgacgcgccagacggtgcggttgcagctcaaaaatggacagatcatcggaaaggacgatttggtatgacagacgaaaaaccgcgcgtcattatcattccgccaaagccggaattgcagcagacc

SEQ ID NO: 15680 - DNA, 260 bp, Unknown
  Description of Unknown: LeftRegion for integrase B2681 sequence
aatatcattatacataatccaaacaatatggataaattcaataattattattcatctgtcattattgatacaataaaaaaaataacataaatataaaggtgtctgataatatttaccattgtcggacacctttatatttattgacttttttcagaaaatatgctataataaaaaactatctacaaaaaggagacatataaatgagaatagcaatatattcaagaaaatcaaaatttacaggcaaaggtgaaagtattgga

SEQ ID NO: 15681 - DNA, 260 bp, Unknown
  Description of Unknown: LeftRegion for integrase B2682 sequence
atcgaagtggcgcgcagtctgatccgccgcaaggatcgtcaaatctccgtcctcgccgccctcgtcgccgtgctcaccatcgcgatcctgttcttcatcacctacgacaggctcaacccggatataggatggttccgcagctcactcgccatcactctgtccgccacgctcccactgtttttgtaaaggagatcaaaaaaatgccatttgtgaaaaccggtaccgtgccgcccgaaaacgccctaaacgccgtgctctat

SEQ ID NO: 15682 - DNA, 260 bp, Unknown
  Description of Unknown: LeftRegion for integrase B2683 sequence
cttacaacatccgcaattcagcgcaaatgtaaatgcggaaacaactgtgcatatgcggttcttcaaagcctacaggtctatggactggttcgagagattcggcaattcacatacgaatggacagaaaaagccctcctgctgggtgcagaaggacgtgacgggtaacagatatgtcgatagatattaaatggcaggtgccaatggcaaagccggaggtcagcgaactggccgtcgtatatgctcggtattcaagccacagt

SEQ ID NO: 15683 - DNA, 260 bp, Unknown; identical to SEQ ID NO: 15638
  Description of Unknown: LeftRegion for integrase B2684 sequence

SEQ ID NO: 15684 - DNA, 260 bp, Unknown
  Description of Unknown: LeftRegion for integrase B2685 sequence
atgagcctgttattccagaaaacacggtatacgagaaaaagctattgaagtatttcagtatgtgtgatggagaaggtaagctgagaatcattcagttggcaatgaatgaattcgacagaacacagcaagaaaaaaaggaaaatcaagaaccggctgttgtcggataagattattagttttgatgaatggagacaaatacgatgaaatttccgattgacctctccactttaacaaaagaagaaatctcgcagtttgaggaa

SEQ ID NO: 15685 - DNA, 260 bp, Unknown
  Description of Unknown: LeftRegion for integrase B2686 sequence
aattcgtcgcaagcaaggatagcgacaaattccacaaaccgagttgccgatgggccaaaaagatactgagtgaaaatgaagtctggtttgattcttcggacgacgccatagccgccggatacggcgcgtgcgggacttgcaatccaaaataacctgccgaacaataaacaccgccccggcctgataagccggagcggtatatgtataaccttttatgcaagggtgagaatcttggtatgaaatttacatcaacatggcgg

SEQ ID NO: 15686 - DNA, 260 bp, Unknown; identical to SEQ ID NO: 15647
  Description of Unknown: LeftRegion for integrase B2687 sequence

SEQ ID NO: 15687 - DNA, 260 bp, Unknown
  Description of Unknown: LeftRegion for integrase B2688 sequence
gcaaataatggaagaagaacagataattcagcaattgaaaaccaaaaataccgacaccacaaaatacaagaagtccgacgtgtttacaaaagacatggcggactttcttatatctgcggtcgtggacgaatggaagataacattcgaattcggaaatggctacaaagtaaccaaaacatacaccaatgggagggcaggaaatgtcaacggaaaactacgtaaacaaaaaacctaagattacagtcataccggccaaacct

SEQ ID NO: 15688 - DNA, 260 bp, Unknown
  Description of Unknown: LeftRegion for integrase B2689 sequence
aactcaattcaatatctgatgctgtatgtgatttaaatagcatggttgaggtattggattatattattgatgcactaaaaaatagaattgaataaaacaactatatttataaaataatgcagattacatctttcaatatttgtaacctgtattatttttaagtcaaaaaacaaacaaacgtttgcaaaaggaggattatcatgtttgttacaaatgaattgaaaacttatgcagcatacctaagagtgtctaccgatgac

SEQ ID NO: 15689 - DNA, 260 bp, Unknown
  Description of Unknown: LeftRegion for integrase B2690 sequence
taatttacgtatttttttgccaatagcaatacttttataaataagaaaatcccccggtgctaccaacaccgagggacctgcaagaacgtgctaccaacacgctcaacgtcatcaaccccataccaataagagctgatataatattataacatattatacgcggctcttacaatcatagctattgaaaggagccgtgtattatggctaaacacgctattactataccccaaaacccaaaagctgctctgtatatccgcgtc

SEQ ID NO: 15690 - DNA, 260 bp, Unknown; identical to SEQ ID NO: 15666
  Description of Unknown: LeftRegion for integrase B2691 sequence

SEQ ID NO: 15691 - DNA, 260 bp, Unknown
  Description of Unknown: LeftRegion for integrase B2692 sequence
aatatcattatacataatccaaacaatatggataaattcaataattattattcatctgtcattattgatacaataaaaaaaataacataaatataaaggtgtccgacaatatttgccattgtcggacacctttatatttattgacttttttcagaaaatatgctataataaaaaactatctacaaaaaggagacatataaatgagaatagcaatatattcaagaaaatcaaaatttacaggcaaaggtgaaagtattgga

SEQ ID NO: 15692 - DNA, 260 bp, Unknown; identical to SEQ ID NO: 15678
  Description of Unknown: LeftRegion for integrase B2693 sequence

SEQ ID NO: 15693 - DNA, 260 bp, Unknown
  Description of Unknown: LeftRegion for integrase B2694 sequence
aaagcgcggtgcggcaaagccgataaacgagtttgatgaggaacttgtcggcaggttaataaagggagtgacgattaaagactatgtagtgaccttcgagttctataacggagttacaatcagtagggcatataccaacggaccaagcggaaaccaaaaaggatggaaagagaaaaaacgattaaaggaggcacagacgaatggaagcagcaattgacactgtccaacaaccgagagtagtaagggtggtaagaaacgta

SEQ ID NO: 15694 - DNA, 260 bp, Unknown
  Description of Unknown: LeftRegion for integrase B2695 sequence
atttttatgctcctcggcgtttgcgcactgctgcttgtgtccgtcattggatacgtcattttcgacatccaactcgcgaccgccggtattttccggtcggcaggagcaagcacgctcgccgctcttctcggtctggtcattctcgctgccgtcggctctatcgggtacgccgttcacacgatccacaaagggaggaaaaaatgaagctgacgcacggggcgtacattctcgcccggttctctacggacaatcaagaggta

SEQ ID NO: 15695 - DNA, 260 bp, Unknown
  Description of Unknown: LeftRegion for integrase B2696 sequence
aagcaggaatcgagcctgaagcattcaactacctcatgaagaagctgaagctcaaagtagagtatgtcgaaacacctgactgccccagagatgtcgatgatatactcaaaagctatgacaagctgataaagaagctataaaaaatcaagagggataagccgctcagcttatccctcatctgtatatggaaaggaaaaaagatgtcagaaagcactctgaaaaaagctgtattctatggcagatacagttctcatttacag

SEQ ID NO: 15696 - DNA, 260 bp, Unknown; identical to SEQ ID NO: 13516
  Description of Unknown: LeftRegion for integrase B2697 sequence

SEQ ID NO: 15697 - DNA, 260 bp, Unknown
  Description of Unknown: LeftRegion for integrase B2698 sequence
acaatagcgaaaatctcaatatacctgagtttgaccaagctcttttattcttctttgaaaactgtgatgcacccggtcaacttcgcattattcaatgtgccatgaatgaacatgataggacgcaaagagaaaaaacaaatccgccgcaaggctctgttattggctaaagtcatcgacctgtctgaatggagaaagacgctatgaaaaccatgaaatttcctattgacctctccatgctaaccgaagaggaaatagaccaa

SEQ ID NO: 15698 - DNA, 260 bp, Unknown
  Description of Unknown: LeftRegion for integrase B2699 sequence
catcatgtaaagcagattttactatcttcctttgccaacaatacggcaaaaaatagctccggcgacatccttgcaatccctcccgaacagagggataataatagtgggggtagtccctatgtaccttgaaaacttcatattccccgcgtattgattgcgttttttcattgacccatcgacaaatgaaaggacggatcaatatgatggaaaacagaatgatgacaggtaatcgggttgattgcctataccgcgtgtccacc

SEQ ID NO: 15699 - DNA, 260 bp, Unknown
  Description of Unknown: LeftRegion for integrase B2700 sequence
aaaaatgccccatcttctcaaaagaaaagacagggcattttgaaatgagttgaacctaaatgtgcaactctacttatataaatagctcccagatatgatatttcggaaatgaatttaactttttgactgttgaaagtgtggaaagatttatttttcccagaacttgcaacaaacttaaaactacttgaaaggtggtatttatgcctcgtaaaaagaaactgcaagaggtaggcggactgcggctggtggcgtactaccgc

SEQ ID NO: 15700 - DNA, 260 bp, Unknown
  Description of Unknown: LeftRegion for integrase B2701 sequence
ttacggtaatacgcgcatcaagatcaccgaacattttcccgacgttgggaaaacgctcaatgaacttctcgccgacgtcattcaatacaccgtcaaagccgccgcgtaaaacaactgcttgatttgcacccacgcttatgctatacttgtcctggagcaagtagtaagcgtgggtcgtttctttgaaaggaggcatgaatttgaaacggccttgcaccatgacaaacaacaacgccgctctctatatgcgtttgagccga

SEQ ID NO: 15701 - DNA, 260 bp, Unknown
  Description of Unknown: LeftRegion for integrase B2702 sequence
gcaaaacgtgtgcccgaaagcgagtatgtgccgattagagaattcagcgaagaaaaaacaaaacgatttctatcgaaggtcgtcgtgacaatgttcacggtgaccttcgtgttctataacggagcgaaaattacacgcacctacaataatggtcagcccggaaacaaagtcgggtggaacaaaaagaaggaggagtcataatggcaacggcgacaagaagagtagtacgaactatgccgcagatgtttatcgatgtggcg

SEQ ID NO: 15702 - DNA, 260 bp, Unknown
  Description of Unknown: LeftRegion for integrase B2703 sequence
tttccctctgtccacattgatagatgcaacaaccatctcttcaacgccatcaatgaaagccccaacgcaaccctcaacatcaacggtacagagggatttacggctcaggagcttgaattgattgacttgtatcgaaacttcccgctgagaaaacaaatggagctgctgaattatgctttcaacctgaaagaaggtaagcaatgagagtagttctttatatgagatatagcagcgaccgtcagaccgagcaatccatagag

SEQ ID NO: 15703 - DNA, 260 bp, Unknown
  Description of Unknown: LeftRegion for integrase B2704 sequence
acaggtcttttgattgtgtgtagtgacccggcgcaaaagaaaattgacagagccgatgccttgaatattccaatcatttcagagcagcaatggtatgaactcatgccagaacttgaagccgttggaatgtggaacggaaagcaaattctgtttgcggacaatgatggcatctaccgtgttgaagtgggcggtgaaagctgatggccagaaaaaagaatattgctgctggcctcgatgccgtcatctatgcccggtactca

SEQ ID NO: 15704 - DNA, 260 bp, Unknown
  Description of Unknown: LeftRegion for integrase B2705 sequence
tcaggcactggggcttgcggaatatgatccgcaggagattgccgaccgcatcatccagattgatgccctccccgacaacaggctcgtttttcatcttgctgatggtacggattcggaaatccagtggacattcccgtcccgttcggaaagctggactgaggaaaaaaggcagaaagcggctgagcaagcacggaggcaccatgcaaagacaggtcgttaagcgcgaggtacaggtcatccagccgacgcttcggacaggg

SEQ ID NO: 15705 - DNA, 260 bp, Unknown
  Description of Unknown: LeftRegion for integrase B2706 sequence
acgcttcaaaatccgcaaaaaattgagggaattgaaaaagaagtaagcatctttgattgaaataaaaaacgcccacggtgctaccaacaccgcaggcgttccagatcagcttacccagagggtaataacagctaacctcacagatgttattgtaccacctccgggtaggcttgtcaaagtgtacctcggaggaaattacaatggcaagaaaaaagaaacaggcaagcggcgatgccgtcatctatgcccgctactcgtcc

SEQ ID NO: 15706 - DNA, 260 bp, Unknown
  Description of Unknown: LeftRegion for integrase B2707 sequence
ctcggtacgcaagattattctcgaataaacggaaccaaaagcagcaaacaagtcaaagccgaacaacttatgctttccggttcggatttaatgatcctttccgaaaatgttttttacgatatgctcgaaaattatgccggtgaaatctaaattaaaaaggccctcgccttggcaaaataccaaataaaggtggtgagtatatgaaaaaggccgtcgcgtatgcgcggttcagcagtgatatgcagcgcgaagaatcgatc

SEQ ID NO: 15707 - DNA, 260 bp, Unknown
  Description of Unknown: LeftRegion for integrase B2708 sequence
tataaaaatctccgaacacttcgccgcaggcgggaagcccctcggtgatctgattgtagatgtggtgcggcataccgcagaaaaagccgcttcaacctgatagcccatcattgataacacgcccacgcttatgatataattgccatagagcaaaagtattgtaagcgtgggttgtttctttagaaggaggatttttaacggtgaaacaaccttacaatactacgatttacaacacggcgctttatatgagattaagccgg

SEQ ID NO: 15708 - DNA, 260 bp, Unknown
  Description of Unknown: LeftRegion for integrase B2709 sequence
gcaacaccaaaatcaaaatgaccgaacatttcgcagaaaatggaaaatcagtcggcacactgctggaagatgtgattcagtattcagctaaccgatgcgcctgatgataaaaacgaattgaatccagcccacacttacggtataatggaagcagaagtattgtaagcgtgggctgtttcttttaagaaggaggctctactatgaaacagcctaacaatacgatgatctataacactgcactgtaccttagactaagccgt

SEQ ID NO: 15709 - DNA, 260 bp, Unknown
  Description of Unknown: LeftRegion for integrase B2710 sequence
tgtctgacctaatggctatgcagagccagctcaaaaactccgtggccgctctgctggataagctcatgcaggcagatatggaaatcgcgtttaacgtcaagagagacgaagatgccgcgttcaaaagcgggtcggcaatgtgatctacgtggactttcgcccctcccggtgaggggcgtttcctttggaggtgaatccctatgcaaaattacccacccctgtcctccgccgaggagtactgtatgtacctccgcaagtcc

SEQ ID NO: 15710 - DNA, 260 bp, Unknown
  Description of Unknown: LeftRegion for integrase B2711 sequence
gttatgatattttccgtgacaaagagggcgtattcgttattccatacggagcgcagcaggtaaaacagcccgatgggcaatatgtttatgattttccgaacgatgaagtaaccgatatgctgaataagcatcattgcaatagatgtgctggcggttatgttacaagggcgcgcgagtaagcccgaaaggagcgtgacggcatgaaaaagcgaatcaacactaattccgcagcccgtgccgtcatctacgctcgttattcc

SEQ ID NO: 15711 - DNA, 260 bp, Unknown
  Description of Unknown: LeftRegion for integrase B2712 sequence
catcttctcaaaagaaaagacagggcattttgaaatgagttgaacctaaatgtgcaactctacttatataaatagctcccagatatgatatttcggaaatgaatttaactttttgactgttgaaagtgtggaaagatttattttccccagaacttgcaacggcttgcaacaaacttaaaactacttgaaaggtggtatttatgcctcgtaaaaagaaactgcaagaggtaggcggactgcggctggtggcgtactaccgc

SEQ ID NO: 15712 - DNA, 260 bp, Unknown
  Description of Unknown: LeftRegion for integrase B2713 sequence
tataaaaatctccgaacacttcgccgcaggcgggaagcccctcggtgatctgattgtagatgtggtgcggcataccgcagaaaaagccgcttcaacctgatagcccatcattgataacacgcccacgcttatgatataattgccatagagcaaaagtattgtaagcgtgggttgtttctttagaaggaggatttttaacggtgaaacaaccttacaatactacgatttacaacacggcgctttatatgagattgagccgg

SEQ ID NO: 15713 - DNA, 260 bp, Unknown; identical to SEQ ID NO: 13442
  Description of Unknown: LeftRegion for integrase B2714 sequence

SEQ ID NO: 15714 - DNA, 260 bp, Unknown
  Description of Unknown: LeftRegion for integrase B2715 sequence
ctccgcaatctatcgactatgaagctagaacgggtgttttcaaggggtccggcaaaaagccgtatgaggtcacagaaaccacctgcacctgccgagattattttgtccgcaagctgccgtgcaagcatatctaccggctgcgcatggagcttgccaaggctgacggcgaataattataaccagaaaaggagcgtgacggcatgagaaagaaagcaaatattgcccccgaagcccgtgccgtcatctatgcccgatactcc

SEQ ID NO: 15715 - DNA, 260 bp, Unknown
  Description of Unknown: LeftRegion for integrase B2716 sequence
ctggcacaggagcagtacgacaccatcggcaacgaagaatacgaaaccgagcgcctgcggcggctgttcgcggcgttcgaatgcacagcagagctcaacgcggagctgctgcaaagcgccgtctctgccgtgctggtgacgcgccaggcggtgcgcttgcagctcaaaaacggacagatcattggaaaggaagatctcggatgaacgaagaaaagccgcgtgtcattatcatccccgctaagccggaactggcacaggaa

SEQ ID NO: 15716 - DNA, 260 bp, Unknown; identical to SEQ ID NO: 14596
  Description of Unknown: LeftRegion for integrase B2717 sequence

SEQ ID NO: 15717 - DNA, 260 bp, Unknown
  Description of Unknown: LeftRegion for integrase B2718 sequence
acaggtcttttgattgtgtgtagtgacccggcgcaaaagaaaattgacagagccgatgccttgaatattccaatcgtttcagagcagcaatggtatgaactcatgccagaacttgaagccgttggaatgtggaacggaaagcaaattctgtttgcggacgatgatggcatctaccgtgttaaagtgggcggtgaaagctgatggccagaaaaaagaatactgctgctggcctcgatgccgtcatctatgcccggtactcg

SEQ ID NO: 15718 - DNA, 260 bp, Unknown
  Description of Unknown: LeftRegion for integrase B2719 sequence
caaaactcgagaacaaacgattcaaaccttacaatcaaataaaatggttgaaaaacaatttaccaaatccgctgtgtttacaaaagacatggcggattttcttatacaagcgacagtaaaagattggaaaataacattcgaatttgctaacggcatcaaaataactaaatcatatacaaacgggagggcaggaaacgtaaatggaaaactctgcaagcgtaaagcctaaaatcaggctgataccagcgaaacaaaggcag

SEQ ID NO: 15719 - DNA, 260 bp, Unknown
  Description of Unknown: LeftRegion for integrase B2720 sequence
tgcatactgcctgcaatgcgcactgctcaacgcgactggtacggcagcggcgtaaatcacgacaatctgtcccgctcctctgctggcttgatcatagcagacagccgggcgggatgtaaagttacagttatgttaacctttgcgctgacccacagatacaaaaggatgtgcccaatttggacacacgagaggtgacagctatggcaaaacgcctgcatggggcgctcatctgcgcccgatactccaccgatatccaaaat

SEQ ID NO: 15720 - DNA, 260 bp, Unknown
  Description of Unknown: LeftRegion for integrase B2721 sequence
tcatttaagcgataaggaattagaaaaagcgtatcaaacgacggtaaaaataaccgtgtacggcaaagagttggaaatccctttcgacgcggttgtatataacgccgtttatgatgccgtaacgaaaatacgagaagaactataaggaggaaaaatgcaaataacgaaaacatatacaaacgggagggctggaaatatcaatggaaaactttgcaagcacaaaaccgaaaattagggttatacctgctaaaacaagacaa

SEQ ID NO: 15721 - DNA, 260 bp, Unknown
  Description of Unknown: LeftRegion for integrase B2722 sequence
aaagaaaattcatcataaaaacgtagcatactgtagcgattgcggatttagctttgactttacaacgcaaaaggatatcgatgacaagtgtaaatcattgttaaatggcgaaataggatctattgtaactgcggtcattttggggattgctttgtttgttataaatggatatctgcattgaaaacgaataaaagtgttatgtgttgattaaaaggctgggggggggtgacagtttgagttcagttgacaaaatcgccgtt

SEQ ID NO: 15722 - DNA, 260 bp, Unknown
  Description of Unknown: LeftRegion for integrase B2723 sequence
atatcgccaactggtcggtcgctcaaggtgcagctaccgcaccgcagcccgttcagcaggtagtggagcagaaaccgtctcccgccgatgaaatccgcaaatacaagggcctgctggatgacggtatcatcacgcaggaagaatttgaagctaagaaaaagcaactgctgggcctgtaaatttgaaaggagcgtgacggcatgagaaaaaagtccaacctcaatgcggctactcgtgccgtcatctatgccaggtattcc

SEQ ID NO: 15723 - DNA, 260 bp, Unknown
  Description of Unknown: LeftRegion for integrase B2724 sequence
aattcgtatcaaggtatcggagcattttgcagagaacgggaagccgctgaacagcctgctggaagatgtaatccagcacgccgccgctgcttcctgaaaaaagatagatttgtgactgtcaatcatcccacgcttatgatatacttgtaccagcgagtattgtataagcgtgggttgtttctttttaaggaggatttttgatgaaacaaccatacaatacaacggtttataacaccgcactttatttgagattgagccgt

SEQ ID NO: 15724 - DNA, 260 bp, Unknown
  Description of Unknown: LeftRegion for integrase B2725 sequence
cgtatcaaggtatcggagcatttcgcacaggatgggaagccgcttgacagcctgctggaagatgtgatccagcacgctgccgccgcttcctgaaaaaatacggaataacgactgtcaatcagcccacgcttatgatatacttgtaccagcgagtattgtataagcgtgggttgtttcttttagaaggaggatttttaaccgtgaaacaaccatacaatacaacgatttataacactgcactatatttgagattgagccgt

SEQ ID NO: 15725 - DNA, 260 bp, Unknown
  Description of Unknown: LeftRegion for integrase B2726 sequence
ctccgcaatctatcgactatgaagccaggacgggtgttttcaaggggtccggcaaaaagccgtatgaggtcaccgaaaccacctgcacctgccgagattattttgtccgcaagctgccgtgcaagcatatctaccggctgcgcatggagcttgccaaggctgacggcgaatagttttcaccagaaaaggagcatgacggcatgagaaaaaaatccaacctcaatgcggctacccgtgccgtcatctatgcccgatattca

SEQ ID NO: 15726 - DNA, 260 bp, Unknown
  Description of Unknown: LeftRegion for integrase B2727 sequence
cttggtacgcaagattattctcgcataaacggaaccaaaagcagcaaacaagtcagggcagaacaacttatgcttgccggttcggatttgatgattctttctgaaaacgttttttacgatatgctcgaaaactatgccggtgaaatctaaataaaaaaggccctcgccggggcaaaatatcaaacaaaggtggtgattatatgaaaaaggccgtcgcgtatgcacgattcagcagcgacatgcagcgcgaagaatcgatc

SEQ ID NO: 15727 - DNA, 260 bp, Unknown
  Description of Unknown: LeftRegion for integrase B2728 sequence
atggataaatcactcttgcctgaaaaaacattatccataggcacagaaattgtcagaaaatttaagggcgagacatatcgcttgcgtgtggtcaatggtggttttgaaatggacaacgagttttacaaatctctatctgcggtggcatataaaattacaggacgtaaaatctctggcaaagaattttggggaatatagttatggaagaagttaaatgcgcaatttataccagaaaatcaacagatgaaggcttggaaaaa

SEQ ID NO: 15728 - DNA, 260 bp, Unknown
  Description of Unknown: LeftRegion for integrase B2729 sequence
gatacacctcccgaaacagatactcttatggttgtcattgttgatgacgaagaaggatttgttaagaaaatcagtattgatgaagatactgtgacccttcgttcttttaacccacactatcctccccgtgtttttggcggtgttgaaattggacgattgcgctttgtcggtagagtcatggagttaaaaaggagatttgcatgaaaaaatttcctatcgacctctcctgtctgacagaggaagaaatctctcaatttcag

SEQ ID NO: 15729 - DNA, 260 bp, Unknown
  Description of Unknown: LeftRegion for integrase B2730 sequence
tctccgacctcatggctatgcagggccagcttaaaaacgctgtggccgctctgcttgacaagctcatgcaggccgacatggaaatcgcgttcaacatcaagagagacgaagatgccgcattcaaaagcgggtcggcaatgtgatctacgtggactttcgcccctccccgtgaggggcgtttcctttggaggtgaatccctatgcgaaattatccacccctgtcctccgccgaggaatactgtatgtatctccgaaagtcc

SEQ ID NO: 15730 - DNA, 260 bp, Unknown
  Description of Unknown: LeftRegion for integrase B2731 sequence
gatacacctcccgaaacagatactcttatggttgttattgttgatgacgaagaaggatttgttaagaaaatcagtattgatgaagatactgtgacccttcgttcttttaacccacactatcctcctcgtgtttttggcggtgttgaaattggacgattgcgctttgttggtagagtcatggagctaaaaaggagatttgcatgaaaaaatttccaatcgacctctcctgtctgacagaggaagaaatctctcaatttcaa

SEQ ID NO: 15731 - DNA, 260 bp, Unknown
  Description of Unknown: LeftRegion for integrase B2732 sequence
tcgagcaaccgacgagacaagaggttatatagagcgcaacgaagacctatttagaaacgcaaggaagagagacgaaggcgatttgatacgtaggatgttctgaaacagaaaaagccccacgcggcttaacttggcggttgcgcgcggggcgtggtcgaattgagcactttgcggtgctcgcttcaagaggtgattttagcatggtcaagaaccgagctgccatatatgcgcgctttagctcgcacaatcagcgctcagag

SEQ ID NO: 15732 - DNA, 260 bp, Unknown; identical to SEQ ID NO: 13390
  Description of Unknown: LeftRegion for integrase B2733 sequence

SEQ ID NO: 15733 - DNA, 260 bp, Unknown; identical to SEQ ID NO: 15702
  Description of Unknown: LeftRegion for integrase B2734 sequence

SEQ ID NO: 15734 - DNA, 260 bp, Unknown
  Description of Unknown: LeftRegion for integrase B2735 sequence
aagacaggtcttttgattgtgtgtagtgacccggcgcaaaagaaaattgacagagccgatgccatgaatattccgattgtttcggagcagcaatggtttgagctcatgccagaacttgaagccgttggaatgtggaacggaaagtgaatcctgttttcagacgacggcatctaccgtgttgaagtgggcggtgaaagctgatggccagaaaaaagaatattgctgctggcctcgatgccgtcatctatgcccggtactca

SEQ ID NO: 15735 - DNA, 260 bp, Unknown
  Description of Unknown: LeftRegion for integrase B2736 sequence
cgtaaaaatatggcatactgcgaagattgcggattcacttttgatttcaccacgcaaaaagacctcgacaacgagtataaaaagctcaataacggggagattggttctgtagtagcgacagttatattcggtgccttatttattgcagttttaggtttcctgaaatagtaatcgttttacagccattaaatgcaaatttgatgctattttcgttaaataaggggggtgacagtttgagttcagttgacaaaatcgccgtt

SEQ ID NO: 15736 - DNA, 260 bp, Unknown
  Description of Unknown: LeftRegion for integrase B2737 sequence
aacatatgtgttaaataaaagcacgatgaaattccacctgccgagctgctcgtcctgctccaaaatcaaggccgagaataaaggcagctacaccggcagccgtgacgatctcatcggtcagggttattcgccctgtggcaactgccatccgtaataaattcgccccggataagctccggggcttgtcataggtgataatcatggacaatgtcgtcatatatgcccgctactcctccgacaagcagacggagcagagcata

SEQ ID NO: 15737 - DNA, 260 bp, Unknown
  Description of Unknown: LeftRegion for integrase B2738 sequence
cgctcagacgcttgccggtatgactaagctgagcgcagcggaagtgcaaaggtcctgcgtgtgtagcttctccgccgcgtcccaaatcatggaccgcctgaagctctacggcctcgcagcagaaaagcagaccagcatttatgaatggaccgacaaggcctattctctgggcgcagaaggggtgaacgggtgacaggggtatgtcagtagatattaagtggaacgtgcctcagaagggcaaggaaggcgatctggccgcc

SEQ ID NO: 15738 - DNA, 260 bp, Unknown
  Description of Unknown: LeftRegion for integrase B2739 sequence
acaggtcttttgattgtgtgtagtgacccggcgcaaaagaaaattgacagagccgatgccttgaatattccaatcatttcagagcagcaatggtatgaactcatgccagaacttgaagccgttggaatgtggaacggaaagcaaattctgtttgcggacaatgatggcatctaccgtgttgaagcggacggtgaaagctgatggccagaaaaaagaatattgctgctggcctcgatgccgtcatctatgcccggtactcg

SEQ ID NO: 15739 - DNA, 260 bp, Unknown
  Description of Unknown: LeftRegion for integrase B2740 sequence
gcattttgccaaagagggtaagccatttacttccctcttggaagatgtaatcctacacgctgtagccgcttcctgacaacggatgcggaaaagtttgataattgtagatttgtgactgtcaattagcccacgtttatgctatactcttaaatacgagtattgtataagcgtgggttgtttctttttaaggaggatttgacttgaaacaaccttacaatacaacgacttatctcacagcgttatatctgagattgagcaga

SEQ ID NO: 15740 - DNA, 260 bp, Unknown
  Description of Unknown: LeftRegion for integrase B2741 sequence
tcgcgtcacggatgaaaccgggcatctcataagtaacaacgaagacctttttaggaacgccagagaaaaaagcgaagccgatttgatatgtaggctgttttgaaaaaagaaaaccccgcgcgggaacttggcggaacgcgcgcggggctggtcaagaagcagagcgctttaccgcgctcgctctaaggggtgattttagcatggtcaagaaccgcgccgccatatatgcgcgcttcagctcgcataatcagcgctcagag

SEQ ID NO: 15741 - DNA, 260 bp, Unknown
  Description of Unknown: LeftRegion for integrase B2742 sequence
gaagacttggtagagataaaggaattcgatgacagcaaagtcgagatattccttgaaaaggcggtcgtgctaaaccacacgataacattcaccttcataaacggaatgtcaatcagtagggagtataccaacggacacggcggcaatacggcggggtggttagaccgccgattggatagattaagtaaggagggcaaacaatgagcatacctcaaaggatagtgcaagaaagaccagtcatatacagaccgacaaatacg

SEQ ID NO: 15742 - DNA, 260 bp, Unknown
  Description of Unknown: LeftRegion for integrase B2743 sequence
taccattatcgagaaaaggcgcaaggccatgtccaccacggcgctttttgaaacggaagacggcaataggatactgctggaaataccaagagcggcggcggagtatatgaccgttggcgacgtcgggatgctggattattacaaaaaaatattcagatcgtttgtcaggttgagggattaagggcgtgaaggagcctgccatgcaaaagagaagaacgaaatacgcaaacagccaaggggataacgccgtcatatacgca

SEQ ID NO: 15743 - DNA, 260 bp, Unknown
  Description of Unknown: LeftRegion for integrase B2744 sequence
cctttgcaaaacctcagtatttagggctaccagaaaattggttttcgatatttgaggcaatgaactaaaataaaaaacgccctgcggcggcaaccgcagggcgtttggatagaccggcttgcccaaagggcaattaccagaccaagtatctgtaattgtagcaccaccgggcaggctttgcaagctgaacaggtgatattatgaaaaagaaacaaaccggtgcccgccatggccgggcggcgatttacgcccggtattcg

SEQ ID NO: 15744 - DNA, 260 bp, Unknown
  Description of Unknown: LeftRegion for integrase B2745 sequence
ctggatcattgacatggttatgatctgttgcaacaaattcaccgacagcaccggcgcggtggttggtctgaaggttgctgagtataccagacagccggatcctgatcttgcagaggcttctctggaggagcagcgggaggcagcggccgagactgccagagcttacggctataccgtaatagagtcaggcactcaggataatgccgacaagtaaaaatacggctcgaaaatatgccgcaggaggtagctcggataattcc

SEQ ID NO: 15745 - DNA, 260 bp, Unknown
  Description of Unknown: LeftRegion for integrase B2746 sequence
tttgcttatgaaattgaagacatcgccagaagcgttctgaacgataaatgataaacacttttttattcggattttttctgatatgaatatgataacgcgcatagacaaagaggaacggtcgccgcagattgcgggcaatgacgcttttcgtcttgtgcgcggttatcttgacgctttgtgcgaattatacgaggaagtccgtgaaaaaggccgttatcctgacacgcgtttcaacgaaagagcaagaagaggggcactct

SEQ ID NO: 15746 - DNA, 260 bp, Unknown
  Description of Unknown: LeftRegion for integrase B2747 sequence
caaaaatatcagatggtgaagaagaggccgtatattcgtcagtaaacgaaacctatgtaaggcatgtagaagcatggcataaagcgttcggcatggacccgtttactgatgaggagcacgagaagcttatggagtatggtagattcttaatttcacagagacaaaaataaaagggagttgaaaataacgcgaaggaggtgatgccaactttatcccttggcaagcacattatagatataggaagtgactccatgacaaca

SEQ ID NO: 15747 - DNA, 260 bp, Unknown
  Description of Unknown: LeftRegion for integrase B2748 sequence
ttacaaagaaaacaaattatctcgttgtcggctcattcgatttcataaaatcagtaaaaggcggcaaatcttcaaagatagtaaaagctgagcaaatgcgccttgacggtttcgacattaacgttattacagagaacacatttttagatatgctagcaggaaaataaaaagcctgctccgagtggataggagggcggacaatggcaagagccgcaaagcaagacagcaattcggaaataattaacggcgtgatatatgcc

SEQ ID NO: 15748 - DNA, 260 bp, Unknown
  Description of Unknown: LeftRegion for integrase B2749 sequence
gaagacttggtagagataaaggaattcgatgacagcaaagtcgagatattccttgaaaaggcggtcgtactaaaccacaagataacattcaccttcataaacggaatgtcaatcagtagggagtataccaacggacacggcggcaatacggcggggtggttagaccgccgattggatagattaagtaaggagggcaaacaatgagcatacctcaaaggatagtgcaagaaagaccagtcatatacagaccgacaaacacg

SEQ ID NO: 15749 - DNA, 260 bp, Unknown
  Description of Unknown: LeftRegion for integrase B2750 sequence
caaaaatatcagatggtgaagaagaggctgtatattcgtccgtaaacgagacttatgtgagacatgtagaagcatggcataaagcgttcggcatggacccgttcaccgatgaagagcatgagaagttaatggagtatggtagattcttaatttcacagagacaaaaataaaagggagttgaaaataacgcgaaggaggtgatgccaactttatcccttggcaagtacattatagatataggaagtgactccatgacaaca

SEQ ID NO: 15750 - DNA, 260 bp, Unknown
  Description of Unknown: LeftRegion for integrase B2751 sequence
tccagaagccaatgacagttcggcatgggatatttcgtgggacgatgattatttctatgtaagctcctatgtggattctcaaaattctttcggggctctcattcgcacgcaattcaccgcgacatacacttgggatggtggcgaatatacgcttccaactctctgtgacgtttccttttctgaataacaggaggcaaagcatggcaagaaaaaacaaatctgccggttccgaccaacgcctggtggcctactaccggtac

SEQ ID NO: 15751 - DNA, 260 bp, Unknown
  Description of Unknown: LeftRegion for integrase B2752 sequence
aaaggaatttataaaaaaatattccttgcttgtagtagaaaccataaaacatattttaagtaaaaacaaataatatattactgacaaggggtgtatgttctatggatatacactccttgtttaatgtctcttaaattcacttgacattataaatatattatggtatattgaaatactattccaaagaaaggatgttataattgaatatagcaatttattctcgtaagtcaaaatttacaggaaaaggcgaatctattggc

SEQ ID NO: 15752 - DNA, 260 bp, Unknown
  Description of Unknown: LeftRegion for integrase B2753 sequence
gctaatgtaagtagctcatcacttttcttttacttttcaaaagcaaattagttgtaaatgaagtatattattaaaaacaaaaaaatccccgactgctaccaatagtcggggaaatagtgtagtgttatggtacaccaattaaaaacatatatattgtaccataacaccgattaaaaatcaagttaagaggtgttatttttatgaaaaaaactaaaaattcagtgcaaagggctgttatatatgcccgttattcgtgtagt

SEQ ID NO: 15753 - DNA, 260 bp, Unknown
  Description of Unknown: LeftRegion for integrase B2754 sequence
caaaaatatcagatggtgaagaagaggccatatattcgtcagtaaacgaaacctatgtaaggcatgtagaagcatggcataaagcgttcagcatggacccgtttactgatgaggagcacgagaagcttatggagtatggtagattcttaatttcacagagacaaaaataaaagggagttgaaaataacgcgaaggaggtgatgccaactttattccttggcaagtacattatagatataggaagtgactccatgacaaca

SEQ ID NO: 15754 - DNA, 260 bp, Unknown
  Description of Unknown: LeftRegion for integrase B2755 sequence
acaaaccatagatatggtcaaagacaaatataaaaaagatttatattcttccgattcacaaaaaataggttgaaaataaaaaaaatccccgactgctactaacagtcgggaaaatagtgtagtgttatggtacaccaattaaaaacatatatattgtaccataacaccgattaaaaatcaagttaagaggtgttatttttatgaaaaaaactaaaaatccagtgcaaagggctgttatatatgcacgttattcgtgtagt

SEQ ID NO: 15755 - DNA, 260 bp, Unknown
  Description of Unknown: LeftRegion for integrase B2756 sequence
ttctgacctcatggctatgcaggcccagctcaaaaatgctgttgccgctctgctcgataagctcatgcaggccgatatggaaattgcgtttaacgtcaagaaagacgaaaaagcagggttcttaaacgggtcggcaatgtgatttatgtggatttccgcccctccaagtgaggggcgtttcctttggaggtgattaccctatgcgaaactacccgccgctttccagcgcggaagaatactgcatttacctgcgcaaatcc

SEQ ID NO: 15756 - DNA, 260 bp, Unknown
  Description of Unknown: LeftRegion for integrase B2757 sequence
ccttgcggtctgcgtcgtgtcgttcccggtcggcttgatcattgtggccattggagcgtaccgggtggcaaaggccggggatatttatgacgctgcggtcgctcggtacgagcagcaaatctcggactatgttgactggctggatgaagtcaacgcaaaataaaaagccgccctcggtgggcggcgggaggttgctctgaatgtgtgcaaaaaagaaaccggccatgcttgagccggatatgcaggatgccgtgatctac

SEQ ID NO: 15757 - DNA, 260 bp, Unknown
  Description of Unknown: LeftRegion for integrase B2758 sequence
cccgaggctatcggcgtatttaccaccaaaggaaagcagctcggaaacgtaaatgcagagttagcaagcgatttgatacataaatatcctaacaacaaaatgaaagttacaatttcagatataacaggcggtggagacaagaattacggttgtaatcttcacgtcgttatctacaaggcataattaaggaggcgggcaaaatggcaagagccgcaaagcaagccagcaattcagaaataattgacggcgtgatatatgcc

SEQ ID NO: 15758 - DNA, 260 bp, Unknown
  Description of Unknown: LeftRegion for integrase B2759 sequence
cagtacattttatgttaagtcaatcttttcctccgacaaaccaaaagaagttgcagagaagatagaaaagcttattaaagcggaaattgatactattgcaataaaaatttaacttttgtccgcagccaacaaaaaagagtttgtgctataatttacttgtacaattttcttttgtttgactgcataggaggaattttatcatgtatcagtcaaacaaccattcgacttacgcagcactgtacactcgcttctctcgtgat

SEQ ID NO: 15759 - DNA, 260 bp, Unknown
  Description of Unknown: LeftRegion for integrase B2760 sequence
ccgcaagcagtgaccctgcggcagcacgcgctgtgcaaaatagcctgtttaacttccaaagctcgccgcagccgattttttgcaatgacggcgaaagtgtgagataataatggtgtaaggtgtaccttgaaaaataaatagagaacaaaaagttcaagactacacgccattttccggtggggaaatgaggtgtatgtaacatggaaaacgtaaagcgagtatattgcctgtaccgcgtttcgaccgtgggacaggtggaa

SEQ ID NO: 15760 - DNA, 260 bp, Unknown
  Description of Unknown: LeftRegion for integrase B2761 sequence
cctttgcaaaacctcagtatttagggctaccagaaaattggttttcgatatttgaggcaatgaactaaaataaaaaacgccctgcggcggcaaccgcagggcgtttggatagaccggcttgcccaaagggcaattaccagaccaagtatctgtaattgtagcaccaccgggcaggctttgcaagctgaacaggtgatattatgaaaaagaaacaaaccggtgcccgccatggccgggctgcgatctatgcgcgctattct

SEQ ID NO: 15761 - DNA, 260 bp, Unknown
  Description of Unknown: LeftRegion for integrase B2762 sequence
ttcaacgtgaacatattttactatattttagcacaatgttgctcatagaagaagatttcaaacaaaataaaaagcgttcacagtgctaccaacaccgtgaacgctccagatcagtttaccctatatggtaatagccgacctcacagaagctattgtatcatatcaaggggagcttatcaagttttaccttggaggatttcatggcaaaaaagaagaagcccgccgggggcaacgccatcatctatgcccgctactcgtcc

SEQ ID NO: 15762 - DNA, 260 bp, Unknown; identical to SEQ ID NO: 14849
  Description of Unknown: LeftRegion for integrase B2763 sequence

SEQ ID NO: 15763 - DNA, 260 bp, Unknown
  Description of Unknown: LeftRegion for integrase B2764 sequence
taagaaaaatcataatgcagtagttagatttaccaagttagcaaaagcagaagaatataggcaaactttaaaattagaacaatctgaagaagtagaatctgcataaaagctcatattttatgggcttttattttataccttattttgcatatttaccttttaagttaataaatataaaattgtatatgaggtgattacttatgaaagcagcaatatatagcagaaaatcaatgtttacaggtaaaggtgactctgtagaa

SEQ ID NO: 15764 - DNA, 260 bp, Unknown
  Description of Unknown: LeftRegion for integrase B2765 sequence
gaacttggaattgaaaccgataactgagtttaatgaagaattagtcggtagagtattaaagcaagtgacgatacaagattggataataacgttcgagttttataacggtgtaaaaataagtcggcaatatacaaacggaccgaacggaaaccaaaaaggttggaaagaaaagaaacgattaaaggaggctcaagagcaaaatggaaacgataatcaataatcaacccaaagtggtgagagttgtaaggaaggtatcgtcc

SEQ ID NO: 15765 - DNA, 260 bp, Unknown
  Description of Unknown: LeftRegion for integrase B2766 sequence
tgaaaaacaccaataatgtggccatagcgatgcagaatgtcagcgacactgaaatattagatttggttgcaaaccttgtcggctgtattgcaatcaaaaaaggcgtatcggcaaaaagcatttatgacgaattaactataacaacaccggacgctactatgcgcaccgacaacggcatgaattaaccggaggtaaatactatggctgttgcagtttattgccgcgtatcatccgaggaccaggcagagcgcggaacaatt

SEQ ID NO: 15766 - DNA, 260 bp, Unknown
  Description of Unknown: LeftRegion for integrase B2767 sequence
gaagacttggtagagataaaggaattcgatgacagcaaagtcgagatattccttgaaaaggcggtcgtactaaaccacacgataacattcaccttcataaacggaatgtcaatcagtagggagtataccaacggacacggtggcaatacggcggggtggttagaccgccgattggatagattaagtaaggagggcaaacaatgagcatacctcaaaggatagtgcaagagagaccagttatatacagaccgacaaacacg

SEQ ID NO: 15767 - DNA, 260 bp, Unknown; identical to SEQ ID NO: 13188
  Description of Unknown: LeftRegion for integrase B2768 sequence

SEQ ID NO: 15768 - DNA, 260 bp, Unknown
  Description of Unknown: LeftRegion for integrase B2769 sequence
ctgcaagcagtgatcctgcggcagcacacgctgtgcaaaacagtctgtttaactttcaaagttcgccgcagccgattttttgcaataacggcgaaagtatgagataataatggtgtaaggtgtaccttgaaaaataaatagagaacaaaaagttcaagactacacaccattttccggtggggaaatgaggtgtatgtaacatggaaaacgtaaagcgagtatattgcctgtaccgcgtttcgaccgtgggacaggtggaa

SEQ ID NO: 15769 - DNA, 260 bp, Unknown; identical to SEQ ID NO: 15752
  Description of Unknown: LeftRegion for integrase B2770 sequence

SEQ ID NO: 15770 - DNA, 260 bp, Unknown
  Description of Unknown: LeftRegion for integrase B2771 sequence
atcaagaacttggaattgaaaccgataactgaatttaatgaagaattagtcggtagagtattaaaacaagtgacgatacaagattggataataacgttcgagttttataacggtgtaaaaataagtcggcaatatacaaacggaccgagcggaaaccaaaaaggttggaaagaaaagattaaaggaggcttaagagcaaaatggaaacgataatcaataatcaacccaaagtggtgagggttgtaaggaaggtatcgtcc

SEQ ID NO: 15771 - DNA, 260 bp, Unknown
  Description of Unknown: LeftRegion for integrase B2772 sequence
tcccgatttaataggcgcattcaccaaaagcggaaagcaaatcggctctgttccttacgatgttgtaaacataataagggataattatgcgggttatcctatgtcagcagaggttaaagaagtaacttattacggcgatcattatttgtgctatgtaacaatcaacgtttataatagataatttgcaaggagggcggacaatggcaagagccgcaaagcaagacggcaattcggaaataattgacggcgtgatctatgcc

SEQ ID NO: 15772 - DNA, 260 bp, Unknown
  Description of Unknown: LeftRegion for integrase B2773 sequence
ctggatcattgacatggttatgatctgttgcaacaaattcaccgacagcaccggcgcggtggttggtctgaaggttgctgagtataccagacagccggatcctgatcttgcagaggcttctctggaggagcagcgggaggcagcggccgagactgccagagcttacggctataccgtaatagagtcaggcgctcaggataatgccgacaggtaaaaacacggctcgaaaatatgccgcaggaggtagctcggataattcc

SEQ ID NO: 15773 - DNA, 260 bp, Unknown
  Description of Unknown: LeftRegion for integrase B2774 sequence
ttcatctttcgataccctatggatagggtatctataccgtatccataccatagcgatacctcgcgtgcgcgcgtgcgtgtgcgcgcgatcgcgcgcgcactgtctctgtttctgtatctgtaactgagactgtatctgtaatctgttaactgtttctgtaatcctactaaagcaatctatcagtagaaggaggtggcgctgtgccgaagaaagcgacaaagcatccggcaaagccgaagcggggcaaaaagctggaagtc

SEQ ID NO: 15774 - DNA, 260 bp, Unknown; identical to SEQ ID NO: 13129
  Description of Unknown: LeftRegion for integrase B2775 sequence

SEQ ID NO: 15775 - DNA, 260 bp, Unknown
  Description of Unknown: LeftRegion for integrase B2776 sequence
tttccttttccgtgaaatgcacccaagaagagacattcaagaaggaaaacaaggaggggaaagcgtataagtttcacaatattaacgaactcacatatcgttttaccgcccctagtgatataccagatgccgaaacaatccctgatccattatatagcacaatagtaaaatggctcaacaaaaagtgaggtgattcggttttggctaagtataagcaagtcgtgcaggaacaaatcggcgtaatctatgcccggtattcc

SEQ ID NO: 15776 - DNA, 260 bp, Unknown
  Description of Unknown: LeftRegion for integrase B2777 sequence
accgggcttttaatcgtgtgcagtgacccgatgcaaaagaaaatcgacagagctgccgccctaaatattccaatcatttcagagcagcaatggtttgaacttatgccggaactagaagccctcggaatgtggaatggaaagccacttccgtttgcggatgacaatggcatctaccgttttgatgtgggtggtgatggataatggcaaaaaataagaagcccgccgggggcaatgccatcatctatgcccgctactcatcc

SEQ ID NO: 15777 - DNA, 260 bp, Unknown
  Description of Unknown: LeftRegion for integrase B2778 sequence
taccattatcgagaaaaggcgcaaagccatgtccaccacggcgctttttgaaacggaagacggcaataggatactgctggaaatacccagagcggcggcggagtatatgaccgttggcgacgtcgggatgctggattattacaaaaaaatattcagatcgtttgtcaggttgagggattaagggcgtgaaggagcctgccatgcaaaagagaagaacgaaatacgcaaacagccaaggggataacgccgtcatatacgca

SEQ ID NO: 15778 - DNA, 260 bp, Unknown
  Description of Unknown: LeftRegion for integrase B2779 sequence
cgatattaagtatttggaaataaaaaatccctcggtgcttccaacaccgagggaactgcaagaacgtgttaccagcacgctcaattcatcaaccctagacctatcaagagtttcaagagctgattacatctataattataacagattttaatcagctctgccactgcatatccgtttttagcaaaggagctgatttttttatgtttaacaataacactaatactaaaatagctatttactgccgtgtgtcgtctgacgag

SEQ ID NO: 15779 - DNA, 260 bp, Unknown
  Description of Unknown: LeftRegion for integrase B2780 sequence
gaataaaagtagagggaatcattcaaggtctacttttacaagataaataccaaacaaaacaaaagttagggtaattagagaaggaaaaattatacgtataaagtttaaggaggaatagatatggcagattgtatatgccagaactgcggacacacctggaaagcctgagtgtgtagccgtatgcagagaggaggcactgcatggcaaaagcaaaacaaaaagcagctacaaatgatataagcaaactcgctgttatatat

SEQ ID NO: 15780 - DNA, 260 bp, Unknown; identical to SEQ ID NO: 15766
  Description of Unknown: LeftRegion for integrase B2781 sequence

SEQ ID NO: 15781 - DNA, 260 bp, Unknown
  Description of Unknown: LeftRegion for integrase B2782 sequence
ttacaaagaaaacaaattatctcgttgtcggctcattcgatttcataaaatcagtaaaaggcggcaaatcttcaaagatagtaaaagctgaacaaatgcgccttgacggtttcgacattaacgttattacagagaacacatttttagatatgctagcaggaaaataaaaagcctgctccgagtggataggagggcggacaatggcaagagccgcaaagcaagacagcaattcggaaataattgacggtgtgatatatgcc

SEQ ID NO: 15782 - DNA, 260 bp, Unknown
  Description of Unknown: LeftRegion for integrase B2783 sequence
ctgaccgccaacgtccaaaagcgggaggaggaaatgtccgccgaggctgacgcctcatcccccgtcccaaagcagcatccgggaaaagaaaaggtcggctaattttctggcgtcgccttctcacctgatgttcacttgaacaccaaaagccccggcaggcacacacccgccggggcttactttataaagggagatttattatggagaatgaacgcaccatgcttcccgccgtcgcttactatcgctactcgccgggcggc

SEQ ID NO: 15783 - DNA, 260 bp, Unknown
  Description of Unknown: LeftRegion for integrase B2784 sequence
agaatgcgaaaggtcaatcattaccaacgttaaacgttacctgtccgcattgcaagactgaattaacaatcaaaaaataaaaaaagccccgcaactgtttggagcagtcacggggtcagtagtgttatggaacaccaattaaaaacatatatattgtaccataacattacttgaaaatcaagttaagaggtgttatttttatgaaaaaaattaaaaatcaagtacaaagagcggttatatatgcacgttattcgtgtagt

SEQ ID NO: 15784 - DNA, 260 bp, Unknown
  Description of Unknown: LeftRegion for integrase B2785 sequence
aaaggaatttataaaaaaatattccttacttgttgtagaaaccataaaacatattttaagtaaaaacaaataatatattactgacaaggggtgtatgttctatggatatacaccccttgtttaatgtctcttaaattcacttgacattataaatatattatggtatattgaaatactattccaaagaaaggatgttataattgaatatagcaatttattctcgtaagtcaaaatttacaggaaaaggcgaatctattggc

SEQ ID NO: 15785 - DNA, 260 bp, Unknown
  Description of Unknown: LeftRegion for integrase B2786 sequence
atggctgaatattttgacgtcacaaatgaactattagaatataaaattttatccatagttcatgatgaaaataagtacaagtctataaaagaagattttatgagtaaagaaatacaatataaccagtgtactgtgtagttctaataaattaattaacctttatagtttaacctacatcaatttaatttttaagagttttagtgaatattatatacaaaggggtgattaaaattagagctgcaatatatgttagaaaatct

SEQ ID NO: 15786 - DNA, 260 bp, Unknown
  Description of Unknown: LeftRegion for integrase B2787 sequence
tcttttccttgcggtgagactctttgtccttcttcatgattgccttactcctttcatagagtttggcaccggtgcagttatgattatatcattttatttacggtttgtcatcaaaaagatatagtataacatgtgagcgatttcgacaaaaatctgttatataattatcttatgttcgaaaaaatcagggttagaaaggtatgcaacggaatatgcgcgacactaaaacgggcaatgaattacaagctactcgcggcgtt

SEQ ID NO: 15787 - DNA, 260 bp, Unknown
  Description of Unknown: LeftRegion for integrase B2788 sequence
ctatattgtcaattcctgctttgaaattaagccacaaaacacggttgacaacggtatccgataccttctcggaatggaaatgcaggacggtaaggtttcttaaaaaatcgtctggacttttcaaccgattgagagtatattgaggttgcgggaactttccgcagctctcaatcggtttggctgaaaacaaggaggtaaacatgatacagtcgagccaaaaaataaccgctctgtactgccgactgtcccaagaggatatg

SEQ ID NO: 15788 - DNA, 260 bp, Unknown
  Description of Unknown: LeftRegion for integrase B2789 sequence
ggttaggttctaattttaaatttacgatcacaaataattaataaaaagccgccccagtgctggtaacactggaacggcatcacaggccggggcctgtataatatatcacgcaaacatattataccattgttaccccggtttttcaactggggtatttctatacccttttcttcgtatactcaaaaaagggagtgattacaatggtcaaaaacattgatgaatattatgtctatttaagaaaaagccggaaagacagggat

SEQ ID NO: 15789 - DNA, 260 bp, Unknown; identical to SEQ ID NO: 15699
  Description of Unknown: LeftRegion for integrase B2790 sequence

SEQ ID NO: 15790 - DNA, 260 bp, Unknown; identical to SEQ ID NO: 13134
  Description of Unknown: LeftRegion for integrase B2791 sequence

SEQ ID NO: 15791 - DNA, 260 bp, Unknown
  Description of Unknown: LeftRegion for integrase B2792 sequence
aatagagatacaaaaatcctttcgtaaaatcttaaagtgcggaatatataaagaattacgtagacgctcccttttgtcagatgagcaactaaattctctgataaatgaaaaataacgcaaatcaaattgcacatcacaagagattttgatacaatatagttgtcttgtggtgtgctattttcatttatggaggtagcacaatgaaagaaaatattttaagggttgcggcatatgccagagtatctacagataaagaagac

SEQ ID NO: 15792 - DNA, 260 bp, Unknown
  Description of Unknown: LeftRegion for integrase B2793 sequence
ggaaacaaattatataaaacaaaacaatattggattgataaatggaaaataatgcatgataaagaatgtatggaaaatgaaatagataatttatcggtgaagtctttataggaattgtaataaaattcatataatattttttaataaatattagttgcaaaaagttttaatgagcgttacaatgcgggtgaggtgatgatatgaacggtgtaatttatgcaagatattcaagcgaaaatcagcgagaagagtctattgac

SEQ ID NO: 15793 - DNA, 260 bp, Unknown
  Description of Unknown: LeftRegion for integrase B2794 sequence
aatagagatacaaaaatcctttcgtaaaatcttaaagtgcggaatatataaagaattacatagacgctcccttttgtcagatgagcaactaaattctctgataaatgaaaaataacgcaaattaaattgcacatcacaagagattttgatacaatatggttgtcttgtggtgtgctattttcatttatggaggtagcacaatgaaagaaaatattttaagggttgcggcgtatgccagagtatctacagataaagaagac

SEQ ID NO: 15794 - DNA, 260 bp, Unknown
  Description of Unknown: LeftRegion for integrase B2795 sequence
gactactttgacgtgtcgctggactacattttcggcaggacggacgacccccacggcatgatctataacaactgcgtgaagctcggcctgaacaatcccgaaatggcgcggttcgtggaaatgtgcttcgaccccggctcggctatgaacgaacgattgaaggcaacgcttgtgcagatgctctcggaggtggatacgaaatgaaagccgtgatctacgcccgctattcctctgacagccagcgagaagaatccatcgaa

SEQ ID NO: 15795 - DNA, 260 bp, Unknown
  Description of Unknown: LeftRegion for integrase B2796 sequence
ccttgcggtctgcgtcgtgtcgttcccggtcggcttgatcattgcgtccgttggagtgtaccgggcggtaaaggccggggatatttatgacgctgcggttgctcggtacgagcagcaaatctcggactatgttgactggctggatgaagtcaacgcaaaataaaaagccgccctcggtgggcggcgggaggttgctctgaatgtgtgcaaaaaagaagccggccatgcttgagccggatatgcaggatgctgtgatctac

SEQ ID NO: 15796 - DNA, 260 bp, Unknown
  Description of Unknown: LeftRegion for integrase B2797 sequence
cttggaatgctggaggactggccgaaggtcagccgcagtggaagcaaggctgcgctggaagatgcacaggctgaaattgagcggtggagacaagagttcctcgccgggaacatctcggcaaagaaatacgtcaaaattgcggacgctctcatgtccaaataaaaaagccgccctcggtgggcggcgggaggttgctctgaatgtgcgcaaaaaagaaaccggccatgcttgagccggatatgcaggatgccgtgatctac

SEQ ID NO: 15797 - DNA, 260 bp, Unknown
  Description of Unknown: LeftRegion for integrase B2798 sequence
tttgttaaatcagagtataccacggagttatgaacttttctactgcaaatatgggacgacaacccataccataaaaatcggaaaattgaaaagctgtaaagaagcaaatttaacgcttttgccgctgtacagcccccgccgttccgtggtacaatgaaaccacggaatagtggggctggctgtcggaaacggaggattttatgttaagacaagccacccaaaacctcattaccgccctttatccgagattgtcccacgag

SEQ ID NO: 15798 - DNA, 260 bp, Unknown
  Description of Unknown: LeftRegion for integrase B2799 sequence
ctgcttcgccaattttccttccgataccgccagatacttggggggaaggattgctaaatttaatgattgaattttggaattatcaaaataaaggtcaatcaatttagtttcacaatacaaaaaagccgcccacatagggcggcaatatttaaacctcgttaactaaacgtatgtttgttatgtagtagaaaggagcaactatgcgggcagcattatacgcaaggtattcaagcgataaccaacgctacgaaagtattacg

SEQ ID NO: 15799 - DNA, 260 bp, Unknown
  Description of Unknown: LeftRegion for integrase B2800 sequence
acttggaatgctggaggactggccgaaggtcagccgtagcggaagcaaggctgcgctggaagacgcacaggctgaaattgagcggtggaggcaagagttccttgctgggaatatctcagcgaagaaatacgttaaaattgcggatgctctcatgtccaaataaaaagccgcccttagtgggcggcgggaggttgctctgaatgcgcgcaaaaaagaaaccggccatgcttgagccggatatgcaggatgccgtgatctac

SEQ ID NO: 15800 - DNA, 260 bp, Unknown
  Description of Unknown: LeftRegion for integrase B2801 sequence
gatacacctcccgaaacagatactcttatggttgtcattgttgatgacgaagaaggatttgttaagaaaatcagcattgatgaagatactgtgacccttcgctcttttaacccacactatcctccccgtgtttttggcggtgttgaaattggacgattgcgctttgtcggtagagtcatggagttaaaaaggagatttgcatgaaaaaatttccaatcgacctctcctgtctgacagaggaagaaatctctcaatttcaa

SEQ ID NO: 15801 - DNA, 260 bp, Unknown
  Description of Unknown: LeftRegion for integrase B2802 sequence
aacagagattcaaaaatcttttcgtaaaaccttaaaatgcggaatatataaagaattacatagacgctcccttttatcagatgagcaactgaattctttgataagtgaaaaataacgcaaaataaattgcgcatcacaagatattttgatacaatatagttgtcttgtggtgtgctattttcatttatggaggtagcacaatgaaagaaaatattttaagggttgcggcgtatgccagagtatctacagataaagaagac

SEQ ID NO: 15802 - DNA, 260 bp, Unknown; identical to SEQ ID NO: 15705
  Description of Unknown: LeftRegion for integrase B2803 sequence

SEQ ID NO: 15803 - DNA, 260 bp, Unknown
  Description of Unknown: LeftRegion for integrase B2804 sequence
gactgtgtatcgtgtacgcagcttctttgtcgcagagcagcagatgggggacatgctggatgccctctctctcgaaaaagtcaatcgggagaactgaatcccggcacattgcccagtggaatccatagccgtgctgtggtataatcattgcagatttctgattgtatcacgcactgcatttcgggaggttaaataagaaaatgcaggaaaattatatcgttggtatttacgcacggctgagccgggacgatgagcgtgcc

SEQ ID NO: 15804 - DNA, 260 bp, Unknown
  Description of Unknown: LeftRegion for integrase B2805 sequence
gacacacctcctgaaacagatactcttatggttgtcattgttgatgacgaagaaggatttgttaagaaaattagtattgatgaagatactgtgacccttcgctcttttaatccacactatcctccccgtgtttttggtggtgttgaaattggacgattgcgctttgtcggtagagtcatggagttaaaaaggagatttgcatgaaaaaatttccaatcgacctctcctgtctgacagaggaagaaatctctcaatttcag

SEQ ID NO: 15805 - DNA, 260 bp, Unknown
  Description of Unknown: LeftRegion for integrase B2806 sequence
agcagagattcaaaaatcttttcgtaagacattaaagtgcggaatatataaagaattacataggcgctcccttttgtcagatgagcaactaaattctctgataaatgaaaaataacgcaaaataaattgcacatcacaagaggttttgatacaatatagttgtcttgtggtgtgctattttcatttatggaggtagtacaatgaaagaaaatattttaagggttgcggcgtatgccagagtatccacagataaagaagac

SEQ ID NO: 15806 - DNA, 260 bp, Unknown
  Description of Unknown: LeftRegion for integrase B2807 sequence
attatatatttttataataaataatacttaattattctatatattattcaattccttgtgccccaaaaatgttacgatttttacgtaacacgcccctccaaaatcgtaacattcgtaacacccggatgttatccacaatttcaccttgacttacccacaggaaaaccgaattcaaattcggttttgaggaggtgcttgttttgaaaaccgctgtcacctatgcccgcttttcatccgcgcgccagcatgagacgtctatc

SEQ ID NO: 15807 - DNA, 260 bp, Unknown
  Description of Unknown: LeftRegion for integrase B2808 sequence
tgactgctgtacttatgatgacagtcagcagaacacggaacttttaaaatcaaggcttggctgcgaacaactgaatacacttgatattggcttattcaaatcctgcgtgagcaagatcttgataagccatttttgtaccatagaggttgaattcatcaacggagtacacatcaaaaatatcacagaaaggaatgacaaaaatgtccacagctccgaatgtaacagtgatacctgcgaaagtgcagacagcggaaaaccgt

SEQ ID NO: 15808 - DNA, 260 bp, Unknown
  Description of Unknown: LeftRegion for integrase B2809 sequence
ttgctgtacttacaatgacagtccgcagaaaacagcggaaatcaaggctctgcttgaaaatcacgaacaattaaatacgctcgatattggcttatttaagtcctgcgtaaacaggattttgataagccatttttgtaccatagaggttgaattaatcaacggcacacgcatccaaaacatatcagaaaggaatgagaattgtgtcaaccgcatcgaatgtaacgataattcctgcgaaagttcagacggaaataaaccgt

SEQ ID NO: 15809 - DNA, 260 bp, Unknown; identical to SEQ ID NO: 15396
  Description of Unknown: LeftRegion for integrase B2810 sequence

SEQ ID NO: 15810 - DNA, 260 bp, Unknown
  Description of Unknown: LeftRegion for integrase B2811 sequence
atttcttctataatttcggacgagcttaaatatattaatattagaaataattttatgactagagaaataccatataattcatgtgcaatttagtactattcatacttattttcaatataaatatgtactcatactcgattaacttatatgatattaaaacttacaattaataatatacataatattcggaggtaatataaatgaaagctgctatctattcaagaaaatcaaaatttactggtaaaggtgaaagtatagaa

SEQ ID NO: 15811 - DNA, 260 bp, Unknown; identical to SEQ ID NO: 13307
  Description of Unknown: LeftRegion for integrase B2812 sequence

SEQ ID NO: 15812 - DNA, 260 bp, Unknown; identical to SEQ ID NO: 13133
  Description of Unknown: LeftRegion for integrase B2813 sequence

SEQ ID NO: 15813 - DNA, 260 bp, Unknown
  Description of Unknown: LeftRegion for integrase B2814 sequence
gactgtgtatcgtgtacgcagcttctttgtcgcagagcagcagatgggggacgtgctggatgccctctccctcgaaaaagtcaatcgggagaactggatcccggcacattgcccagtggaatccatagccgtgctgtggtataatccttgtagatttctgattgtatcacgcactgcatttcgggaggttaaataagaaaatgcaggaaaactatatcgttggtatttacgcacggctgagccgggacgatgagcgtgcc

SEQ ID NO: 15814 - DNA, 260 bp, Unknown
  Description of Unknown: LeftRegion for integrase B2815 sequence
tcttaaaaaggatgcatgaagataagctgttaaccgaggaagaatgggaaaaaatccgggttttgaatgtcaagactttctccccggaattagcaaaagtatatctgtaataacactggatatataaaggactatgtggtagtgtatgttgctgacagggagtgcaaacccttgaaaatactgggaaaggagaaaaaagcatggcaaaaaaagtgactgtcataaaggcagcaaaagcgcagaaacatacacaggaagaa

SEQ ID NO: 15815 - DNA, 260 bp, Unknown
  Description of Unknown: LeftRegion for integrase B2816 sequence
caaaaatccgacttaaaaattaagtcggatttttttatataaatattcttcttcatatcttcgttcataagcttgttaatataactgttaacatttaagccccttggttctgtgcatgtcttggtttaatcctattgcattgactatttacataatatatgatataataaaaaactacataaaagaaggtgagttgtcaaatgaatatagctatctattcaagaaaatctaaattcactggaaaaggtgaaagtatagaa

SEQ ID NO: 15816 - DNA, 260 bp, Unknown
  Description of Unknown: LeftRegion for integrase B2817 sequence
tcaaaaggatgctctgtcatgggatagaacatcctttttgaataccgttcagccgaaatttgtacaggagtccatcataaaaatgacattctataaacctattgcaataggatgaaaagtatggtatatacattatacgaaacattgctttgaaatgaacactctaccgtccattgatgcataaaagagaggtgcttgccatgaccgccgtgatctatgcccgctattcatcggataaccagcgcgaagaatccattgaa

SEQ ID NO: 15817 - DNA, 260 bp, Unknown; identical to SEQ ID NO: 13224
  Description of Unknown: LeftRegion for integrase B2818 sequence

SEQ ID NO: 15818 - DNA, 260 bp, Unknown
  Description of Unknown: LeftRegion for integrase B2819 sequence
aacaatagatgattccaaatatctagattaagtatcaattttagtctatttactttatgatggtaaagaatttgttaatgatttaagatagaatacaattaaaaaattaatgtcggtaaaatatggcaaaaaaacctcgtattgcgagtacgaggcatgaaaaacacgaaaaagtcaacgaaacttaattacaaaaatagatgtctataattgtatgtgttttcatatacaattatagcacactttacacggaaaggaaa

SEQ ID NO: 15819 - DNA, 260 bp, Unknown
  Description of Unknown: LeftRegion for integrase B2820 sequence
tagcaatctaaaaaagtgcaacaaggttctgcgagagacaggtaaaattgctgattttaatgatgagttgtttgagatttttattcagagaatattggttattaaccgtaataacctggtttacgaattgacgagtggtcataaaatcaatgtcgaggtactcgataattataaggtcagggatgagataaggagggtttatgttagcgagtaatgtaaaagtaattcaaccaagaaaattattcaatatagaagagagc

SEQ ID NO: 15820 - DNA, 260 bp, Unknown
  Description of Unknown: LeftRegion for integrase B2821 sequence
aatagagatacaaaaatcctttcgtaaaatcttaaagtgcggaatatataaagaattacatagacgctcccttttgtcagatgagcaactaaattctctgataaatgaaaaataacgcaaattaaattgcatatcacaagagattttgatacaatatggttgtcttgtggtgtgctattttcatttatggaggtagcacaatgaaagaaaatattttaagggttgcggcgtatgccagagtatctacagataaagaagac

SEQ ID NO: 15821 - DNA, 260 bp, Unknown
  Description of Unknown: LeftRegion for integrase B2822 sequence
ctgctgcacttacaatgacagtccgcagaaaacagacaagatcaaggaattgctcaaaaatcatgaacaattaaacagcttagatatcggcttattcaaagcgtgtgtttcacgaatttggataagccatttttgtaccatagaggttgagtttatcaatggtgtgaaaatcaaaaatactacagagaggatgaatgaaaatgagtacagcgccgaatgtaacgataattcctgcaaaaatccagactgcggaaaaccgt

SEQ ID NO: 15822 - DNA, 260 bp, Unknown
  Description of Unknown: LeftRegion for integrase B2823 sequence
acaggtcttttgattgtgtgtagtgacccggcgcaaaagaaaattgatagagccgatgccctgaatattccgattgtttcggagcagcaatggtttgaacttatgcctgaacttgaggccgttggaatgtggaacggaaagcaaattctgtttgcggacaatgatggcatctaccgtgttgaagtgggcggtgaaagctgatggccagaaaaaagaatattgctgctggcctcgatgccgtcatctatgcccggtactcg

SEQ ID NO: 15823 - DNA, 260 bp, Unknown
  Description of Unknown: LeftRegion for integrase B2824 sequence
acttggaatgctggaggactggccgaaggtcagccgtagtggaagcaaggctgcgctggaagatgcacaggctgaaattgagcggtggaggcaagagttccttgctgggaatatctcggcgaagaaatacgttaaaattgcggatgctctcatatccaaataaaaagccgccctcgatgggcggcgggaggttgctctgaatgtgtgcaaaaaagaaaccggccatgcttgagccggatatgcaggatgccgtgatttac

SEQ ID NO: 15824 - DNA, 260 bp, Unknown
  Description of Unknown: LeftRegion for integrase B2825 sequence
tttccttttccgtgaaatgcacccaggaagagacattcgagaaggaaagcaaggaggggaaagcgtataagcttcacaatattaacgaactcacatatcgttttaccgctcctagtgatataccagatgccgaaacaatcccagacccattatatagcacaatagtaaaatggctcaacaaaaagtgaggtgattcggttttggctaagtataagcaagtcgtgcaggaacaaatcggcgtaatctatgcccggtattct

SEQ ID NO: 15825 - DNA, 260 bp, Unknown
  Description of Unknown: LeftRegion for integrase B2826 sequence
ctgctgcacttacaatgacagccctcagaaaacagataaaatcaaggctctgcttgaaaatcacgaacaattaaatacgttggatattggcttattcaaagcgtgtgtttcacgaatttgtataagccatttttgtaccgtagaggttgagcttatcaacggagtgagaattaaaaatataacggaaaggaagatcgaaaatgagcacagcgccgaatgtaacagtaattcctgcgaaagtgcagacagcggaaagtcgt

SEQ ID NO: 15826 - DNA, 260 bp, Unknown
  Description of Unknown: LeftRegion for integrase B2827 sequence
agcagaaattcaaaaatcctttcgtaaaatcttaaagtgcggaatatataaagaattacatagacgctcccttttgtcagatgagcaactaaattctctgataaatgaaaaataacgcaaatcaaattgcacatcacaagagattttgatacaatatagttgtcttgtggtgtgctattttcatttatggaggtagcacaatgaaagaaaatattttaagggttgcggcatatgccagagtatctacagataaagaagac

SEQ ID NO: 15827 - DNA, 260 bp, Unknown
  Description of Unknown: LeftRegion for integrase B2828 sequence
tcttgcggtctgcgtcgtgtcgctcccggtcggcttgatcgttgtggccattggagcgtaccgggtagcaaaggccggggatatttatgacgctgcggtcgctcggtacgagcagcaaatctcggactatgttgactggctggatgaagtcaacgcaaaataaaaagccgccctcggtgggcggcgggaggttgctctgaatgtgtgcaaaaaagaaaccggccatgcttgagccggatatgcaggatgccgtgatctac

SEQ ID NO: 15828 - DNA, 260 bp, Unknown
  Description of Unknown: LeftRegion for integrase B2829 sequence
tttttcaagcagagtgccacggaaaccgcagccgacaaaatggctaaggtgctggaagcggaagctgctacacaaaaatcggcaatatgacgggcggtaaagaagcatttttcacattttgccgctatacacgccgccccgccatgtggtacaatcgaagtacggaatagtggggctggctgtcagaaacggaggaaaccatgttaagacagacaacccaaaaccttattaccgccctttatccgagattatcccatgaa

SEQ ID NO: 15829 - DNA, 260 bp, Unknown; identical to SEQ ID NO: 13821
  Description of Unknown: LeftRegion for integrase B2830 sequence

SEQ ID NO: 15830 - DNA, 260 bp, Unknown
  Description of Unknown: LeftRegion for integrase B2831 sequence
ttattccgttttgcttcatttattctttattttcgtaaaatttgcaaaaagaaaaagcccgccgggccgaagcctgacgggctataaatgaaactgtatttatatgatcctgcagtgatttatgatttttcgtctcacgccttgcgctttcgtctaatccgcaggccaatgagacgattacctgaaaggacactcaaggtatggcaaaaagaaaattcaacaagggcggcgaagtgcggctggtcgcctattacagatac

SEQ ID NO: 15831 - DNA, 260 bp, Unknown
  Description of Unknown: LeftRegion for integrase B2832 sequence
ctgcgtcatatggggtttaaatatacacaccgcaaaagatatacaagatgtatttgatgtaagttacacagccgccaaaatacgtgctgaacgaatgcaaatattgtacgaaagaaatagatttttgacgagcccgttggaaaaacgggtatatgatatgtttgaaccatatatacaagcaaacaggagggtataaggcaatgaatgttgttctatatatgagatacagtagtgacaggcaaacggagcagtctatagag

SEQ ID NO: 15832 - DNA, 260 bp, Unknown
  Description of Unknown: LeftRegion for integrase B2833 sequence
ttttacgttgattatcttttattcttcattttcgtaaaatttgcaaaaagaaaaagcccgccgggccgaagcctgacgggctatagatgaaactgtatttatataattcagcagcgatttatgatttttcgtctcacacgttgcgctttcgtctaatctgcgggttaaatgagacgattactcgaaaggacgctcaaggtatggcaaaaagaaaattcaacaagggcggcgaggttcggctggtcgcctattacagatac

SEQ ID NO: 15833 - DNA, 260 bp, Unknown
  Description of Unknown: LeftRegion for integrase B2834 sequence
acaggtcttttgattgtgtgcagcgactcaatgcaaaagaaaatcgacagagcggatgccctgaatattccaatcgtttcggagcagcaatggtttgaactcatgccggaacttgaggccgctggaatgtggaacggaaagccaatttcattcgcggatgacgatggtatctaccgttttgatgtgggtggtgatggataatggcaaaaaagaagaagcccgccgggggcattgccatcatctatgcccgctactcgtcc

SEQ ID NO: 15834 - DNA, 260 bp, Unknown
  Description of Unknown: LeftRegion for integrase B2835 sequence
aggcaaggcagatttcaccggtgaacagctgcgaagccgcatacagaaaatcgtggtttgcaacgaaaatgttctgattttccgctttcgggatggttcggaagttacacgaaaatggaaagaccgctcacgcagcgaaagctggacagaagaaatgaaagcagccgccaatcaaaaagcattagagaggaataagcacaatgcctaaagttaccatgattcctgcaaccataaatccgctgacgcacttgccaaaagaa

SEQ ID NO: 15835 - DNA, 260 bp, Unknown; identical to SEQ ID NO: 13468
  Description of Unknown: LeftRegion for integrase B2836 sequence

SEQ ID NO: 15836 - DNA, 260 bp, Unknown
  Description of Unknown: LeftRegion for integrase B2837 sequence
gtctttgagcgtgtccgtgacatcctgctcgccaccagctataccaaaaagaccagctgacatcgtggacgaggacaaaagaacgcgctatactgaggatggcagtggtattcggagcaatccatgaaccacgaccaaccgttctttgataaccgaatatcgttcatcctcgcttttatagcgaaagtgaggaaccccctatgactgaaaataaaaaccgtgtctgctgcctgtaccgtgtttccaccgataagcaggtg

SEQ ID NO: 15837 - DNA, 260 bp, Unknown
  Description of Unknown: LeftRegion for integrase B2838 sequence
tacaatatcaactcggtgtttgatatgacctcaaaatccacagcggaggacaagctgaaatatttgctgaagtccgccgctgaaaaattatcataaacttatagattattgctggactttcagaaccggttgtgatatactttctgtaatctcaatcggtttgacatagtccgcagcacagacggaaagagaggttaatcatgtcagacacgaataagataacggctttgtattgcaggctcagccacgaggacgagctt

SEQ ID NO: 15838 - DNA, 260 bp, Unknown
  Description of Unknown: LeftRegion for integrase B2839 sequence
actccgttagagggcatgagtaaagagcaagcctctctttatatgctcacggaatttctaagcctcatagataaagaatatcctaaaataccgccccagcagaaagccgctttaattagcgaattttataagcatgaccctataaaattgttattatctgcacttaataacgaactatccaaacaaggaagtgataaaaaatgatgcagcaggcattaaacgccgtaatatacgcccgttattcttcccacaatcaaaca

SEQ ID NO: 15839 - DNA, 260 bp, Unknown
  Description of Unknown: LeftRegion for integrase B2840 sequence
ttttacgttgattatcttttattcttcattttcgtaaaatttgcaaaaagaaaaagcccgccgggccgaagcctgacgggctatagatgaaactgtatttatataattcagcagcgatttatgatttttcgtctcacacgttgcgctttcgtctaatctgcgggttaaatgagacgattacttgaaaggacgctcaaggtatggcaaaaagaaaattcaacaagggcggcgaggttcggctggtcgcctattacagatac

SEQ ID NO: 15840 - DNA, 260 bp, Unknown
  Description of Unknown: LeftRegion for integrase B2841 sequence
aggaaatcgtcgccgcctccggcctctcccaggctgcctttgccgagcgttactgcatcccaaagcgcactgtcgaggactggtgccgcggtgtcgcaaaatgcccgctgtacacccggctgctgttgcagcgagccgaaggactgctgcaggtatgaccgattgtgtccaatttggacacgatcaggaaggagcaagtaatgccaaacgctgtgatctatgcccgctactcatctcacgcccagcgggatgcctccatc

SEQ ID NO: 15841 - DNA, 260 bp, Unknown; identical to SEQ ID NO: 15832
  Description of Unknown: LeftRegion for integrase B2842 sequence

SEQ ID NO: 15842 - DNA, 260 bp, Unknown
  Description of Unknown: LeftRegion for integrase B2843 sequence
ctctgaacttggttttccctctaactggcatgagcttatcaaataatcatcatctataaagaatccccggcagctctgtacgatagagccgccggggccagatggggaatctgtctgtcggagaataatcataggataagaaaacacctgctgagcaatttcattgtaccatgatcctgctcagcgcacaaggagtaatcatggcaagaaaaaagaaagtatctcccgggaaccgtctggttgcctactatcgttacagc

SEQ ID NO: 15843 - DNA, 260 bp, Unknown
  Description of Unknown: LeftRegion for integrase B2844 sequence
tacaacatcaactcggtgtttgatatgacctcaaaatccacagctgaggacaagctgaaatatttgctgagatccgccgctgaaaaattatcataaatttatagattatcgctggactttcagaatcgattgtgatatactatctgtaatctcaatcggtttgacagagtccgcataatggacggaaagagaggttaataatgtcagacacgaataagataacggctttgtattgcaggctcagtcacgaggatgagctt

SEQ ID NO: 15844 - DNA, 260 bp, Unknown
  Description of Unknown: LeftRegion for integrase B2845 sequence
ctactagaactgtaattgaacaaattaaagagcttaaactggttaatgacctagattctttatttaaggattatgagcctaaaaatgttgctgaaactttatttatagcagcaatcaaagcagatttaagttacataattcaaccaaatgaggaagatgagtaatctcatctttcttttatatatgggaggtatttaaaaatgaaagtagcaatttacactagagtttcaactcatcatcaaattgataaggattcttta

SEQ ID NO: 15845 - DNA, 260 bp, Unknown
  Description of Unknown: LeftRegion for integrase B2846 sequence
atcgactctggggatgtggctgtcgtactggtcaatgatggtatcagtgcagaagggtttgtgaagaagatcgagctggatgagacaggtgtggtgctgcactcctacaatccatactacccgcccatggtcttctccggcacgaacgctcaacaggtctccttcgttggtaaggtgattgagctgaaaaggaagttctgatgagaaagaagaacaaatttccaatcgacctctctatgctaacagacttggagatccag

SEQ ID NO: 15846 - DNA, 260 bp, Unknown
  Description of Unknown: LeftRegion for integrase B2847 sequence
cgtttccggctatttcaagcaggacaccaccgccaccgccgccgataaaatgctgaaagtgctggaagcggaagctgctacacaaaaatcggcaatttgacgggacgtaaagaagcagaaaggactgtacagccagccccggcgtgtggtatgatagtcatacggaatagtggggctggctgtcggaaatggaggacactatgttaagacagaccacccgaaaccttattaccgccctttatccgagattatcccacgag

SEQ ID NO: 15847 - DNA, 260 bp, Unknown
  Description of Unknown: LeftRegion for integrase B2848 sequence
agcatttgaacgtatccgggatattctgcttgccacaagctacacaaagaaagcgggttgacatcgtggacgaaaacctaagcactcgttatactgaggatggctgtggtgttttggtcagacaaagaaccacgaccacccgttctttggcaaccgaatagtacccattctcacttctattataaagtgaggaatcgaaaatgaatgaaatgaacaatcgcgtctgctgcctgtaccgtgtttccaccgacaaacaggtg

SEQ ID NO: 15848 - DNA, 260 bp, Unknown; identical to SEQ ID NO: 15837
  Description of Unknown: LeftRegion for integrase B2849 sequence

SEQ ID NO: 15849 - DNA, 260 bp, Unknown
  Description of Unknown: LeftRegion for integrase B2850 sequence
accgtcattttcctgttcattgacatgtctatcttccttgccggtcttctcgtctctgcggctgagtgggcggtggtctacttctgctgctatcttcctgcaaaggcgaaggctcggcagtatgaaattgaaaagcaaatccggaacgaccgcatcctgaatgatgacgtggaagaactggacgaaacggaggacgaagaatgagagtcgtggcttactgtcgttattcctccgaggctcaaagggacggctactctatc

SEQ ID NO: 15850 - DNA, 260 bp, Unknown; identical to SEQ ID NO: 15832
  Description of Unknown: LeftRegion for integrase B2851 sequence

SEQ ID NO: 15851 - DNA, 260 bp, Unknown
  Description of Unknown: LeftRegion for integrase B2852 sequence
cagaccccgccgcgcctctcaacgatgcgtaccatggtggggtcgtttttattgcaaaaagaatccccggcagctctgtacgatagagccgccggggccagatggggaatctgtctgtcggagaataatcataggataagaaaacacctgctgagcaatttcattgtaccatgatcctgctcagcgcacaaggagcaatcatggcaagaaaaaagaaagtatctcccgggaaccgtctggttgcctactaccgttacagc

SEQ ID NO: 15852 - DNA, 260 bp, Unknown
  Description of Unknown: LeftRegion for integrase B2853 sequence
attttacgttgattgtcttttattcttcattttcgtaaaatttgcaaaaagaaaaacccgccgggccgaagcctgacgggctatagatgaaactgtatttatataattcagcagcgatttatgatttttcgtctcacacgttgtgctttcgtctaatctgctggtcaaatgagacgattacttgaaaggacgctcaaggtatggcaaaaagaaaattcaacaagggcggcgaggttcggcttgtcgcctattacagatac

SEQ ID NO: 15853 - DNA, 260 bp, Unknown
  Description of Unknown: LeftRegion for integrase B2854 sequence
ctctctccgacctcatggctatgcaaagccagctcaaaaacgctgtggacgctctgctcgacaagctcgttcaggccgatatggaaatcgcctttaacgtgcaaaaagacgcagccgagttatcaaaagggtcggtcggataatctatgtggacttccgcccctccaagtgaggggcgtttcttttggaggtgaatccctatgcggaacaatccgttatccagtgccgacgaatactgtatgtacctgcgcaaatcccgt

SEQ ID NO: 15854 - DNA, 260 bp, Unknown; identical to SEQ ID NO: 15836
  Description of Unknown: LeftRegion for integrase B2855 sequence

SEQ ID NO: 15855 - DNA, 260 bp, Unknown
  Description of Unknown: LeftRegion for integrase B2856 sequence
aggagatcgtcgccgcctccggcctctcccaggccgcctttgcggaacgctattgcatccctaagcgcaccgtcgaggattggtgccgcggggtcgcaaaatgcccattgtacacccgcctgctgctgcagcgagccgagggactgctgcaggtatgaccgccggtgtccaatttggacaccggaaggaaggagcaaactatgccaaacgctgtgatctatgcccgctactcttcccatgcccagcgggatgcctctatt

SEQ ID NO: 15856 - DNA, 260 bp, Unknown
  Description of Unknown: LeftRegion for integrase B2857 sequence
gtctttgatcgtatccgtgacattctgctcgccaccagctataccaagacaactagctgacatcgtggacgaggacaaaagaacgcgctatactgaggatggcagtggtattcgggacaatccatgaaccactaccaatcgttctttgataaccgaatatcgtttatcctcgcttttatagcgaaagtgaggaaccccctatgactgaaaataaaaaccgtgtctgctgcctgtaccgtgtgtccactgacaagcaggtg

SEQ ID NO: 15857 - DNA, 260 bp, Unknown; identical to SEQ ID NO: 15830
  Description of Unknown: LeftRegion for integrase B2858 sequence

SEQ ID NO: 15858 - DNA, 260 bp, Unknown; identical to SEQ ID NO: 14174
  Description of Unknown: LeftRegion for integrase B2859 sequence

SEQ ID NO: 15859 - DNA, 260 bp, Unknown
  Description of Unknown: LeftRegion for integrase B2860 sequence
ttgggatttcccgaggattgggccaatattttgaagcgtccataattccagtcataaagaatccccggcagctctgtacgatagagccgccggggccagatggggaatctgtctgtcggagaataatcatagaataagaaaacacgcctgctgagcaatttcattgtaccatgatcctgctcagcgcacaaggagcaatcatggcaagaaaaaagaaagtatctcccgggaaccgtctggttgcctactaccgttacagc

SEQ ID NO: 15860 - DNA, 260 bp, Unknown; identical to SEQ ID NO: 13007
  Description of Unknown: LeftRegion for integrase B2861 sequence

SEQ ID NO: 15861 - DNA, 260 bp, Unknown
  Description of Unknown: LeftRegion for integrase B2862 sequence
taaaagaacatttttctgaaaaaggaaagacaatggaagaacttttgactgatgtcatgctggaaaaggcaaaacagacaatcgcataaaatcggtgcagttgtgagaaatagattgaatgagaaaaaagacccgtgttatactttacttgcaagcaggtattgtaaacacgggttagttataaaggaggataactgacaatgaaacaacagatttacaatactgcactttatcttaggctgagccgagatgatgaatta

SEQ ID NO: 15862 - DNA, 260 bp, Unknown; identical to SEQ ID NO: 15847
  Description of Unknown: LeftRegion for integrase B2863 sequence

SEQ ID NO: 15863 - DNA, 260 bp, Unknown
  Description of Unknown: LeftRegion for integrase B2864 sequence
tacggattacacagtagcgcaaaagacaggcccgtctctgccagaggatgttactatcatgctttctgggcttgacagcacagatcttgaaaaagtcatgatatacgcccgcggtctgctggacggggacaagtatcagaaccgccgtccgcggtaaagctgaaaacgcttccggctatgaacatagaaaggggcagacgatgagcgtatccgtaaccttaaatacacaaaagccggataccacgacgaacgccgtcatt

SEQ ID NO: 15864 - DNA, 260 bp, Unknown
  Description of Unknown: LeftRegion for integrase B2865 sequence
tgtgatcgttgccttggcacctcgttcggggtcagtggtggtgccattccaatcccggaaagcgaggcagttcgccgtgggcttcaccgctgcaaaaggtgtgagtggggtagaagcccagtcccggcaccaagccgcaagcctctttcggaggcgaggccggtctctcgctgcaaggttgttttagggcgcggtggccgatgatggagcgcgatttgtctcttgaccgctgccagggcgactgtgtcatctatgcccgc

SEQ ID NO: 15865 - DNA, 260 bp, Unknown
  Description of Unknown: LeftRegion for integrase B2866 sequence
aacgaattacggttattgtgtgatttctttggttgttcacttgactacttcggcgtatcaacggaagatgaaacttttgaattgttgagccgtgctaaaaatgtttttcttaacaaagatatcccaaaagaggaacgagaacggttgtataaggaaataatgcgtatgtatctcgacgcagaataacagggggaaacaacatggcaagtcagacaagaaaagtaaaaaggaacggagcgcaaataaagcgagctatcgcc

SEQ ID NO: 15866 - DNA, 260 bp, Unknown
  Description of Unknown: LeftRegion for integrase B2867 sequence
tttttcaagcagagtgccacagaaaccgcagccgacaaaatggctaaggtgctggaagcggaagctgctacacaaaaatcggcaatatgacgggctgtaaagaagcgctttttacactttgccgctatacacgccgccccgctgtatggtacaatcgaagtacggaatagtggggctggctgtcagaaacggaggaaaccatgttaagacagacaacccaaaaccttattaccgccctttatccgagattatcccatgaa

SEQ ID NO: 15867 - DNA, 260 bp, Unknown
  Description of Unknown: LeftRegion for integrase B2868 sequence
agcatttgaacgtatccgggatattctgcttgccacaagctacacaaagaaagcgggttgacatcgtggacgaaaacctaagcactcgttatactgaggatggctgtggtgttttggtcagacagagaaccacgaccacccgttctttggcaaccgaatagtacccattctcacttctattataaagtgaggaatcgaaaatgaatgaaatgaacaatcgcgtctgctgcctgtaccgtgtttccaccgacaaacaggtg

SEQ ID NO: 15868 - DNA, 260 bp, Unknown; identical to SEQ ID NO: 13129
  Description of Unknown: LeftRegion for integrase B2869 sequence

SEQ ID NO: 15869 - DNA, 260 bp, Unknown
  Description of Unknown: LeftRegion for integrase B2870 sequence
agatgatgaaggtgctggaagcggaggccgccgccaatacccgcaccgcttccgcttcgtgataagcccggctgtaaaaatcgtcgttttgacgggcgataaagcagcaaattttgcttttacccgctatacagacagccgccccctgtggtatgatgttcatacggaatagcggggcggctgtcggaaatggaggatttatgttaagacaagccacccaaaagacccctatcacagccctttacgcaagattgagcaag

SEQ ID NO: 15870 - DNA, 260 bp, Unknown
  Description of Unknown: LeftRegion for integrase B2871 sequence
gtgacatcgtcaccgcttctggcctctcccaggcggcctttgccgagcggtactgcatcccgcgtcggaccgtggaaaactggtgcagcggagtcaatgagtgccccctgtacaccagactgctgctgcagcgagctgagggactgctgcaggtatgaccgccggtgtccaaattggacaccggcaggaaggagcaagctatgccaaacgctgtgatctatgcccgctactcgtcccatgcccagcgggacgcatccatt

SEQ ID NO: 15871 - DNA, 260 bp, Unknown
  Description of Unknown: LeftRegion for integrase B2872 sequence
acccggtctgcacttttattgtagcatgatccccctcagaacacaatccggcaaaaaagaatccccggcagctctgtacgatagagccgccggggccagatggggaatctgtctgtcggagaataatcataggataagaaaacacgcctgctgagcaatttcattgtaccatgatcctgctcagcgcacaaggagcaatcatggcaagaagaaagaaagtgtctcccgggaaccgtctggttgcctactaccgttacagc

SEQ ID NO: 15872 - DNA, 260 bp, Unknown; identical to SEQ ID NO: 15412
  Description of Unknown: LeftRegion for integrase B2873 sequence

SEQ ID NO: 15873 - DNA, 260 bp, Unknown; identical to SEQ ID NO: 15667
  Description of Unknown: LeftRegion for integrase B2874 sequence

SEQ ID NO: 15874 - DNA, 260 bp, Unknown; identical to SEQ ID NO: 15847
  Description of Unknown: LeftRegion for integrase B2875 sequence

SEQ ID NO: 15875 - DNA, 260 bp, Unknown; identical to SEQ ID NO: 14174
  Description of Unknown: LeftRegion for integrase B2876 sequence

SEQ ID NO: 15876 - DNA, 260 bp, Unknown
  Description of Unknown: LeftRegion for integrase B2877 sequence
ttatcttatttctagtaaaaactataaaatgaaatttttcaattattctgttgggtaatattaagcattctaaaattcaatagggaacttacttcccagtaaatattattgggaagtcgtatgtcaagcctactttactttttgccaaaatgagtaaaaataaaaacatacaagttcagaaattttaaggagttcagattatgcaaaacaaacaagcggttatttatgcacgtgtatctagcagagaacaagaacgtgag

SEQ ID NO: 15877 - DNA, 260 bp, Unknown; identical to SEQ ID NO: 15832
  Description of Unknown: LeftRegion for integrase B2878 sequence

SEQ ID NO: 15878 - DNA, 260 bp, Unknown
  Description of Unknown: LeftRegion for integrase B2879 sequence
gaccccgccgcgcctctcaacgatgcgtaccatggtggggtcgtttttattgcaaaaagaatccccggcagctctgtacgatagagccgccggggccagatggggaatctgtctgtcggagaataatcataggataagaaaacacgcctgctgagcaatttcattgtaccatgatcctgctcagcgcacaaggagcaatcatggcaagaaaaaagaaagtatctcccgggaaccgtctggttgcctactaccgttacagc

SEQ ID NO: 15879 - DNA, 260 bp, Unknown; identical to SEQ ID NO: 15836
  Description of Unknown: LeftRegion for integrase B2880 sequence

SEQ ID NO: 15880 - DNA, 260 bp, Unknown
  Description of Unknown: LeftRegion for integrase B2881 sequence
taaaagagcatttttccgaaaagggcaaaacaatggaagaacttctaactgatgtcatgctggaaaaagcaaagcagacaatcgcataaaatcagtgcagttgtaagaaatagattgaatgacaaaaagtacccgtgttatactttacttgcaagcaggtattgtaaacacgggttagttataaaggaggataactgacaatgaaacaacagatttacaatactgcactttatcttaggttaagccgagatgatgaatta

SEQ ID NO: 15881 - DNA, 260 bp, Unknown
  Description of Unknown: LeftRegion for integrase B2882 sequence
agcatttgaacgtatccgggatattctgcttgccacaagctacacaaagaaagcgggttgacatcgtggacgaaaacctaagcactcgttatactgaggatggctgtggtgttttggtcagacaaagaaccacgactacccgttctttggcaaccgaatagtacccattctcacttctattataaagtgaggaatcgaaaatgaatgaaatgaacaatcgcgtctgctgcctgtaccgtgtttccaccgacaaacaggtg

SEQ ID NO: 15882 - DNA, 260 bp, Unknown
  Description of Unknown: LeftRegion for integrase B2883 sequence
tttgacgaggcggccttcgcagccaaggtggaagaaattcaggtgccagagaatggcgtgctggtctttgttttctatgacgggcataccgtaacaaagacttgggacaacccttcccgccgccatagctggaaccctgagaaccgccagcgggcgcgtgaactggcgctccggcaggccgcagaaaggaggcttgccaaatgccagcagtaacagcgacgcgggtaacgattatccctgcaaagaaagaccggcttccc

SEQ ID NO: 15883 - DNA, 260 bp, Unknown; identical to SEQ ID NO: 14965
  Description of Unknown: LeftRegion for integrase B2884 sequence

SEQ ID NO: 15884 - DNA, 260 bp, Unknown
  Description of Unknown: LeftRegion for integrase B2885 sequence
ttggcaatacgaaaatccgtgtaacagagcattttaatagcaagggtaaacacatcaaagatctcgtagaaaatgccgtacaatacgccgcaaatgcggcttaataacggtgacaacagctcgttcttgtgatataattacgcggtaagcttatcataagtgcgagttgtttcactactaaaggaggttgctaaacaacggtgaaacaactgatttatcgcgtcgcgctctatatgcgattgagccgagacgatgaggat

SEQ ID NO: 15885 - DNA, 260 bp, Unknown
  Description of Unknown: LeftRegion for integrase B2886 sequence
tgcttgcttctttagagccagagcagatcgctttatgattacaactgcacgattaaacgaaatacgggcagttatacatgaaatgcttttgcacgtttgcattgatagcatggttgccatacaatagctgtagcaccttgacagccgaatactctatcagcgtaatctcgtgcagaaaaaagcacgggaggtaatgacaaatgaaacgagtatacacactatacagagtgtccacaaaacagcaggtagacaaagcgaaa

SEQ ID NO: 15886 - DNA, 260 bp, Unknown
  Description of Unknown: LeftRegion for integrase B2887 sequence
gctcgctcgcctacgatatcactacaatatgctcttccgcacctacacccggtggatggttgtgctttttgccgccaatatgggtctggtgctgctgctctgcggggtaattgcccacaaggagcggggctggctccggcattgataaaaatagcttccggtgtcaatattgacaccggaagggaagagggggtaatattatgcagcggcagcacggggcgtatatctacgcccggtacagcacggaaaaccaggacgcg

SEQ ID NO: 15887 - DNA, 260 bp, Unknown
  Description of Unknown: LeftRegion for integrase B2888 sequence
atatgccctccatccgtcaggcgcgtgtcaaccgctcagtcaaccgcaccgtcacgctccccgcatggctcaacgctgccgcgctggagcataatatgaacttctcgcaggtgcttcaggacgcgctcaagcagcagctcggcctttgataaagaaaaagcccccggctatatgccgagggctttgaaagaaggtgctatatgaagttgacgcatggggcatatatccttgcccgtttctccaccgacaggcaggaggcc

SEQ ID NO: 15888 - DNA, 260 bp, Unknown
  Description of Unknown: LeftRegion for integrase B2889 sequence
atatgccctccatccgtcaggcgcgtgtcaaccgctcagtcaaccgcaccgtcacgctccccgcatggctcaacgctgccgcgctggagcataatatgaacttctcgcaggtgcttcaggacgcgctcaagcagcagctcggcctttgataaagaaaaagcccccggctatatgccgagggctttgaaagagggtatcatatgaagttaacacacggggcttatatccttgcccggttctctactgaccggcaggaggcc

SEQ ID NO: 15889 - DNA, 260 bp, Unknown
  Description of Unknown: LeftRegion for integrase B2890 sequence
catcttctccgcagaaaagacagggcgttttggaacgagttgaacctaaacgtgcaactctacttatataaatgactcccagatatgatatttcggaaatgaatttaactttttgactgttgaaagtgtggaaagatttattttccccataacttgcaacggcttgcaacaaacttaaaactacttgaaaggtggtatttatgcctcgcaaaaagaaactgcaagaggttggcggcctgcgcctggtggcgtactatcgc

SEQ ID NO: 15890 - DNA, 260 bp, Unknown
  Description of Unknown: LeftRegion for integrase B2891 sequence
catcttctccgcagaaaagacagggcgttttggaacgagttgaacctaaacgtacaactctacttatataaatggctccccgatatgatatttcggaaatgaatttaactttttgactgttgaaagtgtggaaagatttattttccccagaacttgcaacggcttgcaacaaacttaaaactacttgaaaggtggtatttatgcctcgcaaaaagaaactgcaagaggtaggcggactgcggctggtggcgtactatcgc

SEQ ID NO: 15891 - DNA, 260 bp, Unknown
  Description of Unknown: LeftRegion for integrase B2892 sequence
gccagtaaatgaccggcaaatgaccagcaaataaaaatagcacccggcgctaccaacaccggatgctacatccaagagttaccactcccagagccatcaacccagacaccacatcaagagctgattgcatctataattataacagattttaatcagctctgccactgcatacccattttagcaaaaggagctgattttttatgcttaaaaatacaaaaatcgccgtatactgccgcgtatcgtcagacgagcaggcagag

SEQ ID NO: 15892 - DNA, 260 bp, Unknown
  Description of Unknown: LeftRegion for integrase B2893 sequence
catcttctccgcagaaaagacagggcgttttggaacgagttgaacctaaacgtacaactctacttatataaatggctcccagatatgatatttcggaaatgaatttaactttttgactgttgaaagtgtggaaagatttattttccccagaacttgcaacggcttgcaacaaacttaaaactacttgaaaggtggtatttatgcctcgcaaaaagaaactgcaagaggtaggcggactgcggctggtggcgtactatcgc

SEQ ID NO: 15893 - DNA, 260 bp, Unknown
  Description of Unknown: LeftRegion for integrase B2894 sequence
catcttctccgcagaaaaggcagggcgttttggaacgagttgaacctaaacgtgcaactctacttatataaatggctcccagatatgatatttcggaaatgaatttaactttttgactgttgaaagtgtggaaagatttattttccccagaacttgcaacggcttgcaacaaacttaaaactacttgaaaggtggtatttatgcctcgcaaaaagaaactgcaagaggtaggcggcctgcgcctggtggcgtactatcgc

SEQ ID NO: 15894 - DNA, 260 bp, Unknown
  Description of Unknown: LeftRegion for integrase B2895 sequence
aaaaacgccccatcttctcaaaagaaaagacagggcgttttggaacgagttgaacctaaacgtgcaacttcacttatataaatggctccaagatatgatatttcggaaatgaatttaactttttgactgttgaaagtgtggaaagatttatttttcccagaacttgcaacaaacttaaaactacttgaaaggtggtatttatgcctcgcaaaaagaaactgcaagaggtaggcggcctgcgcctggtggcatactatcgc

SEQ ID NO: 15895 - DNA, 260 bp, Unknown
  Description of Unknown: LeftRegion for integrase B2896 sequence
actggctctcaaaaagcggcacaccatccgcccgactgccccctttctgctggccggatataaccgcatcccgaacctggatgacctgaacatggaccagatcagcgcagcctatcatctcggtaagcaactggccgacaatcactaaccgtttcccggtgtccagcctggacaccggccccacccaaaggagggagaccatgtccaccgccgttgtatatgcccgctactcctcccactcccagcgggatgcctctatc

SEQ ID NO: 15896 - DNA, 260 bp, Unknown
  Description of Unknown: LeftRegion for integrase B2897 sequence
ccagcaaatgaccggcaaatagccagtaaataaaaaaatccctcggtgttggtagcaccgagggacctgcaagaacgtgttaccagcacgctcattgtaaccgcctttcgccacaaaagagctgattacatctatattatatcagattttaatcagctctgccactgcatacccattttgcaaaaaggagctgattttttatgtttaaaaatacaaaaatagcggtatattgccgcgtatcgtccgacgagcaggcagag

SEQ ID NO: 15897 - DNA, 260 bp, Unknown
  Description of Unknown: LeftRegion for integrase B2898 sequence
atatgccctccatccgtcaggcgcgtgtcaaccgctcagtcaaccgcaccgtcacgctccccgcatggctcaacgctgccgcgctggagcataatatgaacttctcgcaggtgcttcaggacgcgctcaagcagcagctcggcctttgataaagaaaaagcccccggctatatgccgagggctttgaaagagggtgtcatatgaagttaacgcacggggcttatatccttgcccggttctctactgaccggcaggaggcc

SEQ ID NO: 15898 - DNA, 260 bp, Unknown
  Description of Unknown: LeftRegion for integrase B2899 sequence
ttggcaatacgaaaatccgtgtaacagagcattttaatagcaagggtaaacatatcaaagatctcgtagaaaatgccgtacaatacgccgcaaatgcggcttaataccggtgacaacagctcgtacttgtgatataattacgcggtaagcttatcataagtgcgagttgtttcactactaaaggaggttgctaaacaacggtgaaacaactgatttatcgcgtcgcgctctatatgcgattgagccgagacgatgaggat

SEQ ID NO: 15899 - DNA, 260 bp, Unknown
  Description of Unknown: LeftRegion for integrase B2900 sequence
cggtatcactataacatgcttttccggacttacgcccggtggatgcttgtgcttttcgccgccaacatggggctggtgctgctgatctgcggggtgacggcctacgaccttgcccacaaagaccggggatggttccgggactgacaaaaaaataaattccggtgtcaatattgacaccggaggggaagaggggaaatattatgcagcggcagcacggggcgtatatctacgcacggtacagcacggaaaaccaggacgcg

SEQ ID NO: 15900 - DNA, 260 bp, Unknown
  Description of Unknown: LeftRegion for integrase B2901 sequence
accgaagaagcaaaaagttctttccgtaaaatgtataaagctggaatatataaagaattatataaacggcagcttttaacagatgcgcaactgaatttgcttttaaacaagaaataagtaatgattagttgcgcatcacaagacgatatggtataatataattgtttcgtggtgtgctattttaccggaggtagcacacaatgcaaaaattaaaagttgcagcatatgccagagtatctacggacaaagatgaccagaca

SEQ ID NO: 15901 - DNA, 260 bp, Unknown; identical to SEQ ID NO: 15898
  Description of Unknown: LeftRegion for integrase B2902 sequence

SEQ ID NO: 15902 - DNA, 260 bp, Unknown
  Description of Unknown: LeftRegion for integrase B2903 sequence
ttcctcgtccctgaaattcggaagttttatcagagtgaggaaggcaaggcgtactatgaagcgtggctgaaaaagcaccccgagtacgccgcctaaattctaaagaaagcaatcgataaccctatcggctgctttccgtacatatgactttcacaatacaaggaagtataatttagaaagaactaatggaggtataaaaaatgaatgttgtaatatatgctcggttttcgagccacagccaaacagaacaatctatcgaa

SEQ ID NO: 15903 - DNA, 260 bp, Unknown
  Description of Unknown: LeftRegion for integrase B2904 sequence
ataccccttagcgtctcacacaaaaaacaaataaaaaatccctcggtgctaccaacaccgagggacctgcaagaacgtgttaccggcacgttcattgtaaccgcctttcgccacaaaagagctgattacatctatattatatcagattttaatcagctctgccactgcatacccattttgcaaaaaggagctgattttttatgcttaaaaataccaaaatagccgtttactgtcgcgtatcgtccgacgagcaggcagag

SEQ ID NO: 15904 - DNA, 260 bp, Unknown
  Description of Unknown: LeftRegion for integrase B2905 sequence
catcttctccgcagaaaagacagggcgttttggaacgagttgaacctaaacgtacaactctacttatataaatggctcccagatatgatatttcggaaatgaatttaactttttgactgttgaaagtgtggaaagatttattttccccagaacttgcaacggcttgcaacaaacttaaaactacttgaaaggtggtatttatgcctcgcaaaaagaaactgcaagaggtgggcggcctgcgcctggtggcgtactatcgc

SEQ ID NO: 15905 - DNA, 260 bp, Unknown
  Description of Unknown: LeftRegion for integrase B2906 sequence
ttggtaatacgaaaatccgtgtaacagagcattttaatagcaagggtaaacatatcaaagatctcgtagaaaacgcagtacaatatgctgcaaatgcagcttaataccggtgacaacagctcgtacttgtgatataattatgcggtaagcttatcataagtgcgagttgtttcactactaaaggaggttgctaaacaacggtgaaacaactgatttatcgcgtcgcgctctatatgcgattgagccgagacgatgaagat

SEQ ID NO: 15906 - DNA, 260 bp, Unknown
  Description of Unknown: LeftRegion for integrase B2907 sequence
catcttctccgcagaaaagacagggcgttttggaacgagttgaacctaaacgtgcaactctacttatataaatggttcccagatatgatatttcggaaatgaatttaactttttgactgttgaaagtgtggaaagatttattttccccagaacttgcaacggcttgcaacaaacttaaaactacttgaaaggtggtatttatgcctcgcaaaaagaaactgcaagaggtgggcggcctgcgcctggtggcgtactatcgc

SEQ ID NO: 15907 - DNA, 260 bp, Unknown
  Description of Unknown: LeftRegion for integrase B2908 sequence
catcttctccgcagaaaagacagggcgttttggaacgagttgaacctaaacgtgcaactctacttatataaatggctcccatatatgatatttcggaaatgaatttaactttttgactgttgaaagtgtggaaagatttattttccccagaacttgcaacggcttgcaacaaacttaaaactacttgaaaggtggtatttatgcctcgcaaaaagaaactgcaagaggtaggcggactgcggctggtggcgtactatcgc

SEQ ID NO: 15908 - DNA, 260 bp, Unknown; identical to SEQ ID NO: 14687
  Description of Unknown: LeftRegion for integrase B2909 sequence

SEQ ID NO: 15909 - DNA, 260 bp, Unknown
  Description of Unknown: LeftRegion for integrase B2910 sequence
gataaacatttccacaaaaaccaaccctgctatcaacagcagggttggtttgcaataatgaaatttgtcgatttttcttgacacgcttcaaagtgtaatttatcataaaattacaatatttatgatgtgtttcattatgagtaaagagtccaaaaatgcacttctttaaagatattataagaataaaggagcgtggaaaaatgaatgccgtaatatatgcaagatactcttctgatcgtcagacagagcaaagcattgag

SEQ ID NO: 15910 - DNA, 260 bp, Unknown
  Description of Unknown: LeftRegion for integrase B2911 sequence
atacttttgatccgtcgtccgacgcttatctgactaccgaaaaggacggcaccgttatcatggaaggctttggctcattccctgcttatgctcacaacggcatggttcttgtgcagaccgacaaccttcctcaggaagtaatcgacctgttcaatgccatgtaaacctccgcattctctttctgcaaaggtggtatctctatgaaaaaacagccgaccggtggaaaccggcttgttgcctactaccgctacagcggcggc

SEQ ID NO: 15911 - DNA, 260 bp, Unknown
  Description of Unknown: LeftRegion for integrase B2912 sequence
tcggtctgcacttttattgtagcatgatccccctcagaacacaatccgacaaaaaagaatccccggcagctctgtacgatagagccgccggggccagatggggaatctgtctgtcggagaataatcataggttaagaaaacacctgctgagcaagttcattgtaccatgatcctgctcagcgcacaagctgaggaaaaccatgaaaaagaaattttcttctgtacccgatccggatattcaggacgcggtgatctatgca

SEQ ID NO: 15912 - DNA, 260 bp, Unknown; identical to SEQ ID NO: 15906
  Description of Unknown: LeftRegion for integrase B2913 sequence

SEQ ID NO: 15913 - DNA, 260 bp, Unknown
  Description of Unknown: LeftRegion for integrase B2914 sequence
gcttatgaggaactggacagaagtatcttgaaaactgaatatggagaacgcattttatctgattgctgcaattgagttacaaacagcgacgattgggcgacaatcaggcgacaatttgaggtttatcgttgccctgaaattctttctgtgatataatgaaagcagcaattttaagcctgtcggtataggaggaaatacttatgcagacaggaaaaatcactgctttatacgtcagattttcttatgatgacggaattgac

SEQ ID NO: 15914 - DNA, 260 bp, Unknown
  Description of Unknown: LeftRegion for integrase B2915 sequence
catcttctccgcagaaaagacagggcgttttggaacgagttgaacctaaacgtgcaactctacttatataaatggctcccagatatgatatttcggaaatgaatttaactttttgactgttgaaagtgtggaaagatttatttttcccagaacttgcaacggcttgcaacaaacttaaaactacttgaaaggtggtatttatgcctcgcaaaaagaaactgcaagaggttggcggtctgcgcctggtggcgtactatcgc

SEQ ID NO: 15915 - DNA, 260 bp, Unknown
  Description of Unknown: LeftRegion for integrase B2916 sequence
catcttctccgcagaaaagacagggcgttttggaacgagttgaacctaaacgtgcaactctacttatataaatggctcccagatattatatttcggaaatgaatttaacttttcgactgttgaaagtgtggaaagatttatttttcccagaacttgcaacgacttgcaacaaacttaaaactacttgaaaggtggtatttatgcctcgcaaaaagaaactgcaagaggtaggcggactgcggctggtggcgtactatcgc

SEQ ID NO: 15916 - DNA, 260 bp, Unknown
  Description of Unknown: LeftRegion for integrase B2917 sequence
ttggcaatacgaaaatccgtgtaacagagcattttaataacaagggtaaacatatcaaagaactcgtagaaaacgcagtacaatatgctgcaaatgcagcttaatacaggtgacaacagctcgtacttgtgatataattatgcagtaagcttatcataagtgcgagttgtttcactactaaaggaggttgctaaacaacggtgaaacaactgatttatcgcgtcgcgctctatatgcgattgagccgagacgatgaagat

SEQ ID NO: 15917 - DNA, 260 bp, Unknown
  Description of Unknown: LeftRegion for integrase B2918 sequence
catcttctccgcagaaaagacagggcgttttggaacgagttgaacctaaacgtgcaactctacttatataaatggctcccagatatgatatttcggaaatgaatttaactttttgactgttgaaagtgtggaaagatttattttcctcagaacttgcaacggcttgcaacaaacttaaaactacttgaaaggtggtatttatgcctcgcaaaaagaaactgcaagaggttggcggcctgcgcctggtggcgtactatcgc

SEQ ID NO: 15918 - DNA, 260 bp, Unknown
  Description of Unknown: LeftRegion for integrase B2919 sequence
ttttaatcagccccaccgaaaactctatttcaaagcaggtacaaaactcatacgttcctataaagggacaaaatatgaggttttagtagttgatgcggggttcctttacaaaggggatatatacaagagtctttcagctatagcccaactaattaccggagttcattggaacggtaaagtgttctttggaggcagtaaatatggccgaggaacataagatattgcgttgtgcgatctatacccgcaaatccacagaagag

SEQ ID NO: 15919 - DNA, 260 bp, Unknown; identical to SEQ ID NO: 15898
  Description of Unknown: LeftRegion for integrase B2920 sequence

SEQ ID NO: 15920 - DNA, 260 bp, Unknown; identical to SEQ ID NO: 15898
  Description of Unknown: LeftRegion for integrase B2921 sequence

SEQ ID NO: 15921 - DNA, 260 bp, Unknown
  Description of Unknown: LeftRegion for integrase B2922 sequence
catcttctccgcagaaaagacagggcgttttggaacgagttgaacctaaacgtgcaactctacttatataaatggctcccagatatgatatttcggaaatgaatttaactttttgactgttgaaagtgtggaaagatttattttcctcagaacttgcaacggcttgcaacaaacttaaaactacttgaaaggtggtatttatgcctcgcaaaaagaaactgcaagaggtgggcggcctgcgcctggtggcgtactatcgc

SEQ ID NO: 15922 - DNA, 260 bp, Unknown
  Description of Unknown: LeftRegion for integrase B2923 sequence
atatgccctccatccgtcaggcgcgtgtcaaccgctcagtcaaccgcaccgtcacgctccccgcatggctcaacgctgccgcgctggagcataatatgaacttctcgcaggtgcttcaggacgcgctcaagcagcagctcggcctttgataaagaaaaagcccccggctatatgccgagggctttgaaagagggtgtcatatgaagttaactcacggggcttatatccttgcccgtttctccaccgacaggcaggaggcc

SEQ ID NO: 15923 - DNA, 260 bp, Unknown; identical to SEQ ID NO: 14687
  Description of Unknown: LeftRegion for integrase B2924 sequence

SEQ ID NO: 15924 - DNA, 260 bp, Unknown
  Description of Unknown: LeftRegion for integrase B2925 sequence
caaaccatagatatggtcaaagacaaatataaaaaagatttatattcttccgattcacaaaaaataggttgaaaataaaaaaaaatccccgactgctactaacagtcggggaaatagtgtagtgttatggtacaccaattaaaaacatatatattgtaccataacaccgattaaaaatcaagttaagaggtgttatttttatgaaaaaaactaaaaatccagtgcaaagggctgttatatatgcacgttattcgtgtagt

SEQ ID NO: 15925 - DNA, 260 bp, Unknown
  Description of Unknown: LeftRegion for integrase B2926 sequence
accgaagaagcaaaaagttctttccgtaaaatgtataaagctggaatatataaagaattatataaacggcagcttttaacagatgcgcaactgaatttgcttttaaacaagaaataagtaatgattagttgcgcatcacaagacgatatggtataatataattgtttcgtggtgtgctattttatcggaggtagcacacaatgcaaaaattaaaagttgcagcatatgccagagtatctacggacaaagatgaccagaca

SEQ ID NO: 15926 - DNA, 260 bp, Unknown; identical to SEQ ID NO: 15905
  Description of Unknown: LeftRegion for integrase B2927 sequence

SEQ ID NO: 15927 - DNA, 260 bp, Unknown
  Description of Unknown: LeftRegion for integrase B2928 sequence
ttacaaacaatagatatggtcaaagacaaatataaaaaagatttatattcttccgattcacaaaaaataggttgaaaataaaaaatccccgactgctactaacagtcggggaaatagtgtagtgttatggtacaccaattaaaaacatatatattgtaccataacaccgattaaaaatcaagttgagaggtgttatttttatgaaaaaaactaaaaattcagtgcaaagggctgttatatatgcacgttattcgtgtagt

SEQ ID NO: 15928 - DNA, 260 bp, Unknown
  Description of Unknown: LeftRegion for integrase B2929 sequence
ttggcaatacgaaaatccgtgtaacagagcattttaatagcaagggtaaacatatcaaagatctcgtagaaaatgccgtacaatacgccgcaaatgcggcttaataacggtgacaacagctcgtacttgtgatataattatgtggtaagcttatcataagtgcgagttgtttcactactaaaggaggttgctaaacaacggtgaaacaactgatttatcgcgtcgcgctctatatgcgattgagccgagacgatgaggat

SEQ ID NO: 15929 - DNA, 260 bp, Unknown
  Description of Unknown: LeftRegion for integrase B2930 sequence
catcttctccgcggaaaagacagggcgttttggaacgagttgaacttaaacgtgcaactctacttatataaatggctcccagatatgatatttcggaaatgaatttaactttttgactgttgaaagtgtggaaagatttattttccccagaacttgcaacggcttgcaacaaacttaaaactacttgaaaggtggtatttatgcctcgcaaaaagaaactgcaagaggtgggcggcctgcgcctggtggcatactatcgc

SEQ ID NO: 15930 - DNA, 260 bp, Unknown
  Description of Unknown: LeftRegion for integrase B2931 sequence
catcttctccgcagaaaagacagggcgttttggaacgagttgaacctaaacgtgcaactctacttatataaatggctcccagatatgatatttcggaaatgaatttaactttttgactgttgaaagtgtggaaagatttatttttcccagaacttgcaacggcttgcaacaaacttaaaactacttgaaaggtggtatttatgcctcgcaaaaagaaactgcaagaggttggcggcctgcggctggtggcgtactatcgc

SEQ ID NO: 15931 - DNA, 260 bp, Unknown
  Description of Unknown: LeftRegion for integrase B2932 sequence
atttattctataatttcggacgagcttaaatatattagtattagaaataattttatgactagagaaataccctataattcatgtgcaatttagtactattcatacttatttttaatataaatatgtactaattctcaattaacttatatgatatttaaacttacaattattaatatacataatattcggaggtaatataaatgaaagctgctatctattcgagaaaatctaaatttactggtaaaggtgaaagcatagaa

SEQ ID NO: 15932 - DNA, 260 bp, Unknown
  Description of Unknown: LeftRegion for integrase B2933 sequence
aaaaacgccccatcttctccgcagaaaagacagggcgttttggaacgagttgaacctaaacgtgcaactctacttatataaatggctcccagatatgatatttcggaaatgaatttaactttttgactgttgaaagtgtggaaagatttatttttcccagaacttgcaacaaacttaaaactacttgaaaggtggtatttatgcctcgcaaaaagaaactgcaagaggtaggcggcctgcggctggtggcgtactatcgc

SEQ ID NO: 15933 - DNA, 260 bp, Unknown
  Description of Unknown: LeftRegion for integrase B2934 sequence
tgcggtatcactacaacatgcttttccggacttacgcccggtggatgcttgtgcttttcgccgccaacatggggctggtgctgctgatctgcggggtgacggcctacgaccttgcccacaaagaccggggctggttccggggctgataaaaataaattccggtgtcaatgttgacaccggaagaaaagaggggaaatattatgcagcggcagcacggggcgtatatctatgcccggtacagcacggaaaaccaggacgcg

SEQ ID NO: 15934 - DNA, 260 bp, Unknown; identical to SEQ ID NO: 15898
  Description of Unknown: LeftRegion for integrase B2935 sequence

SEQ ID NO: 15935 - DNA, 260 bp, Unknown; identical to SEQ ID NO: 14687
  Description of Unknown: LeftRegion for integrase B2936 sequence

SEQ ID NO: 15936 - DNA, 260 bp, Unknown; identical to SEQ ID NO: 15028
  Description of Unknown: LeftRegion for integrase B2937 sequence

SEQ ID NO: 15937 - DNA, 260 bp, Unknown
  Description of Unknown: LeftRegion for integrase B2938 sequence
atgtgttttttcttataacaatacagtcagttttaaaagacggccagcaaatgaccggcaaatagccagcaaataaaaattcccccggtgcgaccaacaccgagggaacagcctgatcaacccacaaatccaactgcaagggctgacatcttaattatatcagctcttgccatacattaaaagcaaggagctgattttttatgcttaaaaatactaaaatagccgtctattgccgcgtatcgtccgacgagcaggcagag

SEQ ID NO: 15938 - DNA, 260 bp, Unknown
  Description of Unknown: LeftRegion for integrase B2939 sequence
ttggcaatacaaaaatccgtgtaacagagcattttaatagcaagggtaaacacatcaaagatctcgtagaaaatgccgtacaatacgccgcaaatgcggcttaataacggtgacaacagctcgtacttgtgatataattacgcggtaagcttatcataagtgcgagttgtttcactactaaaggaggttactaaacaacggtgaaacaactgatttatcgcgtcgcgctctatatgcgattgagccgagacgatgaggat

SEQ ID NO: 15939 - DNA, 260 bp, Unknown
  Description of Unknown: LeftRegion for integrase B2940 sequence
cccagtgcgccaacaccgaacggtcgtgtaatttgccccttttgtttggaaaggttttataggccaactacgttattattataacataacgaagttgaccttgctatcccctacctattttcaagggatacaaggtcaaattttttgcccttttttactatttctgtcaaataaattaacacaaaataaggagaattaccatggaaagagctgtaatttatgcacgttattcaagcgatcatcaacgcgaggaaagtatc

SEQ ID NO: 15940 - DNA, 260 bp, Unknown
  Description of Unknown: LeftRegion for integrase B2941 sequence
catcttctccgcggaaaagacagggcgttttggaacgagttgaacctaaacgtgcaactctacttatataaatggctcccagatatgatatttcggaaatgaatttaactttttgactgttgaaagtgtggaaagatttattttccccagaacttgcaacggcttgcaacaaacttaaaactacttgaaaggtggtatttatgcctcgcaaaaagaaactgcaagaggttggcggcctgcgcctggtggcgtactatcgc

SEQ ID NO: 15941 - DNA, 260 bp, Unknown; identical to SEQ ID NO: 15895
  Description of Unknown: LeftRegion for integrase B2942 sequence

SEQ ID NO: 15942 - DNA, 260 bp, Unknown; identical to SEQ ID NO: 15846
  Description of Unknown: LeftRegion for integrase B2943 sequence

SEQ ID NO: 15943 - DNA, 260 bp, Unknown
  Description of Unknown: LeftRegion for integrase B2944 sequence
catcttctccgcagaaaagacagggcgttttggaacgagttgaacttaaacgtgcgactctacttatataaatggcttccagatatgatatttcggaaatgaatttaactttttgactgttgaaagtgtggaaagatttattttccccagaacttgcaacggcttgcaacaaacttaaaactacttgaaaggtggtatttatgcctcgcaaaaagaagctgcaagaggtaggcggcctgcgcctggtggcatactatcgc

SEQ ID NO: 15944 - DNA, 260 bp, Unknown; identical to SEQ ID NO: 14687
  Description of Unknown: LeftRegion for integrase B2945 sequence

SEQ ID NO: 15945 - DNA, 260 bp, Unknown; identical to SEQ ID NO: 15916
  Description of Unknown: LeftRegion for integrase B2946 sequence

SEQ ID NO: 15946 - DNA, 260 bp, Unknown
  Description of Unknown: LeftRegion for integrase B2947 sequence
tggagccgcagggcttgcggttctgttcggcatcttccttatggtatatgtctttctggatatgcaaaacccgaatcttggcctgttccagtccggccacgcctcgccgatcgtttatgtcgcggccttttccattatcggaacatgcctgtatatcgtccgaactgtgataaagcgaaacgcaaaaaggagtaaacacgatgcaaacaatcccaattgatctatcggctcttacgccggaggaaagacagcagtttgca

SEQ ID NO: 15947 - DNA, 260 bp, Unknown
  Description of Unknown: LeftRegion for integrase B2948 sequence
atatgccctccatccgtcaggcgcgtgtcaaccgctccgtcaaccgcactgtcacgctccccgcatggctcaacgctgccgcgctggagcataatatgaacttctcgcaggtgcttcaggacgcgctcaagcagcagctcggcctttgataaagaaaaagcccccggctatatgccgagggctttgaaagagggtgtcatatgaagttaactcacggggcatatatccttgcccggttctcgaccgaccggcaggatgcc

SEQ ID NO: 15948 - DNA, 260 bp, Unknown; identical to SEQ ID NO: 15898
  Description of Unknown: LeftRegion for integrase B2949 sequence

SEQ ID NO: 15949 - DNA, 260 bp, Unknown
  Description of Unknown: LeftRegion for integrase B2950 sequence
ttggcaatacgaaaatccgtgtaacagagcattttaatagcaagggtaaacatatcaaagatctcgtagaaaacgcagtacaatatgctgcaaatgcagcttaataccggtgacaacagctcgtacttgtgatataattatgcggtaagcttatcataagtgcgagttgtttcactactaaaggaggttgctaaacaacggtgaaacaactgatttatcgcgtcgcgctctatatgcgattgagccgagacgatgaagat

SEQ ID NO: 15950 - DNA, 260 bp, Unknown
  Description of Unknown: LeftRegion for integrase B2951 sequence
ttggcaatacgaaaatccgtgtaacagagcattttaatagcaagggtaaacatatcaaagatctcgtagaaaatgccgtacaatacgtcgcaaatgcggcttaataccggtgacaacagctcgtacttgtgatataattacgcggtaagcttatcataagtgcgagttgtttcactactaaaggaggttgctaaacaacggtgaaacaactgatttatcgcgtcgcgctctatatgcgattgagccgagacgatgaggat

SEQ ID NO: 15951 - DNA, 260 bp, Unknown
  Description of Unknown: LeftRegion for integrase B2952 sequence
actaaaattgataaataattgtatattagttttaatttagattccttttaatatatttaaattagaggtgtttcatttgaaatataatgtaattgaaatatatgataagagtttaaatgacgataaaattaggaaaataattaataaaaaaatatataatattatagaaaaattagagtttagctatccttataaaaagggtgataatcatattgaatgattttaatacaagtttaagagttgggatttacttaagacta

SEQ ID NO: 15952 - DNA, 260 bp, Unknown; identical to SEQ ID NO: 13967
  Description of Unknown: LeftRegion for integrase B2953 sequence

SEQ ID NO: 15953 - DNA, 260 bp, Unknown
  Description of Unknown: LeftRegion for integrase B2954 sequence
catcttctccgcagaaaagacagggcgttttggaatgagttgaacctaaacgtgcaactctgcttatataaatggctcccagatatgatatttcggaaatgaatttaactttttgactgttgaaagtgtggaaagatttatttttcccagaacttacaacggcttgcaacaagcttaaaactacttgaaaggtggtatttatgcctcgtaaaaagaaactgcaagaggtgggcggcctgcgcctggtggcgtactatcgc

SEQ ID NO: 15954 - DNA, 260 bp, Unknown
  Description of Unknown: LeftRegion for integrase B2955 sequence
aaaaacgccccatcttctccgcagaaaagacagggcgttttggaacgagttgaatctaaacgtgcaactctacttatataaatatctcccagatatgatatttcggaaatgaatttaactttttgactgttgaaagtgtggaaagatttattttccccagaacttgcaacaaacttaaaactacttgaaaggtggtatttatgcctcgcaaaaagaaactgcaagaggttggcggcctgcgccttgtggcgtactatcgc

SEQ ID NO: 15955 - DNA, 260 bp, Unknown; identical to SEQ ID NO: 14628
  Description of Unknown: LeftRegion for integrase B2956 sequence

SEQ ID NO: 15956 - DNA, 260 bp, Unknown
  Description of Unknown: LeftRegion for integrase B2957 sequence
catcttctccgcagaaaagacagggcgttttggaacgagttgaacctaaacgtgcaactctacttatataaatggctcccagatatgatatttcggaaatgaatttaactttttgactgttgaaagtgtggaaagatttatttaccccagaacttgcaacggcttgcaacaaacttaaaactacttgaaaggtggtatttatgcctcgcaaaaagaaactgcaagaggtgggcggcctgcgcctggtggcgtactatcgc

SEQ ID NO: 15957 - DNA, 260 bp, Unknown
  Description of Unknown: LeftRegion for integrase B2958 sequence
ctttttcgtgtatggcaaataaaaacgccccatcttctccgcagaaaagacagggcgttttggaacgagttgaacctaaacgtgcaactctacttatataaattgctcccagataggatatttcggagtggaaagatttatttttcccagaacttgcaacggcttgcaacaaacttaaaactacttgaaaggtggtatttatgcctcgcaaaaagaaactgcaagaggtaggcggcctgcgcctggtggcatactatcgc

SEQ ID NO: 15958 - DNA, 260 bp, Unknown
  Description of Unknown: LeftRegion for integrase B2959 sequence
accgaagaagcaaaaagttctttccgtaaaatgtataaagctggaatatataaagaattatataaacggcagcttttaacagatgcgcaactgaatttgcttttaagcaagaaataagtaatgattagttgcgcatcacaagacaatatggtataatataattgtttcgtggtgtgctattttatcggaggtagcacacaatgcaaaaattaaaagttgcagcatatgccagagtatctacggacaaagatgaccagaca

SEQ ID NO: 15959 - DNA, 260 bp, Unknown
  Description of Unknown: LeftRegion for integrase B2960 sequence
ttggcaatacgaaaatccgtgtaacagaacattttaatagcaagggtaaacatatcaaagatctcgtagaaaatgccgtacaatacgccgcaaatgcggcttaataccggtgacaacagctcgtacttgtgatataattacgcggtaagcttatcataagtgcgagttgtttcactactaaaggaggttgctaaacaacggtgaaacaactgatttatcgcgtcgcgctctatatgcgattgagccgagacgatgaggat

SEQ ID NO: 15960 - DNA, 260 bp, Unknown
  Description of Unknown: LeftRegion for integrase B2961 sequence
ccagcaaatgaccggcaaatagccagcaaataaaaaaatccctcggtgctaccaacaccgagggacctgcaagaacgtgttaccggcacgctcattgtaaccgcctttcgccacaaaagagctgattacatctatattatatcagattttaatcagctctgccactgcatacccattttgcaaaaaggagctgattttttatgtttaaaaatacaaaaatagcggtatattgccgcgtatcgtccgacgagcaggcagag

SEQ ID NO: 15961 - DNA, 260 bp, Unknown
  Description of Unknown: LeftRegion for integrase B2962 sequence
gctcgcccgcctacgatatcactacaatatgctcttccgcacctacacccggtggatggttgtgctttttgccgccaatatgggtctggtgctgctgctctgcggggtaattgcccacaaggagcggggctggctccggcattgataaaaatagcttccggtgtcaatattgacaccggaagggaagagggggtaatattatgcagcggcagcacggggcgtatatctacgcccggtacagcacggaaaaccaggacgcg

SEQ ID NO: 15962 - DNA, 260 bp, Unknown
  Description of Unknown: LeftRegion for integrase B2963 sequence
ggattgcccggctgaggtatcactacaacatgctcttccgcacctacacccgttggatggttgtgctttttgccgccaatatgggtctggtgctgctgctttacggggtgatcgcccacaaggagcggggccggttccggggctgacaaaaaataaattccggtgtcaatattgacaccggaaggaaagaggggaatattatgcagcggcagcacggtgcgtatatctatgccaggtacagcacggaaaaccaggacgcg

SEQ ID NO: 15963 - DNA, 260 bp, Unknown
  Description of Unknown: LeftRegion for integrase B2964 sequence
aaaaacgccccatcttctccgcagaaaagacagggcgttttggaacgagttgaacctaaacgtgcaactttacttatataaatggctcccagatatgatatttcggaaatgaatttaactttttgactgttgaaagtgtggaaagatttattttccccagaacttgcaataaacttaaaactacttgaaaggtggtatttatgcctcgcaaaaagaaactgcaagaggtaggcggactgcggctggtggcgtactatcgc

SEQ ID NO: 15964 - DNA, 260 bp, Unknown
  Description of Unknown: LeftRegion for integrase B2965 sequence
gctattattataccataaagcgattggccttgctatcccctacctttttacagggacagcaaggcttttttatgtccatttttaataaattattgtgataaacatataacagcaaagcattattataataatttatcataaaatctgcattattcttttaaaaaattataactatactttaaaaaggagcgtaaagaattatgaaaagggctgccttatatgcaaggtattctagcgataaccaacggcatgaaagtatt

SEQ ID NO: 15965 - DNA, 260 bp, Unknown
  Description of Unknown: LeftRegion for integrase B2966 sequence
catcttctccgcagaaaagacagggcgttttggaacgagttgaacctaaacgtgcaactctacttatataaatggctcccagatatgatatttcggaaatgaatttaactttttgactgttgaaagtgtggaaagatttattttccccagaacttgcaacggcttgcaacaaacttaaaactacttgaaaggtggtatttatgcctcgcaaaaagaaactgcaagaggttggcggcctgcgcctggtggcgtactatcgc

SEQ ID NO: 15966 - DNA, 260 bp, Unknown
  Description of Unknown: LeftRegion for integrase B2967 sequence
ccgtatatgccgctgtttcagaaagaacttgatatatcctccgaatggttggaaaactcatacacatacacgccaagaccatataagccctcaaagcgcgccctccaaatggaggcggacatcaaagaaactgctcacaagtacataacaaacgaaaaagcccttctgctgggcgcagaagggcgtaacgggtaacagatatgtcagtagatattaaatggcaggtgccaaaggcacagccggaggcaaacgaactggcc

SEQ ID NO: 15967 - DNA, 260 bp, Unknown
  Description of Unknown: LeftRegion for integrase B2968 sequence
tgttctgtttatccgattcaccttacccaaaagtagagatttccctaacagaaaaagagaaaatccttattgacgcataccgtgctgctgatgacatgggacagttgaacataatctatgtctgcctggatgaaatgaaaaaagcaaaaggggacaacgaaagtgccgtgtgattgattttgtagagtggaggaagaaccatgtatgaggatataaaaacagcctgcctatatgtcagattctcaagccataaccagact

SEQ ID NO: 15968 - DNA, 260 bp, Unknown
  Description of Unknown: LeftRegion for integrase B2969 sequence
atatgccctccatccgtcaggcgcgtgtcaaccgctccgttaaccgcactgtcacgctccccgcatggctcaacgctgccgcgctggagcataatatgaacttctcgcaggtgcttcaggacgcgctcaagcagcagctcggcctttgataaagaaaaagcccccggctatatgccgagggctttgaaagaaggtgctatatgaagttaactcacggggcttatattcttgcccgtttctccaccgacaggcaggaggcc

SEQ ID NO: 15969 - DNA, 260 bp, Unknown; identical to SEQ ID NO: 14687
  Description of Unknown: LeftRegion for integrase B2970 sequence

SEQ ID NO: 15970 - DNA, 260 bp, Unknown
  Description of Unknown: LeftRegion for integrase B2971 sequence
ttggcaatacgaaaatccgtgtaacagagcattttaatagcaagggtaaacatatcaaagatctcgtagaaaatgccgtacaatacgccgcaaatgcggcttaataacggtgacaacagctcgtacttgtgatataattacgtggtaagcttatcataagtgcgagttgtttcactactaaaggaggttgctaaacaacggtgaaacaactgatttatcgcgtcgcgctctatatgcgattgagccgagacgatgaggat

SEQ ID NO: 15971 - DNA, 260 bp, Unknown
  Description of Unknown: LeftRegion for integrase B2972 sequence
aatctcctcaataatttctgatgaaataaaatacatgaatatacgaactgcatttatgcttaaggacatcccctataattcatgtgtaatttagtacatttagtactgatttttttaatatatatgtactaaagctcaattaacttagagtacatttatatctacaattatttatatataaaacattggaggtattattaatgaaggctgccatctattcaagaaaatcaaaattcactggcaaaggtgaaagtatagaa

SEQ ID NO: 15972 - DNA, 260 bp, Unknown
  Description of Unknown: LeftRegion for integrase B2973 sequence
ttggcaatacgaaaatccgtgtaacagagcattttaatagtaagggtaaacatatcaaagatctcgtagaaaatgccgtacaatacgccgcaaatgcggcttaataccggtgacaacagctcgtacttgtgatataattacgcggtaagcttatcataagtgcgagttgtttcactactaaaggaggttgctaaacaacggtgaaacaactgatttatcgcgtcgcgctctacatgcgattgagccgagacgatgaagat

SEQ ID NO: 15973 - DNA, 260 bp, Unknown
  Description of Unknown: LeftRegion for integrase B2974 sequence
ctttccatgcgtcgcctgcccttacagcatagcacgctttttcgatatgggcaaataaaagccccggcgctggtacgatgcagcgccggggataacatggagtgcagcacaaaaccggacaaagaaaattttatgcttgcaggggtcagtatatcacactccctgcatatgggcaaaccgcccggaaaggaagtgttatcatgccccgcaaaaaagctcctgcggccgaagcgccgcgcctggtggcttactaccgctac

SEQ ID NO: 15974 - DNA, 260 bp, Unknown
  Description of Unknown: LeftRegion for integrase B2975 sequence
aatctattcaataattcgagatgaacaaaaatataatacaataagaactaattttatgaaaagagaaatacaatataatgcatgtcaaatctagtacataatgtacagatttttatagaaatatgtactataagtaaattaacttaactatatcaaaaatatataattataattatatattttatttggaggtataaataatgaaggctgccatctattcaagaaaatcaaaatttactggtaaaggtgaaagtatagaa

SEQ ID NO: 15975 - DNA, 260 bp, Unknown
  Description of Unknown: LeftRegion for integrase B2976 sequence
tacttgataattcaaagaatcggaaaagagaagtattataagcttaatttggatcggctaaaataaaaaacgcccccggtgctaccaacaccgagagcgtttccgaatcagattgccccataaggtgatatggtaacaaccgaccaacagccatattgtaccaccttgcgggcaggattgcaaacccaaaaggtgataccatgaaaaagaagcaaccaaatacccgccatggccgtgcggcgatttacgcccggtattcg

SEQ ID NO: 15976 - DNA, 260 bp, Unknown; identical to SEQ ID NO: 14687
  Description of Unknown: LeftRegion for integrase B2977 sequence

SEQ ID NO: 15977 - DNA, 260 bp, Unknown
  Description of Unknown: LeftRegion for integrase B2978 sequence
aatacgctaacgaagcgcccattggcgccacttgcaatgctcagagctgtgtaggtgttgacactgccgggacgtttaagatcaacgtggttcagtacgatggaaacggaaataaacagaccgccactttcattgtcaacgttcctgagaactaaaaaagccctcctgctggacgcagaagggcgtaatgggtaacagatatgtcgatagatattaaatggcaggtgccaaaggcacagccggaggccagcgaactggcc

SEQ ID NO: 15978 - DNA, 260 bp, Unknown
  Description of Unknown: LeftRegion for integrase B2979 sequence
atgaagccacaaagaaatatttgaaataaaaaagccgccctactctaccaaagcaaggcggccaagctctcgatgatacgaaagccctaagcaagcatattgtatcatcctgagcagccaaacgcaagcggaactgcagttctttgctggctgttattttttatacccttttttcatacttttaagaaggaggatgcaatatgaacagttatgatatctcattcaggccggaagaagttatacagtatcttcgcaagtcc

SEQ ID NO: 15979 - DNA, 260 bp, Unknown
  Description of Unknown: LeftRegion for integrase B2980 sequence
gatgtctatatgccatcaatccggcaggcacaggttaatcgttctgtaaaccgcactgtcacacttcctgcatggcttaatgctgcagctattgagcgaaatatcaatttctctcaggtactgcaagatgctcttaaaactcaatttcacctttctcaaaaagaagcttagtctttacaatgcaggagggttatcatgccatgttgacagtgttcctgtctaatggaaaaggagattctatgattgctatctacacccga

SEQ ID NO: 15980 - DNA, 260 bp, Unknown
  Description of Unknown: LeftRegion for integrase B2981 sequence
gatgtctatatgccatcaatccgacaggcacaggttaatcgctctgtaaaccgcactgtcacacttcctgcatggctaaacgctgcagctattgagcgaaatatcaatttctctcaggtactgcaagatgctcttaaaactcaatttcacctttctcaaaaagaagcttagtctttacaatgcaggagggttatcatgccatgttgacagtgttcctgtctaatggaaaaggaggctctatgattgctatctacacccga

SEQ ID NO: 15981 - DNA, 260 bp, Unknown
  Description of Unknown: LeftRegion for integrase B2982 sequence
ggacaatctgcagacgctttgttggcgatgcaaccggagtaagagtaataaaacggtataaataaaaaaacgcccccggtgctaccaacaccgagagcgtttccgaatcagattgccccataaggtgatatggtaacaaccgaccaacagccatattgtaccaccttgcgggcaggattgcaaacccaaaaggtgataccatgaaaaagaagcaaccaaatacccgccatggccgggcggcgatttacgcccggtattcg

SEQ ID NO: 15982 - DNA, 260 bp, Unknown
  Description of Unknown: LeftRegion for integrase B2983 sequence
cgcaaacctcggcggcattttgggcgacggcgtaacaaagaaaacaaacttcctcgttttaggtaatttcgactattgctccacgataaaagagggcaagtcaaacaagcataaaaaggcggagcaacttatcctcaaaggacaagaccttcaaattatccccgagagcgtatttttgagtatggttgcggaggattgatatgcaaaacgcggtaatatacgcccgttattcctcccacgggcaaaacgagcaaactatc

SEQ ID NO: 15983 - DNA, 260 bp, Unknown
  Description of Unknown: LeftRegion for integrase B2984 sequence
catatgtagaacattagcaaatagggtaatataataaaagcccctgtgctaccaacacaagagctttaccgatatctaccaagccggagcctgatacaatacccaaacacattgcatattgtatcatataatgcgcccggcttgcaagtaggcgtattttttatacccttttttcatacttttaagaaggaggatgcaatatgaacagttatgatatctcattcaggccggaagaggttatacagtatcttcgtaagtcc

SEQ ID NO: 15984 - DNA, 260 bp, Unknown
  Description of Unknown: LeftRegion for integrase B2985 sequence
atacaaaagaaaaaatctatcatctgccgtttgatcagcagtatgaccgtatcgctattgatgccggaaaaggcgagtgctatacggcgaccgtcaaagaggcggaaaaactcggcttccgacgggctttccgccacagagcgtccgagaaggcttgaagaaaaacaagcatctttcaagcccacacgagggaataagaaatgaaaaaagaaaaggcgaagacgcccgaaaataacagagcagccgtgtatgctcggtac

SEQ ID NO: 15985 - DNA, 260 bp, Unknown
  Description of Unknown: LeftRegion for integrase B2986 sequence
atacaaaagaaaaaatctatcatctgccgtttgatcagcagtatgaccgtatcgctattgatgccggaaaaggcgagtgctatacggcgaccgtcaaagaggcggaaaaactcggcttccggcgggctttccgctacagagcggccgagaaggcttgaagaaaaataagcagctttcaagcccacacgagggaataagaaatgaaaaaagaaaaggcgaagacgcccgagaataacagagcagccgtgtatgctcggtac

SEQ ID NO: 15986 - DNA, 260 bp, Unknown
  Description of Unknown: LeftRegion for integrase B2987 sequence
tttgcaaacgcactggccgggctgcccgtgcttacgacctctgcgatccaacgtaactgcaagtgcggaatcaaccgcgcgtactcgatactacgcaatcttcaggtctacgggcttattcatgaggccggaaaagacacctatgaatggacagaaaaagccctcctgctgggcgcagaagggcgtaacgggtaacagatatgtcgatagatattaaatggcaagtgccaatagcaaagccggaggtcagcgaactggcc

SEQ ID NO: 15987 - DNA, 260 bp, Unknown
  Description of Unknown: LeftRegion for integrase B2988 sequence
ccgcgcatctctgcccttttatggtagcacgggcggtatagcgggtcaagcgctcaaaacgcattacgcaaaataaaatgtccgggtgctggtacgaacagcccccggacggaatgcaacacattaaaaccgataatgcgcctgccgtggatagtataccacactcccggcagccgcgcaaccgaaaggagtgtgatctcatgccccgcaaaaaatccgcaaccggcgctcctgtgtgtctggtggcctattaccgttat

SEQ ID NO: 15988 - DNA, 260 bp, Unknown
  Description of Unknown: LeftRegion for integrase B2989 sequence
gatgtctatatgccatcaatccgacaggcacaggttaatcgttctgtaaaccgcactgtcacacttcctgcatggcttaatgctgcagctattgagcgaaatatcaatttctctcaggtactgcaagatgctcttaaaactcaatttcacctttctcaaaaagaagcttagtctttacaatgcaggagggttatcatgccatgttgacagtgttcctgtctaatggaaaaggagattctatgattgctatctacacccga

SEQ ID NO: 15989 - DNA, 260 bp, Unknown
  Description of Unknown: LeftRegion for integrase B2990 sequence
tttgcaaacgcactggccgggctgcccgtgcttacgacctctgcgatccaacgtaactgcaagtgcggaatcgaccgcgcgtactcgatactacgcaatcttcaggtctacgggcttatccatggggccggaaaagacacctatgaatggacagaaaaagcccttctgctgggcgcagaagggcgtaacgggtaacagatatgtcagtagatattaaatggcaggtgccaaaggcacagccggaggcaaacgaactggcc

SEQ ID NO: 15990 - DNA, 260 bp, Unknown
  Description of Unknown: LeftRegion for integrase B2991 sequence
tttgtagatggaatggtctccatcatcgcgttcaagcttaaagccagcttgcgacagcattttcactaaatcgcgtcttttcacatgatcacctcgcttatctttattttcgtttctgattatattataatacgtaatttacgtaatgtaaagcgaaaaaataagtaatttacgtaatttttttcaaaggagatgactctatgcaaagagcagttatctacgcgcgcttttcctcggacatgcagcgcgaagagtctatt

SEQ ID NO: 15991 - DNA, 260 bp, Unknown
  Description of Unknown: LeftRegion for integrase B2992 sequence
cctttgcaaaacctcagtatttagggctaccagaaaattggttttcgatatttgaggcaatgaactaaaataaaaaacgccctgcggcggcaaccgcagggcgtttggatagaccggcttgcccaaagggcaattaccagaccaagtatctgtaattgtagcaccaccgggcaggctttgcaagctgaacaggtgatattgtgaaaaagaaacaacccaatacccgccatggccgggcggcgatttacgcccggtattcg

SEQ ID NO: 15992 - DNA, 260 bp, Unknown; identical to SEQ ID NO: 13019
  Description of Unknown: LeftRegion for integrase B2993 sequence

SEQ ID NO: 15993 - DNA, 260 bp, Unknown; identical to SEQ ID NO: 13434
  Description of Unknown: LeftRegion for integrase B2994 sequence

SEQ ID NO: 15994 - DNA, 260 bp, Unknown; identical to SEQ ID NO: 14683
  Description of Unknown: LeftRegion for integrase B2995 sequence

SEQ ID NO: 15995 - DNA, 260 bp, Unknown
  Description of Unknown: LeftRegion for integrase B2996 sequence
gtacagacaaaaaataaaacaaatgaggatttgaaatttatttttaaaaaactattagaaaaaaatcttatatcacatcaagaatacttagattgtttaaaacatttaaaatatggggcttaaatagccccataaattttttatatataacaaaatatggtataataaatgtgtgtatgattttgtagaaaggagtattaatggttaaagccgttatatattgtagagtcagcacagatgatgaaatacaaattaatgca

SEQ ID NO: 15996 - DNA, 260 bp, Unknown
  Description of Unknown: LeftRegion for integrase B2997 sequence
ttgcaacgctcagagctgtgtaggcgttgacaacgccgggacgtttaagatcaacgtggttcagtacgatggaaacggaaataaacagaccgccactttcattgtcaacgttcctgagaactaaaaaagccctcctgctgggcgcagaatggcgtaacgggtaaacagatatgtcgatagatattaaatggcaagtgccaatggcaaagccggaggtcagcgaactggccgtcgtatatgcccggtattcaagccacagt

SEQ ID NO: 15997 - DNA, 260 bp, Unknown
  Description of Unknown: LeftRegion for integrase B2998 sequence
gctttacaaagaaacaaacgccaaaacgcagatcgccgcacagatcgctagaaagcgtgtctctttgatgaagccgcaggatgcgttcaatgctgcatatttttccgaactgatcgacgccgtctcccttcatgtgggaggcggcgtcgttctgcatacaaaaacagaaaccgatatttgcgaaagcgaggataaaccgaatggaagtccagagaattccgaaacggacagtttccgtaattgaaccccaaacgtccatc

SEQ ID NO: 15998 - DNA, 260 bp, Unknown
  Description of Unknown: LeftRegion for integrase B2999 sequence
ctagcgcaaagactgaggcagatcgtgacctacaggcggattgtgacacaatcatcgacactcttgagatttgggattgatttaattgcaaaacctccccggcgcgtccaacaccggggaggttaaagggtagtacatttgtcaccagatactacccttttattttagcataaattttggcaaaatgaaaggaaaaaatcatggcgaagcgaaaaaagaagtccatagacagctcagttggcgtatgctatgcccgatac

SEQ ID NO: 15999 - DNA, 260 bp, Unknown
  Description of Unknown: LeftRegion for integrase B3000 sequence
gataagatgatgaaagtgctggaggcggaagccgccgcaggacacaaagcccagctttcgccctaacgctacaagccgcacagaaaaatcgtcattttaccgggcggtaaagaagcagaagccgctatacagacagccgccccatgtggtataatcgaaatacggaatagtggggctggctgtcggaaacggaggattttatgttaagacagaccacccagaaaatcactgccctttatccaagactatcccatgaggac

SEQ ID NO: 16000 - DNA, 260 bp, Unknown; identical to SEQ ID NO: 13421
  Description of Unknown: LeftRegion for integrase B3001 sequence

SEQ ID NO: 16001 - DNA, 260 bp, Unknown
  Description of Unknown: LeftRegion for integrase B3002 sequence
ttgcgcaagaattccagcctttgacagattggggatgatagcggaaaggcgtgaagatttcgagtgcgccgccctgacctatcttgaggccatccactggtacaaaaagtgggggatggctacggaaccttacgagaaaaagctcgaaagagtgaaaaaaaacgcgaggaagaaagctcaaccggaaggggagtgattggttgacagcaccgtttccgaaatacaacaatgaggcagcggttatttatgccagatattca

SEQ ID NO: 16002 - DNA, 260 bp, Unknown
  Description of Unknown: LeftRegion for integrase B3003 sequence
taagatgatgaaagtgctggaggcggaagccgccgcaggacacaaagcccagctttcgccctaacgctacaagccgcacagtaaaaaatcgtcattttgacaggcggtaaagaagcagaagccgctatacagacagccgccccatgtggtataatcgaaatacggaatagtggggctggctgtcggaaacggaggattttatgttaagacagaccacccagaaaatcactgccctttatccaagactatcccatgaggac

SEQ ID NO: 16003 - DNA, 260 bp, Unknown
  Description of Unknown: LeftRegion for integrase B3004 sequence
ctggatcattgacatggttatgatctgttgcaacaaattcaccgacagcaccggcgcggtggtcggtttgaaggttgccgagtataccagacagccggatcctgatcttgcagaggcttctctggaggagcagcgggaggcagcggccgagactgccagagcttacggctataccgtaatagagtcaggcgctcaggataatgtcaacaagtaaaaacacggctcgaaaatatgccgcaggaggtggctcggataattcc

SEQ ID NO: 16004 - DNA, 260 bp, Unknown; identical to SEQ ID NO: 14583
  Description of Unknown: LeftRegion for integrase B3005 sequence

SEQ ID NO: 16005 - DNA, 260 bp, Unknown
  Description of Unknown: LeftRegion for integrase B3006 sequence
aatttaaaagtgatagcacattgataagatttgatgatagagacattgaaactaaagaaaataatgaagatatacttaatatattagtaggattaattataaaaaagatttcagaatattcttaaatagatttgtagttttatctaacttatgctaaactcacaaccagtagataaaattaacaaaagaaagggggtattttggaaaaagcatataatgcttatttaagtgaaaaaattaataatagttttggcggttat

SEQ ID NO: 16006 - DNA, 260 bp, Unknown; identical to SEQ ID NO: 14174
  Description of Unknown: LeftRegion for integrase B3007 sequence

SEQ ID NO: 16007 - DNA, 260 bp, Unknown
  Description of Unknown: LeftRegion for integrase B3008 sequence
ctggatcattgacatggttatgatctgttgcaacaaattcaccgatagcaccggtgcggtggtcggcctgaaggttgccgagtataccagacagccggatcccgatcttgcagaggcttctctggaggagcagcgggaggcagcggccgagactgccagagcttacggctataccgtaatagagtcaggcgctcaggataatgccgacaagtaaaaccgcggctcgaaaatatgccgcaggaggtggctcggataattcc

SEQ ID NO: 16008 - DNA, 260 bp, Unknown; identical to SEQ ID NO: 15989
  Description of Unknown: LeftRegion for integrase B3009 sequence

SEQ ID NO: 16009 - DNA, 260 bp, Unknown
  Description of Unknown: LeftRegion for integrase B3010 sequence
tcaagggagcgacttccacccgataaagaagttcgatgaggataagttatataagtttataaaaagggtagtcgtgaaagattggacggttacgttcgaattctttaacggagtatgcatcactcgctcctataccaatggacagccaggaaacatcaaagattggaagttaaaacaaaaacaacggagggaggaacagaatggacagtaatcagagaatcgtgcggacaatccccgcatcgtttacgaggacaacctcg

SEQ ID NO: 16010 - DNA, 260 bp, Unknown
  Description of Unknown: LeftRegion for integrase B3011 sequence
ccgtatatgccgctgtttcagaaagaacttgatatatcctccgaatggttggaaaactcatacatatacacgccaagaccatataagccctcaaagcgcgccctccaaatggaggcggacatcaaagaaactgctcacaagtacataacaaacgaaaaagcccttctgctgggcgcagaagggcgtaacgggtaacagatatgtcagtagatattaaatggcaggtgccaaaggcacagccggaggcaaacgaactggcc

SEQ ID NO: 16011 - DNA, 260 bp, Unknown; identical to SEQ ID NO: 13002
  Description of Unknown: LeftRegion for integrase B3012 sequence

SEQ ID NO: 16012 - DNA, 260 bp, Unknown
  Description of Unknown: LeftRegion for integrase B3013 sequence
tcagaacctcaaaaaattccaaaagatattgaaaacggcaaaaccgatgaccacgatggatgcggaaatgtgcgatcttttcgtcaagcgcattttagtgatggataggaataaccttatctttgaactgacgagcggacataaggtcaaggtcgaggtgctggatttttataaaacgagagacgaaataaggagggtctatgttaccgagtaatgtgaaaataattaaaccgcgcgctcaagtggtgattgatgagcaa

SEQ ID NO: 16013 - DNA, 260 bp, Unknown
  Description of Unknown: LeftRegion for integrase B3014 sequence
gatgtctatatgccatcaatccgacaggcacaggttaatcgctctgtaaaccgcactgtcacacttcctgcatggctaaacgctgcagctattgagcgaaatatcaatttctctcaggtactgcaagatgctcttaaaactcaatttcacctttctcaaaaagaagcttagtctttacaatgcaggagggttatcatgccatgttgacagtgttcctgtctaatggaaaaggaggctctatgattgctatctatacccga

SEQ ID NO: 16014 - DNA, 260 bp, Unknown
  Description of Unknown: LeftRegion for integrase B3015 sequence
cttacaacgtccgcaattcagcgcaaatgtaaatgcggaaacaactgtgcgtatgcagttcttcaaagcctacaggtctacggaatgattcgagagattcggcaattcacatacgaatggacagaaaaagccctcctgctgggcgcagaagggcgtaacgggtaacagatatgtcgatagatattaaatggcaagtgccaatggcaaggccggaagtcagcgaactggccgtcgtatatgcccggtattcaagccacagt

SEQ ID NO: 16015 - DNA, 260 bp, Unknown
  Description of Unknown: LeftRegion for integrase B3016 sequence
ggacaaattgtggctgccatcgtcggaggagaaactggctctttaaaaaggatgaaatggtcagaaggatctccttatattaaactcattcctgaaaatagtgactttgaaacaaaagaagtcctaccacacgaaattattgtttgtggcgtttattctggtcatttcagacctgattataatatataggagtgtcataaatgtttgataatattttagatgaatactgcatttatctcaggaagtctagaaccgattta

SEQ ID NO: 16016 - DNA, 260 bp, Unknown
  Description of Unknown: LeftRegion for integrase B3017 sequence
gatgtatatatgccatcaatccgacaggcacaggttaatcgttctgtaaaccgcactgtcacacttcctgcatggcttaatgctgcagctattgagcgaaatatcaatttctctcaggtactgcaagatgctcttaaaactcaatttcacctttctcaaaaagaagcttagtctttacaatgcaggagggttatcatgccatgttgacagtgttcctgtctaatggaaaaggagattctatgattgctatctacacccga

SEQ ID NO: 16017 - DNA, 260 bp, Unknown
  Description of Unknown: LeftRegion for integrase B3018 sequence
aggacaatctgcagacgctttgttggcgatgcaaccggagtaagagtaataaaacggtataaataaaaaaaacgcccccagtgcgccaacaccgagagcgtttccatagatcagcttgcccacaaaagtggatacaatcgacccgacaatcgtattgtaccaccttgcgggcaggattgcaaacccaaaaggtgataccaatgaaaaagaaacaacccaatacccgccatggccgggcggcgatttacgcccggtattcg

SEQ ID NO: 16018 - DNA, 260 bp, Unknown
  Description of Unknown: LeftRegion for integrase B3019 sequence
ggaatagaattattgtcatcgagggcatatgcaaaggtgggaaaccgctcggagagctgcttctcgaaatagcaacagacagaatcaataagaagttctattgatggtgcagactggacacatatcattcgcccatgtatattgatggcgtgagtgaatagttgttctggatgtgctgttttcaatttggagagataacaatgagaatacagaacattcacagagtcggaatttacctccggctttctcgggacgatgga

SEQ ID NO: 16019 - DNA, 260 bp, Unknown
  Description of Unknown: LeftRegion for integrase B3020 sequence
agaactggcgtgctgattgtttgcgaacagccaaatgaaagaaagctacgtcaagcggagatagttggcgttcccattctgaacgaaagccagtggtttgaattgattcctgaacttgaagcgcagggaatgtggactggcaaaaccgtctgcgctgacgaaaacggaatttatagggtagtcgtggatggtgatggttgatggccagaaaaaagaatactgccgctggtctggatgccgtcatatatgcccggtattcg

SEQ ID NO: 16020 - DNA, 260 bp, Unknown
  Description of Unknown: LeftRegion for integrase B3021 sequence
acaggtcttttgattgtgtgtagtgacccggcgcaaaagaaaattgacagagccgatgccctgaatattccgattgtttcggagcagcaatggtttgaacttatgctggaacttgaggccattggaatgtggaacggaaagcaaattctgtttgcggacaatgatggcatctaccgtgttgaagtgggcggtgaaagctgatggccagaaaaaagaatattgctgccggcctcgatgccgtcatctatgcccggtactca

SEQ ID NO: 16021 - DNA, 260 bp, Unknown; identical to SEQ ID NO: 13709
  Description of Unknown: LeftRegion for integrase B3022 sequence

SEQ ID NO: 16022 - DNA, 260 bp, Unknown
  Description of Unknown: LeftRegion for integrase B3023 sequence
attggtgttttggttgcgtgtagtaatccaaagcagaagaaaatcgatcaggccaaagctctaaatattccggtcatttcagagcagcagtggtttgagcttatgccagaactggaagcactcggaatgtggaacggaaagccaattccgtttgcagatgataatggaatttaccatattgatgtgggcggtgatggttgatggcccgaaaaaagaatattgctgctggcctcgatgccgtcatctatgcccggtactcg

SEQ ID NO: 16023 - DNA, 260 bp, Unknown; identical to SEQ ID NO: 13506
  Description of Unknown: LeftRegion for integrase B3024 sequence

SEQ ID NO: 16024 - DNA, 260 bp, Unknown
  Description of Unknown: LeftRegion for integrase B3025 sequence
aacggaacgtggtaagcgtttttgggaagaatatcttcgtaaaaaggagaaagaggctcaaaaaacagcctgaattctatcctctattaatttaaataaaaaatgcggtttagcgctttaaagcgttgacaaaatcttttgaaagtgatatactattaaataaagaaaaccaacaacgcaacgacaataaggaggtagcaatgaaggcagtaatttatgctcgttactcatgtgataaccaacgtgaagagagtatcgaa

SEQ ID NO: 16025 - DNA, 260 bp, Unknown; identical to SEQ ID NO: 15097
  Description of Unknown: LeftRegion for integrase B3026 sequence

SEQ ID NO: 16026 - DNA, 260 bp, Unknown
  Description of Unknown: LeftRegion for integrase B3027 sequence
gttatgatatttttcgtgacaaagagggtatatttgtaattccatacggagcgcagcaggtaaaacagcctgatgggcaatatgtttatgattttccgaacgatgaagtaaccgatatgctgaacaagtataactgtaatagatgtgctggcggttatgttacaaaagcacgtgagtgaaattgaaaggagcgtgacggcatgaaaaagcgaatcaacaccaattcagcggctcgtgccgtcatctatgcccggtattca

SEQ ID NO: 16027 - DNA, 260 bp, Unknown; identical to SEQ ID NO: 13711
  Description of Unknown: LeftRegion for integrase B3028 sequence

SEQ ID NO: 16028 - DNA, 260 bp, Unknown; identical to SEQ ID NO: 13018
  Description of Unknown: LeftRegion for integrase B3029 sequence

SEQ ID NO: 16029 - DNA, 260 bp, Unknown; identical to SEQ ID NO: 13158
  Description of Unknown: LeftRegion for integrase B3030 sequence

SEQ ID NO: 16030 - DNA, 260 bp, Unknown
  Description of Unknown: LeftRegion for integrase B3031 sequence
tctggtgatagcgattttgttccagccgcgaaattggctcggagagaaggaatcgattttattctcgatccaatgtgggcagatatcaaggctgatttgtttgaacacatcgacggccttaatagtcaatggaaaaagaaagaaagccaataagggatatttcggtataaggtgccgggttttttaggagggctgaaagagtggaaaaacttgatacgcgcccggtagccgatattctggcccggtactcaacagacaat

SEQ ID NO: 16031 - DNA, 260 bp, Unknown; identical to SEQ ID NO: 15509
  Description of Unknown: LeftRegion for integrase B3032 sequence

SEQ ID NO: 16032 - DNA, 260 bp, Unknown
  Description of Unknown: LeftRegion for integrase B3033 sequence
aagacgggtcttttgattgtgtgtagtgacccggcgcaaaagaaaatcgacagagcggatgccctgaatattccgatcgtttcggagcagcaatggtttgagatcatgccagaacttgaagccgttggaatgtggaacggaaagcgaatcctgttttcagacgacggcatctaccgtgttgaagtgggcggtgaaagctgatggccagaaaaaagaatattgctgctggcctcgatgccgtcatctatgcccggtactca

SEQ ID NO: 16033 - DNA, 260 bp, Unknown
  Description of Unknown: LeftRegion for integrase B3034 sequence
cctaaaggttataaggtatggcgctgctcaaaacctaaagagaaatgtcagatgaagtatctgcgggaaacggagctgtttgaagcatcgaaggaaatcttaggccaaaactatcagggcgaggtagtagagaatatagctaaaattgtaatcaacgatgataccatagactttgtattcaaagatgggagggagcagatatggcaacggcagtaagaacgattccggctacattaaacaagttcaattctaagccagtt

SEQ ID NO: 16034 - DNA, 260 bp, Unknown; identical to SEQ ID NO: 13136
  Description of Unknown: LeftRegion for integrase B3035 sequence

SEQ ID NO: 16035 - DNA, 260 bp, Unknown; identical to SEQ ID NO: 13709
  Description of Unknown: LeftRegion for integrase B3036 sequence

SEQ ID NO: 16036 - DNA, 260 bp, Unknown; identical to SEQ ID NO: 13018
  Description of Unknown: LeftRegion for integrase B3037 sequence

SEQ ID NO: 16037 - DNA, 260 bp, Unknown
  Description of Unknown: LeftRegion for integrase B3038 sequence
gtggaatgacattatcgaaatttcacatatatacagataatggagatatagaaaaaatacaataagtaaaaaatcccccttgctacgccaatagcaaaagggatttaagagtgttatgatataacctcaattccaaatataattatatcataacactccgataaatacaagaaaaatcaaataaaaggagtgtttttttaatgcaaaaaaataataatataggtaacagatgtgtaatttatgcaagatattcttgcagc

SEQ ID NO: 16038 - DNA, 260 bp, Unknown
  Description of Unknown: LeftRegion for integrase B3039 sequence
tataatccaaaagggttattttgagagggctatcagtgtaagggctgatagccctatttttttttgtctaaaaatgaggagtatctctggttattactcaaataacaagtaatgggtttacatagtatcaaaaaggtgtataataactatgagatattatgacaaacctgtacaaattctatcaaacaggaggaaacaggatggtacaggaaagattaagagcggtattttatgcaagagtttctacagaggaggagaaa

SEQ ID NO: 16039 - DNA, 260 bp, Unknown; identical to SEQ ID NO: 15097
  Description of Unknown: LeftRegion for integrase B3040 sequence

SEQ ID NO: 16040 - DNA, 260 bp, Unknown
  Description of Unknown: LeftRegion for integrase B3041 sequence
agaacaggctgcggctgctgaacaggaaaggattgcacaagagcaagctgcagcgcaagcagcacaagagcaggctgcacagcaaagccaagatgaccccatcgtgtatataacaaacactggggcaaagtatcatagcgctggatgcagaactttgaaatctaagatagaaaaacatctgtctgaggtacgcggagtttatgaaccgtgcggcatttgccatccaccacaataaaataaaaaccgcccctgcgccaaca

SEQ ID NO: 16041 - DNA, 260 bp, Unknown
  Description of Unknown: LeftRegion for integrase B3042 sequence
acaggtcttttgattgtgtgtagtgacccggcgcaaaagaaaattgacagagccgatgccttgaatattccaatcatttcagagcagcaatggtatgaactcatgccagaacttgaagccgttggaatgtggaacggaaagcaaattctgtttgcggacaatgatggcatctaccgtgttgaagtgggcggtgaaagctgatggccagaaaaaagaatattgctgctggcctcgatgccgtcatctatgcccggtactcg

SEQ ID NO: 16042 - DNA, 260 bp, Unknown
  Description of Unknown: LeftRegion for integrase B3043 sequence
ctccgcaatctatcgactatgaagccaggacgggtgttttcaaggggtccggcaaaaagccgtatgaggtcaccgaaaccacctgcacctgccgagattattttgtccgcaagctgccgtgcaagcatatctaccggctgcgcatggagcttgccaaggctgacggcgaatagttttcaccagaaaaggagcatgacggcatgagaaaaaagtccaacctcaatgcggctactcgtgccgtcatctatgcccgatattca

SEQ ID NO: 16043 - DNA, 260 bp, Unknown
  Description of Unknown: LeftRegion for integrase B3044 sequence
gacgctcccgtagaaagcggctcaatcatggtcatcatcgtggacgatgacgatgggttcataaagcaagtcagtgttgcagacgatacgatcacgcttcactcctttaaccctgcatatcctcctatggtgttcggcggctctgaattgtccagacttcgtttcattggtcgtgttgttgaacagaaaaggaagttttaatgaaaagaaagaaattcccaatagacctctcaatgctgacagaggaagaaatagaccag

SEQ ID NO: 16044 - DNA, 260 bp, Unknown
  Description of Unknown: LeftRegion for integrase B3045 sequence
ttctttcagcggcacaagaagataaactacaatgcattttacatcaatatgaataaataatacagtatgactaacatccgcacctttgcaaatctaaatctgttaaattaccatagggatgcagaagtgatctgcacccgcacattgacaaccgcatactcaatcagtgcaatcctgtgtaaagcatgaaaggaaaacacatgaaaagaatacatacgttatacagggtgtccaccaagaagcaagtggataaggagaag

SEQ ID NO: 16045 - DNA, 260 bp, Unknown
  Description of Unknown: LeftRegion for integrase B3046 sequence
atctgtgtggaaattttccacacctgtgtccacaccatagtataattcttactcttattcttttcttattcttttcttattctatatgcgtgacgtcacgtgacatgcttgaaaatcgttattattcgggagttgcaacttttttgtttttctctattagagtgttgcaacaatcaaagttacaaacggagcggatgaaagtgaaaacaccagaatacagggatggcgtaatatacgccaggtacagccccggccccaac

SEQ ID NO: 16046 - DNA, 260 bp, Unknown; identical to SEQ ID NO: 13717
  Description of Unknown: LeftRegion for integrase B3047 sequence

SEQ ID NO: 16047 - DNA, 260 bp, Unknown; identical to SEQ ID NO: 13711
  Description of Unknown: LeftRegion for integrase B3048 sequence

SEQ ID NO: 16048 - DNA, 260 bp, Unknown; identical to SEQ ID NO: 13307
  Description of Unknown: LeftRegion for integrase B3049 sequence

SEQ ID NO: 16049 - DNA, 260 bp, Unknown
  Description of Unknown: LeftRegion for integrase B3050 sequence
ttctccaatacaagttgaaattggcaaaggaaatcgaaaatttataacgtacaagattggagatattgatgatataaaaagctactctgacaaaatacaaagcaatttaataaggttgcttgactagaatttcgctattgagtgcgaaccttgactctgctccctgcgtttgcggggagcttttttaggaggatttctgtatgcaacaatactgcttatatctgcgtaaatcccgtgcagacgcagaagccgaagcgcgg

SEQ ID NO: 16050 - DNA, 260 bp, Unknown
  Description of Unknown: LeftRegion for integrase B3051 sequence
cgtcagataatcctacactctctgacatggaacaattattagtaactacattccgtaatacggatacattaggacaggctaatatcatacacgcttgtttggctgagcgtgatagagttgaaaaaggtaaagtcgaacatactgaaaaagaaaagagcattgctgccgtataataaatttgtcagaatggaggaaacgccatgtatgaggatataaaaacagcctgcctatatgtcagattttcaagccataaccagact

SEQ ID NO: 16051 - DNA, 260 bp, Unknown
  Description of Unknown: LeftRegion for integrase B3052 sequence
atgaatagtagttctcatttatatactattcactcttttaaattgtgttcttcatctacaattaaagtaaattaatttagttcagttaatcattatttcttacatatatataaagtagaaattaatatggatagttcttcaattaacgcatcttattatgcttaatcaagaatgtaatttgttaataaggagctgacacaatgataaaaatagctatatattcacgtaaatctgtttttacaggcaaaggagaatctatt

SEQ ID NO: 16052 - DNA, 260 bp, Unknown
  Description of Unknown: LeftRegion for integrase B3053 sequence
cgtcagataatcctactctctctgacatggaacaattattagtaaccacattccgtaatacggatacattaggacaggctaatatcatacacgcttgtttggctgagcgtgatagagttgaaaaaggtaaagtcgaacatactgaaaaagaaaagagcattgctgccgtataataaatttgtcagaatggaggaaacgccatgtatgaggatataaaaacagcctgcctatatgtcagattctcaagccataaccagact

SEQ ID NO: 16053 - DNA, 260 bp, Unknown
  Description of Unknown: LeftRegion for integrase B3054 sequence
ttgcaatgctcagagctgtgtaggtgttgacaatgccgggacgtttaagatcaacgtgattcagtacgatggaaacggaaataagcagactgccactttcgttgtcaacgttcctgagaactaaaaaaagccctcctgctgggcgcagaaggacgtaacgggtaacagatatgtcgatagatattaaatggcaagtgccaatggcaaagccggaggtcagcgaactggccgtcgtatatgcccggtattcaagccacagt

SEQ ID NO: 16054 - DNA, 260 bp, Unknown
  Description of Unknown: LeftRegion for integrase B3055 sequence
caagtgctctaatatctcgcgccaacgacggagatcctggtgatgattatatttccgaaacggaatggatcgttgcctgtaaatctggtgctgttgtctccgcattatgcggtcacactctgtatagatcggttatggagcacattaatcccggcattgtagagtgaataaaggggcacccgtaaaaatggaggggttttatggcggtgtttgcgcaggctgttcagccggattttaacgacgatgtggccgacgttgtg

SEQ ID NO: 16055 - DNA, 260 bp, Unknown; identical to SEQ ID NO: 13018
  Description of Unknown: LeftRegion for integrase B3056 sequence

SEQ ID NO: 16056 - DNA, 260 bp, Unknown; identical to SEQ ID NO: 13821
  Description of Unknown: LeftRegion for integrase B3057 sequence

SEQ ID NO: 16057 - DNA, 260 bp, Unknown
  Description of Unknown: LeftRegion for integrase B3058 sequence
aaaattcaagtatcactacctattgtaattgattcgcctagcgggaaagaagtcgtaaaaggaaatgtggagcgaatgttacagatattaaaaagagattttactaataatcaagttataatcgcatcaatttatagttatgatatagagggaatatccgtccatccaatagaaaagtcgcttatgggtgaggaatttctatgaaagcaatcatttacgctcggtattcgagtgacaatcaaagagaggagagtatcgag

SEQ ID NO: 16058 - DNA, 260 bp, Unknown
  Description of Unknown: LeftRegion for integrase B3059 sequence
cagctcaagcagcgcgcggatttctttcaaaagtttttctttttgcattttttacaccctcctgtattgatttttgccccccataatgatacaatggtctcgtactatttttatttgattatattatgccaaatattggcaacgttgtcaacccattcgacaaacgttgtcaaaacaggtgtgctttcgaggtttttcacatggcttttcaaaaaattaaatcagtcccgccggaaaatgcgctcaacgcagttatatac

SEQ ID NO: 16059 - DNA, 260 bp, Unknown
  Description of Unknown: LeftRegion for integrase B3060 sequence
tgttctgtttatctgattcaccttacccaaaagtagagatttccctaacagaaaaagagaaaatccttattgacgcataccgtgctgctaatgacatgggacagttgaacataatctatgtctgcctggatgaaatgaaaaaagcaaaaggggacaacgaaagtgccgtgtgattgattttgtagagtggaggaagaaccatgtatgaggatataaaaacagcctgcctatacgttagattttcaagccataaccagact

SEQ ID NO: 16060 - DNA, 260 bp, Unknown
  Description of Unknown: LeftRegion for integrase B3061 sequence
tgttctgtttatccgattcaccttatccaaaagtagagatttccctaacagaaaaagagaaaatccttattgacgcataccgtgctgctaatgacatgggacagttgaacataatctatgtctgcctggatgaaatgaaaaaagcaaaaggggacaacgaaagtgccgtgtgattgattttgtagagtggaggaagaaccatgtatgaggatataaaaacagcctgcctatacgttagattctcaagccataaccagact

SEQ ID NO: 16061 - DNA, 260 bp, Unknown
  Description of Unknown: LeftRegion for integrase B3062 sequence
attttatttttgacggtcacactaaatacgccgaatacaatgtatcgcaagttacggctttaagaaaggcgtttggtgaagaagcggcaaatatactactgccgttagcaaagttaaatgatacagggttggcaaaagttcgtaattacatttccgatatgctaaaaatagaggaatatcgcaaatagggggaatattacttgaaatcgaaaaacaagccatttgtacggaaagccgttgcttatgcacggttttcatca

SEQ ID NO: 16062 - DNA, 260 bp, Unknown
  Description of Unknown: LeftRegion for integrase B3063 sequence
gatacacctcccgaaacagatactcttatggttgtcattgttgatgacgaagaaggatttgttaagaaaatcagtattgatgaagatactgtgacccttcgttcttttaacccacactatcctccccgtgtttttggcggtgctgaaattggacgattgcgctttgtcggtagagtcatggagctaaaaaggagatttgcatgaaaaaatttccaatcgacctctcctgtctgacagaggaagaaatctctcaatttcag

SEQ ID NO: 16063 - DNA, 260 bp, Unknown
  Description of Unknown: LeftRegion for integrase B3064 sequence
taattttcgtagaaattagcctcgacacaatttgtgtcgaggctttcttcttttgtacgctatgtattttttcttttgcatgagcatattttatcatatagagtcgactttcacaatcaaaattcctcgcaaaattcgacatgcgttgacaattttcttctaatcatctatgatacaaaaaaaaacaaaggaggtatcttatggaactaaacagaaccggcagatatgtaatgtatctgcgtaagtcccgaaaggacgat

SEQ ID NO: 16064 - DNA, 260 bp, Unknown
  Description of Unknown: LeftRegion for integrase B3065 sequence
tatatcgcttctgaaagcggaataaatacatagggtatcacgacagacacaaaatggtgaggtacgtcctcaccatttttaatgtttggtgatactttatctaatattatttacaaatttacattgtactattgtatttcaaataattctatgatatacttcttttaagatattttagaattaacagagagggtgtttaaatggacgcagtggcatacatcagggtttctacaaacaaggaagaacaagagctaagtctt

SEQ ID NO: 16065 - DNA, 260 bp, Unknown
  Description of Unknown: LeftRegion for integrase B3066 sequence
acagctcaagcagcgcgcggacctctttcaaaagtttttctttttgcatttttacgtcctcccgtattgactttttgcccccttaatgatacaattgtcacgtactattttcatttgattatattatgccaaatattggtaacgatgtcaacccattcgacaaacgttgtcaaaactggtgttcttccgaggtttttcttatggcttttcaaaaaataaaatcagtcccgccggaaaatgcgctcaacgcagttatatac

SEQ ID NO: 16066 - DNA, 260 bp, Unknown; identical to SEQ ID NO: 14662
  Description of Unknown: LeftRegion for integrase B3067 sequence

SEQ ID NO: 16067 - DNA, 260 bp, Unknown
  Description of Unknown: LeftRegion for integrase B3068 sequence
atgaatagtagttctcatttatatactattcactcttttaaattgtgttcttcatctacaattaaagtaaattaatttagttcagttaatcattatttcttacatatatataaagtagaaattaatatgaaaagttcttcaattaacgcatcttattatgcttaatcaagaatgtaaattgttaataaggagctgacacaatgataaaaatagctatatattcacgtaaatctgtttttacaggcaaaggagaatctatt

SEQ ID NO: 16068 - DNA, 260 bp, Unknown; identical to SEQ ID NO: 15329
  Description of Unknown: LeftRegion for integrase B3069 sequence

SEQ ID NO: 16069 - DNA, 260 bp, Unknown
  Description of Unknown: LeftRegion for integrase B3070 sequence
acaggtctcttgattgtgtgcagcgactcaatgcaaaagaaaatcgacagagcggatgccctgaatattccaatcgtttcggagcagcaatggtttgaactcatgccggaacttgaggccgctggaatgtggaacggaaagccaatttcattcgcggatgacgatggtatctaccgttttgatgtgggtggtgatggataatggcaaaaaagaagaagcccgccgggggcattgccgtcatctatgcccgctactcgtcc

SEQ ID NO: 16070 - DNA, 260 bp, Unknown
  Description of Unknown: LeftRegion for integrase B3071 sequence
taactctcaaagatcgcttgttttctcaatcctcattaaatgaacaagaaacggagttagttaatttattccgttcttgtgaaccatctgtgcaatttcaggtaattcatataatgatgacggaaaaagaaaaaacagactctacgaaaaagtctgctatcggataaaatcattgacctgtctaaatggagaaagacattatgaagaaattcaaatttccaatcgacctatccatgctgaccgaagatgaaatagaccaa

SEQ ID NO: 16071 - DNA, 260 bp, Unknown
  Description of Unknown: LeftRegion for integrase B3072 sequence
tgaatttatacaaaagaaaaaccggcccggtgttggcgcaccggaccggccagaatatctccagaagaagatacccctaatccaatcatattggatcttcttccgaacagccttgcaagcggaacttatgttccggtggctgttatttttatactcttttttgcgaggcgcctcgcatacactgtacaggaggataccatatgtaccgagaactacctacattctgtccggaagaaatccttgtctatctgcgaaaatcc

SEQ ID NO: 16072 - DNA, 260 bp, Unknown
  Description of Unknown: LeftRegion for integrase B3073 sequence
aaaagggctttatggtcttagttgattatattataaaaaccgccccaggcggcaacccggaacggttttaagtggattctgtataggcctaagccaatacaatataccctaagcaagtatattgtatcacaaacttttggcacctgtacaggtgtattttttatacctatttttacatatagtagaaaaggagtggtacaatggaatattatatttatctcagaaaaagtcgtaaagacagggaagctgagatgcaaggc

SEQ ID NO: 16073 - DNA, 260 bp, Unknown
  Description of Unknown: LeftRegion for integrase B3074 sequence
cgcagaaattgagagtggctgtattgctgtggtcgtggtagacggtacagaagggtttttaaaacaagtcgagttcggtgagaactccacctcgcttcactcgttcaatccgtattatcccgacatggagtttgtagatgccgaccagaaacgtttgcactttgtcggtcgcgtccgggaaatgaagcggaggttctgatatgcgtaaaaagtttaatatcgacctctccatgctgaccccggaagaacagcagcagttt

SEQ ID NO: 16074 - DNA, 260 bp, Unknown
  Description of Unknown: LeftRegion for integrase B3075 sequence
tcagccgaaacccgctgttgattcggacgaaatgcgcaagtttgttgagatgtgtttcgacccgaaatcccccatgaacgagcgactaaagcaggtccttgtggacctgctacaacaatcaaaaaatgacagccgggtctgatttgatttagcacatactatatgcagtgctgctctggcaacccggcggaaggagtagtatgaaagcagtaatttacgcaagatattcaagcgacaatcagcgcgaggaatccatcgag

SEQ ID NO: 16075 - DNA, 260 bp, Unknown
  Description of Unknown: LeftRegion for integrase B3076 sequence
tgttctgtttatccgattcaccttacccaaaagtagagatttccctaacagaaaaagagaaaatccttattgacgcataccgtgctgctaatgacatgggacagttgaacataatctatgtctgcctggatgaaatgaaaaaagcaaaaggggacaacgaaagtgccgtgtgattgattttgtagagtggaggaagaaccatgtatgaggatataaaaacagcctgcctatacgttagattctcaagccataaccagact

SEQ ID NO: 16076 - DNA, 260 bp, Unknown
  Description of Unknown: LeftRegion for integrase B3077 sequence
attatctattctgtttatccgattcgccttacccgaaagtagagatttccctaacggaagaagagcaattactgcttgacgcattccgttccgctaccacacaaggtagattcaacattattactacctgtatgtgtgagaagcgaaaaggggacaacgaaagtgccgggtaattgatttcatagaatggaggaagaaccatgtatgaggatataaaaacagcctgcctatacgttagattctcaagccataaccagact

SEQ ID NO: 16077 - DNA, 260 bp, Unknown
  Description of Unknown: LeftRegion for integrase B3078 sequence
tataatccaaaagggttattttgagagggctatcagtgtaagggctgatagccctatttttttttgtctaaatttcaggagatttctggttattactcaaataataagtaatgggtttacatagtatcaaaaagatgtataataagtatgagatattatgacaaacctgtacaaattctaatcaacaggaggaaaacaggatggtacaggagaaattaagagcggtattttatgcaagggtatctacagaggaagagaaa

SEQ ID NO: 16078 - DNA, 260 bp, Unknown; identical to SEQ ID NO: 15966
  Description of Unknown: LeftRegion for integrase B3079 sequence

SEQ ID NO: 16079 - DNA, 260 bp, Unknown
  Description of Unknown: LeftRegion for integrase B3080 sequence
aatctgcttttgttgatctacgctgagtgcttcaaacatggtcaaagcttccttgtcagaaaccttaccttctttgttagtgatatgacatattctactccaatcttaggaagttcttcctatgtattagcgccaagtgatattatagcactttatctttcgtttgccattggtaaatagaggaaaggataacggacattatgacagttaaaaaatttccaatcgacctctcctgtctgacagaggaagaaatctctcaa

SEQ ID NO: 16080 - DNA, 260 bp, Unknown
  Description of Unknown: LeftRegion for integrase B3081 sequence
gcagaactttaaggagcatctgaaccggatttcttaaatttaaaataaaaagcccctgtgctaccaacacagaagcttttcattgatttctcttactggacaatccagaaagatacaatcagaatcatcacctgaattatatcattcctgggacgtcctggcaagagggcgtattttttatacttataaggagtgatattatgttggtttttggaatctatgcaagaaaatccctacacagcgaccagtcagatagtgtg

SEQ ID NO: 16081 - DNA, 260 bp, Unknown
  Description of Unknown: LeftRegion for integrase B3082 sequence
tatgccaaaatactgtcagcactaccggcatttacgcctactgaaatacagcagaaatgtgattgcagtttcgctggtgcattagctattttgcagcgattgctcgcctgcgggctgatctcacagtgccgagtaggaacttacacatggacagaaaaagctctcctgctaggcgcagaagagcttaaaggatgataattatgtcaatggatattaagtggcagaagccaaaagcaaataacggcgaactggccgtcgta

SEQ ID NO: 16082 - DNA, 260 bp, Unknown
  Description of Unknown: LeftRegion for integrase B3083 sequence
atatcgcttctgaaagcggaataaatacataatggtatcgcaataaacacaaaatggtgaggtacgtcctcaccatttttaatgtttggtgatactttatctaatattatttacaaatttacattgtactattgtatttcaaataattctatgatatacttcttttaagatattttagaattaacagagagggtgtttaaatggacgcagtggcatacatcagggtttctacaaacaaggaagaacaagagctaagtctt

SEQ ID NO: 16083 - DNA, 260 bp, Unknown
  Description of Unknown: LeftRegion for integrase B3084 sequence
tgttctgtttatccgattcaccttacccaaaagtagagatttccctaacagaaaaagagaaaatccttattgacgcataccgtgctgctaatgacatgggacagttgaacataatctatgtctgcctggatgaaatgaaaaaagcaaaaggggacaacgcaagtgccgtgtgattgattttgtagagtggaggaagaaccatgtatgaggatataaaaacagcctgcctatacgttagattctcaagccataaccagact

SEQ ID NO: 16084 - DNA, 260 bp, Unknown; identical to SEQ ID NO: 16075
  Description of Unknown: LeftRegion for integrase B3085 sequence

SEQ ID NO: 16085 - DNA, 260 bp, Unknown
  Description of Unknown: LeftRegion for integrase B3086 sequence
cagacttgcgcagacttgcagaattttacggcgttggtcttgattatttcggtgtgaatacaacagatgaaagttttgagttgttgagccgtgcaaaaagtgtttttctgaatgaaaatatcccaaaagaagaaaaagaaagactttacaaaagcattatgaaaatttatttgcaaatggactaacaggaggggttttgcttgaaatcgaagaacaaacagtatatacggaaagccgttgcttatgcacggttttcatca

SEQ ID NO: 16086 - DNA, 260 bp, Unknown
  Description of Unknown: LeftRegion for integrase B3087 sequence
attatctattttgtttatctgattcaccttgcccgaaagtagagatttccctaacggaagaagagcaattactgcttgacgcatttcgttccgctaccccacaaggcagattcaacattattaccacctgtatgtgtgagaagcgaaaaggggacaacgaaagtgtcgggtaattgatttcatagaatggaggaagaaccatgtatgaggatataaaaacagcctgcctatacgttagattctcaagccataaccagact

SEQ ID NO: 16087 - DNA, 260 bp, Unknown
  Description of Unknown: LeftRegion for integrase B3088 sequence
catcgaataatcctacactttctgacatggaacaattattagtaactacattccgtaatacggatacattaggacaggctaatatcatacacgcttgtttaactgagcgtgatagagttgaaaaaggtaaagtcgaacatactgaaaaagaaatgagcattgctgccgtataatcaatttatcagaatggaggaagaaccatgtatgaggatataaaaacagcctgcctatacgttagattctcaagccataaccagact

SEQ ID NO: 16088 - DNA, 260 bp, Unknown
  Description of Unknown: LeftRegion for integrase B3089 sequence
gtgtaagaaacttggcggaaatgctgttatagactgccagtttgagtacagaaacgccgttgaagccaaactcatcggtaaagacaatcaggcaattgagattttcgcatacggtactgctgttaagtatgaagattaaccgttttgggatttgttctgctccccgcgattgcggggagcttttttaggaggatttctgtatgcaacaatactgcttatatctgcgtaaatcccgtgcagacgcagaagccgaagcgcgg

SEQ ID NO: 16089 - DNA, 260 bp, Unknown
  Description of Unknown: LeftRegion for integrase B3090 sequence
cttacgacctctgcgatccaacgtaactgcaagtgcggaatcaaccgcgcgtactcgatactacgcaatcttcaggtctacgggcttattcatgaggccggaaaagacacctatgaatggacagaaaaagccctcctgctgggcgcagaagggcgtaacgggtaacagatatgtcgatagatattaaatggcaagtgccaatggcaaagccggaggtcagcgaactggccgtcgtatatgcccggtattcaagccacagt

SEQ ID NO: 16090 - DNA, 260 bp, Unknown; identical to SEQ ID NO: 14900
  Description of Unknown: LeftRegion for integrase B3091 sequence

SEQ ID NO: 16091 - DNA, 260 bp, Unknown
  Description of Unknown: LeftRegion for integrase B3092 sequence
tagttatgatattttccgtgacaaagagggcgtattcgttattccatacggagcgcagcaggtaaaacagcccggtgggcaatatgtttatgattttccgaacgatgaagtaaccgatatgctgaataagcatcattgcaatagatgtgctggcggttatgttacaaaggcgcgcgagtaagcccgaggagcgtgacggcatgaaaaagcgaatcaacactaattccgcagcccgtgccgtcatctatgcccggtattcc

SEQ ID NO: 16092 - DNA, 260 bp, Unknown
  Description of Unknown: LeftRegion for integrase B3093 sequence
gatatatcctctgaatggttggaaaactcatacacatacacgccaaagccgtataagccttcaaagcgcgccctccaaatggaggcggacatcaaagaaactgctcacaaatacataacaagcgaaaaagccctcctgctgggcgcagaagggcgtaacgggtaacagatatgtcgatagatattaaatggcaattgccaatggcaaagccagaggtcagcgaactggccgtcgtatatgcccggtattcaagccacagt

SEQ ID NO: 16093 - DNA, 260 bp, Unknown
  Description of Unknown: LeftRegion for integrase B3094 sequence
tatatggtatcgcacgcaaactttttgggaaaatcatcatggtataccgtagtgatacctcgcgtgcgcgcgtgcgtgtgcgcgcgatcgtgcgcgcactgtctctgtacctgtatctgtatctgagactgtatctgtattctgtttctgattctgaatatctactactgcaaatctatcgttagaagggggtggcgctgttgccgagaaaacctgcaaagcacccggcgaagccgaagcggggcaagaagctggaagtc

SEQ ID NO: 16094 - DNA, 260 bp, Unknown; identical to SEQ ID NO: 16074
  Description of Unknown: LeftRegion for integrase B3095 sequence

SEQ ID NO: 16095 - DNA, 260 bp, Unknown
  Description of Unknown: LeftRegion for integrase B3096 sequence
cttctaatgcaaccaagatatggctaacaagctctggaaactgtctgctttgtcacaatcgctctcaaataccaaatcatgtacttcgtaacatcatgcgaatgattgaagcgcggcacaatgatgttgttcgtgcatggctaaagtattttggagaaattcgatactatatttaataactcttatgaaaggaattttctatggaactaaacagaaccggcagatatgtaatgtatctgcgtaagtcccgaaaagacgat

SEQ ID NO: 16096 - DNA, 260 bp, Unknown; identical to SEQ ID NO: 13007
  Description of Unknown: LeftRegion for integrase B3097 sequence

SEQ ID NO: 16097 - DNA, 260 bp, Unknown
  Description of Unknown: LeftRegion for integrase B3098 sequence
cagctggctgaggccaaggcccgcattaagcaccttaccattgccctggcggcttgtgttattttttttgtactcatttgggtggtcgatctcctgaaccgtgacgttggctggttccgcgacgccctcggcttcggcttggacgccgcccgtcccgctggcgcggcgtacctggcccccctggcctggaggtggcgctgatgcagaggccccacggcgcgtatatcctcgcgcgctactccacggacagccaaaacccg

SEQ ID NO: 16098 - DNA, 260 bp, Unknown
  Description of Unknown: LeftRegion for integrase B3099 sequence
cgcagaaattgagagcggctgtattgccgtggtcgtggtggacggtacagaagggtttttaaaacaagtcgagttcggtgagaattccacctcgcttcactcgttcaatccgtattatcccgacatggagtttgtagatgccgaccagaaacgtttgcattttatcggtcgcgtccgggaaatgaagcggaggttctgatatgcctcagaagtttaaaatcgacctctctatgctgaccccagaagaacagcagcagttt

SEQ ID NO: 16099 - DNA, 260 bp, Unknown
  Description of Unknown: LeftRegion for integrase B3100 sequence
aagcgtttgagcgcattcggaacatcctgcttgccaccagctatacgaagaaggtaggttgacatcatggacgaatgcagaatcaaacgctatactgagtgcggtaacgggcgatattacaaaccgagccattgccggacgttctttgacaacgaaataaagcctatccccacttttatgatgaaagtgaggaatttacaatgacaagaaataacaatcgcgtgtgctgcttgtaccgcgtttccaccgataagcaggtg

SEQ ID NO: 16100 - DNA, 260 bp, Unknown
  Description of Unknown: LeftRegion for integrase B3101 sequence
tccgatcttggtatatctcttacggaagcattgcgaaaagaaaaaagctatgaacaaaatcaagccgcaaaaaatgcttgttctgctatacacacttttcttgaaagtattagacagcttcccgaacgtgaacgctccacaataataaaagagctttattatttctgctctgaatacttgaaaatgaagggggaatagcaatgcagcaagcattaaacgcggtcatatacgcccgctattcttcccatagccagcaggaa

SEQ ID NO: 16101 - DNA, 260 bp, Unknown
  Description of Unknown: LeftRegion for integrase B3102 sequence
tgcagccattataagccttgtcggcatcggaatcatcgccattccgacgggcattatttccgctggattcacgtctttgattggaaaggatagagaagaaaccgacaaaaagaactattgcccatattgcggccacaggctcgacgaataacaaagcgtttttgcattttctgaaaaaaagtttacgagtaggtgattgcatgaaagcggccatatacgcccgtttttcgagccataatcaacgtgaggaatccattgaa

SEQ ID NO: 16102 - DNA, 260 bp, Unknown; identical to SEQ ID NO: 15220
  Description of Unknown: LeftRegion for integrase B3103 sequence

SEQ ID NO: 16103 - DNA, 260 bp, Unknown
  Description of Unknown: LeftRegion for integrase B3104 sequence
ttgccgaatatgcaaaaacccattttgaaaaatccgtaaaaaagactttgacaattcccgcatggcttaatcaagccgcgttggagcacaatattaatttttcacaggttttacaagatgcgttgaaagcacaattacatttaaactaactctcccctactctctcctatccttttatgtctcaagaaagaaggtgtaacatgaaaggggtaatctatgcccggtacagttccgacaagcaaacagagcaatccatagaa

SEQ ID NO: 16104 - DNA, 260 bp, Unknown
  Description of Unknown: LeftRegion for integrase B3105 sequence
acttactgggtcttagtgaagtcagaaaaccagaagtcttagttttgtcagaaaaagagaaaatcctcattgacgcataccgtactgctaatgacatgggacaattaaacataatctatgtctgcatggatgaaatgaaaaaagcaaaaggggaaggcgtacttgtagggtaattgatttcatagaatggaggaagaaccatgtatgaggatataaaaacagcctgcctatacgttagattctcaagccataaccagact

SEQ ID NO: 16105 - DNA, 260 bp, Unknown
  Description of Unknown: LeftRegion for integrase B3106 sequence
atgcacgggttgtgctgtttgcttacaacgccaccgagtacatggtgcttgcacagctgacaatacacgatcagccctctgacgtttcccgtgaattggattcaattttaaatagtatccaattttcggcaattgatagcgaatgattacgaaaaaaacgccctgcggtttcccgcggggtgttgatatatcggaaaggaatggtacttttggacacatactgtatatatctacggaaatcgcgtgcagacgcagaagcc

SEQ ID NO: 16106 - DNA, 260 bp, Unknown
  Description of Unknown: LeftRegion for integrase B3107 sequence
aaaaaaccaatacgcaaaagataataattggacattaataagaataccatttactgaatacgataacatagaacaaatattagctgaatatatagaacaggaacaagttatataaattatatagcttgtttttttattgtataaattaacacatatttccacataattaaagtataatcaatatgtggaggtgaaatacaatggagcagaaggtagcaatttactgtagagtctcaactcaaagcaacgaccaagcgaat

SEQ ID NO: 16107 - DNA, 260 bp, Unknown
  Description of Unknown: LeftRegion for integrase B3108 sequence
aagcatttgagcgcattcggaacatcctgcttgccaccagctacacgaagaaggtaggttgacatcatggacgaatgcagaatcaaacgctatactgagtgcggtgatgggcggtgccacaaaccgagccattgccggacgttctttgacaacgaaataagtcctgtccccgcttttgttatgaaagtgaggaatttacaatgacagaaaacaacaaccgtgtctgctgcttgtaccgcgtttccaccgataagcaggtg

SEQ ID NO: 16108 - DNA, 260 bp, Unknown
  Description of Unknown: LeftRegion for integrase B3109 sequence
gcgcaggcttgcggaatgttacggcgtcgggcttgattatttcggcattgcaaccgctgacgaagtgcttgaactgttagcacgggcaaaagaagtttttgaaagtgatcagataagcaaagagcgtaaaaacgaattgtttgacgcaattatgcggttaaaactcaatataaaataaaagcatatacgggggatttattttgactaacaactacacacaacagaaaaaagaattattatatgatatggtgtcgggcgtt

SEQ ID NO: 16109 - DNA, 260 bp, Unknown
  Description of Unknown: LeftRegion for integrase B3110 sequence
ttgccgaatatgcaaaaacccattttgaaaaatccgtaaaaaagactttgacaattcccgcatggcttaatcaagccgcgttggagcacaatattaatttttcacaggtcttacaagatgcgttgaaagcacaattacatttaaactaactctcccctactctctcctatccttttatgtctcaagaaagaaggtgtaacatgaaaggggtaatctatgcccggtacagttccgacaagcaaacagagcaatccatagaa

SEQ ID NO: 16110 - DNA, 260 bp, Unknown
  Description of Unknown: LeftRegion for integrase B3111 sequence
gaaagatctcggcaaggatcgctgctcaaatcggcgccaacatcattatggcagacatcaggagtacagcttaagaacatgtaaattgagggtaatatgcccttgttccgccaaaaactttgttagatattctttagcttttaagatagctattaaggaaagggtgtggtattgtttgttgcgataggaggtgaacaagcatgggaaaaactatgaccgagggcagttctgctctgaaagaaaagcgggtcatcgtcatt

SEQ ID NO: 16111 - DNA, 260 bp, Unknown
  Description of Unknown: LeftRegion for integrase B3112 sequence
cctgacgaaaggagctgtcaaagctgaatatcaagatcgattataacggcattgacaagtccggaaaaatcgccgttgtttatgccagatattcttcccatagtcaaggcgaacagtccattgaaggacagcttgccgctgcgaaagcgtatgccgatgcgcggggatatacaatcgttcatgagtatatcgaccgcgccatgaccggcaggaacgacaaccgcgatgaatttcagcaaatgctttctgactgtgcaaag

SEQ ID NO: 16112 - DNA, 260 bp, Unknown
  Description of Unknown: LeftRegion for integrase B3113 sequence
aagcatttgagcgcattcggaacatcctgcttgccaccagctatacgaagaaggtaggttgacatcatggacgaatgcagaaccaaacgctatactgagtgcggtaacgggcggtgctacaagccgaaccattgccggacgttctttgacaacgaaataaagcctgtccccacttttgttatgaaagtgaggaatttacaatgacagaaaacaacaaccgcgtctgctgcttgtaccgcgtttccaccgataagcaggtg

SEQ ID NO: 16113 - DNA, 260 bp, Unknown
  Description of Unknown: LeftRegion for integrase B3114 sequence
aagcgtttgagcgcattcggaacatcctgcttgccaccagctatacgaagaaggtaggttgacatcatggacgaatgcagaaccaaacgctatactgagtgcggtaacgggcggtgctacaagccgaaccattgccggacgttctttgacaacggaataaagtctgtccccacttttgttatgaaagtgaggaatttgtaatgacagaaaacaacaaccgtgtctgttgcttgtaccgcgtttccaccgataagcaggtg

SEQ ID NO: 16114 - DNA, 260 bp, Unknown; identical to SEQ ID NO: 16113
  Description of Unknown: LeftRegion for integrase B3115 sequence

SEQ ID NO: 16115 - DNA, 260 bp, Unknown
  Description of Unknown: LeftRegion for integrase B3116 sequence
agagtgtgcaaaggatttgtttcataataaaatatcagccttgtgagtataaaaacttgcaaggcttttttcgcaaaatatcttcgcattttaccgacattggtctggatattacattatataatggtataatgtaatcagagagaaatctcaactcagactaagaatagtgtcggtgcaaatgagaaagagaggttaaaatgattgttacaaaaccgacgcaagaaaaaacattaaaaacagtttactgcttatacaga

SEQ ID NO: 16116 - DNA, 260 bp, Unknown
  Description of Unknown: LeftRegion for integrase B3117 sequence
cgcagaaattgagagcggctgtattgccgtggccgttgtagacggtacagaagggtttttaaaacaagtcgagttcggtgagaactccacctcgcttcactcgttcaatccgtattatcccgacatggagtttgtagatgccgaccagaaacgtttgcactttatcggtcgcgtccgagaaatgaagcggaggttctgatatgcctcagaagtttaaaatcgacctctctatgctgaccccggaagaacagcagcagttt

SEQ ID NO: 16117 - DNA, 260 bp, Unknown
  Description of Unknown: LeftRegion for integrase B3118 sequence
atggacggcggcttgaaacactcttttgaagtaaaaaacagagtaaccgctataattggaaaatggacggtttatcaagcgcaaaagcgccttccccttttagaactctgtcaagacttatccgaagaagaattgcttgaagtaattaactatatcaagtttgttcaatctaagcggcaagcggagaaggaggaatagcaatgcagcaagcattgaacgcggttatatatgcccgctattcctcccatagccagcaggaa

SEQ ID NO: 16118 - DNA, 260 bp, Unknown
  Description of Unknown: LeftRegion for integrase B3119 sequence
attatctattctgtttatctgattcaccttacccgaaagtagagatttccctaaccgaagaagagcaattactgcttgacgcattccgttccgctaccccacaaggtagatttaacattattactacctgtatgtgcgagaagcgaaaaggggacaacgaaagtgccgggtgattgattttgtagagtggaggaataaccatgtatgaggatataaaaacagcctgcctatacgttagattctcaagccataaccagact

SEQ ID NO: 16119 - DNA, 260 bp, Unknown; identical to SEQ ID NO: 13002
  Description of Unknown: LeftRegion for integrase B3120 sequence

SEQ ID NO: 16120 - DNA, 260 bp, Unknown; identical to SEQ ID NO: 13073
  Description of Unknown: LeftRegion for integrase B3121 sequence

SEQ ID NO: 16121 - DNA, 260 bp, Unknown
  Description of Unknown: LeftRegion for integrase B3122 sequence
cagctggctgaggccaaggcccgcattaagcacctgaccattgccctggcggcttgtgttattttttttgtactcattttggtggtcgatctcctaaaccgtgacgtcggctggttccgcgatgccctcggcctcggcctggacgccgcccgtcccgctggcgcggcgtatctggcccccctggcctggaggtgtcgctgatgcagaggccccacggcgcgtatatcctcgcgcgctactccacagacaaccaaaacccg

SEQ ID NO: 16122 - DNA, 260 bp, Unknown; identical to SEQ ID NO: 16019
  Description of Unknown: LeftRegion for integrase B3123 sequence

SEQ ID NO: 16123 - DNA, 260 bp, Unknown
  Description of Unknown: LeftRegion for integrase B3124 sequence
gaataaaagtagagggaatcattcaaggtctacttttacaagataaataccaaacaaaacaaaagttagggtaattagagaaggaaaaattatacgtataaagtttaagaaggaatagatacggcagattgtgtatgccagaactgcgtatacacctggaaagcctgagtgtgtagccgtatacagagaggaggcactgcatggcaaaagcaaaacaaaaagcagctacaaatgatataagcaaactcgctgttatatat

SEQ ID NO: 16124 - DNA, 260 bp, Unknown
  Description of Unknown: LeftRegion for integrase B3125 sequence
gatgaaaaagtattcaaaagtgaaatctttaaaatcatttctaagcccaatcatttattaacttttatttttaaagatggtagcgaaagagacatcacttggagtaatccttctagaagtaaatcatggactccggaaatgaaagaagtagccagacaaaggtcactaaaactttataaaaagagaggagaggatggaagatggctaaaagaaaaataacggttattccttcaacaataaatcctttaacgcagaccccg

SEQ ID NO: 16125 - DNA, 260 bp, Unknown; identical to SEQ ID NO: 15537
  Description of Unknown: LeftRegion for integrase B3126 sequence

SEQ ID NO: 16126 - DNA, 260 bp, Unknown
  Description of Unknown: LeftRegion for integrase B3127 sequence
aaggtggaggacggcgtcaccaaaaagacaaactttctcgtcctcggcagcaccgattactgctcctccctcaacggcgccaagagcagcaagcaactcaaggccgaaaagctcatcgcggaagggcaggaccttgtcattataaccgaggcggaatttttggaaatgacgctctattttaatccggaaaacgaagacttatgaacgccgtcatatatgcgcgctactcctcctacaaccagaccgagcgcagcattgag

SEQ ID NO: 16127 - DNA, 260 bp, Unknown
  Description of Unknown: LeftRegion for integrase B3128 sequence
catattagaaaataagattaagtccattttaaaagatgaagaaaaatatataaaaattaaatctatatttaaaatttatgaagttcaatataatgcttgtaatatataattatccctttaaatgtgctttttatttattctaaatcaatttaacaatttaaaatattaacttatattaatgaatagtatgtattaaaggggtgattaaaattagagcagcaatatatgttagaaaatctagattatcagaaaaaggtgaa

SEQ ID NO: 16128 - DNA, 260 bp, Unknown
  Description of Unknown: LeftRegion for integrase B3129 sequence
aagcatttgaacgcattcggaacatcctgcttgccaccagctacacgaagaaggtaggttgacatcatggacgaatgcagaatcaaacgctatactgagtgcggtgatgggcggtgccacaaaccgagccattgccggacgttctttgacaacgaaataaagcctgtccccacttttgttatgaaagtgaggaatttacaatgacagaaaacaacaaccgcgtctgctgcttgtaccgcgtttccaccgataagcaggtg

SEQ ID NO: 16129 - DNA, 260 bp, Unknown
  Description of Unknown: LeftRegion for integrase B3130 sequence
gctttttatcaattagctaatatgttatacttaccagaggaacaaatagcaatatgtccgatatgccatagattttttatacggaaaaatgccaatcaaaaatattgtcataatactaaagttgttaatggaatagaaaggcgaacttgttatgctcaaaaaatgtataagagaaatcaaagcagaaaggaatcagaataatgaatgttgtaatatatgctcgtttcagttcaagtggacagagagaagaaagtattgaa

SEQ ID NO: 16130 - DNA, 260 bp, Unknown
  Description of Unknown: LeftRegion for integrase B3131 sequence
aagatttcttattaagtaaatgaacactgatttaagccttgtaagtgtaaaaaacttgcaaggctttttttcgcaaattatcttcgcatttcaccgccattggtctggatattacattatataatggtataatgtaatcagagagaaatctcaactcagactaagaatagtgtcggtacaaatgagaaagagaggttaaaatgattgctacaaaaccgacgcaagaaaaaacagtgaaaacagtttactgcttatacaga

SEQ ID NO: 16131 - DNA, 260 bp, Unknown
  Description of Unknown: LeftRegion for integrase B3132 sequence
taatttataaaattgaatcaatagtaagagatgaagaaaggtatattagaataaaagaaaaaattaaactttatgaagttcaatttaacacctgcaatatatgatgcatcttaaacttacttacactttaaatttatctataatctatttaagtattttaaataatatcttaaagtaatgaataagtatgtatcaaaggggtgattaaaattagagctgcaatatatgttagaaaatctagattatcagaaaaaggtgaa

SEQ ID NO: 16132 - DNA, 260 bp, Unknown
  Description of Unknown: LeftRegion for integrase B3133 sequence
cgccgcacgggatcggcatttggaatccgtaaatcgtgataaaatgatttggcgcgttgtggccctttcgttgattgggctgctttgtgtgtggtttatctgggatgttaccggcggcaatcgcgggcttatccgctatggccaatcgtccttcctccccgtcagccgcctttttcatcttggaaaaggaggcgttttccatgtctgaaaaatacgccatctatttgagaaaaagccgggccgatatggaggcagaggcc

SEQ ID NO: 16133 - DNA, 260 bp, Unknown; identical to SEQ ID NO: 13129
  Description of Unknown: LeftRegion for integrase B3134 sequence

SEQ ID NO: 16134 - DNA, 260 bp, Unknown
  Description of Unknown: LeftRegion for integrase B3135 sequence
atttactaaaatagccgctgctgaagattatagaaaaactcttgtaattgaaaaatcaattaatattaaaaatacaactaaaattgcttaaatatatttaaaccctacaattaaatttgtagggttggttatctattagaataattttctacttaaaatgtataatattaaattatatactaatgtatgaggtgaaataaatgaaagttgcaatatactcaagaaaaagcgtttttactggaaaaggtgaatctattgag

SEQ ID NO: 16135 - DNA, 260 bp, Unknown
  Description of Unknown: LeftRegion for integrase B3136 sequence
atctttaacaactgttggctatggcgatatatacccggtatcaaccgccgggcgtgttttcactatgctgtcgtcgctggttggtattgccgttgtagccttgcctgccggtatcataacggcggggtacatggacgcactgcgcgaagattccgacaaaaagaaatagcccgccgatcggcgggcaggggggtgcttatatgcgagcgtttatctattgccgattttccagccataagcagcaagagcttagcatagag

SEQ ID NO: 16136 - DNA, 260 bp, Unknown; identical to SEQ ID NO: 13018
  Description of Unknown: LeftRegion for integrase B3137 sequence

SEQ ID NO: 16137 - DNA, 260 bp, Unknown
  Description of Unknown: LeftRegion for integrase B3138 sequence
ccagcactaataacatcgcaaaaaagctcacgaactccatcttgcaaagccttgccgattactacgactctgccccaaagcattatgagcctccatacgcagaggacgacgagggcgcgtgctgtgaggacggtgacggtgacggcgacgatgactgtaccaatacccctttttgtgtgtgatgctccgtggataaggctgtgatctacgcccgctactccagcggtgcccaaaaggatgtgtcaatcgaccagcaagtc

SEQ ID NO: 16138 - DNA, 260 bp, Unknown
  Description of Unknown: LeftRegion for integrase B3139 sequence
cgccgcgcgggatcggcatttggaatccgtaaatcgtgataaaatgatttggcgcgttgtggccctttcgttgattgggctgctttgtgtgtggttcatttgggatgttaccggcggcaatcgcgggcttatccgctatggccaatcgtccttccaccccgtcagccgcctttttcatcttggaaaaggaggcgctttccatgcctgaaaaatacgccatctatttgagaaaaagccgggccgatatggaggcagaggcc

SEQ ID NO: 16139 - DNA, 260 bp, Unknown; identical to SEQ ID NO: 13377
  Description of Unknown: LeftRegion for integrase B3140 sequence

SEQ ID NO: 16140 - DNA, 260 bp, Unknown
  Description of Unknown: LeftRegion for integrase B3141 sequence
catcttctccgcagaaaagacagggcgttttggaacgagttgaacctaaacgtgcaactctacttatataaatggctcccagatatgatatttcggaaatgaatttaactttttgactgttgaaagtgtggaaagatttatttttcccagaacttgcaacggcttgcaacaaacttaaaactacttgaaaggtggtatttatgcctcgcaaaaagaaactgcaagaggtgggcggcctgcgcctggtggcatactatcgc

SEQ ID NO: 16141 - DNA, 260 bp, Unknown
  Description of Unknown: LeftRegion for integrase B3142 sequence
ctcattcccgttcccgattgatgaggtaagggattcagacacgtaccagctaacgacgaggtggagagcttacttggagagacataggaagctgctcaaataaaaaaagaaaccccgtgcggcttcttggcggttggcgcacggggcaaaggtgaagaacagagcgcttaaccgcgcccgtcctgagaggtgattttagcatggtgaagaaccgagccgccatatatgcgcgcttcagctcgcacaaccagcgttcggaa

SEQ ID NO: 16142 - DNA, 260 bp, Unknown; identical to SEQ ID NO: 16137
  Description of Unknown: LeftRegion for integrase B3143 sequence

SEQ ID NO: 16143 - DNA, 260 bp, Unknown
  Description of Unknown: LeftRegion for integrase B3144 sequence
aacacacctcctgaaacagatactcttatggttgtcattgttgatgacgaagaaggatttgttaagaaaatcagtattgatgaagatactgtgacccttcgctcttttaatccacactatcctccccgtgtttttggtggtgttgaaattggacgattgcgctttgtcggtagagtcatggagttaaaaaggagatttgcatgaaaaaatttccaatcgacctctcctgtctgacagaggaagaaatctctcaatttcag

SEQ ID NO: 16144 - DNA, 260 bp, Unknown
  Description of Unknown: LeftRegion for integrase B3145 sequence
agcgccgtgaagaggctcctcagtgataaccccggagaccttgccactatcttccctcagctcatggagcgtcaaaacagcctaaaggcggaaaccgccgccatcatcgacaacctgctccaagcggatattgcggctgaaaataagaaataagaaaaggccctgcgggtgcggggtcttttgctttggaggtgatagttttggatgagtattttatttacctgagaaaatcccgcgccgatatggaggccgaggcccac

SEQ ID NO: 16145 - DNA, 260 bp, Unknown
  Description of Unknown: LeftRegion for integrase B3146 sequence
ttcaagtctaatattaacatagaacttgaaaaataggtgcattttgttattttatatcgaaatgcgttatatcggagtgattaaatgtacaacaagaaaacggaaaaatctttgttctgcggttcgcttgccgctgaacagcagaaagtacaacataaaattttgacttccgaatatacctattttaatcggaggaaaaaatggaacagtattgcttatatctgcgaaaatcaagatcagatgtcgaagccgaaaatcac

SEQ ID NO: 16146 - DNA, 260 bp, Unknown
  Description of Unknown: LeftRegion for integrase B3147 sequence
ttcaagtttgatattaacacaaaacttgaaaaataggagcattttgttattttatatcgaaatgcgttatatcggagtgattaaatgtacaacaaaaaaacggaaaaaactttgttctgcggtacgcttgctgctgaacagcagaaagtacaacataaaattttgacttccgaatatacctattttaatcggaggaaaaaatggaacagtattgcttatatctgcgaaaatcaagatcagatgtcgaagccgaaaatcac

SEQ ID NO: 16147 - DNA, 260 bp, Unknown
  Description of Unknown: LeftRegion for integrase B3148 sequence
ttcaagtttgatattaacataaaacttgaagaataggagcattttgttattttatatcgaaatgcgttatatcggagtgattaaatgtacaacgagaaaacagaaaaatctttgttctgcggtacatttgccgctaaacagcagaaagtacaacataaaattttgacttccgaatatacctattttagtcggagggaaaaatggaacagtattgcttatatctgcgaaaatccagatcggacattgaagccgaaaatcac

SEQ ID NO: 16148 - DNA, 260 bp, Unknown; identical to SEQ ID NO: 16147
  Description of Unknown: LeftRegion for integrase B3149 sequence

SEQ ID NO: 16149 - DNA, 260 bp, Unknown
  Description of Unknown: LeftRegion for integrase B3150 sequence
agcgccgtgaagaggctcctcagtgataaccccggcgaccttgccactatcttccctcagctcatggagcgccaaaacagcctaaaggcggaaaccgccgccatcatcgacaacctgctccaagcggatattgcggctgaaaataagaaataagaaaaggccctgcgggtgcggggccttttgctttggaggtgatagttttggatgagtattttatttacctgagaaaatcccgcgccgatatggaggccgaggcccac

SEQ ID NO: 16150 - DNA, 260 bp, Unknown; identical to SEQ ID NO: 16147
  Description of Unknown: LeftRegion for integrase B3151 sequence

SEQ ID NO: 16151 - DNA, 260 bp, Unknown
  Description of Unknown: LeftRegion for integrase B3152 sequence
taagtgaagttaggaaccctcacacccttccgactctgactgaacaggagagggtactactgtctgctttccgtgcagcaaccgtagaagggcagtttcacatcatccaggtctgtatgaacgaacgagacgcagcagtagcggaaaaaggggaaagcgtcagtgtagggtaatcaacctggaagaatggaggaaacatcatgtatgaagaaataaaaaccgtatgtctatacgtgcgttattccagttcaaaccaaacc

SEQ ID NO: 16152 - DNA, 260 bp, Unknown
  Description of Unknown: LeftRegion for integrase B3153 sequence
tcttcgaaagaacaagaaaaaaccactgcccaaagattacaattatgaaaaagtacaggatgctgtacagcgtgcaaaagaattggattgcgatggagaagaatatccgaaagatcatctcggaagcaccgtatataaaatcattgaaaaactcattgaaatgaaaaatcaaatcgaataaccagtaaaggaagtgtaagatgaacgttgtcatctatgcccgttattcttgtgaacggcagacggaacaatccattgaa

SEQ ID NO: 16153 - DNA, 260 bp, Unknown; identical to SEQ ID NO: 13421
  Description of Unknown: LeftRegion for integrase B3154 sequence

SEQ ID NO: 16154 - DNA, 260 bp, Unknown
  Description of Unknown: LeftRegion for integrase B3155 sequence
aattaaagcatatactgttctttgtcctgatggaacatataccatcgttctaaattcaagactttcgcacgaacagcagcttgaagcgtataagcatgagttaaaacatattatggataatgattttgatattgaaaacggtgatgctgatgcgattgaacaatatgctcataatgaataggaaaattaggtgattacatatgttatacgatataaaaagtgttgacttagaaaacataattatatatttgagaaaatca

SEQ ID NO: 16155 - DNA, 260 bp, Unknown
  Description of Unknown: LeftRegion for integrase B3156 sequence
tatcggcggggagagttttcgacacacccgctggagccgcaagtcctccggcagtttgagggctttttagaagcacatggaaagtaaaaagccgcacctgctccaccaggtacggcttgaaaagagagtatatgctatgatagcacaagaccgtgtctattatagcatacttctgcattttttgcaagggggaaatttttatggacacatactgtatatatctacggaaatcgcgtgcggacgcagaagccgaagcacgc

SEQ ID NO: 16156 - DNA, 260 bp, Unknown
  Description of Unknown: LeftRegion for integrase B3157 sequence
ttcaagtttgatattaacataaaacttgaagaataggagcattttgttattttatatcgaaatgcgttatatcggagtgattaaatgtacaacgagaaaacagaaaaatctttgttctgcggtacatttgccgctaaacagcagaaagtacaacataaaattttgacttccgaatatacctattttagtcggagggaaaaatggaacagtattgcttatatctgcgaaaatcaagatcagacatcgaagctgaaaatcac

SEQ ID NO: 16157 - DNA, 260 bp, Unknown
  Description of Unknown: LeftRegion for integrase B3158 sequence
ttcaagtttgatattaacataaaacttgaagaataggagcattttgttattttatatcgaaatgcgttatatcggagtgattaaatgtacaacgagaaaacagaaaaatctttgttctgcggtacatttgccgctaaacagcagaaagtacaacataaaattttgacttccgaatatacctattttagtcggagggaaaaatggaacagtattgcttatatctgcgaaaatcaagatcagatgtcgaagccgaaaatcac

SEQ ID NO: 16158 - DNA, 260 bp, Unknown
  Description of Unknown: LeftRegion for integrase B3159 sequence
attggactggccctctacggtgcgattgtagcgagcattctggatgcggagttacacgccgccattcttcccggcatcctcatgctgctggcgttcaacgtgcctgacctgatccggctgaagctgggcaagttccgggataacgtgggcgattatctgcggcaataaaaaagcccgcacactggcgggcgggtgatggtatgaaaaaagagaacgaaatccgggcagttgtctatgcccggtactcatcccattcgcaa

SEQ ID NO: 16159 - DNA, 260 bp, Unknown
  Description of Unknown: LeftRegion for integrase B3160 sequence
ttcaagtttgatattaacacaaaacttgaaaaataggagcattttgttattttatatcgaaatgcgttatattggagtgattaaatgtacaacgagaaaacggaaaaatctttgttctgcggttcgcttgccgctgaacagcagaaagtacaacataaaattttgacttccgaatatacctattttaatcggaggaaaaaatggaacagtattgcttatatctgcgaaaatcaagatcagatgtcgaagccgaaaatcac

SEQ ID NO: 16160 - DNA, 260 bp, Unknown
  Description of Unknown: LeftRegion for integrase B3161 sequence
tatatcggcggggtgagttttcgacacacccgctggagccgcaagtcctccggcagtttgagggctttttagaagcccatggaaagtaaaaagccgcacctgctccaacaggtacggcttgaaaagagagtatatgctatgatagcactagaccgtgtctattatagcatacttctgcattttttgcaagggggaaatttatggacacatactgtatatatctacggaaatcgcgtgcggacgcagaagccgaagcacgt

SEQ ID NO: 16161 - DNA, 260 bp, Unknown
  Description of Unknown: LeftRegion for integrase B3162 sequence
ttcaagtttgatattaacacaaaacttgaaaaataggagcattttgttattttatatcgaaatgcgttatatcggagtgattaaatgtacaacaaaaaaacggaaaaaactttgttctgcggtacgcttgctgctgaacagcagaaagtacaacataaaattttgacttccgaatatacctattttagtcggaggaaaaaatggaacagtattgcttatatctgcgaaaatcaagatcagacatcgaagctgaaaatcac

SEQ ID NO: 16162 - DNA, 260 bp, Unknown; identical to SEQ ID NO: 16147
  Description of Unknown: LeftRegion for integrase B3163 sequence

SEQ ID NO: 16163 - DNA, 260 bp, Unknown
  Description of Unknown: LeftRegion for integrase B3164 sequence
tatcggcggggagatttttcgacacacccgctggagccgcaagtcctccggcagtttgagggctttttagaagcacacggaaagtaaaaagccgcacctgctccaccaggtacggcttgaaaagagagtatatgctatgatagcacaagaccgtgtctattatagcatacttctgcattttttgcaagggggaaatttttatggacacatactgtatatatctacgaaaatcgcgtgcggacgcagaagccgaagcacgc

SEQ ID NO: 16164 - DNA, 260 bp, Unknown
  Description of Unknown: LeftRegion for integrase B3165 sequence
gtcagcgttttggcggatttttccgtttttgatatgtaagaagtaagcatctttgattgaaataaaaaacgcccacggtgctaccaacaccgcaggcgttccagatcagcttacccagagggtaataacagccaacctcacagatgttattgtaccacctccgggtaggcttgtcaaagtgtacctcggaggaaattacaatggcaagaaaaaagaaacaggcaagcggcgatgccgtcatctatgcccgctactcgtcc

SEQ ID NO: 16165 - DNA, 260 bp, Unknown
  Description of Unknown: LeftRegion for integrase B3166 sequence
aaaaagataaatacctcgtttcttctggagctgatattggctatctacctgcaagcgctgcaaaacgtatagaggaagatggcgaggacgcatacaatatttttgtggctgatacggattatgatgaccgaggaaaaaatacaattagtgtatatcttttcccgaccggcaaataataacgccttaaagtaggtgattgcatgaaagcggccatatacgcccgtttttcgagccataatcaacgtgaggaatccattgaa

SEQ ID NO: 16166 - DNA, 260 bp, Unknown
  Description of Unknown: LeftRegion for integrase B3167 sequence
taattctgtcatggaaatgtgccgttcccttctcaccttccagattaatattttcatgaattaataatatcactctattcattgaattgtctgccggtaatgtttaccagtggcaagctgaccatccgtccggcttgacctttatttgaattttaactataatttgaaccactaaaaatgaatgaaagcaggtgtgcgtcatgctatatgaaatcaaccgggaagattttgaaaatgtaataatctatttgaggaaatca

SEQ ID NO: 16167 - DNA, 260 bp, Unknown; identical to SEQ ID NO: 13018
  Description of Unknown: LeftRegion for integrase B3168 sequence

SEQ ID NO: 16168 - DNA, 260 bp, Unknown; identical to SEQ ID NO: 13549
  Description of Unknown: LeftRegion for integrase B3169 sequence

SEQ ID NO: 16169 - DNA, 260 bp, Unknown
  Description of Unknown: LeftRegion for integrase B3170 sequence
tatcggcggggagagttttcgacacacccgctggagccgcaagtcctccggcagtttgagggttttttagaagcccatggaaagtaaaaagccgcacctgctccaacaggtgcggcttgaaaagagagtatatgctatgatagcactagaccgtgtctattatagcatacttctgcattttttgcaagggggaaatttttatggacacatactgtatatatctaagaaagtcgcgtgcggacgcagaagccgaagcacgc

SEQ ID NO: 16170 - DNA, 260 bp, Unknown; identical to SEQ ID NO: 16161
  Description of Unknown: LeftRegion for integrase B3171 sequence

SEQ ID NO: 16171 - DNA, 260 bp, Unknown; identical to SEQ ID NO: 16147
  Description of Unknown: LeftRegion for integrase B3172 sequence

SEQ ID NO: 16172 - DNA, 260 bp, Unknown
  Description of Unknown: LeftRegion for integrase B3173 sequence
ttcaagtttgatgttaacacaaaacttgaaaaataggtgcattttgttattttatatcgaaatgcgttatattggagtgattaaatgtacaacaagaaaacggaaaaatctttgttctgcggtacatttgccgctaaacagcagaaagtacaacataaaattttgacttccgaatatacctattttagtcggagggaaaaatggaacagtattgcttatatctgcgaaaatcaagatcagatgtcgaagccgaaaatcac

SEQ ID NO: 16173 - DNA, 260 bp, Unknown; identical to SEQ ID NO: 16164
  Description of Unknown: LeftRegion for integrase B3174 sequence

SEQ ID NO: 16174 - DNA, 260 bp, Unknown
  Description of Unknown: LeftRegion for integrase B3175 sequence
cttgtattttggatgggcgtactggctgcacttttcgagggcgtaggtagtgaaaaactcatttctttgtgggtattgtttctgctggcctgcatcaacgtacctgacctgatccggctgaaactgggcaagtttcgggataacgtgggcgcctatctgcggcaataaaaaagcccgcacactggcgggcgggtgatggtatgaaaaaagagaacgaaatccgggcagttgtctatgcccggtactcatcccattcgcaa

SEQ ID NO: 16175 - DNA, 260 bp, Unknown
  Description of Unknown: LeftRegion for integrase B3176 sequence
gtcagcgttttggcggatttttccgtttttgatatgtaagaagtaagcatctttgattgaaataaaaaacgcccacggtgctaccaacaccgcaggcgttccagatcagcttacccagagggtaataacagctaacctcacagatgttattgtaccacctccgggtaggcttgtcaaagtgtacctcggaggaaattacaatggcaagaaaaaagaaacaggcaagcggcgatgccgtcatctatgcccgctactcgtcc

SEQ ID NO: 16176 - DNA, 260 bp, Unknown
  Description of Unknown: LeftRegion for integrase B3177 sequence
ttcaagtttgatgttaacacaaaacttgaaaaataggagcattttgttattttatatcgaaatgcgttatattggagtgattaaatgtacaacgagaaaacggaaaaatctttgttctgcggtacatttgccgctaaacagcagaaagtacaacataaaattttgacttccgaatatacctattttaatcggaggaaaaaatggaacagtattgcttatatctgcgaaaatcaagatcagatgtcgaagccgaaaatcac

SEQ ID NO: 16177 - DNA, 260 bp, Unknown
  Description of Unknown: LeftRegion for integrase B3178 sequence
gatattctggctaaaatgtcatgctattttaatgcgccgattgaatgcctgttaggactacccgaaaagaaagaccaccagaacaccgtattagctctgtttaacgctctggatagtgaaaatcaaaaagccgtgttactatacatggaatttgttctgtccaaacaaaaaagcccgcacaacggcgggcaggtgatggtatgaaaaaagagaatgaaatccgggcagttgtctatgcccggtattcttcccactctcag

SEQ ID NO: 16178 - DNA, 260 bp, Unknown; identical to SEQ ID NO: 16161
  Description of Unknown: LeftRegion for integrase B3179 sequence

SEQ ID NO: 16179 - DNA, 260 bp, Unknown
  Description of Unknown: LeftRegion for integrase B3180 sequence
acacccgccgacgcactttctgccgcatcttccccctgcactggctacacccgcgacgacgtctccctgctcctggatcgtatcgagcgccaacacctccgccacaccgaggatctgcgcgcaaaccaggccgtcatgcacgagctcatcaaaacccttgtctccaccctcaaccgatccgataaggagtgactccctccatgccccgcgtaccatctcacaaacagcagtcctttgccgtcatctacgcccgctactcc

SEQ ID NO: 16180 - DNA, 260 bp, Unknown
  Description of Unknown: LeftRegion for integrase B3181 sequence
ttcaagtttgatattaacacaaaacttgaaaaataggagcattttgttattttatatcgaaatgcgttatatcggagtgattaaatgtacaacgagaaaacggaaaaatctttgttctgcggttcgcttgccgctgaacagcagaaagtacaacataaaattttgacttccgaatatacctattttaatcggaggaaaaaatggaacagtattgcttatatctgcgaaaatcaagatcagatgtcgaagccgaaaatcac

SEQ ID NO: 16181 - DNA, 260 bp, Unknown
  Description of Unknown: LeftRegion for integrase B3182 sequence
ttcaagtttgatattaacataaaacttgaagaataggagcattttgttattttatatcgaaatgcgttatatcggagtgattaaatgtacaacgagaaaacagaaaaatctttgttcggcggtacatttgccgctaaacagcagaaagtacaacataaaattttgacttccgaatatacctattttagtcggagggaaaaatggaacagtattgcttatatctgcgaaaatccagatcggacattgaagccgaaaatcac

SEQ ID NO: 16182 - DNA, 260 bp, Unknown
  Description of Unknown: LeftRegion for integrase B3183 sequence
ttgcagccattataagccttgtcggcatcggaatcatcgccattccgacgggcattatttccgctggattcacgtctttgattggaaaggatagagaagaaaccgacaaaaagaactattgcccatattgcggccacaggctcgacgaataacaaagcgtttttgcattttctgaaaaaagtttgcgagtaggtgattgcatgaaagcggccatatacgcccgtttttcgagccataatcaacgtgaggaatccattgaa

SEQ ID NO: 16183 - DNA, 260 bp, Unknown
  Description of Unknown: LeftRegion for integrase B3184 sequence
ttcaagtttgatattaacataaaacttgaagaataggagcattttgttattttatatcgaaatgcgttatatcggagtgattaaatgtacaacgagaaaacagaaaaatctttgttctgcggtacatttgccgctaaacagcagaaagtacaacataaaattttgacttccgaatatacctattttaatcggaggaaaaaatggaacagtattgcttatatctgcgaaaatcaagatcagatgtcgaagccgaaaatcac

SEQ ID NO: 16184 - DNA, 260 bp, Unknown; identical to SEQ ID NO: 16166
  Description of Unknown: LeftRegion for integrase B3185 sequence

SEQ ID NO: 16185 - DNA, 260 bp, Unknown
  Description of Unknown: LeftRegion for integrase B3186 sequence
gtcagcgttttggcggatttttccgtttttgatatgtaagaagtaagcatctttgattgaaataaaaaacgcccacggtgctaccaacaccgcaggcgttccagatcagcttacccagagggcaataacagctaacctcgcagatgttattgtaccacctccgggtaggcttgtcaaagtgtacctcggaggaaattacaatggcaagaaaaaagaaacaggcaagcggcgatgccgtcatctatgcccgctactcgtcc

SEQ ID NO: 16186 - DNA, 260 bp, Unknown; identical to SEQ ID NO: 16147
  Description of Unknown: LeftRegion for integrase B3187 sequence

SEQ ID NO: 16187 - DNA, 260 bp, Unknown
  Description of Unknown: LeftRegion for integrase B3188 sequence
ttacaacgtccgcaattcagcgcaaatgtaaatgcggaaacaactgtgcgtatgcagttcttcaaaacctacaggtctacggaatgattcgagagattcggcaattcacatacgaatggacagaaaaagccctcctgctgggcgcagaagggcgtaacgggtaaacagatatgtcgatagatattaaatggcaggtgccaatggcaaagccggaggttagcgaactggccgtcgtatatgcccggtattcaagccacagt

SEQ ID NO: 16188 - DNA, 260 bp, Unknown
  Description of Unknown: LeftRegion for integrase B3189 sequence
taattctgtcatggaaatgtgccggtcccttctcaccttccagattaatattttcatgaattaataatatcactctattcattgaattgtctgcaggtaatgtttaccagtggcaagctgaccatccgtccggcttgacctttatttgaattttaactataatttgaaccactaaaaatgaatgaaagcaggtgtgcgtcatgctatatgaaatcaaccgggaagattttgaaaatgtaataatctatttgagaaaatca

SEQ ID NO: 16189 - DNA, 260 bp, Unknown; identical to SEQ ID NO: 16164
  Description of Unknown: LeftRegion for integrase B3190 sequence

SEQ ID NO: 16190 - DNA, 260 bp, Unknown; identical to SEQ ID NO: 16175
  Description of Unknown: LeftRegion for integrase B3191 sequence

SEQ ID NO: 16191 - DNA, 260 bp, Unknown; identical to SEQ ID NO: 16154
  Description of Unknown: LeftRegion for integrase B3192 sequence

SEQ ID NO: 16192 - DNA, 260 bp, Unknown
  Description of Unknown: LeftRegion for integrase B3193 sequence
atcgccattccgacgggcattatttccgccggattcacgtctttgatcggaaaagataaagaagaacccgacaaaaagaactattgtccatattgcggccataagctcgacgaataatagcgcaatctcacattcaaaatagctgaaatgcgctcattttgcatttgcaatattaaagtatttaacgagtaggtgattgcatgaaagcggccatatacgcccgtttttcgagccataatcagcgcgaggaatccattgaa

SEQ ID NO: 16193 - DNA, 260 bp, Unknown
  Description of Unknown: LeftRegion for integrase B3194 sequence
ctgttcctccggttttacccaatgattacaaaaaactgcttactctttatagagaggcagacgatgacggaaaaaccgtcattatgagtcacgccattcaggaatgtagacgatcaatgaaagagaaagaaaaaacaggctcttcggaagagtctgctgtcggttaaagtaattgacctaaatgaatggagaaagaccctatgaagaagttcaaattccctattgacctgtccatgttgacagaagaagagatcaatcaa

SEQ ID NO: 16194 - DNA, 260 bp, Unknown
  Description of Unknown: LeftRegion for integrase B3195 sequence
attggactggccctctacggtacgattgtggcgagcattctggatgcggagttacacgccgccattcttcccggtatcttcatgctgctggcgttcaacgtgcctgacctgatccggctgaaactgggcaagttccgggataacgtgggcgattatctgcggcaataaaaaagcccgcacactggcgggcgggtgatggtatgaaaaaagataacgaaatccgggcagttgtctacgcccggtactcatcccattcgcaa

SEQ ID NO: 16195 - DNA, 260 bp, Unknown; identical to SEQ ID NO: 16176
  Description of Unknown: LeftRegion for integrase B3196 sequence

SEQ ID NO: 16196 - DNA, 260 bp, Unknown
  Description of Unknown: LeftRegion for integrase B3197 sequence
aacgggtaagacgcaggtcggactcgaccttgtcgatgatgtttcgagcgcgataaaagatttaagctaaataaaaaagaacccccggtgcgggaacaccgagggttaagacatcaaaacacaccacgcgaatagagtgaattgatatacatattatatcagctcgctctcttaaatgcaagaaagcgaggcttttttatatggaaaacgcagtaatttacgcgagatattcatcggacaagcagacggagcagagcatc

SEQ ID NO: 16197 - DNA, 260 bp, Unknown
  Description of Unknown: LeftRegion for integrase B3198 sequence
agagccgttccaacagacaggagttgcagggggataaaggccagactgcgagttgagaaggtcattcccattgatctgctcagacgaaagagagccttggaggtgatattacgaaagcggtaatctatgccagatacagctcccacagccagcgggaggagtccatagaaggtcagctccgtgagtgtcacgagttcgccttgaagaatggatttacgatcataaacgaatattgtgaccgggcgctctccggcaagacc

SEQ ID NO: 16198 - DNA, 260 bp, Unknown; identical to SEQ ID NO: 16157
  Description of Unknown: LeftRegion for integrase B3199 sequence

SEQ ID NO: 16199 - DNA, 260 bp, Unknown
  Description of Unknown: LeftRegion for integrase B3200 sequence
cttgtattttggatgggcgtactggctgcacttttcgagggcgtaggtagtgaaaaactcatttctttgtgggtattgtttctgctggcctgcatcaacgtacctgacctgatccggctgaaactgggcaagtttcgggataacgtgggcgactatctgcggcaataaaaaagctcgcacaacggcgggcgggtgatggtatgaaaaaagagaacgaaatccgggcagttgtgtatgcccggtactcatctcattcgcaa

SEQ ID NO: 16200 - DNA, 260 bp, Unknown
  Description of Unknown: LeftRegion for integrase B3201 sequence
attattatgtggctcggtgcaatcggaatgatttttgagggcgttggtagtgaaaaactgttttccctctgggtgattttcttgctggcctgcttcaacgtgcctgacctgatccggctgaaactgggcaagttccgggataacgtgggcgattatctgcggcaataaaaaagcccgcacactggcgggcgggtgatgatatgaaaaaagagaacgaaatccgggcagttgtctacgcccggtactcatcccattcgcaa

SEQ ID NO: 16201 - DNA, 260 bp, Unknown
  Description of Unknown: LeftRegion for integrase B3202 sequence
gggtgatggtggtggtgatcaccgtgataaccgccacaatttatatgtatcgatctaaaagcctctctggatatagtgtctctctttttcatctaaaatgtattgcaaatccttatagaatatggtatatacattatacgaaacattgctttaggatgaacgttccaccgttcaatgatgtgtaaagtgaggtgcctgccatgactgccgtgatatacgcccgctattccagtgacaaccagcgtgaagaatccatcgag

SEQ ID NO: 16202 - DNA, 260 bp, Unknown; identical to SEQ ID NO: 15132
  Description of Unknown: LeftRegion for integrase B3203 sequence

SEQ ID NO: 16203 - DNA, 260 bp, Unknown; identical to SEQ ID NO: 15077
  Description of Unknown: LeftRegion for integrase B3204 sequence

SEQ ID NO: 16204 - DNA, 260 bp, Unknown; identical to SEQ ID NO: 16164
  Description of Unknown: LeftRegion for integrase B3205 sequence

SEQ ID NO: 16205 - DNA, 260 bp, Unknown
  Description of Unknown: LeftRegion for integrase B3206 sequence
ttcaagtttgatattaacataaaacttgaagaataggagcattttgttattttatatcgaaatgcgttatatcggagtgattaaatgtacaacgagaaaacagaaaaatatttgttctgcggtacatttgccgctaaacagcagaaagtacaacataaaattttgacttccgaatatacctattttagtcggagggaaaaatggaacagtattgcttatatctgcgaaaatccagatcggacattgaagccgaaaatcac

SEQ ID NO: 16206 - DNA, 260 bp, Unknown
  Description of Unknown: LeftRegion for integrase B3207 sequence
cttgtattttggatgggcgtactggctgcacttttcgagggcgtaggtagtgaaaaactcatttctttgtgggtattgtttctgctgacctgcatcaacgtacctgacctgatccggctgaaactgggcaagtttcgggataacgtgggcgactatctgcggcaataaaaaagcccgcacactggcgggcgggtgatggtatgaaaaaagagaacgaaatccgggcagttgtctatgcccggtactcatcccattcgcaa

SEQ ID NO: 16207 - DNA, 260 bp, Unknown
  Description of Unknown: LeftRegion for integrase B3208 sequence
taaagagcatcctcgctgattgcgggggagacctggcagatgctttcccgcagattatggagaagcagaacacgctcaaggccaaaaccgcctctatccttgacagccttttgcaggctgacgttgcggccttaaaggatagcaacaagtaacctttcggcctgcgctccggcgcgggcctttttgttttggaggtcatcatggagcagtatctcatatacctgcgcaagtctcgttccgacctcgaggccgaagcgcac

SEQ ID NO: 16208 - DNA, 260 bp, Unknown; identical to SEQ ID NO: 14989
  Description of Unknown: LeftRegion for integrase B3209 sequence

SEQ ID NO: 16209 - DNA, 260 bp, Unknown
  Description of Unknown: LeftRegion for integrase B3210 sequence
ataaagagcatcctcgcagattgcgggggagacctggcaggtgctttcccgcagattatggagaagcagaacacgctcaaggctagaaccgcctctaccctcgacagtctcttgcaggccgacgttgcggccttaaaggatagcaacaagtaacctttcggcctgcgctccggcgcgggcctttttgtttggaggccatcatggagcagtatctcatatacctgcgcaagtctcgttccgacctcgaggccgaagcacac

SEQ ID NO: 16210 - DNA, 260 bp, Unknown
  Description of Unknown: LeftRegion for integrase B3211 sequence
taaagagcatcctcgctgattgcgggggagacctggcagacgctttcccgcagattatggagaagcagaacacgctcaaggccaagaccgcctctattctggatagcctcttgcaggccgatgttgcggccttaaaagacagcaacaagtaacctattggcctgcgctccggcgcgggccttttttgtttggaggtcatcatggagcagtatctcatatacctgcgcaagtctcgttccgacctcgaggccgaagcgcac

SEQ ID NO: 16211 - DNA, 260 bp, Unknown
  Description of Unknown: LeftRegion for integrase B3212 sequence
ataaagagcatcctcgctgattgcgggggagacctggcagatgctttcccgcagattatggagaagcagaacacgctcaaggccaaaaccgcctctatccttgacagcctcttgcaggctgacgttgcggccttaaaggatagcaacaagtaacctttcggcctgcgctccggcgctggcctttttgtttggaggtcatcatggagcagtatctcatatacctgcgcaagtctcgttccgacctcgaggccgaagcgcac

SEQ ID NO: 16212 - DNA, 260 bp, Unknown
  Description of Unknown: LeftRegion for integrase B3213 sequence
taaagagcatcctcgctgattgcgggggagacctggcagatgctttcccgcagattatggagaagcagaacacgctcaaggccaagaccgcctctattctggatagcctcttgcaggccgatgttgcggccttaaaagacagcaacaagtaacctattggcctgcgctccggcgcgggccttttttgtttggaggtcatcatggagcagtatctcatatacctgcgcaagtctcgttccgacctcgaggccgaagcgcac

SEQ ID NO: 16213 - DNA, 260 bp, Unknown
  Description of Unknown: LeftRegion for integrase B3214 sequence
aaagagcatcctcgcggattgcgggggagacctggcaggtgctttcccgcagattatggagaagcagaacacgctcaaggccaaaaccgcttctatcctcgacagcctcttgcaggcagacgttgcggccttaaaggatagcaacaagtagcctttcggcctgcgctccggcgcgggcctttttttgtttggaggtcatcatggagcagtatctcatatacctgcgcaagtctcgttccgacctcgaggccgaagcgcac

SEQ ID NO: 16214 - DNA, 260 bp, Unknown
  Description of Unknown: LeftRegion for integrase B3215 sequence
ataaagagcatcctcgctgattgcgggggagacctggcagatgctttcccgcagattatggagaagcagaacacgctcaaggccaaaaccgcctctatccttgacagcctcttgcaggctgacgttgcggccttaaaggacagcagcaaataacctttcagcctgcgctcctgcgcgggcctttttgtttggaggtcatcatggagcagtatctcatatacctgcgcaagtcccgttccgacatcgaggcagaggcgcac

SEQ ID NO: 16215 - DNA, 260 bp, Unknown
  Description of Unknown: LeftRegion for integrase B3216 sequence
ataaagagcatcctcgctgattgcgggggagacctggcagatgctttcccgcagattatggagaagcagaacacgctcaaggccaaaaccgcctctattctggatagcctcttgcaggctgacgttgcggccttaaaagacagcaacaagtaacctattggcctgcgctccggcgcgggtctttttgtttggaggtcatcatggagcagtatctcatatacctgcgcaagtctcgttccgacctcgaggccgaagcgcac

SEQ ID NO: 16216 - DNA, 260 bp, Unknown; identical to SEQ ID NO: 16213
  Description of Unknown: LeftRegion for integrase B3217 sequence

SEQ ID NO: 16217 - DNA, 260 bp, Unknown
  Description of Unknown: LeftRegion for integrase B3218 sequence
ataaagagcatcctcgctgattgcgggggagacctggcagatgctttcccgcagattatggagaagcagaacacgctcaaggccaagaccgcctctattctggatagcctcttgcaggccgatgttgcggccttaaaagacagcaacaagtaacctattggcctgcgctccggcgcgggcctttttgtttggaggtcatcatggagcagtatctcatatacctgcgcaagtctcgttccgacctcgaggcagaggcacac

SEQ ID NO: 16218 - DNA, 260 bp, Unknown
  Description of Unknown: LeftRegion for integrase B3219 sequence
ataaagagcatcctcgctgattgcgggggagacctggcagatgctttcccgcagattatggagaagcagaacacgctcaaggccaagaccgcctctattctggacagcctcttgcaggctgacgttgcggccttaaaggatagcaacaagtaacctttcggcctgcgctccggcgcgggtctttttgtttggaggtcatcatggaacagtatctcatatatctgcgcaagtctcgttccgacctcgaggccgaagcgcac

SEQ ID NO: 16219 - DNA, 260 bp, Unknown; identical to SEQ ID NO: 16213
  Description of Unknown: LeftRegion for integrase B3220 sequence

SEQ ID NO: 16220 - DNA, 260 bp, Unknown
  Description of Unknown: LeftRegion for integrase B3221 sequence
ataaagagcatcctcgctgattgcgggggagacctggcagatgctttcccgcagattatggagaagcagaacacgctcaaggccaagaccgcctctattctggatagtctcttgcaggccgatgttgcggccttaaaagacagcaacaagtaacctattggcctgcgctccggcgcgggcctttttgtttggaggtcatcatggagcagtatctcatatacctgcgcaagtctcgttccgacctcgaggccgaagcgcac

SEQ ID NO: 16221 - DNA, 260 bp, Unknown; identical to SEQ ID NO: 13018
  Description of Unknown: LeftRegion for integrase B3222 sequence

SEQ ID NO: 16222 - DNA, 260 bp, Unknown
  Description of Unknown: LeftRegion for integrase B3223 sequence
ataaagagcatcctcgcggattgcgggggagacctggcaggtgctttcccgcagattatggagaagcagaacacgctcaaggccaaaaccgcctctatccttgacagccttttgcaggctgacgttgcggccttaaaggatagcaacaagtaacctttcggcctgcgctccggcgcgggtctttttgtttggaggccatcatggagcagtatctcatatacctgcgcaagtctcgttccgacctcgaggccgaagcgcac

SEQ ID NO: 16223 - DNA, 260 bp, Unknown; identical to SEQ ID NO: 14982
  Description of Unknown: LeftRegion for integrase B3224 sequence

SEQ ID NO: 16224 - DNA, 260 bp, Unknown; identical to SEQ ID NO: 13019
  Description of Unknown: LeftRegion for integrase B3225 sequence

SEQ ID NO: 16225 - DNA, 260 bp, Unknown; identical to SEQ ID NO: 16212
  Description of Unknown: LeftRegion for integrase B3226 sequence

SEQ ID NO: 16226 - DNA, 260 bp, Unknown
  Description of Unknown: LeftRegion for integrase B3227 sequence
ataaagagcatcctcgctgattgcgggggagacctggcagatgctttcccgcagattatggagaagcagaacacgctcaaggccaagaccgcctctattctggatggcctcttgcaggccgatgttgcggccttaaaagacagcaacaagtaacctattggcctgcgctccggcgcgggcctttttgtttggaggtcatcatggagcagtatctcatatacctgcgcaagtctcgttccgacctcgaggccgaagcgcac

SEQ ID NO: 16227 - DNA, 260 bp, Unknown
  Description of Unknown: LeftRegion for integrase B3228 sequence
aacagcctcaaaaacgaggtatgcgccgtccttgataaacttatgcaagccgacattgacaccgcctttgaagtcaaaaaagaagacctcgaatactccgaacggaaggcaacataatctatgtggattggagcaactatcgtaaaaaagattaaccgctgccgcctctccggggcggcttctcttttggaggtgtaattatgccgtactgcttatatgtccgtaaatcaagagcggacgcagaggcggaggctcgcggt

SEQ ID NO: 16228 - DNA, 260 bp, Unknown
  Description of Unknown: LeftRegion for integrase B3229 sequence
ctgctgttacaggatattgatcgcaatggcaataccggattaggtaaaccggagcctttgaaaggcgatttacatggttattggagccgtcgcattgacgaaacaaaccggcttgtataccgcatagtcagcgaccgggttgagatattacaatgccgtacgcattacaaacatattcaataaaaaagccggaggcagtcatggcgcaagaaaactatatcatctatctgcgcaaatcccgggcggacgccgaggctgag

SEQ ID NO: 16229 - DNA, 260 bp, Unknown; identical to SEQ ID NO: 16222
  Description of Unknown: LeftRegion for integrase B3230 sequence

SEQ ID NO: 16230 - DNA, 260 bp, Unknown; identical to SEQ ID NO: 16217
  Description of Unknown: LeftRegion for integrase B3231 sequence

SEQ ID NO: 16231 - DNA, 260 bp, Unknown
  Description of Unknown: LeftRegion for integrase B3232 sequence
taaagagcatcctcgctgattgcgggggagacctggcagatgctttcccgcagattatggagaagcagaacacactcaaggccaaaaccgcctctatccttgacagcctcttgcaggctgacgttgcggccttaaaggatagcaacaagtaacctttcggcctgcgctccggcgcgggcctttttgttttggaggtcatcatggagcagtatctcatatacctgcgcaagtctcgttccgacctcgaggccgaagcgcac

SEQ ID NO: 16232 - DNA, 260 bp, Unknown; identical to SEQ ID NO: 16215
  Description of Unknown: LeftRegion for integrase B3233 sequence

SEQ ID NO: 16233 - DNA, 260 bp, Unknown
  Description of Unknown: LeftRegion for integrase B3234 sequence
taaagagcatcctcgctgattgcgggggagacctggcagatgctttcccgcagattatggagaagcagaacacgctcaaggccaagaccgcctctattctggatagcctcttgcaggccgatgttgcggccttaaaagacagcaacaagtaacctattggcctgcgctccggcgcgggccttttttgtttggaggtcatcatggagcagtatctcatatacctgcgcaagtctcgctctgacatcgaggcagaggcgcac

SEQ ID NO: 16234 - DNA, 260 bp, Unknown; identical to SEQ ID NO: 16212
  Description of Unknown: LeftRegion for integrase B3235 sequence

SEQ ID NO: 16235 - DNA, 260 bp, Unknown
  Description of Unknown: LeftRegion for integrase B3236 sequence
aaagagcatcctcgcggattgcgggggagacctggcagatgctttcccgcagattatggagaagcagaacacgctcaaggccaagaccgcctctattctggatagcctcttgcaggccgatgttgcggccttaaaagacagcaacaagtaacctattggcctgcgctccggcgcgggcctttttttgtttggaggtcatcatggagcagtatctcatatacctgcgcaagtctcgttccgacctcgaggccgaagcgcac

SEQ ID NO: 16236 - DNA, 260 bp, Unknown; identical to SEQ ID NO: 16207
  Description of Unknown: LeftRegion for integrase B3237 sequence

SEQ ID NO: 16237 - DNA, 260 bp, Unknown
  Description of Unknown: LeftRegion for integrase B3238 sequence
tcgatgaagagtataaaaagttcaataacggagaaattgggtctatagcggcaacagtaatattcggcattttgtttattgcggttttgggtttcctaaaatagcaatcatttttcaattctgacttggctttttaagcacaaaatcaaagccttaattgcaaatttaagcctattttcgttaaatgggggtgtggtattttgagctcagtagataaaacagccgtaatttatgcgcggtattcgtcccatggacagacc

SEQ ID NO: 16238 - DNA, 260 bp, Unknown
  Description of Unknown: LeftRegion for integrase B3239 sequence
ataaagagcatcctcgcagattgcgggggagacctggcaggtgctttcccgcagattatggagaagcagaacacgctcaaggctagaaccgcctctaccctcgacagtctcttgcaggccgacgttgcggccttaaaggatagcaacaagtaacctttcggcctgcgctccggcgcgggcctttttgtttggaggtcatcatggagcagtatctcatatacctgcgcaagtctcgttccgacctcgaggccgaagcacac

SEQ ID NO: 16239 - DNA, 260 bp, Unknown
  Description of Unknown: LeftRegion for integrase B3240 sequence
ataaagagcatcctcgctgattgcgggggagacctggcagatgctttcccgcagattatggagaagcagaacacgctcaaggccaaaaccgcctctattctggatagcctcttgcaggctgacgttgcggccttaaaagacagcaacaagtaacctattggcctgcgctccggcgcgggcctttttgtttggaggtcatcatggagcagtatctcatatacctgcgcaagtctcgttccgacctcgaggccgaagcgcac

SEQ ID NO: 16240 - DNA, 260 bp, Unknown
  Description of Unknown: LeftRegion for integrase B3241 sequence
tggagccgcagggcttgcggctctgttcggtattttccttatgatctatgtctttctggatatgcggaacccgaaccttggtctgttccagtccggccgcgctgcgccgatcgtttatgtcgcggccttttccattatcggaacatgtctgtatatcgtctgcactgtgataaagcgaaacgcaaaaaggaggaaacacgatgcaaacaataccaattgatctatcggctttgacgccggaggagagacagcagtttgcg

SEQ ID NO: 16241 - DNA, 260 bp, Unknown; identical to SEQ ID NO: 16212
  Description of Unknown: LeftRegion for integrase B3242 sequence

SEQ ID NO: 16242 - DNA, 260 bp, Unknown
  Description of Unknown: LeftRegion for integrase B3243 sequence
taaagagcatcctcgcagattgcgggggagacctggcagatgcttttcctcagattatggagaagcagaacacgctcaaggccaagaccgcctctattctggatagcctcttgcaggccgatgttgcggccttaaaagacagcaacaagtaacctattggcctgcgctccggcgcgggcctttttgttttggaggtcatcatggagcagtatctcatatacctgcgcaagtctcgttccgacctcgaggccgaagcgcac

SEQ ID NO: 16243 - DNA, 260 bp, Unknown
  Description of Unknown: LeftRegion for integrase B3244 sequence
taaagagcatcctcgcggattgcgggggagacctggcaggtgctttcccgcagattatggagaagcagaacacgctcaaggccaaaaccgcttctatcctcgacagcctcttgcaggcagacgttgcggccttaaaggatagcaacaagtagcctttcggcctgcgctccggcgcgggccttttttgtttggaggtcatcatggagcagtatctcatatacctgcgcaagtctcgttccgacctcgaggccgaagcgcac

SEQ ID NO: 16244 - DNA, 260 bp, Unknown
  Description of Unknown: LeftRegion for integrase B3245 sequence
ataaagagcatcctcgctgattgcgggggagacctggcagatgctttcccgcagattatggagaagcagaacacgctcaaggccaagaccgcctctattctggatagcctcttgcaggccgatgttgcggccttaaaagacagcaacaagtaacctattggcctgcgctctggcgcgggcctttttgtttggaggtcatcatggagcagtatctcatatacctgcgcaagtctcgttccgacctcgaggccgaagcgcac

SEQ ID NO: 16245 - DNA, 260 bp, Unknown; identical to SEQ ID NO: 16238
  Description of Unknown: LeftRegion for integrase B3246 sequence

SEQ ID NO: 16246 - DNA, 260 bp, Unknown
  Description of Unknown: LeftRegion for integrase B3247 sequence
taaagagcatcctcgctgattgcgggggagacctggcagatgctttcccgcagattatggagaagcagaacacgctcaaggccaaaaccgcctctattctggatagcctcttgcaggccgatgttgcggccttaaaagacagcaacaagtaacctattggcctgcgctccggcgcgggccttttttgtttggaggtcatcatggagcagtatctcatatacctgcgcaagtctcgttccgacctcgaggccgaagcgcac

SEQ ID NO: 16247 - DNA, 260 bp, Unknown; identical to SEQ ID NO: 15063
  Description of Unknown: LeftRegion for integrase B3248 sequence

SEQ ID NO: 16248 - DNA, 260 bp, Unknown; identical to SEQ ID NO: 16233
  Description of Unknown: LeftRegion for integrase B3249 sequence

SEQ ID NO: 16249 - DNA, 260 bp, Unknown
  Description of Unknown: LeftRegion for integrase B3250 sequence
ataaagagcatcctcgctgattgcgggggagacctagcagatgctttcccgcagattatggagaagcagaacacgctcaaggccaaaaccgcctctatccttgacagcctcttgcaggctgacgttgcggccttaaaggatagcaacaagtaacctttcggcctgcgctccggcgcgggcctttttgtttggaggtcatcatggagcagtatctcatatacctgcgcaagtctcgttccgacctcgaggccgaagcgcac

SEQ ID NO: 16250 - DNA, 260 bp, Unknown
  Description of Unknown: LeftRegion for integrase B3251 sequence
aacagcctcaaaaacgaggtatgcgccgtcctcgataaacttatgcaagccgacattgacaccgcctttgaagtcaaaaaagaagacctcgaatactccgaacggaaggcaacataatctatgtggattggagcaactatcataaaaaagattaaccgctgccgcctctccggggcggcttctcttttggaggtgtaattatgccgtattgcttatatgtccgtaaatcaagagcggacgcagaggcggaggctcgcggt

SEQ ID NO: 16251 - DNA, 260 bp, Unknown
  Description of Unknown: LeftRegion for integrase B3252 sequence
ataaagagcatcctcgcggattgcgggggagacctggcagatgctttcccgcagattatggagaaacagaacacgctcaaggccaaaaccgcctctattctggatagcctcttgcaggccgatgttgcggccttaaaagacagcaacaagtaacctattggcctgcgctccggcgcgggccttttcgtttggaggttatcatggagcagtatctcatatacctgcgcaagtctcgttccgacctcgaggccgaagcgcac

SEQ ID NO: 16252 - DNA, 260 bp, Unknown
  Description of Unknown: LeftRegion for integrase B3253 sequence
taaagagcatcctcgctgattgtgggggagacctggcagatgctttcccgcagattatggagaagcagaacacgctcaaggccaagaccgcctctattctggatagcctcttgcaggccgatgttgcggccttaaaagacagcaacaagtaacctattggcctgcgctccggcgcgggccttttttgtttggaggtcatcatggagcagtatctcatatacctgcgcaagtctcgttccgacctcgaggccgaagcgcac

SEQ ID NO: 16253 - DNA, 260 bp, Unknown; identical to SEQ ID NO: 14352
  Description of Unknown: LeftRegion for integrase B3254 sequence

SEQ ID NO: 16254 - DNA, 260 bp, Unknown
  Description of Unknown: LeftRegion for integrase B3255 sequence
ataaagagcatcctcgctgattgcgggggagacctggcagatgctttcccgcagattatggagaagcagaacacgctcaaggccaagaccgcctctattctggatagcctcttgcaggccgatgttgcggccttaaaagacagcaacaagtaacctattggcctgcgctccggcgcgggcctttttgtttggaggtcatcatggagcagtatctcatatacctgcgcaagtctcgttccgacctcgaggctgaagcgcac

SEQ ID NO: 16255 - DNA, 260 bp, Unknown
  Description of Unknown: LeftRegion for integrase B3256 sequence
ataaagagcatcctcgctgattgcgggggagacctggcagatgctttcccgcagattatggagaagcagaacacgctcaaggccaaaaccgcctctattctggatagcctcttgcaggccgatgttgcggccttaaaaggcagcaacaagtaacctattggcctgcgctccggcgcgggccttttcgtttggaggtcatcatggagcagtatctcatatacctgcgcaagtctcgttccgacctcgaggccgaagcgcac

SEQ ID NO: 16256 - DNA, 260 bp, Unknown
  Description of Unknown: LeftRegion for integrase B3257 sequence
atcgtaacgagttagagggggataaagataaaactgcggcagtctaaggtcattccgatagaattgctcagacgtaagaagctattggaggtgagattacgaaagcagtaatttatgctcgatattcgagccacagtcaaagagaggagtccatcgaaggtcagcttcgtgagtgccatgagttcgctcttaaaaacggaatgacggtcataaacgaatactgtgaccgagcaatctccggcaaaacagataatcgtccg

SEQ ID NO: 16257 - DNA, 260 bp, Unknown
  Description of Unknown: LeftRegion for integrase B3258 sequence
gggcgctacatatgacttaaaagttggctaccacttgcaggatgattctccggttgatattgaaatcaccgatctgttcggcaaggaaacatttttaaagcagactgtacagccgtaacgaaagccaaaacaaaagatataaaaatacgccccactaaaaataaagtggggcgtattccataaggaaaggagtgcatcgcatggagcaatattgcatttatctccgaaagtcacgtgccgatgcggaagcagaagcaaga

SEQ ID NO: 16258 - DNA, 260 bp, Unknown; identical to SEQ ID NO: 16212
  Description of Unknown: LeftRegion for integrase B3259 sequence

SEQ ID NO: 16259 - DNA, 260 bp, Unknown; identical to SEQ ID NO: 16212
  Description of Unknown: LeftRegion for integrase B3260 sequence

SEQ ID NO: 16260 - DNA, 260 bp, Unknown
  Description of Unknown: LeftRegion for integrase B3261 sequence
taaagagcatcctcgctgattgcgggggagacctggcagatgctttcccgcagattatggagaagcagaacacgctcaaggccaagaccgcctctattctggatagtctcttgcaggccgatgttgcggccttaaaagacagcaacaagtaacctattggcctgcgctccggcgcgggccttttttgtttggaggtcatcatggagcagtatctcatatacctgcgcaagtctcgttccgacctcgaggccgaagcgcac

SEQ ID NO: 16261 - DNA, 260 bp, Unknown; identical to SEQ ID NO: 16215
  Description of Unknown: LeftRegion for integrase B3262 sequence

SEQ ID NO: 16262 - DNA, 260 bp, Unknown
  Description of Unknown: LeftRegion for integrase B3263 sequence
ataaagagcatcctcgctgattgcggaggagacctggcagatgctttcccgcagattatggagaagcagaacacgctcaaggccaaaaccgcctctatccttgacagcctcttgcaggctgacgttgcggccttaaaggatagcaacaagtaacctttcggcctgcgctccggcgcgggtctttttgtttggaggtcatcatggagcagtatctcatatacctgcgcaagtctcgttccgacctcgaggccgaagcgcac

SEQ ID NO: 16263 - DNA, 260 bp, Unknown
  Description of Unknown: LeftRegion for integrase B3264 sequence
ataaagagcatcctcgctgattgcgggggagacctggcagatgctttcccgcagattatggagaagcagaacacgctcaaggccaaaaccgcctctatccttgacagcctcttgcaggctgacgttgcggccttaaaggatagcaacaagtaacctttcggcctgcgctccggcgcgggtctttttgtttggaggtcatcatggagcagtatctcatatacctgcgcaagtctcgttccgacctcgaggccgaagcgcac

SEQ ID NO: 16264 - DNA, 260 bp, Unknown
  Description of Unknown: LeftRegion for integrase B3265 sequence
ataaagagcatcctcgcggattgtgggggagacctagcagatgctttcccgcagattatggagaagcagaacacgctcaaggccaagaccgcctctattctggatagcctcttgcaggccgatgttgcggccttaaaagacagcaacaagtaacctattggcctgcgctccggcgcgggcctttttgtttggaggtcatcatggagcagtatctcatatacctgcgcaagtctcgttccgacctcgaggccgaagcgcac

SEQ ID NO: 16265 - DNA, 260 bp, Unknown
  Description of Unknown: LeftRegion for integrase B3266 sequence
gcctttctgatgtaaaagaaattcaaaaattagagcaatccctaacagaggaagaagtactgctccttaaagcgttccatgcagcaagcgcaagtggccgtttccgtatcatccaggtctgcatgaatgaattggataatactgaaaaaggggtaaccgtaagtgccggataattgacttcacagaatggaggaagaaccatgtatgaggaaataaaacaggtagttttgtatgtgcgctattccagtgcaaaccagaca

SEQ ID NO: 16266 - DNA, 260 bp, Unknown
  Description of Unknown: LeftRegion for integrase B3267 sequence
taaagagcatcctcgctgattgcgggggagacctggcaggtgctttcccgcagattatggagaagcagaacacgctcaaggccaaaaccgcctctatccttgacagcctcttgcaggctgacgttgcagccttaaaggatagcaacaagtaacctttcggcctgcgctccggcgcgggccttttttgtttggaggtcatcatggagcagtatctcatatacctgcgcaagtctcgttccgacctcgaggccgaagcgcac

SEQ ID NO: 16267 - DNA, 260 bp, Unknown
  Description of Unknown: LeftRegion for integrase B3268 sequence
gaaaatgaaggtatgccccactacttgatgattcaaataaataaaaaccgccccggagccaaccgggacggaaacttaatactgtacagaccgaagtcggtaagtatttcctgaacaaaaatattttaccatgaaacttcaacatctgtataggtgttatttttatactcttttttcataaactgtacaggaggattgctatgaagaaacaactaaacctttatggtcattattgtgcctatctccgtaaatcacgagca

SEQ ID NO: 16268 - DNA, 260 bp, Unknown
  Description of Unknown: LeftRegion for integrase B3269 sequence
ataaagagcatccttgctgattgcgggggagacctggcagatgctttcccgcagattatggagaagcagaacacgctcaaggccaagaccgcctctattctggatagcctcttgcaggccgatgttgcggccttaaaagacagcaacaagtaacctattggcctgcgctccggcgcgggcctttttgtttggaggtcatcatggagcagtatctcatatacctgcgcaagtctcgttccgacctcgaggccgaagcgcac

SEQ ID NO: 16269 - DNA, 260 bp, Unknown; identical to SEQ ID NO: 16212
  Description of Unknown: LeftRegion for integrase B3270 sequence

SEQ ID NO: 16270 - DNA, 260 bp, Unknown
  Description of Unknown: LeftRegion for integrase B3271 sequence
atccgacagttttttgattttggcaaagatatccgaccattcgctcgtagtcatacggcatggctcctttctcaaatttactgtcggcagcaactgaattatatcaaatacgcacccgctttttagggattcgtagaattataccgaaaatcggaaaaatattgcgaattttgaagaagataatcgtgaggtgatggttgatggcccgaaaaaagaatatcgctgcgggtcaagatgccgtcatttacgcccgctactct

SEQ ID NO: 16271 - DNA, 260 bp, Unknown
  Description of Unknown: LeftRegion for integrase B3272 sequence
taaagagcatcctcgctgattgcgggggagacctggcagatgctttcccgcagattatggagaagcagaacacgctcaaggccaagaccgcctctattctggatagcctcttgcaggccgatgttgcggccttaaaagtcagcaacaagtaacctattggcctgcgctccggcgcgggccttttttgtttggaggtcatcatggagcagtatctcatatacctgcgcaagtctcgttccgacctcgaggccgaagcgcac

SEQ ID NO: 16272 - DNA, 260 bp, Unknown; identical to SEQ ID NO: 16222
  Description of Unknown: LeftRegion for integrase B3273 sequence

SEQ ID NO: 16273 - DNA, 260 bp, Unknown
  Description of Unknown: LeftRegion for integrase B3274 sequence
aaaggaaaaaacagatgcccaacaagaggactggtttattagtcaccatcttctgatggccgcacttgctgtcgatatggacagctataagggcaacgcagatacatatgacgatattatcaaacaacgaaatgagcttgctgcccttgtcggaataaagaaaagataaccacgcttatcaacaagaaggtggtgctaaaatgaacgatcaatctacaaaaggcgtcctctactgccggtacagctcccacgcccaacgc

SEQ ID NO: 16274 - DNA, 260 bp, Unknown
  Description of Unknown: LeftRegion for integrase B3275 sequence
ataaagagcatcctcgctgattgcgggggagacctggcagatgctttcccgcagattatggagaagcagaacacgctcaaggccaaaaccgcctctattctggatagcctcttgcaggccgatgttgcggccttaaaagacagcaacaagtaacctttcggcctgcgctccggcgcgggcctttttgtttggaggtcatcatggagcagtatctcatatacctgcgcaagtctcgttccgacctcgaggcagaggcacac

SEQ ID NO: 16275 - DNA, 260 bp, Unknown
  Description of Unknown: LeftRegion for integrase B3276 sequence
acactacaatagaatattttctaacaggaaaacgccctatatctaatctgactgatatggaaaatcttctattagaagcatacagatcggcagacgtaaaaggacaagctgcaatcatccaagtctgtatgaatgaaaaagatgcaaaaggggaaactatcattgcaggataataagcattgaagaatggaggaagaaccatgtacgaagagattaagactgcttgtctatatctacgatattcaagcagcagccaaact

SEQ ID NO: 16276 - DNA, 260 bp, Unknown
  Description of Unknown: LeftRegion for integrase B3277 sequence
ataaagagcatcctcgctgattgcgggggagacctggcagatgctttcccgcagattatggagaagcagaacacgctcaaggccaaaaccgcctctattctggatagcctcttgcaggccgatgttgcggccttaaaagacagcaacaagtaacctattggcctgcgctccggcgcgggccttttcgtttggaggttatcatggagcagtatctcatatacctgcgcaagtctcgttctgacctcgaggccgaagcgcac

SEQ ID NO: 16277 - DNA, 260 bp, Unknown; identical to SEQ ID NO: 16212
  Description of Unknown: LeftRegion for integrase B3278 sequence

SEQ ID NO: 16278 - DNA, 260 bp, Unknown; identical to SEQ ID NO: 15411
  Description of Unknown: LeftRegion for integrase B3279 sequence

SEQ ID NO: 16279 - DNA, 260 bp, Unknown
  Description of Unknown: LeftRegion for integrase B3280 sequence
ataaagagcatcctcgctgattgcgggggagacctggcagatgctttcccgcagattatggagaagcagaacacgctcaaggccaaaaccacctctattctggatagcctcttgcaggccgatgttgcggccttaaaagacagcaacaagtaacctattggcctgcgctccggcgcgggccttttcgtttggaggtcatcatggagcagtatctcatatacctgcgcaagtctcgttccgacctcgaggccgaagcgcac

SEQ ID NO: 16280 - DNA, 260 bp, Unknown; identical to SEQ ID NO: 16217
  Description of Unknown: LeftRegion for integrase B3281 sequence

SEQ ID NO: 16281 - DNA, 260 bp, Unknown; identical to SEQ ID NO: 16238
  Description of Unknown: LeftRegion for integrase B3282 sequence

SEQ ID NO: 16282 - DNA, 260 bp, Unknown
  Description of Unknown: LeftRegion for integrase B3283 sequence
ataaagagcatcctcgcagattgcggcggagaccttgcagatgcttttcctcagattatggagaagcagaacacgctcaaggccaagaccgcctctattctggatagcctcttgcaggccgatgttgcggccttaaaagacagcaacaagtaacctattggcctgcgctccggcgcgggcctttttgtttggaggtcatcatggagcagtatctcatatacctgcgcaagtctcgttccgacctcgaggccgaagcgcac

SEQ ID NO: 16283 - DNA, 260 bp, Unknown
  Description of Unknown: LeftRegion for integrase B3284 sequence
aaaaatacgtaattttcgtaacattatatatttttataataaataatacttaattattctatatattattcaattccttgtgccccaaaagtgttacgatttttgcgtaacatgcccctccaaaatcgtaacattcgtaacaaccaaacgttatccacaggaaaaccgaatgcgaattcggttttgaggaggtgcttattttgaaaaccgccgtcacctatgcccgcttttcctctgcgcgccagcatgagacgtctatc

SEQ ID NO: 16284 - DNA, 260 bp, Unknown; identical to SEQ ID NO: 16217
  Description of Unknown: LeftRegion for integrase B3285 sequence

SEQ ID NO: 16285 - DNA, 260 bp, Unknown; identical to SEQ ID NO: 16217
  Description of Unknown: LeftRegion for integrase B3286 sequence

SEQ ID NO: 16286 - DNA, 260 bp, Unknown
  Description of Unknown: LeftRegion for integrase B3287 sequence
ataaagagcatcctcgctgattgcgggggagacctggcagatgctttcccgcagattatggagaagcagaacacgctcaaggccaagaccgcctctattctggatagcctcttgcaggccgatgttgcggccttaaaggatagcaacaagtaacctttcggcctgcgctccggcgcgggtctttttgtttggaggtcatcatggagcagtatctcatatacctgcgcaagtctcgctctgacatcgaggcagaggcacac

SEQ ID NO: 16287 - DNA, 260 bp, Unknown
  Description of Unknown: LeftRegion for integrase B3288 sequence
cacgaaggcttaacgtattgggaaaataataaagatttaattggcagaacttcaagagttattattgctgcctttgatgatactaaaaataataatgatgaacttttatatgctagaaatgtattagcacatcaacttaagagaaaagagataagtgaatactctttaccataataatatcttaagggaagggataaccaatgaacgctgtaatatatgctaggttctctagccataaccaacaggaacaaagcattgaa

SEQ ID NO: 16288 - DNA, 260 bp, Unknown; identical to SEQ ID NO: 16217
  Description of Unknown: LeftRegion for integrase B3289 sequence

SEQ ID NO: 16289 - DNA, 260 bp, Unknown
  Description of Unknown: LeftRegion for integrase B3290 sequence
ggtaaaaaatttaataagacttttagtaatataacttctctatctgatatagaatcagcattgttagacttatctgcatatgcttgtgtatttttttctgaaaatgatattaacctaagcacttatattattcaagaatatacaatagaatttatatcaaaattagagcatttattggattaaaatagaaaggtaattctatgaacgctgtaatatatgctaggttctctagccataaccaacaggaacagagcattgaa

SEQ ID NO: 16290 - DNA, 260 bp, Unknown
  Description of Unknown: LeftRegion for integrase B3291 sequence
ataaagagcatcctcgctgattgcgggggagacctggcagatgctttcccgcagattatggagaagcagaacacgctcaaggccaaaaccgcctctattctggatagcctcttgcaggccgatgttgcggccttaaaagacagcaacaagtaacctattggcctgcgctccggcgcgggccttttcgtttggaggtcatcatggagcagtatctcatatacctgcgcaagtctcgttccgacctcgaggccgaagcgcac

SEQ ID NO: 16291 - DNA, 260 bp, Unknown
  Description of Unknown: LeftRegion for integrase B3292 sequence
taaagagcatcctcgctgattgcgggggagacctggcagatgctttcccgcagattatggagaagcagaacacgctcaaggccaagaccgccactatccttgacagcctcttgcaggctgacgttgcggccttaaaggatagcaacaagtaacctttcggcctgcgctccggcgcgggcctttttgttttggaggtcatcatggagcagtatctcatatacctgcgcaagtctcgttccgacctcgaggccgaagcgcac

SEQ ID NO: 16292 - DNA, 260 bp, Unknown; identical to SEQ ID NO: 16266
  Description of Unknown: LeftRegion for integrase B3293 sequence

SEQ ID NO: 16293 - DNA, 260 bp, Unknown
  Description of Unknown: LeftRegion for integrase B3294 sequence
ataaagagcatcctcgctgattgcgggggagacctggcagatgctttcccgcagattatggagaagcagaacacgctcaaggccaaaaccgcctctatccttgacagcctcttgcaggctgacgttgcggccttaaaggatagcaacaagtaacctttcggcctgcgctccggcgcgggtctttttgttcggaggtcatcatggagcagtatctcatatatctgcgcaagtctcgttccgacctcgaggccgaagcgcac

SEQ ID NO: 16294 - DNA, 260 bp, Unknown
  Description of Unknown: LeftRegion for integrase B3295 sequence
ctggatcattgacatggttatgatctgctgcaacaaattcaccgacagcaccggtgcggtggtcggtctgaaggttgccgagtataccagacagccggatcccaatcttgcagaggcttctctggaggagcagcgggaggcagcggccgagactgccagagcttacggctataccgtaatagagtcaggcgctcaggataatgccgacaaataaaaacatggctcgaaaatatgccgcaggaggtggctcggataattcc

SEQ ID NO: 16295 - DNA, 260 bp, Unknown; identical to SEQ ID NO: 16266
  Description of Unknown: LeftRegion for integrase B3296 sequence

SEQ ID NO: 16296 - DNA, 260 bp, Unknown
  Description of Unknown: LeftRegion for integrase B3297 sequence
cggcgtgaccggcatcgcgcggagctgtacgggcgtatcattgccgggcttgttacctttgttttctttgtgctcatcttttttattattgacctgctgaaccccaatgtgggatggatccgccgctccatcattgagcagacgcactacggcgtgagcactcgcgccgccatcatgtgcgcgctcccgtggtggctgggatgaccacgcttcatcatggcgcgtacatactcgcgcgttatagtaccgaccggcaggat

SEQ ID NO: 16297 - DNA, 260 bp, Unknown; identical to SEQ ID NO: 16212
  Description of Unknown: LeftRegion for integrase B3298 sequence

SEQ ID NO: 16298 - DNA, 260 bp, Unknown
  Description of Unknown: LeftRegion for integrase B3299 sequence
ataaagagcatcctcgctgattgcgggggagacctggcagatgctttcccgcagattatggagaagcagaacacgctcaaggccaagaccgcctctattctggatagcctcttgcaggccgatgttgcggccttaaaagacagcaacaagtaacctattggcctgcgctccggcgcgggcctttttgtttggaggtcatcatggagcagtatctcatatacctgcgcaagtctcgctctgacatcgaggcagaggcgcac

SEQ ID NO: 16299 - DNA, 260 bp, Unknown; identical to SEQ ID NO: 16242
  Description of Unknown: LeftRegion for integrase B3300 sequence

SEQ ID NO: 16300 - DNA, 260 bp, Unknown
  Description of Unknown: LeftRegion for integrase B3301 sequence
aacagcctcaaaaacgaggtatgcgccgtcctcgataaacttatgcaagccgacattgacaccgcctttgaagtcaaaaaagaagacctcgaatactccgaacggaaggcaacataatctatgtggattggagcaactatcgtaaaaaagattaaccgctgccgcctctccggggcggcttctcttttggaggtgtaattatgccgtattgcttatatgtccgtaaatcaagagcggacgcagaggcggaggctcgcggt

SEQ ID NO: 16301 - DNA, 260 bp, Unknown
  Description of Unknown: LeftRegion for integrase B3302 sequence
taaagagcatcctcgcggattgcggaggagacctggcaggtgctttcccgcagattatggagaagcagaacacgctcaaggccagaaccgcctctatcctcgacagcctcttgcaggccgacgttgcggccttaaaggatagtaacaagtaacctttcggcctgcgctccggcgcgggccttttttgtttggaggccatcatggagcagtatctcatatacctgcgcaagtctcgttccgacctcgaggccgaagcacac

SEQ ID NO: 16302 - DNA, 260 bp, Unknown; identical to SEQ ID NO: 16227
  Description of Unknown: LeftRegion for integrase B3303 sequence

SEQ ID NO: 16303 - DNA, 260 bp, Unknown; identical to SEQ ID NO: 13821
  Description of Unknown: LeftRegion for integrase B3304 sequence

SEQ ID NO: 16304 - DNA, 260 bp, Unknown
  Description of Unknown: LeftRegion for integrase B3305 sequence
cgcgctctcaacaccaaaaagatgaaattggtttcttgtgacttgcagaaaaaggaatatgaggtgctgggtgaacacgatgaagtctacaccatccggcacggagaatgttcttgcatggacttccagatgcgcggtcttccgtgtaagcacatgtacttcgttagtatgcacctcgattaaaaggacggtgatggataatggcaaaaaagaagaagcctgccggaggcgttgccatcatctatgcccgttactcgtcc

SEQ ID NO: 16305 - DNA, 260 bp, Unknown; identical to SEQ ID NO: 16212
  Description of Unknown: LeftRegion for integrase B3306 sequence

SEQ ID NO: 16306 - DNA, 260 bp, Unknown
  Description of Unknown: LeftRegion for integrase B3307 sequence
cggtttgtgcattctgctggcggcagccctggcggcttacgtgatcctggatgcgctcaaccccgccatgggcctgatccggcagaccgggaccaatattggcgtgtatctcatggctatggccatcatcggagtctgcctgtacattggtcacagcatggtcaagcgccgaaataaaagattgagagaggagcaaaaccatgagcaaagctgacatcctcgcccgatactccacggataatcaaaatgcagacagcatc

SEQ ID NO: 16307 - DNA, 260 bp, Unknown
  Description of Unknown: LeftRegion for integrase B3308 sequence
ataaagagcatcctcgctgattgcgggggagacctggcagatgctttcccgcagattatggagaagcagaacacgctcaaggccaaaaccgcctctatccttgacagcctcttgcaggctgacgttgcggccttaaaggatagcaacaagtaacctttcggcctgcgctccggcgcgggtctttttgtttggaggtcatcatggagcagtatctcatatacctgcgcaagtctcgctctgacatcgaggcagaggcacac

SEQ ID NO: 16308 - DNA, 260 bp, Unknown; identical to SEQ ID NO: 16242
  Description of Unknown: LeftRegion for integrase B3309 sequence

SEQ ID NO: 16309 - DNA, 260 bp, Unknown
  Description of Unknown: LeftRegion for integrase B3310 sequence
ataaagagcatcctcgcggattgcgggggagacctggcagatgctttcccgcagattatggagaagcagaacacgctcaaggccaaaaccgcctctatccttgacagcctcttgcaggctgacgttgcggccttaaaggatagcaacaagtaacctttcggcctgcgctccggcgcgggtctttttgtttggaggtcatcatggagcagtatctcatatacctgcgcaagtctcgttccgacctcgaggccgaagcgcac

SEQ ID NO: 16310 - DNA, 260 bp, Unknown
  Description of Unknown: LeftRegion for integrase B3311 sequence
ataaagagcatcctcgctgattgcgggggagacctggcagatgctttcccgcagattatggagaagcagaacacgctcaaggccaagaccgcctctattctggatagcctcttgcaggccgatgttgcggccttaaaagacagcaacaagtaacctattggcctgcgctccggcgcgggcctttttgtttggaggtcatcatggagcagtatctcatatacctgcgcaagtctcgttccgacctcgaggccgaagcgcac

SEQ ID NO: 16311 - DNA, 260 bp, Unknown
  Description of Unknown: LeftRegion for integrase B3312 sequence
tacagcggagttattgatagatgataatatgcttatcgatattatggaggtaaataatctaattacaattgatgaattaagtaaatacttcggtgttcctaacgagtttatttcttataagtttacccacttaaattttaattaataacctaccatatgtttactatattgttgtactatatataagaagggggaatcttatgattgcagcaatttattcaagaaagtcaaaatttactggaaaaggtgaatctatagaa

SEQ ID NO: 16312 - DNA, 260 bp, Unknown; identical to SEQ ID NO: 16293
  Description of Unknown: LeftRegion for integrase B3313 sequence

SEQ ID NO: 16313 - DNA, 260 bp, Unknown
  Description of Unknown: LeftRegion for integrase B3314 sequence
taaagagcatcctcgctgattgcgggggagacctggcagatgctttcccgcagattatggagaagcagaacacgctcaaggccaaaaccgcctctatccttgacagcctcttgcaggctgacgttgcggccttaaaggatagcaacaagtaacctttcggcctgtgctccggcgcgggcctttttgttttggaggtcatcatggagcagtatctcatatacctgcgcaagtctcgttccgacctcgaggccgaagcgcac

SEQ ID NO: 16314 - DNA, 260 bp, Unknown; identical to SEQ ID NO: 16213
  Description of Unknown: LeftRegion for integrase B3315 sequence

SEQ ID NO: 16315 - DNA, 260 bp, Unknown
  Description of Unknown: LeftRegion for integrase B3316 sequence
aacggctccctgctgcaacagagaaccgtctcacatagatcacactcccgaaggatgatgcaatctgtaggccaaaaacattgtatcatcttccggacagccacgcaagcggaactcctgttccccgctggctgttatttttataccctttttgcgatttgcgacgtcgcaaatcatacactgtactggaggatgatattatgtacgaagatctatcttatacttacggatccggcgcttatgccatctacttgcggaag

SEQ ID NO: 16316 - DNA, 260 bp, Unknown; identical to SEQ ID NO: 16222
  Description of Unknown: LeftRegion for integrase B3317 sequence

SEQ ID NO: 16317 - DNA, 260 bp, Unknown
  Description of Unknown: LeftRegion for integrase B3318 sequence
taaagagcatcctcgctgattgcgggggagacctggcaggtgctttcccgcagattatggataagcagaacacgctcaaggccaaaaccgcctctatccttgacagcctcttgcaggctgacgttgcagccttaaaggatagcaacaagtaacctttcggcctgcgctccggcgcgggccttttttgtttggaggtcatcatggagcagtatctcatatacctgcgcaagtctcgttccgacctcgaggccgaagcgcac

SEQ ID NO: 16318 - DNA, 260 bp, Unknown; identical to SEQ ID NO: 16207
  Description of Unknown: LeftRegion for integrase B3319 sequence

SEQ ID NO: 16319 - DNA, 260 bp, Unknown; identical to SEQ ID NO: 16217
  Description of Unknown: LeftRegion for integrase B3320 sequence

SEQ ID NO: 16320 - DNA, 260 bp, Unknown
  Description of Unknown: LeftRegion for integrase B3321 sequence
ataaagagcatcctcgctgattgcggaggagacctagcagatgctttcccgcagattatggagaagcagaacacgctcaaggccaaaaccgcctctattctggatagcctcttgcaggccgatgttgcggccttaaaagacagcaacaagtaacctattggcctgcgctccggcgcgggccttttcgtttggaggtcattatggagcagtatctcatatacctgcgcaagtctcgttccgacctcgaggccgaagcgcac

SEQ ID NO: 16321 - DNA, 260 bp, Unknown; identical to SEQ ID NO: 16266
  Description of Unknown: LeftRegion for integrase B3322 sequence

SEQ ID NO: 16322 - DNA, 260 bp, Unknown; identical to SEQ ID NO: 16220
  Description of Unknown: LeftRegion for integrase B3323 sequence

SEQ ID NO: 16323 - DNA, 260 bp, Unknown
  Description of Unknown: LeftRegion for integrase B3324 sequence
attggttggcaagcgtttaaaacgataaagtatgtatatcgtggtgtagaccaaattttggatgaggttacacaaaataatttaaaagaattgcaggatatggcgcaaagtttgtcagatatcccacaataaaatcgacaaaaatacgccccaccttattttttagtggggcgtatttcataaggaaaggagtgtatcacatggagcaatattgcatttatctccgaaaatcacgtgccgatgcagaagcagaagcaaga

SEQ ID NO: 16324 - DNA, 260 bp, Unknown
  Description of Unknown: LeftRegion for integrase B3325 sequence
ataaagagcatcctcgctgattgcgggggagacctggcagatgctttcccgcagattatggagaagcagaacacgctcaaggccaagaccgcctctattctggatagcctcttgcaggctgacgttgcggccttaaaggacagcagcaaataacctttcagcctgcgctcctgcgcgggcctttttgtttggaggtcatcatggagcagtatctcatatacctgcgcaagtcccgttccgacatcgaggcagaggcgcac

SEQ ID NO: 16325 - DNA, 260 bp, Unknown; identical to SEQ ID NO: 16212
  Description of Unknown: LeftRegion for integrase B3326 sequence

SEQ ID NO: 16326 - DNA, 260 bp, Unknown; identical to SEQ ID NO: 16263
  Description of Unknown: LeftRegion for integrase B3327 sequence

SEQ ID NO: 16327 - DNA, 260 bp, Unknown; identical to SEQ ID NO: 16233
  Description of Unknown: LeftRegion for integrase B3328 sequence

SEQ ID NO: 16328 - DNA, 260 bp, Unknown; identical to SEQ ID NO: 13289
  Description of Unknown: LeftRegion for integrase B3329 sequence

SEQ ID NO: 16329 - DNA, 260 bp, Unknown
  Description of Unknown: LeftRegion for integrase B3330 sequence
taaagagcatcctcgctgattgcgggggagacctggcagatgctttcccgcagattatggagaaacagaacacgctcaaggccaagaccgcctctattctggatagcctcttgcaggccgatgttgcggccttaaaagacagcaacaagtaacctattggcctgcgctccggcgcgggccttttttgtttggaggtcatcatggagcagtatctcatatacctgcgcaagtctcgttccgacctcgaggccgaagcgcac

SEQ ID NO: 16330 - DNA, 260 bp, Unknown
  Description of Unknown: LeftRegion for integrase B3331 sequence
gtttgtccgataataggtcttgtgcgccaatagatacttctctaacagaggaagaagcactactccttaaagcgttccatgcagcaagcgcaagtggccgtttccgtatcatccagatctgcatgaatgaattggataatactgaaaaaggggtaaccgtcagtgccggataattgacttcacagaatggaggaagaaccatgtatgaggaaataaaacaggtagttttgtatgtgcgctattccagtgcaaaccagaca

SEQ ID NO: 16331 - DNA, 260 bp, Unknown
  Description of Unknown: LeftRegion for integrase B3332 sequence
atagtgtatcctaatatggtaaaaaattcttgtattacgtaaaatttttaaaataaaagtccactacccacaatagtgaacttttgaggtaccactaatacctcgtttcaaataaatgaactaagtacaagtccttttacgtgcctaattataacaaattagcacgtctaaggcaaattaaagaaaggacgtgttttaatatgcaaataagaaatgcagttgcatactgtagattcagtagtgataatcaaagaagtgaa

SEQ ID NO: 16332 - DNA, 260 bp, Unknown
  Description of Unknown: LeftRegion for integrase B3333 sequence
ataaagagcatcctcgcggattgcgggggagacctggcagatgctttcccgcagattatggagaagcagaacacgctcaaggccaagaccgcctctatccttgacagccttttgcaggctgacgttgcggccttaaaggatggcagcaagtaacctttcggcctgcgctccggcgcgggcctttttgtttggaggtcatcatggagcagtatctcatatacctgcgcaagtctcgttccgacctcgaggccgaagcgcac

SEQ ID NO: 16333 - DNA, 260 bp, Unknown; identical to SEQ ID NO: 13821
  Description of Unknown: LeftRegion for integrase B3334 sequence

SEQ ID NO: 16334 - DNA, 260 bp, Unknown; identical to SEQ ID NO: 16293
  Description of Unknown: LeftRegion for integrase B3335 sequence

SEQ ID NO: 16335 - DNA, 260 bp, Unknown; identical to SEQ ID NO: 13344
  Description of Unknown: LeftRegion for integrase B3336 sequence

SEQ ID NO: 16336 - DNA, 260 bp, Unknown; identical to SEQ ID NO: 13289
  Description of Unknown: LeftRegion for integrase B3337 sequence

SEQ ID NO: 16337 - DNA, 260 bp, Unknown
  Description of Unknown: LeftRegion for integrase B3338 sequence
taaagagcatcctcgctgattgcgggggagacctggcagatgctttcccgcagattatggagaagcagaacacgctcaaggccaagaccgcctctattctggatagtctcttgcaggccgatgttgcggccttaaaagacagcaacaagtaacctattggcctgcgctccggcgcgggccttttttgtttggaggccatcatggagcagtatctcatatacctgcgcaagtctcgttccgacctcgaggccgaagcgcac

SEQ ID NO: 16338 - DNA, 260 bp, Unknown
  Description of Unknown: LeftRegion for integrase B3339 sequence
ataaagagcatcctcgctgattgcgggggagacctggcagatgctttcccgcagattatggagaagcagaacacgctcaaggccaaaaccgcctctatccttgacagcctcttgcaggctgacgttgcggccttaaaggatagcaacaagtaacctttcggcctgcgctccggcgcgggcctttttgtttggaggtcatcatggagcagtatctcatatacctgcgcaagtctcgttccgacctcgaggccgaagcgcac

SEQ ID NO: 16339 - DNA, 260 bp, Unknown
  Description of Unknown: LeftRegion for integrase B3340 sequence
atctcggcatcgtcaccatgcttcgcagcctgcgggagcagggtctcgtcagcggcagcgaagccaaaaaaatcgccgcgcggctgagggtacagcttggcgcagacatcattatttctctttgatttcttcgcttttaggatagctattgcggatgttatatggtattgtgtgttactgacgaaggaggtggcagaggaatgagtgataaggagaaaaccaacggttctctggcgatggctccgcgggtcattacgatc

SEQ ID NO: 16340 - DNA, 260 bp, Unknown; identical to SEQ ID NO: 13821
  Description of Unknown: LeftRegion for integrase B3341 sequence

SEQ ID NO: 16341 - DNA, 260 bp, Unknown
  Description of Unknown: LeftRegion for integrase B3342 sequence
ataaagagcatcctcgcagattgcgggggagacctggcaggtgctttcccgcagattatggagaagcagaacacgctcaaggccaaaaccgcctctgttttggacagcctcttacaggccgatgttgcggccttaaaagacagcaacaagtaacctttcggcctgcgctccggcgcgggcctttttgtttggaggtcatcatggagcagtatctcatatacctgcgcaagtctcgttccgacctcgaggccgaagcacac

SEQ ID NO: 16342 - DNA, 260 bp, Unknown; identical to SEQ ID NO: 16266
  Description of Unknown: LeftRegion for integrase B3343 sequence

SEQ ID NO: 16343 - DNA, 260 bp, Unknown; identical to SEQ ID NO: 16313
  Description of Unknown: LeftRegion for integrase B3344 sequence

SEQ ID NO: 16344 - DNA, 260 bp, Unknown
  Description of Unknown: LeftRegion for integrase B3345 sequence
cacagcggagttattgatagatgataatatgcttatcgatattatggaggtaaataatctaattacaattgatgaattaagtaaatactttggtgttcctagcgagtttatttcttataagtttacccacttaaattttaattaataacctaccatatgtttactatattgttgtactatatataagaagggggaatcttatgattgcagcaatttattcaagaaaatcaaaatttactggaaaaggtgaatctatagaa

SEQ ID NO: 16345 - DNA, 260 bp, Unknown
  Description of Unknown: LeftRegion for integrase B3346 sequence
taaagagcatcctcgcagattgcgggggaggcctggcagatgcttttcctcagattatggagaagcagaacacgctcaaggccaagaccgcctctattctggatagcctcttgcaggccgatgttgcggccttaaaagacagcaacaagtaacctattggcctgcgctccggcgcgggcctttttgttttggaggtcatcatggagcagtatctcatatacctgcgcaagtctcgttccgacctcgaggccgaagcgcac

SEQ ID NO: 16346 - DNA, 260 bp, Unknown
  Description of Unknown: LeftRegion for integrase B3347 sequence
taaagagcatcctcgcagattgcgggggagacctggcagatgcttttcctcagattatggagaaacagaacacgctcaaggccaagactgcctctattctggatagtctcttgcaggccgatgttgcggccttaaaagacagcaacaagtaacctattggcctgcgctccggcgcgggcctttttgttttggaggtcatcatggagcagtatctcatatacctgcgcaagtctcgttccgacctcgaggccgaagcgcac

SEQ ID NO: 16347 - DNA, 260 bp, Unknown
  Description of Unknown: LeftRegion for integrase B3348 sequence
aacagcctcaaaaacgaggtttgtgccgtcctcgataaacttatgcaagccgacattgacaccgcctttgaagtcaaaaaagaagacctcgaatactccgaacggaaggcaacataatctatgtggattggagcaactatcataaaaaagattaaccgctgccgcctctccggggcggcttctcttttggaggtgtaattatgccgtattgcttatatgtccgtaaatcaagagcggacgcagaggcggaggctcgcggc

SEQ ID NO: 16348 - DNA, 260 bp, Unknown
  Description of Unknown: LeftRegion for integrase B3349 sequence
ataaagagcatcctcgctgattgcgggggagacctggcagatgctttcccgcagattatggagaagcagaacacgctcaaggccaagaccgcctctattctggatagcctcttgcaggccgatgttgcggccttaaaagacagcaacaagtaacctattggcctgcgctccggcgcgggtctttttgtttggaggtcatcatggagcagtatctcatatatctgcgcaagtctcgttccgacctcgaggccgaagcgcac

SEQ ID NO: 16349 - DNA, 260 bp, Unknown; identical to SEQ ID NO: 16212
  Description of Unknown: LeftRegion for integrase B3350 sequence

SEQ ID NO: 16350 - DNA, 260 bp, Unknown
  Description of Unknown: LeftRegion for integrase B3351 sequence
tgtaacatctggtctttctgtgctgtttggtttgctcctgatggtatatgtaaccttggacgctaggaatccaaatcttggcctaattagaggcaccacaacagccccaattgtgtacgttgcggctttttccattatcggaatgtgcttgtatatcgtccgaacagtggcaaggcgaaacgcaaaagggaggaaacgggatgcaaacaatgcccattgacctgtcggcgctgactccggaggaaaggcagcagtttgcg

SEQ ID NO: 16351 - DNA, 260 bp, Unknown
  Description of Unknown: LeftRegion for integrase B3352 sequence
aattgccacaacaagatctgaatggaagaataaaacggaatatttgaaagatctgattagagatcaaaagcacgaaatcatcttgttaagaattttacttacagttgccatcattttaatcatcggcgcactggtcattgaccgactgaatggcaacataggctttatctggcgctactaaaaattaaggtgggatcaaagtggagaaaacaatagaaaaagtgtgtgggaaatgggaacaagatcaatatgccatgtat

SEQ ID NO: 16352 - DNA, 260 bp, Unknown; identical to SEQ ID NO: 16238
  Description of Unknown: LeftRegion for integrase B3353 sequence

SEQ ID NO: 16353 - DNA, 260 bp, Unknown
  Description of Unknown: LeftRegion for integrase B3354 sequence
ataaagagcatcctcgctgattgcgggggagacctggcaggtgctttcccgcagattatggagaagcagaacacgctcaaggccaaaaccgcctctatccttgacagcctcttgcaggctgacgttgcagccttaaaggatagcaacaagtaacctttcggcctgcgctccggcgcgggcttttttgtttggaggtcatcatggagcagtatctcatatacctgcgcaagtctcgttccgacctcgaggccgaagcgcac

SEQ ID NO: 16354 - DNA, 260 bp, Unknown
  Description of Unknown: LeftRegion for integrase B3355 sequence
taaagaacatcctcgctgattgcgggggagacctggcaggtgctttcccgcagattatggagaagcagaacacgctcaaggccaaaaccgcctctatccttgacagcctcttgcaggctgacgttgcagccttaaaggatagcaacaagtaacctttcagcctgcgctccggcgcgggccttttttgtttggaggtcatcatggagcagtatctcatatacctgcgcaagtctcgttccgacctcgaggccgaagcgcac

SEQ ID NO: 16355 - DNA, 260 bp, Unknown
  Description of Unknown: LeftRegion for integrase B3356 sequence
ctgctgttacaggatatcgatcgcaatggctattccggtttaggcaagccggagcctttaaaaggcgatttacatggttattggagccgacgcattgacgaaacaaaccggcttgtataccgcatagtcagcgaccgggttgagatattacaatgccgtacgcattacaaacatattcaataaaaaagccggaggcagtcatggcgcaagaaaactatatcatctatctgcgcaaatcccgggcggacgccgaggctgag

SEQ ID NO: 16356 - DNA, 260 bp, Unknown
  Description of Unknown: LeftRegion for integrase B3357 sequence
taaagaacatcctcgcggattgcgggggagacctggcagatgctttcccgcagattatggagaagcagaacacgctcaaggccaagaccgcctctattctggatagtctcttgcaggccgatgttgcggccttaaaagacagcaacaagtaacctattggcctgcgctccggcgcgggccttttttgtttggaggtcatcatggagcagtatctcatatacctgcgcaagtctcgttccgacctcgaggccgaagcgcac

SEQ ID NO: 16357 - DNA, 260 bp, Unknown
  Description of Unknown: LeftRegion for integrase B3358 sequence
gtgcgtcgcttttgcgttttagcggtgatggcggtgcaggcaaagatgctttgactggaacgatggttgatacgagatctggggaaactgtttcaacaaagatcgaaagcctagaagatctttgcaagctgtttcctgcggtgaagttatacgtggcaggataatattcgtatttgtgaacagaaagagggcgggcagcattgtcgaagcgcgaatcgaaaagcagccagaagtgtttggcagcggagcagatcggcgtg

SEQ ID NO: 16358 - DNA, 260 bp, Unknown
  Description of Unknown: LeftRegion for integrase B3359 sequence
taaagagcatcctcgctgattgcaggggagacctggcagatgctttcccgcagattatggagaagcagaacacgctcaaggccaagaccgcctctattctggatagcctcttgcaggccgatgttgcggccttaaaagacagcaacaagtaacctattggcctgcgctccggcgcgggccttttttgtttggaggtcatcatggagcagtatctcatatacctgcgcaagtctcgttccgacctcgaggccgaagcgcac

SEQ ID NO: 16359 - DNA, 260 bp, Unknown; identical to SEQ ID NO: 16215
  Description of Unknown: LeftRegion for integrase B3360 sequence

SEQ ID NO: 16360 - DNA, 260 bp, Unknown
  Description of Unknown: LeftRegion for integrase B3361 sequence
tttcgatcaagggcttatgacggtcttgcctgatcttacaattcaggtctcgaactatgtgaaggacggctacgacgaccaaaatacgagagactggctactcggcgtagagggtacaaaaatcatcaggccgaagaggttcgcaccaaatcgcgacatgctggcctaccacaatgagtttgtattcctgaggtgattccatgcagcgagcagtgatatacgccaggtacagccctggaccaaatcagacagagcagtcg

SEQ ID NO: 16361 - DNA, 260 bp, Unknown
  Description of Unknown: LeftRegion for integrase B3362 sequence
gctcagcatcagaagtccctgcgcatgcaccggcttgtgacgctcatcctcttgggtattcttttgctgtgtgcccttgcgcttgtggccgacgtgctcagcccatcgatcggctggttccgcgcataaatcaaaccgccccggcccagcgccggagcggtatccgtataaccttttgcccttgtggtgagaatctgcttatgaaatttacatctacctggaaaatctccgacccgctcgcgcaatacatcatttacctg

SEQ ID NO: 16362 - DNA, 260 bp, Unknown
  Description of Unknown: LeftRegion for integrase B3363 sequence
tctccaactggacggcaaaggcaccctcgccggcagttgcaccgcagcctgcgccacaggttattgaacaaaagccgtctgcagctgatgaaatccgcaagtacaagggcctgcttgacgatggaatcatttcgcaggaagaatttgaggcaaagaagaagcagttgcttggcctgtaaaaccgaaaggagcgtgacggcatgaaaaagcgaatcaacactaattccgcagcccgtgccgtcatctatgcccggtattcc

SEQ ID NO: 16363 - DNA, 260 bp, Unknown
  Description of Unknown: LeftRegion for integrase B3364 sequence
ccgatgctaccaacaccagaccggctcgcatatccgaggatatacacatgtgacctaggaaatcactcgaatattgtatcatcctcggacagctatcgcaagcggaactcctgttccccgctggctgttatttttatactcttttttaggttgttgcgacgtcgcaacagctgcatacactatacgaggaggatgatacgatgtacgaaaatctgtcttttccttacggatccggcacttatgccatctacctccggaag

SEQ ID NO: 16364 - DNA, 260 bp, Unknown
  Description of Unknown: LeftRegion for integrase B3365 sequence
ctatagagtgttctgcgcaatattacataaacggcatttttcaatataatttctctgaacttccttatttttttatcaccaatagtggagatttgcaaattgagtttagttgcaaagaaataccttttgatttacgtgactcttctgaaattactataggtcattccattgaagtttaatataagtgaggagcaataaatatgagcagatattgcatttacctgcgaaaatcccgcgccgaccttgaagcagaagcgcac

SEQ ID NO: 16365 - DNA, 260 bp, Unknown
  Description of Unknown: LeftRegion for integrase B3366 sequence
ccagcagcagaagtccctgcacatgcaccggcttgtgacgctcatcctcttgggtattcttttgctgtgtgcccttgcgcttgtggccgacgcgctcatcccatcgatcggctggattcgcacctgaaaattaccgccccggcctgataagccggagcggttgctgtataacttttttgcccaacggggagaatttgcctatgaaatttacatctgcatggagaattgtggacccgctctcgcagtatatcatttacctg

SEQ ID NO: 16366 - DNA, 260 bp, Unknown
  Description of Unknown: LeftRegion for integrase B3367 sequence
aacggtttgaaaaccgatgttgctgcgctcctcgataaacttatgcaagccgatgtcgataccgcttttgaagtcaaaaaaggcggcctcacatcgtccgggtcgaaggcaatataatctatgtcgattggggcaaccgtttcaaatagcctgtaaccgccgcccctctccgggcggcttcttctttggaggtggtattattgccatattgcttatatgtccgtaagtcccgcgctgacgcggaggcagaggctcgcggg

SEQ ID NO: 16367 - DNA, 260 bp, Unknown
  Description of Unknown: LeftRegion for integrase B3368 sequence
ctgcaatttaattactgcgcagcaggggatgacgatccgacaacaatgcaaatcaagcgcgcctgcaaagaattcaaacccacagatacatttccagaatcattctacagctccatcgtcagcaaaatcatcttacacctcgatacacatatcgacatcaaattgcgaaacggacagacattataataaggaagagcaccatgagcaacgcaagaatcatcgaaattccagccactagacagatacgcagtgggaaaaac

SEQ ID NO: 16368 - DNA, 260 bp, Unknown
  Description of Unknown: LeftRegion for integrase B3369 sequence
cggggagattggttctgtagtagcgacaattatattcggcgtcttattcattgcggttttaggttttctaaaatagtaaccgtttttcagccattaaacgcaattttgagagtttttgtatctaatttagccttttaagcataaaattggggccttaattacaaatttaggctcattttcgttagataagaggtgatactttgagttcggttgataaaatcgccgttatttacgcgcgttattcgtctcacggccagacc

SEQ ID NO: 16369 - DNA, 260 bp, Unknown
  Description of Unknown: LeftRegion for integrase B3370 sequence
gacacacctcctgaaacagatactcttatggttgtcattgttgatgacgaagaaggatttgttaagaaaatcagcattgatgaagatactgtgacccttcgctcttttaatccacactatcctccccgtgtttttggcggtgttgaaattggacgattgcgttttgtcggtagagtcatggagttaaaaaggagatttgcatgaaaaaatttccaatcgacctctcctgtctgacagaggaagaaatctctcaatttcag

SEQ ID NO: 16370 - DNA, 260 bp, Unknown
  Description of Unknown: LeftRegion for integrase B3371 sequence
gctcagcagcagaagtccctgcgcatgcaccggcttgtaacgctcatcctcttgggtattcttttgctgtgtgcccttgcgcttgtggccgacgcgctcatcccatcgatcggctggatccgcgcataaataaaaccgccccggcccagcgccggagcggtatccgtataaccttttgcccttgtggtgagaatcttcctatgaaatttacatctacctggaaaatcgccgacccgctcgcgcagtacatcatttacctg

SEQ ID NO: 16371 - DNA, 260 bp, Unknown
  Description of Unknown: LeftRegion for integrase B3372 sequence
ctgctttaatatttcactcggtattggtttgcttgataaagaaagacctaattacgaagtggcaattagcagtatatttcaggcttatacttcaattaggacgcttgtaaaactctacgattctttaaaagtgacctggagtttttctacatcaatcgttcaactttaatctgttaattacataaggagctaggtgaaatatgagtagatattgcatttacctacgaaaatcccgcgccgacctcgaagcagaagcgcac

SEQ ID NO: 16372 - DNA, 260 bp, Unknown
  Description of Unknown: LeftRegion for integrase B3373 sequence
cttaaacgattcgccgaactttacggcgtcactcttgattatttcggagtgtcaacaaatgatgaagtctttgaattaataagccgtgctcgtgaggtttttgaaagtgaccaagtatcaagtaagacgaaagaggatctatacaaagaatttatgcgtctttacttgaatatcagcaaggattaaaggagttttcacctatgacaatacaaaaggataataccgcgttgcgcgctgccgtatatgtccgttattcgtcg

SEQ ID NO: 16373 - DNA, 260 bp, Unknown; identical to SEQ ID NO: 15097
  Description of Unknown: LeftRegion for integrase B3374 sequence

SEQ ID NO: 16374 - DNA, 260 bp, Unknown
  Description of Unknown: LeftRegion for integrase B3375 sequence
ccagatcattctgatatcaggcgacagtgacttcgtaccggcggctaagttggctcgaagagagggaatcgattttattctcgaccccatgcgttctcccattaaaccggacttatatgaacacgttgacggtattaggtctaaagtgccaaacccaagaaaaatcagagaggctgagcagccagtattggagatgcaacatgagtaaatactgcatctacctacgaaaatcccgtgccgacctcgaagccgaggcacac

SEQ ID NO: 16375 - DNA, 260 bp, Unknown
  Description of Unknown: LeftRegion for integrase B3376 sequence
tattacgtgtattagtttatcaccattacggtgaaaccacctaaatggtaaaaaaggaccaactcttaggagtcagcccttgaccaattaatgatcatataacacacactcatagtatatcattaattggtacatctggcaaactccgggtgtattttttgtaccctttttcataaatttaaacataaaggagatttaaaatggcatactgcatatatttacgtaagtccagagcggacagagaacttgaaaatcaggga

SEQ ID NO: 16376 - DNA, 260 bp, Unknown
  Description of Unknown: LeftRegion for integrase B3377 sequence
tgcccagcagcagaagtccctgcgcatgcaccgacttgtgacgctcatcctcttgggtattcttttgctgtgtgcccttgcgcttttggtcgacgtgctcatcccatcgatcggctggatccgcacataaataaaaccgccccggccggcgccggagcggtatccgtataaccttttgcccttgtggtgagaatttgcttatgaactttacatctacctggaaaatcgccgacccgctcgcgcagtacatcatttacctg

SEQ ID NO: 16377 - DNA, 260 bp, Unknown
  Description of Unknown: LeftRegion for integrase B3378 sequence
caggaacagatcatccgccagaagtccgtcgaggctcggcgcaaggatatcttgatcggcgttctggtgtgcatcgttctcgtcgcgcttctgtcgctccttgtcgacctttgtaatcccaatatcggctgggtccgcgcctccgcgcttgcattttttgtgcccgtataaccgcctgccgcagtggtgagaattggcttatgaactttacatctacgtggaaaatctccgacccgctcgcgcagtacatcatttacctg

SEQ ID NO: 16378 - DNA, 260 bp, Unknown
  Description of Unknown: LeftRegion for integrase B3379 sequence
gctcagcatcagaagtccctgcgcatgcaccggcttgtgacgctcatcctcttgggtattcttttgctgtgtgcccttgcgcttgtggccgacgtgctcagcccatcgatcggctggttccgcgcataaatcaaaccgccccggcccagcgccggagcggtatccgtataaccttttgcccttgtggtgagaatctgcttatgaactttacatctacctggaaaatcgctgacccgctcgcgcagtacatcatttacctg

SEQ ID NO: 16379 - DNA, 260 bp, Unknown
  Description of Unknown: LeftRegion for integrase B3380 sequence
gcccagcagcagaagtccctgcgcatgcaccggcttgtgacgctcatcctcttgggtattcttttgctgtgtgcccttgcgcttttggtcgacgtcctcagtccatcaatcggctggatgcgcacataaataaaaccgccccggctcagcgccggagcggtatccgtataaccttttgctcttgtggtgagaatttgcttatgaactttacatctacctggaaaatcgccgacccgctcgcgcagtacatcatttacctg

SEQ ID NO: 16380 - DNA, 260 bp, Unknown
  Description of Unknown: LeftRegion for integrase B3381 sequence
actcttgttgttaatattatgcataaaaaatagcgcccctgctctggaaaagtaaggcgctatttttagtaattacttctgccggcggtcaggtgtacactggccaacggttctcttgttaagtacattatatcgctatatacggtttatgtcaaacagattcgtttgacatttttattatctaatcgaggtgaggcaatatgccatattgtttatatttaagaaaatcaagggctgatattgatgctgaagccaatgga

SEQ ID NO: 16381 - DNA, 260 bp, Unknown
  Description of Unknown: LeftRegion for integrase B3382 sequence
gcccagcagcagaagtccctgcgcatgcaccggcttgtcacactcatcctcttgggtattcttttgctgtgtgcccttgcgcttttggccgacgtgctcagcccatcgatcggctggatccgcacataaataaaaccgccccggcccagcgccggagcggtatccgtataaccttttgcccttgtggtgagaatctgcttatgaaatttacatctacctggaaaatcgctgacccgctcgcgcagtacatcatttacctg

SEQ ID NO: 16382 - DNA, 260 bp, Unknown
  Description of Unknown: LeftRegion for integrase B3383 sequence
cttactttcacattatttctcttagttgtcttagcaatattagttatttgggcaataaaagtaacacatttagcagacccatccatgaggctaatagtgattccttatgaacgccaagtaattatcaaaactatttcaacatataacttaaaattaggagaaacaataaaatttgattcctaattattcaggagattaaaatgagcagatactgtatttaccttcgaaaatcccgtgccgacctcgaagcagaagcgcac

SEQ ID NO: 16383 - DNA, 260 bp, Unknown
  Description of Unknown: LeftRegion for integrase B3384 sequence
caggaacagatcatccgccagaagtccgtcgaggcgcggcgcaaggatgttttgatcggcgtgcttgtgtgcatcgttctcgtctcgcttctggcgctcctcgtcgacctttgtaatcccaatatcggctgggtccgcgcctccgcgcttgcatcctttgtgcccgtataaccgcctgccgcagtggtgagaatctgcttatgaaatttacatctacctggaaaatcgccgacccgctctcgcagtatatcatttacctg

SEQ ID NO: 16384 - DNA, 260 bp, Unknown
  Description of Unknown: LeftRegion for integrase B3385 sequence
ttcaagtttgatattaacacaaaacttgaaaaataggggcattttgttattttataacgaaatgcgttacatcggagtgattaaatgtacaacgagaaaacggaaaaatctttgttctgcggtgcatttgccgctgaacagcagaaagtacaacataaaattttgacttccgaatatacctattttaatcggagggaaaaatggaacagtattgcttatatctgcgaaaatcaagatcagacatcgaagctgaaaatcac

SEQ ID NO: 16385 - DNA, 260 bp, Unknown
  Description of Unknown: LeftRegion for integrase B3386 sequence
ccagcagcagaaatccctgcgtatgcaccggcttgtgacgctcatcctcttgggtattcttttgctgtgtgcccttgcgcttgtggccgacgtgctcatcccatcaatcggctggatccgcacataaattaaaccgccccggcctgataagccggagcggttgccgtataacttttttgcccaacggggagaatttgcctatgaaatttacatctgcatggagaatcgtggacccgctctcgcagtatatcatttacctg

SEQ ID NO: 16386 - DNA, 260 bp, Unknown
  Description of Unknown: LeftRegion for integrase B3387 sequence
aatataatcatttatctgctatctgcaattgtagcacttacccttgctgcgctgattattgatctatgcagcccgaatctcggctgggtgcgcgccgcgcttcacatgcagttcctgcatttataaaaaacaaagccgccccggcccagcgccggagcggtatccgtataaccttgtgcccttgtggtgagaatctgcttatgaaatttacatctacctggaaaatcgccgacccgctcgcgcagtacatcatttacctg

SEQ ID NO: 16387 - DNA, 260 bp, Unknown
  Description of Unknown: LeftRegion for integrase B3388 sequence
cagtacaacaaactgaacgcaaacgagggatgctccattctggtggctgtcgttctcggcgttatcctcgcagtgatttggtttttcggtcattaaatgcaaattttgatgatttttgtatctgatttggctttttaagcacaaaattaaggccttaattgcaaatttgaggctattttcgttaaatagggggtgatagtttgagttcagttgaaacaaccgccgttgtttacgcacggtattcatcccacggccagacc

SEQ ID NO: 16388 - DNA, 260 bp, Unknown
  Description of Unknown: LeftRegion for integrase B3389 sequence
tgcccagcagcagaagtccctgcgcatgcaccgacttgtgacgctcatcctcttgggtattcttttgctgtgtgcccttgcgcttgtggccgacgtgctcatcccatcaatcggctggatccgcacataaataaaaccgccccggccggcgccggagcggtatccgtataacctttttcccttgtggtgagaatctgcctatgaaatttacatctacctggaaaatctccgacccgctcgcgcagtacatcatttacctg

SEQ ID NO: 16389 - DNA, 260 bp, Unknown
  Description of Unknown: LeftRegion for integrase B3390 sequence
taaagagcatcctcgcggattgcgggggagacctggcaggtgctttcccgcagattatggagaagcagaacacgctcaaggccaagaccgcctctgttttggacagcctcttacaggctgatgttgcggccttaaaagacagcaacaagtaacctttcggcctgcgctccggcgcgggccttttttgtttggaggtcatcatggagcagtatctcatatacctgcgcaagtctcgttccgacctcgaggccgaagcgcac

SEQ ID NO: 16390 - DNA, 260 bp, Unknown
  Description of Unknown: LeftRegion for integrase B3391 sequence
ccagcatcagaagtccctgcgcatgcaccggcttgtgacgctcatcctcttgggtattctttcgctgtgtgcccttgcgcttttggtcgacgtactcagtccatcaatcggctggatccgcacataaataaaaccgccccggcctgataagccggagcggttgctgtataacttttttgcccaacggggagaatttgcctatgaaatttacatctgcatggagaatcgtggacccgctctcgcagtatatcatttacctg

SEQ ID NO: 16391 - DNA, 260 bp, Unknown; identical to SEQ ID NO: 16361
  Description of Unknown: LeftRegion for integrase B3392 sequence

SEQ ID NO: 16392 - DNA, 260 bp, Unknown
  Description of Unknown: LeftRegion for integrase B3393 sequence
gctcagcatcagaagtccctgcgcatgcaccgacttgtgacgctcatcctcttgggtattctttcgctgtgtgccctcgcgcttgtggccgacgtactcagcccatcgatcggctggttccgcgcataaatcaaaccgccccggcccagcgccggagcggtatccgtataaccttttgcccttgtggtgagaatctgcttatgaaatttacatctacctggaaaatcgccgacccgctcgcgcagtacatcatttacctg

SEQ ID NO: 16393 - DNA, 260 bp, Unknown
  Description of Unknown: LeftRegion for integrase B3394 sequence
ctatagagtgttctgcgcaatattacataaacggcatttttcaatataacttctctgaacttcctagtttttttatcactaatagtggagatttgcaaattgagtttagttgtaaagaaataccttttgatttgcgtgactcttctgaaattactataggtcattccattgaagtttaatatgagagaggagcgataaatatgagcagatattgcatttacctgcgaaaatcccgcgccgaccttgaagcagaagcgcac

SEQ ID NO: 16394 - DNA, 260 bp, Unknown
  Description of Unknown: LeftRegion for integrase B3395 sequence
ccagatcattctgatatcaggcgacagtgacttcgtaccggcggctaagttggctcgaagagagggaatcgattttattctcgaccccatgcgttctcccattaaaccggacttatatgaacacgttgacggtattaggtctaaagtgccaaacccaagaaaaatcagagaggctgagcagccagtattggagatgcaacatgagtaaatactgcatctacctacgaaaatcccgtgccgacctcgaagcagaagcgcac

SEQ ID NO: 16395 - DNA, 260 bp, Unknown
  Description of Unknown: LeftRegion for integrase B3396 sequence
cgcgtactgcgagaattgcggatacagctttgactttaccacgcaggatgacctcaatgcccaatataataaactgaacacaaacgagggatgcgccattttggtggcggtcattctcggcgttattcttataacaatttggttttacagccattaaacgcaaatttgaggccgttttcgttaaataagggggtgatagtttgagttcagttgataaaatcgccgtcgtttacgcgcggtattcgtcccacggtcagacc

SEQ ID NO: 16396 - DNA, 260 bp, Unknown
  Description of Unknown: LeftRegion for integrase B3397 sequence
gcccagcagcagaagtccctgcgcatgcaccggcttgtgacgctcatcctcttgggcattctttcgctgtgtgccctcgcgcttgtggccgacgtactcagcccatcgatcggctggttccgcgcataaatcaaaccgccccggcccagcgccggagcggtatccgtataaccttttgcccttgtggtgagaatctgcttatgaaatttacatctacctggaaaatcgccgacccgctcgcgcagtacatcatttacctg

SEQ ID NO: 16397 - DNA, 260 bp, Unknown
  Description of Unknown: LeftRegion for integrase B3398 sequence
tttcgatcaagggcttatgacggtcttgcctgatcttacaattcaggtctcggactatgtgaaagacagctacgacgaccaaaatacgaaagactggctactcggcgtagagggtacaaaaatcatcaggccgaagaggttcgcgccaaatcgcgacatgctggcctaccacaatgagtttgtattcctgaggtgattccatgcagcgagcagtgatatacgccaggtacagccctggaccaaatcagacggagcagtcg

SEQ ID NO: 16398 - DNA, 260 bp, Unknown
  Description of Unknown: LeftRegion for integrase B3399 sequence
agtaaaaagatacttgtatatatactaaatgataaaggcttttatgatgaacccatgttttatacattcaatgataaagtaaaagtaaatatttatgatgatttagaaatagattttagtacatttgatttatgaaaactaaattaagccattagatatttttatttagtggctttaatattataagaggaggttttcttatgaaaaagatagcaatttattctcgtaaatcagtatttactggcaaaggtgaaagtgtt

SEQ ID NO: 16399 - DNA, 260 bp, Unknown
  Description of Unknown: LeftRegion for integrase B3400 sequence
caatttgattactgcgtagcaggggatgacgatccgacaacaatgcaaatcaagcgcgcctgcaaaaaattcaaacccacagatacatttccagaatcattctacaacgccatcgtcagcaaaatcatcttacacctcgatacacgtatcgacatcaaactgcgaaacggacaaacattataataataaggaagagaaccatgagcaacgcaagaatcatcgaaattccagccactagacagatacgcggtgggaaaagc

SEQ ID NO: 16400 - DNA, 260 bp, Unknown; identical to SEQ ID NO: 16394
  Description of Unknown: LeftRegion for integrase B3401 sequence

SEQ ID NO: 16401 - DNA, 260 bp, Unknown
  Description of Unknown: LeftRegion for integrase B3402 sequence
gaagagctttatgacacaaaaatttgtgaaaagtgtgagcattcggatgaattttataagcttaataaaaaaaagcctcataccattaggacaccgaaaaaacggtttgaacctcactatgatgatttttcatttttacaaacttcaaatgatgatgattatgaaccgcactaatcccaaaagcaaaggagttgtttgatatgagcagatattgtatctacctacgaaagtcccgcgccgacctcgaagccgaggcgcac

SEQ ID NO: 16402 - DNA, 260 bp, Unknown
  Description of Unknown: LeftRegion for integrase B3403 sequence
tttcgatcaagggcttatgacggtcttgcctgatcttacaattcaggtctcgaattacgtgaaggacggctacgacgaccaaaatacgagagactggctactcggcgtagagggtacaaaaatcatcaggccgaagaggttcgcaccaaatcgcgacatgctggcctaccacaatgagtttgtattcctgaggtgattccatgcagcaagcagtgatatacgccaggtacagccctggaccaaatcagacagaacagtcg

SEQ ID NO: 16403 - DNA, 260 bp, Unknown
  Description of Unknown: LeftRegion for integrase B3404 sequence
ctgcaatttaattactgcgcagcaggggatgacgatccgacaacaatgcaaatcaagcgcgcctgcaaagaattcaaacccacagatacatttccagaatcattctacagctccatcgtcagcaaaatcatcttacacctcgatacacatatcgacatcaaactgcgaaacggacagacattataataaggaagagcaccatgagcaacgcaagaatcatcgaaattccagccactagacagatacgcagtgggaaaaac

SEQ ID NO: 16404 - DNA, 260 bp, Unknown
  Description of Unknown: LeftRegion for integrase B3405 sequence
gctcagcatcagaagtccctgcgcatgcaccggcttgtgacgctcatcctcttgggtattcttttgctgtgtgcccttgcgcttgtggccgacgtgctcagcccatcgattggctggttccgcgcataaatcaaaccgccccggcccagcgccggagcggtatccgtataaccttttgcccttgtggtgagaatctgcttatgaaatttacatctacctggaaaatctccgacccgctcgcgcaatacatcatttacctg

SEQ ID NO: 16405 - DNA, 260 bp, Unknown
  Description of Unknown: LeftRegion for integrase B3406 sequence
caggaacagatcatccgccagaagtccgccgaggcgcggcgcaaggatgttttgatctgcgttctggtgtgcatcgttctcgtcgcgcttctgtcgctccttgtcgacctttgtaatcccaatatcggctggcttcgcgcctccgcgcttgcatcttttgtgcccgtataaccgcctgccgcagtggtgagaattggcttatgaactttacatctacgtggaaaattactgacccgttcgcgcagtacatcatttacctg

SEQ ID NO: 16406 - DNA, 260 bp, Unknown; identical to SEQ ID NO: 13029
  Description of Unknown: LeftRegion for integrase B3407 sequence

SEQ ID NO: 16407 - DNA, 260 bp, Unknown; identical to SEQ ID NO: 16405
  Description of Unknown: LeftRegion for integrase B3408 sequence

SEQ ID NO: 16408 - DNA, 260 bp, Unknown
  Description of Unknown: LeftRegion for integrase B3409 sequence
ctttatgacacaaaaatttgtgaaaagtgtgagcattcggatgaattttataagcttaataaaaaaaagcctcataccattaggacaccgaaaaaaaggtttgaacctcactatgatgatttttcatttttacaaacttcaaatgatgatgatgatgattatgaaccgcactaatcccaaaagcaaaggagttgtttgacatgagcagctattgtatctaccttcgaaaatcccgcgccgaccttgaagcagaagcgcac

SEQ ID NO: 16409 - DNA, 260 bp, Unknown
  Description of Unknown: LeftRegion for integrase B3410 sequence
ttcaagtttgatgttaacacaaaacttgaaaaataggagcattttgttattttatatcgaaatgcgttatattggagtgattaaatgtacaacgagaaaacggaaaaatctttgttctgcggtacatttgccgctgaacagcagaaagtacaacataaaattttgacttccgaatatacctattttaatcggaggaaaaaatggaacagtattgcttatatctgcgaaaatcaagatcagatgtcgaagccgaaaatcac

SEQ ID NO: 16410 - DNA, 260 bp, Unknown
  Description of Unknown: LeftRegion for integrase B3411 sequence
gcccagcagcagaagtccctgcacatgcaccggcttgtgacgctcatcctcttgggtattcttttgctgtgtgcccttgcgcttgtggccgatgtgttcatcccatcgatcggctggatccgcacataaataaaaccgccccggcccaacgccggagcggtatccgtataaccttttgctcttgtggtgagaatctgcctatgaaatttacatctacctggaaaatctccgacccgctcgcgcagtacattatttacctg

SEQ ID NO: 16411 - DNA, 260 bp, Unknown
  Description of Unknown: LeftRegion for integrase B3412 sequence
gctcagcatcagaagtccctgcgcatgcaccggcttgtgacgctcatcctcttgggtattcttttgctgtgtgcccttgcgcttgtggccgacgtgctcagcccatcgatcggctggttccgcgcataaatcaaaccgccccggcccagcgccggagcggtatccgtataaccttttgcccttgtggcgagaatctgcttatgaaatttacatctacctggaaaatcgccgacccgctcgcgcagtacatcatttacctg

SEQ ID NO: 16412 - DNA, 260 bp, Unknown
  Description of Unknown: LeftRegion for integrase B3413 sequence
ttggctgataacaagaattatgagctgtggagattcagcaaagatatgattgatgttttcgagcacacatatgatgaattatttgaaaatgaaaaaacaaagcagtctataattgaattggcacagctggcaagagtagagcagaagtcaagcaatcgggaaagaatatataataatacagcgaaaggcggggatataatatgaacgctgtaatttatgcaagatattcaagcgaacggcaaacagaggcaagcattgag

SEQ ID NO: 16413 - DNA, 260 bp, Unknown
  Description of Unknown: LeftRegion for integrase B3414 sequence
tctccaactggacggcaaaggcacccgcgccggcagttgcaccgcagcctgcgccacaggttattgaacaaaagccgtctgcagctgatgaaatccgcaagtacaagggtctgcttgacgatggaatcatttcgcaggaagaatttgaggcaaagaagaagcagttgcttggcctgtaaaaccgaaaggagcgtgacggcatgaaaaagcgaatcaacactaattccgcggcccgtgccgtcatttatgctcgttattcc

SEQ ID NO: 16414 - DNA, 260 bp, Unknown; identical to SEQ ID NO: 16402
  Description of Unknown: LeftRegion for integrase B3415 sequence

SEQ ID NO: 16415 - DNA, 260 bp, Unknown
  Description of Unknown: LeftRegion for integrase B3416 sequence
gctcagcatcagaagtccctgcacatgcaccgacttgtgacgctcatcctcttgggcattctttcgctgtgtgccctcgcgcttgtggccgacgtactcagcccatcgatcggctggttccgcgcataaatcaaaccgccccggcccagcgccggagcggtatccgtataaccttttgcccttgtggtgagaatctgcttatgaaatttacatctacctggaaaatcgccgacccgctcgcgcagtacatcatttacctg

SEQ ID NO: 16416 - DNA, 260 bp, Unknown
  Description of Unknown: LeftRegion for integrase B3417 sequence
caggaacagatcatccgccataagtccgtcgaggcgcggcgcaaggatattctgatcggcgtgctggtgtgcatcgttctcatcgcgctcctggcgctccttgtcgacctttgtaatcccaatatcggctggcttcgcgcctccgcgcttgcatcctttgttcccgtataaccgccttccgcagtggtgagaatctgcttatgaaatttacatctacctggaaaatctccgacccgctcgcgcagtacatcatttacctg

SEQ ID NO: 16417 - DNA, 260 bp, Unknown
  Description of Unknown: LeftRegion for integrase B3418 sequence
gcccagcagcagaagtccctgcgtatgcaccggcttgtaacgcttatcctcttgggtattcttctgctgtgtgcccttgcgcttgtggccgatgtgttcatcccatcgatcggctggatccgcacataaataaaaccgccccggcccagcgccggagcggtatccgtataaccttttgctcttgtggtgagaatctgcctatgaaatttacatctacctggaaaatctccgacccgctcgcgcagtacattatttacctg

SEQ ID NO: 16418 - DNA, 260 bp, Unknown
  Description of Unknown: LeftRegion for integrase B3419 sequence
caggaacagatcatccgccataagtccgtcgaggcgcggcgcaaggatattctgatcggcgtgctggtgtgcatcgttctcatcgcgctcctggcgctccttgtcgacctttgtaatcccaatatcggctggcttcgcgcctccgcgcttgcatcctttgttcccgtataaccgccttccacagtggtgagaatttgcttatgaactttacatctacctggaaaatcgctgacccgctcgcgcagtacatcatttacctg

SEQ ID NO: 16419 - DNA, 260 bp, Unknown
  Description of Unknown: LeftRegion for integrase B3420 sequence
tcagcagcagaagtccctgcgcatgcaccggcttgtgacgctcatcctcttgggtattcttctgctgtgtgtccttgcgcttttggtcgacgtgctcatcccatcaatcggctggatccgtacataaattaaaccgccccggcctgataagccggagcggttgctgtataacttttttgcccaacggggagaatttgcctatgaaatttacatctgcatggagaatcgtggacccgctctcgcagtatatcatttacctg

SEQ ID NO: 16420 - DNA, 260 bp, Unknown
  Description of Unknown: LeftRegion for integrase B3421 sequence
tttcgatcaagggcttatgacggtcttgcctgatcttacaattcaggtctcgaactacgtgaaggacggctacgacgaccaaaatacgagagactggctactcggcgtagagggtacaaaaatcatcaggccgaagaggttcgcaccaaatcgcgacatgctggcctaccacaatgagtttgtattcctgaggtgattccatgcagcgagcagtgatatatgccaggtacagccctggaccaaatcagacagagcagtcg

SEQ ID NO: 16421 - DNA, 260 bp, Unknown; identical to SEQ ID NO: 13967
  Description of Unknown: LeftRegion for integrase B3422 sequence

SEQ ID NO: 16422 - DNA, 260 bp, Unknown
  Description of Unknown: LeftRegion for integrase B3423 sequence
gtagcagtacatattttctcgattctaaactcctttgcttttttatccctgttgtattctattggggggaagaaatctctaggtttgataaatatgaaaaattgcgttccaatttatggtggggtgttgttatagcaatttttgtcggaattatcagcagttttctctattcccttattaattaaaaatgaggtaatcatatgattcccttttctgtatcatcttccgctctacccgatggatgtagtgggtttctccgc

SEQ ID NO: 16423 - DNA, 260 bp, Unknown
  Description of Unknown: LeftRegion for integrase B3424 sequence
cagtacgacaaactgaacgcaaacgagggatgctccattctggtggctgtcgttctcggcgttatcctcgcagtgatttggtttttcggtcattaaatgcaaattttgatgatttttgtatctgatttggctttttaagcacaaaatcaaagccttaattgcaaatttgaggctattttcgttaaatagggggtgacagtttgagttcagttgataaaatcgccgttgtttacgcgcggtattcgtcccacggtcagacc

SEQ ID NO: 16424 - DNA, 260 bp, Unknown
  Description of Unknown: LeftRegion for integrase B3425 sequence
tgcccagcagcagaagtccctgcgcatgcaccgacttgtgacgctcatcctcttgggtattcttttgctgtgtgcccttgcgcttttggtcgacgttcttatcccatcaatcggctggatccgcacatgaataaaaccgccccggccggcgccggagcggtatccgtataaccttttgcccttgtggtgagaatctgcttatgaaatttacatctacctggaaaatcgccgacccgctcgcgcagtacatcatttacctg

SEQ ID NO: 16425 - DNA, 260 bp, Unknown; identical to SEQ ID NO: 15405
  Description of Unknown: LeftRegion for integrase B3426 sequence

SEQ ID NO: 16426 - DNA, 260 bp, Unknown
  Description of Unknown: LeftRegion for integrase B3427 sequence
cgatgcgccaacaccagaccggcccgcatatccgaggatatacacatgtgacctaggaaatcacgcaaatattgtatcatcctcggacagctatcgcaagcggaactcctgttccccgctggctgttatttttatacccattttccagcagtgttgcgacgtcgcaacggctgcatacactatacgaggaggatgatacgatgtacgaagacctgtcttttccttacggatccggcacttacgccatctacctccggaag

SEQ ID NO: 16427 - DNA, 260 bp, Unknown
  Description of Unknown: LeftRegion for integrase B3428 sequence
ttctaatattattattttatattcaaagttttttggtgtatccacagactatattttagagttaagtgaattcaaaaaccatacatcaaaccagataagtacaaacaaattcattaataatttacttgacttaattggttcataccttaaagaaattgaagaagaatcatagaatacactaaaaaaaggagaaaattataatgagcagatattgcatttacctgcgaaaatcccgtgccgaccttgaagcagaagcgcac

SEQ ID NO: 16428 - DNA, 260 bp, Unknown
  Description of Unknown: LeftRegion for integrase B3429 sequence
tttcgatcaagggcttatgacggtcttgcctgatcttacaattcaggtctcggattacgtgaaggacggctacgacgaccaaaatacgagagactggctactcggcgtagagggtacaaaaatcatcaggccgaagagattcgcaccaaatcgcgacatgctggcctaccacaatgagtttgtattcctgaggtgattccatgcagcgagcagtgatatacgccaggtacagccctggaccaaatcagacagagcagtca

SEQ ID NO: 16429 - DNA, 260 bp, Unknown; identical to SEQ ID NO: 13711
  Description of Unknown: LeftRegion for integrase B3430 sequence

SEQ ID NO: 16430 - DNA, 260 bp, Unknown
  Description of Unknown: LeftRegion for integrase B3431 sequence
aactcgcccggcgtgaaggcgtcgatgtcgttctcgacccgctcgaacaatctgtaaaggacgatctatttgagcacatcgacggtctgcgctcctgtggaaaccctttcctgtccaagtgaccaaataaacaccgccccggcccgataagccggagcggtatatgtataacctttttatgcaagggtgagaatcttggtatgaaatgtacatcaacatggcggatttcagatccgctcgcgcagtatattgtctatctg

SEQ ID NO: 16431 - DNA, 260 bp, Unknown
  Description of Unknown: LeftRegion for integrase B3432 sequence
aactcttgttgttaatattatgcataaaaaatagcgcccctgctctggaaaagtaaggcgctatttttagtaattacttctgccggcggtcaggtgtacactggccaacggttctcttgttaagtacattatatcgctatatacggtttatgtcaaacagattcgtttgacattttattatctaatcgaggtgaggcaatatgccatattgtttatatttaagaaaatcaagagctgatattgatgccgaagccaatgga

SEQ ID NO: 16432 - DNA, 260 bp, Unknown
  Description of Unknown: LeftRegion for integrase B3433 sequence
tttcgatcaagggcttatgacggtcttgcctgatcttacaattcaggtctcgaattacgtgaaggacggctacgatgaccaaaatacgagagactggctactcggcgtagagggtacaaaaatcatcaggccgaagaggttcgcaccaaatcgcgacatgctggcctaccacaatgagtttgtattcctgaggtgattccatgcagcaagcagtgatatacgccaggtacagccctggaccaaatcagacagaacagtcg

SEQ ID NO: 16433 - DNA, 260 bp, Unknown
  Description of Unknown: LeftRegion for integrase B3434 sequence
gcccagcagcagaagtccctgcgcatgcaccggcttgtgacgctcatcctcttgggcattctttcgctgtgtgccctcgcgcttgtggccgacgtactcagcccatcgatcggctggttccgcgcataaatcaaaccgccccggcccagcgccggagcggtatccgtataaccttttgcccttgtggtgagaatttgcttatgaactttacatctacgtggaaaatctccgacccgctcgcgcagtacatcatttacctt

SEQ ID NO: 16434 - DNA, 260 bp, Unknown; identical to SEQ ID NO: 16380
  Description of Unknown: LeftRegion for integrase B3435 sequence

SEQ ID NO: 16435 - DNA, 260 bp, Unknown
  Description of Unknown: LeftRegion for integrase B3436 sequence
gtttgaccagggccttatgacagtgctgccagacctcacgattcgcatctcggacgtgataaaagacggcttcgacgaccaaaatacaagagagtggctgcttggcctggaaggtactaaaattatccggccaaagcgattcgcgccgaaccgcgacatgctggcctaccataacgaatttgtctttttaaggtgatccaatgaaacgagcagtaatatacgccagatacagcccagggccaaaccagacagagcagtct

SEQ ID NO: 16436 - DNA, 260 bp, Unknown
  Description of Unknown: LeftRegion for integrase B3437 sequence
aactcgcccggcgtgaaggcgtcgatgtcgttctcgacccgctcgaacagtctgtaaaggacgatctatttgagcacatcgacggtctgcgctcctgtggaaaccctttcctgtccaagtgaccaaataaacaccgccccggcccgataagccggagcggtatatgtataacctttttatgcaagggtgagaatcttggtatgaaatttacatcaacatggcggatttcagatccgctcgcgcagtatattgtctatctg

SEQ ID NO: 16437 - DNA, 260 bp, Unknown
  Description of Unknown: LeftRegion for integrase B3438 sequence
ctgctttaatatttcactcggtattggttcgcttgataaagaaagacctaattacgaagtggcaattagcagtatatttcaggcttatacttcaattaggacgcttgtaaaactctacgattctttaaaagtgacctggagtttttctacatcaatcgttcaactttaatctgttaattatataaggagctaggtgaaatatgagtagatattgcatttacctacgaaaatcccgcgccgacctcgaagcagaagcgcac

SEQ ID NO: 16438 - DNA, 260 bp, Unknown
  Description of Unknown: LeftRegion for integrase B3439 sequence
gctcagcagcagaagtccctgcgcatgcaccggcttgtgacgctcatcctcttgggtattcttttgctgtgtgcccttgcgcttttggtcgacgtcctcagtccatcaatcggctggatccacacataaataaaaccgccccggctcagcgccggagcggtatccgtataaccttttgcccttgtggtgagaatctgcttatgaactttacatctacctggaaaatcgccgacccgctcgcgcaatacatcatttacctg

SEQ ID NO: 16439 - DNA, 260 bp, Unknown
  Description of Unknown: LeftRegion for integrase B3440 sequence
tgctcagcagcagaagtccctgcgcatgcaccgacttgtgacgctcatcctcttgggtattcttttgctgtgtgcccttgcgcttttggtcgacgtgctcatcccatcgatcggctggatccgcacatgaataaaaccgccccggccggcgccggagcggtatccgtataaccttttgcccttgtggcgagaatctgcttatgaaatttacatctacctggaaaatcgccgacccgctcgcgcagtacatcatttacctg

SEQ ID NO: 16440 - DNA, 260 bp, Unknown
  Description of Unknown: LeftRegion for integrase B3441 sequence
agccctgatattgaacggtgtttcgttcaatatcagggcttgtcacttattccaatacaaaaagcgtgtgctgagtatgcgccaacagaggaatttccggaaaccttttataaagaagtcgtcagcaaggtaatcctgtaccgtgacactcatattgaattcaaactgcaaaacggacaaattgtgtaaggggaaaagccatgggtaacatgagaatcattgagattcccgcttctatgagggaaagcgccggacagaaa

SEQ ID NO: 16441 - DNA, 260 bp, Unknown; identical to SEQ ID NO: 15405
  Description of Unknown: LeftRegion for integrase B3442 sequence

SEQ ID NO: 16442 - DNA, 260 bp, Unknown
  Description of Unknown: LeftRegion for integrase B3443 sequence
tgctcagcagcagaagtccctgcgcatgcaccgacttgtgacgctcatcctcttgggtattcttttgctgtgtgcccttgcgcttttggtcgacgtgctcatcccatcgatcggctggatccgcacatgaataaaaccgccccggccggcgccggagcggtatccgtataaccttttgcccttgtggtgagaatttgcttatgaactttacatctacgtggaaaatctccgacccgctcgcgcagtacatcatttacctg

SEQ ID NO: 16443 - DNA, 260 bp, Unknown
  Description of Unknown: LeftRegion for integrase B3444 sequence
tatttcagcgtcgtaaccgggaagaacaagtttctctgtaaagtctcctgtgatttccgtgcgctcgaacgcgcctgcaaagcctatgatccgtcccgcaaatccctgagccgctgacccttccagacaaacaccgccccggcctgataagccggagcggtatatgtataaccttttcgtgcaaaggtgaaaatcttgttatgaaatttacatcaacatggcggatctcggatccgatcgcgcagtatatcgtctatctg

SEQ ID NO: 16444 - DNA, 260 bp, Unknown; identical to SEQ ID NO: 16382
  Description of Unknown: LeftRegion for integrase B3445 sequence

SEQ ID NO: 16445 - DNA, 260 bp, Unknown
  Description of Unknown: LeftRegion for integrase B3446 sequence
agagattcttggtgttgatgaacttacaagcgaaataatcgatgagagaattgaaaaagtaattgttggagatgataagttattgactttttatctgaaagatggaaacaaaattgatgcccactggatgcagaaaagcagaagtgaatcatggactgaagaaatgaaagagaacgcaagaagaaaggcggttgaaatacatggcaaaagtaacagtaatcccatcaacgattaatccaattactaaattacctaataat

SEQ ID NO: 16446 - DNA, 260 bp, Unknown
  Description of Unknown: LeftRegion for integrase B3447 sequence
tctccaactggacggcaaaggcacccgcgccggcagttgcaccgcagcctgcgccacaggttattgaacaaaagccgtctgcagctgatgaaatccgcaagtacaagggcctgcttgacgatggaatcatttcgcaggaagaatttgaggcaaagaagaagcagttgcttggcctgtaaaaccgaaaggagcgtgacggcatgaaaaagcgaatcaacactaattccgcagcccgtgctgtcatctacgctcgttattcc

SEQ ID NO: 16447 - DNA, 260 bp, Unknown
  Description of Unknown: LeftRegion for integrase B3448 sequence
ctggatcattgacatggttatgatctgttgtaataaattcaccgacagcaccggcgcggtggttggcctgaaggttgccgagtataccagacagccggatcctgatcttgcagaggcttctctggaggagcagcgggaggcagcggccgagactgccagagcttacggctataccgtaatagagtcaggcgctcaggataatgccgacaagtaaaaacacggctcgaaaatatgccgcaggaggtagctcggataattcc

SEQ ID NO: 16448 - DNA, 260 bp, Unknown
  Description of Unknown: LeftRegion for integrase B3449 sequence
tttcgatcaagggcttatgacggtcttgcctgatcttacaattcaggtctcggactacgtgaaggacagctacgacgaccaaaatacgagagactggctactcggcgtagagggtacaaaaatcatcaggccgaagaggttcgcaccaaatcgcgacatgctggcctaccacaatgagtttgtattcctgaggtgattccatgcagcgagcagtgatatacgccagatacagccctggaccaaatcaaacagagcagtca

SEQ ID NO: 16449 - DNA, 260 bp, Unknown; identical to SEQ ID NO: 16438
  Description of Unknown: LeftRegion for integrase B3450 sequence

SEQ ID NO: 16450 - DNA, 260 bp, Unknown
  Description of Unknown: LeftRegion for integrase B3451 sequence
gctgatgcagaccgtcgccctggttgggcatacgggcgaaataacggcgattacagcccacaacgataatcttctggagttcaccctcaaggacggaaccaacgccgtgaagcggtggcaggaccgctcccgtgccgagagttggacagcggaaatgcgcaaatctgccggagaaaaaacacgggaaaggaataaacgccatgccgaaagctaaaaatgtcaccgtcatccccgccacgctgaatatccataccaaaaca

SEQ ID NO: 16451 - DNA, 260 bp, Unknown
  Description of Unknown: LeftRegion for integrase B3452 sequence
tatgacaatattaaagtattagatttcatagaagtatttaataataacagactgctgttccatctaaaaaataaagaaataaaagaatttatttgggaagaacgttcaagaagtcaatcttggactgatgaaatgagagaagaagcaaagaaaagaacaataataaataacaaaaataaaaagagaggagcaaatggaaaatggcaaaagtcagagtaatacctagcacactaaatccacttactcaatctccaattagt

SEQ ID NO: 16452 - DNA, 260 bp, Unknown
  Description of Unknown: LeftRegion for integrase B3453 sequence
cagtataataaactgaacacgaatgaggggtgcgccattttggtggcggtcatcctcggcgttattctcgcggcaatttggttttgcggccattaaacgcaaattttgatggaatttgtatctgattggctttttaagcacaaaatcaaagccttacttacaaatttgaggctactttcgttaaataagggggtgatagtttgagttcagtggataaaatcgccgtagtctatgcacggtattcatcccacgggcagacc

SEQ ID NO: 16453 - DNA, 260 bp, Unknown
  Description of Unknown: LeftRegion for integrase B3454 sequence
caggaacagatcatccgccataagtccgtcgaggcgcggcgcaaggatattctgatcggcgtgctggtgtgcatcgttctcgtcgcgcttctgtcgctccttgtcgacctttgtaatcccaatatcggctggcttcgcgcctccgcgcttgcatcctttgttcccgtataactgccttccgcagtggtgagaatttgcttatgaactttacatctacctggaaaatcgccgacccgctcgcgcagtacatcatttacctg

SEQ ID NO: 16454 - DNA, 260 bp, Unknown
  Description of Unknown: LeftRegion for integrase B3455 sequence
caggaacagatcatccgccagaagtccgtcgaggcgcggcgcaaggatgttttgatcggcgtgcttatgtgcatcgttctcgtcgcgcttctggcgctcctcgtcgacctttgtaatcccaatatcggctgggtccgcgcctccgcgcttgcatcctttgtgcccgtataaccttttgcccttgtggtgagaatctgcttatgaaatttacatctacatggaaaatcgccgatccgctcgcgcagtacatcatttacctg

SEQ ID NO: 16455 - DNA, 260 bp, Unknown; identical to SEQ ID NO: 13158
  Description of Unknown: LeftRegion for integrase B3456 sequence

SEQ ID NO: 16456 - DNA, 260 bp, Unknown
  Description of Unknown: LeftRegion for integrase B3457 sequence
gagctttatgacacaaaaatttgtgaaaagtgtgagcattcggatgaattttataagcttaataaaaaaaagcctcataccattaggacaccgaaaaaacggtttgaacctcactatgatgatttttcatttttacaaacttcaaatgatgatgatgattatgaaccgcactaatcccaaaagcaaaggagttgtttgatatgagcagatattgtatctacctacgaaagtcccgcgccgacctcgaagccgaggcgcac

SEQ ID NO: 16457 - DNA, 260 bp, Unknown
  Description of Unknown: LeftRegion for integrase B3458 sequence
gagttggaatacgaattctgctctgcaggagatgccgatccggcaactatgcaaatacgaaaggcttgtgccgagtataagccgacagatggcttcccacataccttttataaggaggtcgtcagcaaggtaatcctgtaccgtgacactcatattgaattcaaactgcagaacggacaaattgtgtaaggggaaaagccatgagcaacatgagaatcattgagattcccgcttctatgagggaaagcgccggacggaaa

SEQ ID NO: 16458 - DNA, 260 bp, Unknown
  Description of Unknown: LeftRegion for integrase B3459 sequence
accgagttgccgatgggccaaaaagatactgagtgaaaatgaagtctggtttgattcttcggacgacgccatagccgccggatacggcgcgtgcgggacttgcaatcccaaataacctaccaataaataaacaccgccccggcctgataagccggagcggtatatgtataacctttttatgcaagggtgagaatcttggtatgaaatatacatcaacatggcggatctcggatccgctcgcgcagtatattgtctatctg

SEQ ID NO: 16459 - DNA, 260 bp, Unknown
  Description of Unknown: LeftRegion for integrase B3460 sequence
tatcttctcaaaacaatggtattatgctgaattgcaaaaggaggcggaaagtactatggggcaagaagatttgcaactacttataaaaggaatcgtgttctctctgcgacaacaaaaattgctgacgaaggcagagtccgaatttgtattgaaaattattgaacgaaagtacccacggccaagaattacgagggaagacaatgagtaatgaaaaagactattcggtattgcctgaggtaaccataatccaagaatcggcg

SEQ ID NO: 16460 - DNA, 260 bp, Unknown
  Description of Unknown: LeftRegion for integrase B3461 sequence
ctatagagtgttctgcgcaatattacataaacggcatttttcaatataatttctctgaacttcctaatttttttatcaccaatagtggagatttgcaaattgagtttagttgcaaagaaataccttttgatttacgtgactcttctgaaattactataggtcattccattgaagtttaatataagtgaggagcaataaatatgagcagatattgcatttacctgcgaaaatcccgcgccgaccttgaagcagaagcgcac

SEQ ID NO: 16461 - DNA, 260 bp, Unknown
  Description of Unknown: LeftRegion for integrase B3462 sequence
ttctaatattattattttatattcaaagttttttggtgtatccacagactatattttagagttaagtgaattcaaaaaccatacatcaaaccagataagtacaaacaaattcattaataatttacttgacttaattggttcataccttaaagaaattgaagaagaatcatagaatacactaaaaaaaggagaaaattataatgagcagatattgcatttacctgcgaaaatcccgtgccgacctcgaagcagaagcgcac

SEQ ID NO: 16462 - DNA, 260 bp, Unknown; identical to SEQ ID NO: 15411
  Description of Unknown: LeftRegion for integrase B3463 sequence

SEQ ID NO: 16463 - DNA, 260 bp, Unknown
  Description of Unknown: LeftRegion for integrase B3464 sequence
ccgatgctaccaacaccagaccggccccgcatatccgaggatatacacatgtgacctaggaaatcacgcaaatattgtatcatcctcggacagctatcgcaagcggaactcctgttccccgctggctgttatttttatacccattttcgactgttgcgacgtcgcaacggctgcatacactatatgaggaggatgatacgatgtacgaagacctgtcttttccttacggatccggcacttatgccatctacctccggaag

SEQ ID NO: 16464 - DNA, 260 bp, Unknown
  Description of Unknown: LeftRegion for integrase B3465 sequence
ggtgatgctggtattctcacatatgaatcgaccgatagtgatataattacatctagtggtgaaattatcggaattagagttccctaatatctttactcatgagtttatttgcaaagaaataccttttgatttgcgtgactcttgtgaaattactataggttcattccattgaagtttaatatgagtgaggagcaataaatatgagcagctattgtatctaccttcgaaagtcccgcgccgacctcgaagcagaagcgcac

SEQ ID NO: 16465 - DNA, 260 bp, Unknown; identical to SEQ ID NO: 16418
  Description of Unknown: LeftRegion for integrase B3466 sequence

SEQ ID NO: 16466 - DNA, 260 bp, Unknown
  Description of Unknown: LeftRegion for integrase B3467 sequence
gagcggcggcctgtaccactatttcagcacgggtgagccggttgataatatcaatgtccgctttatagatcagtccggcaatcttttgcaggaagcaaattcaagcgatatgcaataatccgctcaataaacaccgccccggcctaattatccggagcggtatctgtataaccttttcatgcaagggtgagaatctggttatgaaatttacatcaacatggcggatttcagatccgctcgcgcagtatattgtctatctg

SEQ ID NO: 16467 - DNA, 260 bp, Unknown
  Description of Unknown: LeftRegion for integrase B3468 sequence
actcttgttatcaatttaatgcataaaaaatagcgcccctgctctggtaaagtaaggcgctattttttagttactactctatccggcggtcaggtgtgcactggccaacggttctcttgttaagtacattatatcgctatatacggtttatgtcaaacagattcgtttgacattttattatctaatcgaggtgaggcaatatgccatattgtttatatttaagaaaatcaagagctgatattgatgccgaagccaatgga

SEQ ID NO: 16468 - DNA, 260 bp, Unknown
  Description of Unknown: LeftRegion for integrase B3469 sequence
tgcccagcagcagaagtccctgcgcatgcaccggcttgtcacgctcatcctcttgggtattcttttgctgtgtgcccttgcgcttgtggccgacgtactcatcccatcgatcggctggatccgcacataaataaaaccgccccggccggcgccggagcggtatccgtataaccttttgcccttgtggtgagaatttgcctatgaaatttacatctacctggaaaatctccgacccgctcgcgcagtacatcatttacctg

SEQ ID NO: 16469 - DNA, 260 bp, Unknown
  Description of Unknown: LeftRegion for integrase B3470 sequence
atatcgccaactggtcggccgctcaaggtgcagctaccgcaccgcagcccgttcagcaggtagtggagcagaaaccgtctcccgccgatgaaatccgcaaatacaagggcctgctggatgacggtatcatcacgcaggaagaatttgaagctaagaaaaagcaactgctgggcctgtaaatttgaaaggagcgtgacggcatgagaaaaaaatccaacctcaatgcggctactcgtgccgtcatctatgccaggtattcc

SEQ ID NO: 16470 - DNA, 260 bp, Unknown
  Description of Unknown: LeftRegion for integrase B3471 sequence
tgaatacacagaggaagaaatgcagaaggagtatagctatatgcttgcccagcagatgacaaaaaaactgtttgaaaagggcatgatttcagacgtggaattaaataaaattatggctaaaaataaggaaacattttctccgaaattagctgcgataatgccctgaaaccgttgataatactggggcttagaggtaatatgtgaccaagcggaagtggggtgagttgatgaaaacgataacaaaaatagaagaaattgaa

SEQ ID NO: 16471 - DNA, 260 bp, Unknown
  Description of Unknown: LeftRegion for integrase B3472 sequence
ccagcagcagaagtccctgcgcatgcaccggcttgtgacgctcatcctcttgggtattcttttgctgtgtgcccttgcgcttgtggccgacgtgctcatcccatcgatcggctggattcgcgcatgaaaattaccgccccggcccgatcagccggagcggtatatgtataacctttttatgcaagggtgagaatcttggtatgaaatttacatcaacatggcggatttcagatccgctcgcgcagtatattgtctatctg

SEQ ID NO: 16472 - DNA, 260 bp, Unknown
  Description of Unknown: LeftRegion for integrase B3473 sequence
tggggtcgataagttcaacgaggcttttttccacgagcgcgtttcaaagatggtgatttcagtcgggaactgcatcacgtaccacatgaaggacggaacagaaattcagcgggtctggaaagaccgttcacggcgggaaagctggaccccggaaatgaaagaaaaggcaaggcaggcaacgacagaaaggtggagatcaaatggctaacgcaagaaaggtacaggtcatagaggcaacaatcaatcctaagacgcacctg

SEQ ID NO: 16473 - DNA, 260 bp, Unknown
  Description of Unknown: LeftRegion for integrase B3474 sequence
agacggttctgaaatcgttaaacggtggcaagaccgctcacgggcagaatcgtggacgccggagatgaaggaagccgctcgacagaaggctcttgcacggagcagggcttgacggctctctcattataccgccgttttcccaaatcggatcattacattttcagcaaaacctattatgattttgcacaggaggtgcatacatggcaacagcaaaaaatgtgacagtaattcctgccacattcaatccccagacccgccga

SEQ ID NO: 16474 - DNA, 260 bp, Unknown
  Description of Unknown: LeftRegion for integrase B3475 sequence
gctcagcagcagaagtccctgcgcatgcaccggcttgtaacgctcatcctcttgggtattcttttgctgtgtgcccttgcgcttttggtcgacgtcctcagtccatcaatcggctggatgcgcacataaataaaaccgccccggctcagcgccggagcggtatccgtataaccttttgcccttgtggtgagaatctgcttatgaactttacatctacctggaaaatcgccgacccgctcgcgcagtacatcatttacctg

SEQ ID NO: 16475 - DNA, 260 bp, Unknown
  Description of Unknown: LeftRegion for integrase B3476 sequence
tctccaactggacggcaaaggcacccgcgccggcagttgcaccgcagcctgcgccacaggttattgaacaaaagccgtctgcagccgatgaaatccgcaagtacaagggcctgcttgacgatggaatcatttcgcaggaagaatttgaggcaaagaagaagcagttgcttggcctgtaaaaccgaaaggagcgtgacggcatgaaaaagcgaatcaacactaattccgcagcccgtgccgtcatctacgctcgttattcc

SEQ ID NO: 16476 - DNA, 260 bp, Unknown; identical to SEQ ID NO: 13717
  Description of Unknown: LeftRegion for integrase B3477 sequence

SEQ ID NO: 16477 - DNA, 260 bp, Unknown
  Description of Unknown: LeftRegion for integrase B3478 sequence
tttcgatcaagggcttatgacggtcttgcctgatcttacaattcaggtctcggactacgtgaaggacggctacgacgaccaaaatacgagagactggctactcggcgtagagggtacaaaaatcatcaggccgaagaggttcgcaccaaatcgcgacatgctggcctaccacaatgagtttgtattcctgaggtgattccatgcagcgagcagtgatatacgccaggtacagccctggaccaaatcagacagagcagtca

SEQ ID NO: 16478 - DNA, 260 bp, Unknown
  Description of Unknown: LeftRegion for integrase B3479 sequence
acattttgtccgctgcggcatatactatagacacagcgaaagctgcgaatcaagcctttggaattgaccccccacgatcaggggagcgccagatccaagggcttttgatcgttagtgccccaacagtttaacaccgccccggcccgatacgccggagcggtatatgtataaccttttcatgcaagggtgagaatctggttatgaaatttacatcaacatggaggatctcggatccgatcgcgcagtatatcatctatctg

SEQ ID NO: 16479 - DNA, 260 bp, Unknown
  Description of Unknown: LeftRegion for integrase B3480 sequence
tttcgatcaagggcttatgacggtcttgcctgatcttacaattcaggtttcggactacgtgaaggacggctatgacgaccaaaatacgagagactggctactcggcgtagagggtacaaaaatcatcaggccgaagaggttcgcaccaaatcgcgacatgctggcctaccacaatgagtttgtattcctgaggtgattccatgcagcgagcagtgatatacgccaggtacagccctggaccaaatcagacagagcagtca

SEQ ID NO: 16480 - DNA, 260 bp, Unknown
  Description of Unknown: LeftRegion for integrase B3481 sequence
gcccagcagcagaagtccctgcgcatgcaccggcttgtgacgctcatcctcttgggcattctttcgctgtgtgccctcgcgcttgtggccgacgtactcagcccatcgatcggctggttccgcgcataaatcaaaccgccccggcccagcgccggagcggtatccgtataaccttttgcccttgtggtgagaatctgcttatgaaatttacatctacctggaaaatcgctgacccgctctcgcagtacatcatttacctg

SEQ ID NO: 16481 - DNA, 260 bp, Unknown
  Description of Unknown: LeftRegion for integrase B3482 sequence
ccagattattctgatatcaggcgacagtgacttcgtaccggcggctaagttggctcgaagagagggaatcgattttattcttgatcccatgcgttctcccattaaaccggacttatatgaacacgttgacggtatcaggtctaaagtgccaaacccaattaaaagtaaagaaactgaaaagtccgatttggagctccaacatgagtagatattgcatttacctacgaaaatcccgcgccgaccttgaagccgaggcgcac

SEQ ID NO: 16482 - DNA, 260 bp, Unknown
  Description of Unknown: LeftRegion for integrase B3483 sequence
tgcccagcagcagaagtccctgcgcatgcaccggcttgtcacgctcatcctcttgggtattcttttgctgtgtgcccttgcgcttgtggccgacgtactcaccccatcgatcggctggatccgcacataaataaaaccgccccggccggcgccggagcggtatccgtataaccttttgcccttgtggtgagaatttgcctatgaaatttacatctacctggaaaatctccgacccgctcgcgcagtacatcatttacctg

SEQ ID NO: 16483 - DNA, 260 bp, Unknown
  Description of Unknown: LeftRegion for integrase B3484 sequence
ttattagctattatgtttggtttgatgtatttttatgaaagagttttaatcccttctgtctgttttatagctgccgttctgtttattttcttttctattgcttctgaggcatattttatgcttattatcccggtattttgtgttatatatggagtgatttatataaaaagcaatccaataagaaaaaaggataaaagaaaatgaaaaaagctgtaatttatgcaaggtatagttctgacagtcaaaccgagcaatctatc

SEQ ID NO: 16484 - DNA, 260 bp, Unknown; identical to SEQ ID NO: 15097
  Description of Unknown: LeftRegion for integrase B3485 sequence

SEQ ID NO: 16485 - DNA, 260 bp, Unknown
  Description of Unknown: LeftRegion for integrase B3486 sequence
ctgctgacagtggatgaggcggagaagtcccgcattgaactggagcgcaagctccggcccactctgctgttcgcctgaacaggctctatgcgagaatagctgattgcccagtttttccacttctttttcgttggtgttggtaatggctattgcggaaggactgtggtagtgtgtgttgctgaaaggaggtcaaaaaagatatgacggaaacaaacataagtacagcaagagttccgcaggtcacagtaatcgaccccaga

SEQ ID NO: 16486 - DNA, 260 bp, Unknown
  Description of Unknown: LeftRegion for integrase B3487 sequence
cagtacaacagactgaacgcgaacgagggatgttccattctggtggctgtcgttctcggcgttatcctcgcggtgatttggtttttcggccattaaatgcaaattttgatgatttttgtatctgatttggctttttaagcacaaaatcaaagccttaattgcaaatttgaggctattttcgttaaataggaggtgacattttgagttcagttgataaaatcgctgtcgtttatgcgcggtattcatcccacggccagact

SEQ ID NO: 16487 - DNA, 260 bp, Unknown
  Description of Unknown: LeftRegion for integrase B3488 sequence
caggaacagatcatccgccagaagtccgtcgaggcgcggcgcaaggatgttttgatcggcgtgcttgtgtgcatcgttctcgtctcgcttctggcgctcctcgtcgacctttgtaatcccaacatcggctgggtccgcgcctccgcgcttgcatcctttgttcccgtataaccgccttccgcagtggtgagaatttgcttatgaactttacatctacgtggaaaatcgcagacccgctcgcgcagtacatcatttacctg

SEQ ID NO: 16488 - DNA, 260 bp, Unknown
  Description of Unknown: LeftRegion for integrase B3489 sequence
caggaacagatcatccgccagaagtccgtcgaggcgcgtcgcaaggatgttttgatcggcgtgcttgtgtgcatcgttctcgtctcgcttctggcgctcctcgtcgacctttgtaatcccaatatcggctggcttcgtgcctccgcgcttgcatcctttgttcccgtataaccgccttccgcagtggtgagaatctgcttatgaaatttacatctacctggaaaatcgccgacccgctcgcgcagtacatcatttacctg

SEQ ID NO: 16489 - DNA, 260 bp, Unknown
  Description of Unknown: LeftRegion for integrase B3490 sequence
gctcatcagcagaagtccctgcgcatgcaccggcttgtgacgctcatcctcttgggtattcttttgctgtgcgcccttgcgcttgtggccgacgtgctcatcccatcgatcggctgggtccgcacataagtaaaaccgccccggcccagcgccggagcggtatccgtataaccttttgcccttgtggtgagaatctgcctatgaaatttacatctacctggaaaatcgccgacccgctcgcgcaatacatcatttacctg

SEQ ID NO: 16490 - DNA, 260 bp, Unknown
  Description of Unknown: LeftRegion for integrase B3491 sequence
tgcccagcagcagaagtccctgcgtatgcaccggcttgtgacgctcatcctcttgggtattcttttgctgtgcgcccttgcgcttgtggccgacgcgctcatcccatcgatcggctggatccgcacatgaataaaaccgccccggccggtgtcgaagcggtatccgtataaccttttgcccttgtggtgagaatctgcctatgaaatttacatctacttggaaaatctccgacccgctcgcgcagtacatcatatatctg

SEQ ID NO: 16491 - DNA, 260 bp, Unknown
  Description of Unknown: LeftRegion for integrase B3492 sequence
atatcgccaactggtcggccgctcaaggtgcagctaccgcaccgcagcccgttcagcaggtagtggagcagaaaccgtctcccgccgatgaaatccgcaaatacaagggcctgctggatgacggtattatcacgcaggaagaatttgaagctaagaaaaagcaactgctgggcctgtaaatttgaaaggagcgtgacggcatgagaaaaaagtccaacctcaatgcggctactcgtgccgtcatctatgccaggtattcc

SEQ ID NO: 16492 - DNA, 260 bp, Unknown
  Description of Unknown: LeftRegion for integrase B3493 sequence
caggaacagatcatccgccagaagtccgtcgaggcgcggcgcaaggatgttttgatcggcgtgcttgtgtgcatcgttctcgtctcgcttctggcgctccttgtcgacctttgtaatcccaatatcggctggcttcgcgcctccgcgcttgcatcctttgttcccgtataaccgccttccgcagtggtgagaatttgcttatgaactttacatctacctggaaaatcgccgacccgctcgcgcagtacatcatttacctg

SEQ ID NO: 16493 - DNA, 260 bp, Unknown; identical to SEQ ID NO: 16395
  Description of Unknown: LeftRegion for integrase B3494 sequence

SEQ ID NO: 16494 - DNA, 260 bp, Unknown
  Description of Unknown: LeftRegion for integrase B3495 sequence
gagcggtggactgtaccactatttcagcacgggtgagccggtcgataatatcaatgtccgctttgttgatcagtccggcaacctcttgcaggaggcaaattcaagcgatatgcaataatccgctcaataaacaccgccccggcctaattatccggagcggtatctgtataaccttttcatgcaagggtgagaatctggttatgaaatttacatcaacatggcggatctcggatccgctcgcgcagtatatcgtctatctg

SEQ ID NO: 16495 - DNA, 260 bp, Unknown
  Description of Unknown: LeftRegion for integrase B3496 sequence
ctccgcaatctatcgactatgaagccaggacgggtgttttcaaggggtccggcaaaaagccgtatgaggtcaccgaaaccacctgcacctgccgagattattttgtccgcaagctgccgtgcaagcatatctaccggctgcgcatggagcttgccaaggctgacggcgaatagttttcaccagaaaaggagcatgacggcatgagaaaaaagtccaacctcaatgtggctactcgtgccgtcatctatgccaggtattcc

SEQ ID NO: 16496 - DNA, 260 bp, Unknown; identical to SEQ ID NO: 16237
  Description of Unknown: LeftRegion for integrase B3497 sequence

SEQ ID NO: 16497 - DNA, 260 bp, Unknown; identical to SEQ ID NO: 16403
  Description of Unknown: LeftRegion for integrase B3498 sequence

SEQ ID NO: 16498 - DNA, 260 bp, Unknown
  Description of Unknown: LeftRegion for integrase B3499 sequence
atatcgccaactggtcggccgctcaaggtgcagctaccgcaccgcagcccgttcagcaagtagtggagcagaaaccgtctcccgccgatgaaatccgcaaatacaagggcctgctggatgacggtatcatcacgcaggaagaatttgaagctaagaaaaagcaactgctgggcctgtaaatttgaaaggagcgtgacggcatgagaaaaaagtccaacctcaatgcggctactcgtgccgtcatctatgccaggtattcc

SEQ ID NO: 16499 - DNA, 260 bp, Unknown
  Description of Unknown: LeftRegion for integrase B3500 sequence
cgtgaagtagacattgaagatggagatattgtcgtggccgtggtagatcggcaagacggttttatcaaacaagtccactttgaagagaatattcttaccctgcattccttcaacccttactaccctgatatggtctttaaggggaacgagatcaagcaagtccgctttgtaggtaaagcccgagaggtgaagagaattctatgaagaagttcaaattccccattgacctgtccatgctgacagaggaagagatcaaccaa

SEQ ID NO: 16500 - DNA, 260 bp, Unknown
  Description of Unknown: LeftRegion for integrase B3501 sequence
ccagcagcagaagtccctgcgcatgcaccggcttgtgacgcttatcctcttgggtatcctttcgctgtgtgcccttgcgcttgtggccgacgcgctcatcccatcgatcggctggattcgcacatgaaaattaccgccccggcccgatcagccggagcggtatatgtataacctttttatgcaagggtgagaatcttggtatgaaatttacatcaacatggcggatttcagatccgctcgcgcagtatattgtctatctg

SEQ ID NO: 16501 - DNA, 260 bp, Unknown
  Description of Unknown: LeftRegion for integrase B3502 sequence
tgcccagcagcagaagtccctgcgcatgcaccggcttgtgacgctcatcctcttgggcattctttcgctgtgtgccctcgcgcttgtggccgacgtgctcatcccatcaatcggctggatccgcacataaataaaaccgccccggccggcgccggagcggtatccgtataacctttttcccttgtggtgagaatctgcctatgaaatttacatctacctggaaaatctccgacccgctcgcgcagtacatcatttacctg

SEQ ID NO: 16502 - DNA, 260 bp, Unknown; identical to SEQ ID NO: 13027
  Description of Unknown: LeftRegion for integrase B3503 sequence

SEQ ID NO: 16503 - DNA, 260 bp, Unknown
  Description of Unknown: LeftRegion for integrase B3504 sequence
ccagatcattctgatatcaggcgacagtgacttcgtaccggcggctaagttggctcgaagagagggaatcgattttattctcgaccccatgcgttctcccattaaaccggacttatatgaacacgttgacggtattaggtctaaagtgccaaacccaagaaaaatcaaagaggctgagcagccagtattggagatgcaacatgagtaaatactgcatctacctacgaaaatcccgtgccgacctcgaagcagaagcgcac

SEQ ID NO: 16504 - DNA, 260 bp, Unknown
  Description of Unknown: LeftRegion for integrase B3505 sequence
tcatatgtagatcatcctgtgtatttctatgacaatgaaggcaatttacaaattgaattttgttatagcggcctcccatttgatttacgtgaatctgatttcatcaaggttgattatagcttaagatgaataaagttttttagtattttttcaaagacgatgattataaatcgtataaataaaaaaaggagatgtttggtttgagcaaatattgcatttacctacgaaaatcccgcgccgaccttgaagctgaagcacac

SEQ ID NO: 16505 - DNA, 260 bp, Unknown; identical to SEQ ID NO: 14174
  Description of Unknown: LeftRegion for integrase B3506 sequence

SEQ ID NO: 16506 - DNA, 260 bp, Unknown
  Description of Unknown: LeftRegion for integrase B3507 sequence
agtaaaaagatacttgtatatatactaaatgataaaggcttttatgatgaacccatgttttatacattcaatgataaagtaaaagtaaatatttatgatgatttagaaatagattttagtacatttgatttatgaaaactaaattaagccattagatatttttatttagtggctttaatattataagaggaggttttctcatgaaaaagatagcaatttattctcgtaaatcagtatttactggcaaaggtgaaagtgtt

SEQ ID NO: 16507 - DNA, 260 bp, Unknown
  Description of Unknown: LeftRegion for integrase B3508 sequence
gcccagcagcagaagtccctgcgcatgcaccggcttgtgacgctcatcctcttgggtattcttttgctgtgtgcccttgcgcttgtggccgacgtgctcagcccatcgattggctggttccgcgcataaatcaaaccgccccggcccagcgccggagcggtatccgtataaccttttgcccttgtggcgagaatctgcttatgaaatttacatctacctggaaaatcgctgacccgctcgcgcagtacatcatttacctg

SEQ ID NO: 16508 - DNA, 260 bp, Unknown
  Description of Unknown: LeftRegion for integrase B3509 sequence
cagaactggagtaccaattttgctcggcgggcgatgctgacccagcaagcctgcaaatgcaaaaagcgtgtgccgagtataagccgaccgatgattttccatataccttttataaaggaatcgttagcaacgtcagtctataccgcgatacccacatcgaattcaaactgcgaaatggacaaactgtgtgaggaaaagtcatgaataacatgagaattgttgagattcccgcttctatgagggaaaacgccggacggaaa

SEQ ID NO: 16509 - DNA, 260 bp, Unknown
  Description of Unknown: LeftRegion for integrase B3510 sequence
tgaggttgataagttcaacgaagccttttttcacgagcgcgtttcaaagatggtgatttcagccgggaactgcatcacctactactttaaggatggaacagaaatccagcgggtctggaaggaccgctcacggcgagaaagctggaccccggaaatgaaagaaaaggcaagacgggcaacggcagaaaggtggaaagcaaatggctaatgcaagaaaagttcaggtcatagaggcaacaatcaatccgaaaacgcatctg

SEQ ID NO: 16510 - DNA, 260 bp, Unknown
  Description of Unknown: LeftRegion for integrase B3511 sequence
acagggacggcatcgtaactcggattttcgctatattgcgatagcctactatacgataatatcatacatctgaagatgtacaactagctgcaaaaatattgtatcatcttcggaacagcttcgcaagcggaacactcgttccccgctggctgttatttttatacccatttttacatatttttacttaggaggatgatgacatgcaggaaacaaacatctctatcaatgaaattatcatgtatctgcgcaaatcccgatca

SEQ ID NO: 16511 - DNA, 260 bp, Unknown
  Description of Unknown: LeftRegion for integrase B3512 sequence
tattaccattaatatttatagttatttgtatactgctggtggttcctttttgtattttaatagttacatatgttattttagatgcattgtactattcaaattatcgaaatatggttgttccatatgaaaggaaagtaattcttaagacattacaatcttatgatggaagatataaagaattagattagtggggtgactatatgagatatgttatatacctgcgaaaatcccgcgccgaccttgaagcagaagcgcacggc

SEQ ID NO: 16512 - DNA, 260 bp, Unknown; identical to SEQ ID NO: 16510
  Description of Unknown: LeftRegion for integrase B3513 sequence

SEQ ID NO: 16513 - DNA, 260 bp, Unknown
  Description of Unknown: LeftRegion for integrase B3514 sequence
atgtgaggtctttttcgttatctaataaataattcaaactacataaaaaagagccagccgctaacgaccagctccacaagtgatataaataccaccctagacaagttgtattgtatcatttctggagcatccggtcaaatgctgggtgttatttttgtacctattttttaataaaatcaaatataaaggagtgatatactatggcttattgtatttatttaagaaaatccagagctgatagagagttagaactgcaaggt

SEQ ID NO: 16514 - DNA, 260 bp, Unknown; identical to SEQ ID NO: 16513
  Description of Unknown: LeftRegion for integrase B3515 sequence

SEQ ID NO: 16515 - DNA, 260 bp, Unknown
  Description of Unknown: LeftRegion for integrase B3516 sequence
agagggagtgaaaagaatggaaccaaaacaaactaaagaagaaaaatatataattgagagaaaatatgtaggagaaaaaagtctaatagaaatcattacaaaaatgattttacaggaaataaaggtaaaaaatggctaaaaaaataaagatatgttataatcaaaatgagcaagttgaatgttgatgtgaaggaggaagcatgaatacaaacatcaaacatacagctttactaagtagactatcaagagaagatgaaaat

SEQ ID NO: 16516 - DNA, 260 bp, Unknown
  Description of Unknown: LeftRegion for integrase B3517 sequence
aatatgctttaaatgtcaatttaaaaaccggctcctgctaccaacaggaaccggcaaggaataacatccgaaaatgatactcccaattagcaaaaatattgtatcatcttcggaacagcttcgcaagcggaacacccgttccccgctggctgttatttttatacccatttttacatatttttacttaggaggatgatgtcatgcaggaaacaaatatctctatcaatgaaattatcatgtatctgcgcaaatcccgatca

SEQ ID NO: 16517 - DNA, 260 bp, Unknown
  Description of Unknown: LeftRegion for integrase B3518 sequence
atcaatgcttgatgtaattgcacataataaataattattacaaataaaaaaagagccagccactaaggaccagctccaaagtgatacaatatcaccatagacaagtcatattgtatcacataatggaacatctggcaaaggctgggtgttatttttgtacctattttttaataaaatcaaatataaaggagtgatatactatggcttattgtatttatttaagaaaatccagagctgatagagagttagaactgcaaggt

SEQ ID NO: 16518 - DNA, 260 bp, Unknown
  Description of Unknown: LeftRegion for integrase B3519 sequence
cagcgcttgatcgaattcgaaaagcgcccgtgaccttcttcgtgccccttttgccacccttggcaaaatagccatcaaaaacgccccgcccatgtttccagcatggacgagacgaagtattcaattcacactctttttctttatgcggctcatcaagggattcattcaactgttatcactatttaagggggtgatccaatttgaaagccgtcatatatgcccgcttctccagccacaaccagcgcgaagaatccatcgaa

SEQ ID NO: 16519 - DNA, 260 bp, Unknown
  Description of Unknown: LeftRegion for integrase B3520 sequence
tagtcaacattcaaccccctcgaaatcgaaggttttagaatctaaaataaaagagccagcccctaacgaccagctccaaagtgatacaatatcaccatagacaagtcatattgtatcacataatggaacatctggcaaaggctgggtgttatttttgtacctattttttaataaaatcaaatataaaggagtgatatactatggcttattgtatttatttaagaaaatccagagctgatagagagttagaactgcaaggt

SEQ ID NO: 16520 - DNA, 260 bp, Unknown
  Description of Unknown: LeftRegion for integrase B3521 sequence
tatttccattgttcatcccagttattgttatattattagcagttccattttccattattataattacatgtctaatttcttatttattgtactattcaaactatagaaacatggttgttccatatgaaaggaaaatagttcttaaaacattacaatcttatgatggaagatataaagaattagattagtggggtgactatatgagatatgttatctacctacgaaaatcccgcgccgacctcgaagccgaggcacacggc

SEQ ID NO: 16521 - DNA, 260 bp, Unknown; identical to SEQ ID NO: 16513
  Description of Unknown: LeftRegion for integrase B3522 sequence

SEQ ID NO: 16522 - DNA, 260 bp, Unknown
  Description of Unknown: LeftRegion for integrase B3523 sequence
cttggagtgttgggggactggccgaaggtcagccgtagcggaagcaaggctgcgctggaagacgcacaggctgaaattgagcggtggaggcaagagttcattgctgggaatatctcggcgaagaaatacgttaaaattgcggatgctctcatatccaaataaaaaagccgccctcggtgggcggcgggaggttactctgaatgtgtgcaaaaaagaaaccggccatgcttgagccggatatgcaggatgccgtgatctac

SEQ ID NO: 16523 - DNA, 260 bp, Unknown
  Description of Unknown: LeftRegion for integrase B3524 sequence
caccacacatactcataaatagaaaaaaccggctcctgcagcaacaggaaccggcaaggaataacatccgaaaatgatactcccaattagcaaaaatattgtatcatcttcggaacagcttcgcaagcggaacacccgttccccgctggctgttatttttatacccatttttacatatttttacttaggaggatgatgacatgcaggaaacaaacatctctatcaatgaaattatcatgtatctgcgcaaatcccgatca

SEQ ID NO: 16524 - DNA, 260 bp, Unknown
  Description of Unknown: LeftRegion for integrase B3525 sequence
acagggacggcatcgtaactcggattttcgctatattgcgatagcctactatacgataatatcatacatctgaagatgtacaactagctgcaaaaatattgtatcatcttcggaacagcttcgcaagcggaacacccgttccccgctggctgttatttttatacccatttttacatatttttacttaggaggatgatgtcatgcaggaaacaaatatctctatcaatgaaattatcatgtatctgcgcaaatcccgatca

SEQ ID NO: 16525 - DNA, 260 bp, Unknown
  Description of Unknown: LeftRegion for integrase B3526 sequence
ttgttaacgcattaggttttttagcaaaaaatgatttttctttattattcattaatatagtcctccttaatttactatagtaaattaattgttaagtattgatatattataccatatgttagaaaaatttggggtataaagacatatctttgaattaaaccaataactttctatgatataattataatgaggtgatattaatgagtaactatagaagtgctctatatgctagagttagtacacaaaatgaagagcaagat

SEQ ID NO: 16526 - DNA, 260 bp, Unknown
  Description of Unknown: LeftRegion for integrase B3527 sequence
aatatgctttaaatgtcaatttaaaaaccggctcctgttggcgcaggaaccggcaaggaataacatccgaaaatgatactccaacttagcaaaaaatattgtatcatcttcggaacagcttcgcaagcggaacacccgttccccgctggctgttatttttatacccatttttacatatttttacttaggaggatgatgacatgcaggaaacaaacatctctatcaatgaaattatcatgtatctgcgcaaatcccgatca

SEQ ID NO: 16527 - DNA, 260 bp, Unknown; identical to SEQ ID NO: 14465
  Description of Unknown: LeftRegion for integrase B3528 sequence

SEQ ID NO: 16528 - DNA, 260 bp, Unknown; identical to SEQ ID NO: 16513
  Description of Unknown: LeftRegion for integrase B3529 sequence

SEQ ID NO: 16529 - DNA, 260 bp, Unknown
  Description of Unknown: LeftRegion for integrase B3530 sequence
aatatgctttaaatgtcaatttaaaaaccggctcctgctaccaacaggaaccggcaaggaataacatccgaaaatgatactcccaattagcaaaaatattgtatcatcttcggaacagcttcgcaagcggaacacccgttccccgctggctgttatttttatacccatttttacatatttttacttaggaggatgatgtcatgcaggaaacaaatatctctatcaatgaaattattatgtatctgcgcaaatcccgatca

SEQ ID NO: 16530 - DNA, 260 bp, Unknown
  Description of Unknown: LeftRegion for integrase B3531 sequence
gttgcccacttggaccccgatacggtcagaagcaaaataacggcaatcagagcagaaaataataatgtagtcgtgttctgcatggatgacggttcagaaatcgttgaacgatgggcagaccgctccagggcagaaagctggacgccggaaatgaaagaacaggcgcgccaacgggcactgcaggcaaggaggagcaaaaaatgagcagaacagcagcacggtcggtcaccgtcattccaccgaccatcaatccgctgaca

SEQ ID NO: 16531 - DNA, 260 bp, Unknown
  Description of Unknown: LeftRegion for integrase B3532 sequence
aaaagaatcagaaccgatatctctttgggtgttactagactacaaaatacaaattattcagagggaatcaataaaatatttagtgtctatgacttaattagaaaaataggagatttttcagatttcatagatattagatggtcattttcagtaacagcgaatgaaatttaacattaaatattagggagcggtggagtattatggcgcgtaaaacggataagcctttgtccaatattgcagttatatacgctcgattctcc

SEQ ID NO: 16532 - DNA, 260 bp, Unknown
  Description of Unknown: LeftRegion for integrase B3533 sequence
agtttaaaaacaaccgaaaataaaaaccggctcctgcgtcaacaggaaccggcaatagaatatgtatccgaagataatactctgcaatgacaaaaatattgtatcatcttcggaacagcttcgcaagcggaacacccgttccccgctggctgttatttttatacccatttttacatatttttacttaggaggatgatgacatgcaggaaacaaacatctctatcaatgaaattatcatgtatctgcgcaaatcccgatca

SEQ ID NO: 16533 - DNA, 260 bp, Unknown
  Description of Unknown: LeftRegion for integrase B3534 sequence
ccgcagccccacattgttggctattcagaatatctggatacggcataccggttttctttttggtaaagaaaaagccccggctttcaccggggcatcccatgagttgtgctcatgtaatctcgcaaattatagtatagcactgctccgggatattttgaagtattccgggcatttttatgccctttttaggaggttttgctgtgcattttggaatttatggaagaaaatcatattttaaggacacctcagacagtacacag

SEQ ID NO: 16534 - DNA, 260 bp, Unknown
  Description of Unknown: LeftRegion for integrase B3535 sequence
aatatgctttaaatgtcaatttaaaaaccggctcctgctaccaacaggaaccggcaaggaataacatccgaaaatgatactcccaattagcaaaaatattgtatcatcttcggaacagcttcgcaagcggaacacccgttccccgctggctgttatttttatacccatttttacatatttttacttaggaggatgatgacatgcaggaaacaaacatctctatcaatgaaattatcatgtatctgcgcaaatcccgatca

SEQ ID NO: 16535 - DNA, 260 bp, Unknown
  Description of Unknown: LeftRegion for integrase B3536 sequence
gtcaacattcaaccccctcgaaatcgaaaggtttagaatctaaaataaaagagccagccgctaacgaccagctccacaagtgatataaataccaccctagacaagttgtattgtatcatttctggagcatccggtcaaatgctgggtgttatttttgtacctattttttaataaaatcaaatataaaggagtgatatactatggcttattgtatttatttaagaaaatccagagctgatagagagttagaactgcaaggt

SEQ ID NO: 16536 - DNA, 260 bp, Unknown
  Description of Unknown: LeftRegion for integrase B3537 sequence
agacggctacccacaaatcattaccactaccaacttcaagcaggtacagaagcaactgaaaaagcagattgtccggaagcctaaaaagcaaccaactccgcccaccaagttttaccgcgggatcatcaatagatactctgatgatgcttttaaacaggctgaacatatctatcaattaatttacagtgaggtggaagtctatggcgaaagttagaattatccccgcccaagtcaaacaaggtaatcgaaaccgacaaatt

SEQ ID NO: 16537 - DNA, 260 bp, Unknown
  Description of Unknown: LeftRegion for integrase B3538 sequence
ttacaacttatttattaaaaaaccgcccctgttggcgcagagacggtttcaaatcggcaataccgaagatggtatcaaccaaccttttgaccaaaatattgtatcatcttcggaacagcttcgcaagcggaacacccgttccccgctggctgttatttttatacccatttttacatatttttacttaggaggatgatgtcatgcaggaaacaaatatctctatcaatgaaattatcatgtatctgcgcaaatcccgatca

SEQ ID NO: 16538 - DNA, 260 bp, Unknown; identical to SEQ ID NO: 16537
  Description of Unknown: LeftRegion for integrase B3539 sequence

SEQ ID NO: 16539 - DNA, 260 bp, Unknown; identical to SEQ ID NO: 16519
  Description of Unknown: LeftRegion for integrase B3540 sequence

SEQ ID NO: 16540 - DNA, 260 bp, Unknown
  Description of Unknown: LeftRegion for integrase B3541 sequence
attttttcaatgtttccgttgattatttgctcggcgcgtccgccgaagaaagtttttcacggttcatcaagtcgtacggcttggatcgtgtttgcgatgcggatcttctcgcaaagttccgcgacgtcgttgcgtccgtcgattccgacgagcattgacggatccgccgccctgtgcggtgcttataattgggtgtaattatgaaagttgtaggatattgcagattttcgtccgaaggtcaaaaggacggttattcaatc

SEQ ID NO: 16541 - DNA, 260 bp, Unknown
  Description of Unknown: LeftRegion for integrase B3542 sequence
tgagtctaaagaatactcattgagatatagcgcttacaataaatatgagggtacagaaataatgttttattcaaataaccttattcctgttaatttctaatttcataatatcgttataaaaagctatgattaaatcaatagcttttctttttactattttttcaatataataaacatataaatagcaatgaggtgatccaatgaaaatagcaatatattctaggaaaagtaaatttactggcaagggcgaaagtattcaa

SEQ ID NO: 16542 - DNA, 260 bp, Unknown
  Description of Unknown: LeftRegion for integrase B3543 sequence
tagtcaacattcaaccccctcgaaatcgaaaggtttagaatctaaaataaaagagccagccgctaacgaccagctccaaagtgatacaatatcaccatagacaagtcatattgtatcacataatggaacatctggcaaaggctgggtgttatttttgtacctattttttaataaaatcaaatataaaggagtgatatactatggcttattgtatttatttaagaaaatccagagctgatagagagttagaactgcaaggt

SEQ ID NO: 16543 - DNA, 260 bp, Unknown; identical to SEQ ID NO: 16513
  Description of Unknown: LeftRegion for integrase B3544 sequence

SEQ ID NO: 16544 - DNA, 260 bp, Unknown
  Description of Unknown: LeftRegion for integrase B3545 sequence
cagcgcttgatcgaatccgaaaagcgcccgtgaccttcttcgtgccccttttgccacccttggcaaaatagccatcaaaaacgccccgcccatgtttccagcatggacgagacgaagtattcaattcacactctttttctttatgcggctcatcaagggattcattcaactgttatcactatttaagggggtgatccaatttgaaagccgtcatatatgcccgcttctccagccacaaccagcgcgaagaatccatcgaa

SEQ ID NO: 16545 - DNA, 260 bp, Unknown
  Description of Unknown: LeftRegion for integrase B3546 sequence
acagatgcgcttgaccctgatatggtccgaagcaaaataacgatgatccgagcagagaaaaacaatgtcgctgtgttctgcatggacgacggttctgagatcgtgaaacgatggaaagaccgctccagagcagaaagctggtcgccggaaatgaaagagcaggccagacagcgggcattgcagacaaggagggtacaaaaatgagcaccgcgacagtccggtcggtcacgatcattccaccgaccatcaaccctttgacg

SEQ ID NO: 16546 - DNA, 260 bp, Unknown
  Description of Unknown: LeftRegion for integrase B3547 sequence
gctggataaactggccagtctctttgagagcgccatgacggaggtcgctgtcgtgaactacccgcgcaagagcgcgtaaagatctcgaaccaaaaaagatgcccccggcgctaccaacaccgagggcgatcaaagggcagctgactatcgacaggtcttactgcccttctatcttacaacagaataggaggtttcgcaacatgaaaatgatgcagaacgacaaccggacggccatcacctactaccgctattccagccac

SEQ ID NO: 16547 - DNA, 260 bp, Unknown
  Description of Unknown: LeftRegion for integrase B3548 sequence
agccttcgaccgaggccttataactatcactccttccatgaaaatctatgtttctccgataattttggatagccctcaggacgcttttacagcccgctggctggcttctcttgacggaatggttttaccccccccccccgatttccgccgcgtagagagcttctggagtaccataacgacgaaatttttaggagggtcacatgaatacagtaatttatgctcggtattctgccggcccgagacagaccgaccagagtatc

SEQ ID NO: 16548 - DNA, 260 bp, Unknown
  Description of Unknown: LeftRegion for integrase B3549 sequence
gttctcttgttaagtatattatatcaaatcagaggttttagtcaataaaaaaagagccagcccctaacgaccagctccaagtgatacaatatcaccctagacaagtcatattgtatcacataatggaacatctggcaaaggctgggtgttatttttgtacctattttttaataaaatcaaatataaaggagtgatatactatggcttattgtatttatttaagaaaatccagagctgatagagagttagaactgcaaggt

SEQ ID NO: 16549 - DNA, 260 bp, Unknown
  Description of Unknown: LeftRegion for integrase B3550 sequence
ctgattcttaaatatttctttcaaatgaagcaaataaaaaccgccccagtacgccaataccgggacggtggtggatctccgaagagatacctcattccgcaaaaatattgtatcatcttcggagcggctgtacaaccagaacatttgtgtggccgttatttttgtacccattttcacatattttaaaccgaggtgatattatgaagtttttagatgtcgcgaaacttttaaatgtatgtatctacctgcgtaaatcccgt

SEQ ID NO: 16550 - DNA, 260 bp, Unknown
  Description of Unknown: LeftRegion for integrase B3551 sequence
aacaattgtttatattttttcaaatgtaaaaaccgcccagtgttaccagcaccgaacggctttacatagattactgtacggttccggaagaaccgtgatataacctcatggcattaagattatatcacaatcctccggcacctgtacaggtgtattttttatactcttttttcatacttttgataaggaggattgatggtatggaacaatattgtatgtatttacgtaagtcccgtgcggatcgggaagcggaacagcgt

SEQ ID NO: 16551 - DNA, 260 bp, Unknown
  Description of Unknown: LeftRegion for integrase B3552 sequence
acagggacggcatcgtaactcggattttcgctatattgcgatagcctactatacgataatatcatacatctgaagatgtacaactagctgcaaaaatattgtatcatcttcggaacagcttcgcaagcggaacacccgttccccgctggctgttatttttatacccatttttacatatttttacttaggaggatgatgacatgcaggaaacaaacatctctatcaatgaaattatcatgtatctgcgcaaatcccgatca

SEQ ID NO: 16552 - DNA, 260 bp, Unknown
  Description of Unknown: LeftRegion for integrase B3553 sequence
atcaatgcttgatgtaattgcacataataaataattattacaaataaaaaaagagccagccactaaggaccagctccgaagtgatacaatatcaccatagacaagtcatattgtatcacataatggaacatctggcaaaggctgggtgttatttttgtacctattttttaataaaatcaaatataaaggagtgatatactatggcttattgtatttatttaagaaaatccagagctgatagagagttagaactgcaaggt

SEQ ID NO: 16553 - DNA, 260 bp, Unknown
  Description of Unknown: LeftRegion for integrase B3554 sequence
tctcaccgcccatacctagcagcggcatcaggtgtttaaacgccagcgcgatatccagatcgttcccgcctacacggcagccactgtgtcccagcaggctgttttcgcgatcggcgcgctgatgccattgcggccccatcagcagtagtgaacagttgatgtataatgtacgccacagtaagtaacgagagaacaagaagatgaaagtacccgtatggagctacgcacgtgtatcaacactgaatcaggttgatggtttt

SEQ ID NO: 16554 - DNA, 260 bp, Unknown
  Description of Unknown: LeftRegion for integrase B3555 sequence
ttagtcaacattcaaccccctcgaaatcgaaggttttagaatctaaaataaaagagccagcccctaacgaccagctccaagtgatacaatatcaccctagacaagtcatattgtatcacataatggaacatctggcaaaggctgggtgttatttttgtacctattttttaataaaatcaaatataaaggagtgatatactatggcttattgtatttatttaagaaaatccagagctgatagagagttagaactgcaaggt

SEQ ID NO: 16555 - DNA, 260 bp, Unknown
  Description of Unknown: LeftRegion for integrase B3556 sequence
gtactgtttttctttgtctaaaaccttgtatttagttttttatctaaaattataacttcccaatctacttaaattactatgttttacttatatggcactatagtaaatatttttaagtacaaaattaataaatgcattgaatattcattttaactatttttttagcatgatataattatcatgaaaggtggttttataatatgaggattgcaatttattctagaaagtcggtttttactggtaaaggtgactctatagaa

SEQ ID NO: 16556 - DNA, 260 bp, Unknown; identical to SEQ ID NO: 16551
  Description of Unknown: LeftRegion for integrase B3557 sequence

SEQ ID NO: 16557 - DNA, 260 bp, Unknown
  Description of Unknown: LeftRegion for integrase B3558 sequence
tttttaccttagatatatacctacctttatacctaacagaataaaaaataatgaaatttatattaaataacaagaacaatacaaacttattatatcttaaaccccagtaaatacgcacatttaagaattaataaagataatgcgatatggggtaaattatatacccttttttacatatttttacttaggaggatgatgacatgcaggaaacaaacatctctatcaatgaaattatcatgtatctgcgcaaatcccgatca

SEQ ID NO: 16558 - DNA, 260 bp, Unknown
  Description of Unknown: LeftRegion for integrase B3559 sequence
caaatcttaatgtaccagcccttgatgtgtatgaagggcgcaaaagatttaatgatatggtatgggtaacagcaaaggggaaacgttatcactctagccaaggttgttccaacatgaatgctcccgaagaaatcccgcgatccgaagccgaagatatggggtataccccatgctcaaaatgttattaacgaggtaattctatgccatacttaatctatctacgaaagagccgcgccgacatggatgccgaagcccgtggc

SEQ ID NO: 16559 - DNA, 260 bp, Unknown; identical to SEQ ID NO: 15777
  Description of Unknown: LeftRegion for integrase B3560 sequence

SEQ ID NO: 16560 - DNA, 260 bp, Unknown; identical to SEQ ID NO: 16513
  Description of Unknown: LeftRegion for integrase B3561 sequence

SEQ ID NO: 16561 - DNA, 260 bp, Unknown
  Description of Unknown: LeftRegion for integrase B3562 sequence
aatttgatttaaagaaaaaacaattactcgaactataacattttaaataaaaagagccagccactaaggaccagctccaagtgatacaatatcaccctagacaagtcatattgtatcacataatggaacatctggcaaaggctgggtgttatttttgtacccattttttaataaaatcaaatataaaggagtgatatactatggcttattgtatttatttaagaaaatccagagctgatagagagttagaactgcaaggt

SEQ ID NO: 16562 - DNA, 260 bp, Unknown
  Description of Unknown: LeftRegion for integrase B3563 sequence
attttttaggcatctgccagctcctgaaggcgctccgaacggtcgggttttctgagattgaaatcaaaaagatcgcgcggcggatcgctgtcgagcttggtgcaaatttcacactttacgcttgatttttctccgttttgttcatagctattctgaaaatattgtagtagtgtgtgttgctgcagagggaggtgaacggcatggcaaagaagcagaccaacggaaatcttgcgctggaacagcagcgcgtcattgtaatc

SEQ ID NO: 16563 - DNA, 260 bp, Unknown
  Description of Unknown: LeftRegion for integrase B3564 sequence
tagtcaacattcaaccccctcgaaatcgaaggttttagaatctaaaataaaagagccagccactaaggaccagctccaaagtgatacaatatcaccatagacaagtcatattgtatcacataatggaacatctggcaaaggctgggtgttatttttgtacctattttttaataaaatcaaatataaaggagtgatatactatggcttattgtatttatttaagaaaatccagagctgatagagagttagaactgcaaggt

SEQ ID NO: 16564 - DNA, 260 bp, Unknown
  Description of Unknown: LeftRegion for integrase B3565 sequence
aaaaaacaatttttatcaaaacaaaaaaccggctcctgcgtcaacaagaaccggcaaggaataacatccgaaaatgatactccaacttagcaaaaatattgtatcatcttcggaacagcttcgcaagcggaacacccgttccccgctggctgttatttttgtacccttttttacatatttttacttaggaggatgatgtcatgcaggaaacaaatatctctatcaatgaaattatcatgtatctgcgcaaatcccgatca

SEQ ID NO: 16565 - DNA, 260 bp, Unknown
  Description of Unknown: LeftRegion for integrase B3566 sequence
ccgcagccccacattgttggctattcagaatacctggatacggcataccggttttctttttggtaaagaaaaagccccggctttcaccggggcatcccatgagttgtgctcatgtaatctcgcaaattatagtatagcactgctccgggatattttgaagtattccgggcatttttatgccctttttaggaggttttgctgtgcattttggaatttatggaagaaaatcatattttaaggacacctcagacagcacacag

SEQ ID NO: 16566 - DNA, 260 bp, Unknown
  Description of Unknown: LeftRegion for integrase B3567 sequence
gtggtgggatatattcattaaatatagcacagtcgccaggtgctggtaacaccggacggcttcacatagattactgtacggttccggaagaaccgtgatataacctcatcgcaaaaagattatatcacaatcctccggcacctgtacaggtgtattttttatactcttttttcatactttgggtaaggaggattgatggtatggaacaatattgtatgtacttgcgtaaatcccgtgcagatcgggaagcggaacagcgt

SEQ ID NO: 16567 - DNA, 260 bp, Unknown
  Description of Unknown: LeftRegion for integrase B3568 sequence
gcagatgcccttgactctgatatggtccgaagcaaaataacgatgatccgagcagagaaaaacaatgtcgttgtgttctgcatggacgacggttctgaaatcgtgaaacgatggaaagaccgctccagagcagaaagttggtcgccggaaatgaaagagcaggccagacagcgggcattgcagacaaggagggtacaaaaatgagcaccgcagcagtccggtcggtcacaatcattccaccaaccatcaacattctgacg

SEQ ID NO: 16568 - DNA, 260 bp, Unknown
  Description of Unknown: LeftRegion for integrase B3569 sequence
gcaatggcaatacagcttatccttatttatatactgtataaatgaggtggtttcagtgaaagggaaaattaaaatcaatgatgaattaaaagcaagttacagacgtgggattgtaaaggagttgtattcaaggggaatgataacggagcagcagtacaagagattgcttatgaaacagtgacagcggggaggtgtcggcggtgcttaaagtggcggcatatgcgcgtgtttcgacagacaaggatgatcaaatcaattct

SEQ ID NO: 16569 - DNA, 260 bp, Unknown; identical to SEQ ID NO: 16513
  Description of Unknown: LeftRegion for integrase B3570 sequence

SEQ ID NO: 16570 - DNA, 260 bp, Unknown
  Description of Unknown: LeftRegion for integrase B3571 sequence
tatatcagcgtaatatgttcttggtgcatccattggagaggcaagtataccgtcagtttgaatcatttatccggacaaacaagtaaaaacgccgcacctgctctaacaggtacggcgaattgatggagggatgctatgatagtacgaaaccatttctattatagcacatttcccccgaaaaatgcaagagggaatcaataatggaaacatattgcatctatctccggaaatcacgtgcggatgcggatgcagaggcacgt

SEQ ID NO: 16571 - DNA, 260 bp, Unknown
  Description of Unknown: LeftRegion for integrase B3572 sequence
tgaatctgaaaaataagaaatagcatccccgctctgacaaagtaggatgctatttcttaatccttatttcgccagaaacggataggttccagctatcgttccggctgtcttgttaagtatattatacaaacgtttgaaacatttgtcaaacacatttgtttaacaaatccttcttattatatgatatgaggtgaaccaatatgccatattgcctgtatttgagaaaatccagaactgatctggatgcagaagccaacgga

SEQ ID NO: 16572 - DNA, 260 bp, Unknown
  Description of Unknown: LeftRegion for integrase B3573 sequence
aatatgctttaaatgtcaatttaaaaaccggctcctgctaccaacaggaaccggcaaggaataacatccgaaaatgatactccgaattcgcaaaaatattgtatcatcttcggaacagcttcgcaagcggaacacccgttccccgctggctgttatttttatacccatttttacatatttttacttaggaggatgatgtcatgctggaaacaaatatctctatcaatgaaattattatgtatctgcgaaaatcccgatca

SEQ ID NO: 16573 - DNA, 260 bp, Unknown
  Description of Unknown: LeftRegion for integrase B3574 sequence
gtttaaaaacaaccgaaaataaaaaccggctcctgttggcgcaagaaccggcaatagaatatatatccgaagatagatactctaaacacgcaaaaatattgtatcatcttcggaacagcttcgcaagcggaacactcgttctttgctggctgttatttttatacccatttttacatatttttacttaggaggatgatgacatgcaggaaacaaacatctctatcaatgaaattatcatgtatctgcgcaagtcacgatca

SEQ ID NO: 16574 - DNA, 260 bp, Unknown
  Description of Unknown: LeftRegion for integrase B3575 sequence
cacacatactcataaatagaaaaaaccggctcctgcggcaacaggaaccggaaactgaatataaatccgaagataatattcaagaacgtgcaaaaatattgtatcatcttcggaacagcttcgcaagcggaacacccgttccccgctggctgttatttttgtacccatttttacatatttttacttaggaggatgatgtcatgcaggaaacaaatatctctatcaatgaaattatcatgtatctgcgcaaatcccgatca

SEQ ID NO: 16575 - DNA, 260 bp, Unknown
  Description of Unknown: LeftRegion for integrase B3576 sequence
agtttaaaaacaaccgaaaataaaaaccggctcctgcgtcaacaggaaccggcaatagaatatgtatccgaagataatactctgcaatgacaaaaatattgtatcatcttcggaacagcttcgcaagcggaacactcgttccccgctggctgttatttttatacccatttttacatatttttacttaggaggatgatgacatgcaggaaacaaacatctctatcaatgaaattatcatgtatctgcgcaaatcccgatca

SEQ ID NO: 16576 - DNA, 260 bp, Unknown; identical to SEQ ID NO: 16517
  Description of Unknown: LeftRegion for integrase B3577 sequence

SEQ ID NO: 16577 - DNA, 260 bp, Unknown
  Description of Unknown: LeftRegion for integrase B3578 sequence
aaatatgctttaaatgtcaatttaaaaaccggctcctgcttcaacaggaaccggcaaggaataacatccgaaaatgatactccaactatgctaaaatattgtatcatcttcggaacagcttcgcaagcggaacacccgttccccgctggctgttatttttatacccttttttacatatttttacttaggaggatgatgacatgcaggaaacaaacatctctatcaatgaaattatcatgtatctgcgcaaatcccgatca

SEQ ID NO: 16578 - DNA, 260 bp, Unknown
  Description of Unknown: LeftRegion for integrase B3579 sequence
gctggataagctggccagtctctttgagagcgccatgacggaggtcgccgttgtaaactacccgcgcaagagcgcgtaaagatctcgaaccaaaaaagatgcccccggcgctaccaacaccgagggcgatcaaagggcagctgactatcgacaggtcttactgcccttctatcttacaacagaataggaggtttcgcaacatgaaaatgatgcagaatgacaaccggacggccatcacctactaccgctattccagccac

SEQ ID NO: 16579 - DNA, 260 bp, Unknown
  Description of Unknown: LeftRegion for integrase B3580 sequence
tatatcagcgtaatatgttcttggcgcatccattggagaggcaagtataccgtcaatttgaagcatttatccggacaaacaagtaaaaacgccgcacctgctctaacaggtacggcgaattgatgggagggatgctatgatagtacgagacaatttctattatagcatatctctccgaaaaacgcaagagggaatcaataatggaaacatattgtatctatctccgaaaatcacgtgcagatgcggatgcagaggcacgt

SEQ ID NO: 16580 - DNA, 260 bp, Unknown; identical to SEQ ID NO: 16517
  Description of Unknown: LeftRegion for integrase B3581 sequence

SEQ ID NO: 16581 - DNA, 260 bp, Unknown
  Description of Unknown: LeftRegion for integrase B3582 sequence
atgtttttgaggaagggacgccaagcccggaagaaacagccgctgcagaggcggcttatgaaaagagcttaggtattgcgccgagcacggctgcatctgcttcgagtaccaccgaagacacggcctgagtcgactgaagaaataggcaatggctgagggtcccccggtgaagccaaaaaagaaaagggagggccgtccgggtggacagctctccctttttaatgcaggaaaggatgggtattgaactcatggcaaaaaat

SEQ ID NO: 16582 - DNA, 260 bp, Unknown
  Description of Unknown: LeftRegion for integrase B3583 sequence
atgcaaaaatggctatgctttatgcgtattaatatattttaacataataaaaagagccagcccctaacgaccagctccaagtgatacaatatcaccctagacaagtcatattgtatcacataatggaacatctggcaaaggctgggtgttatttttgtacccattttttaataaaatcaaatataaaggagtgatatactatggcttattgtatttatttaagaaaatccagagctgatagagagttagaactgcaaggt

SEQ ID NO: 16583 - DNA, 260 bp, Unknown
  Description of Unknown: LeftRegion for integrase B3584 sequence
agcgcaagcaaagacatgctccaatccgcatcacgacctagccgccatttttccagtgacggaaaaatagccatcaaaaaacgccccgcccatgtttccagcatggacgagacgaagtattcaattcacactctttttctttatgcggctcatcaagggattcattcaactgttatcactatttaagggggtgatccaatttgaaagccgtcatatatgcacgcttctccagccacaaccagcgcgaagaatccatcgaa

SEQ ID NO: 16584 - DNA, 260 bp, Unknown
  Description of Unknown: LeftRegion for integrase B3585 sequence
caaaaatggctatgctttatgcgtattaatatattttaacataataaaaagagccagcccctaacgaccagctccacaagtgatataaataccaccctagacaagttgtattgtatcatttctggagcatccggtcaaatgctgggtgttatttttgtacctattttttaataaaatcaaatataaaggagtgatatactatggcttattgtatttatttaagaaaatccagagctgatagagagttagaactgcaaggt

SEQ ID NO: 16585 - DNA, 260 bp, Unknown
  Description of Unknown: LeftRegion for integrase B3586 sequence
gtcggcattctcgataaacttcaagatttatcggacgtcaaaaaccttgcagccgtttacgagctcgtttcgtctttgagcgacaaggaattcagcgaaagcaataaataaaaaagaaacgaactgtcgtttcgtccgtcgatgccgacgagcattgacggctccgccgccctgtgcggtgcttataattgggtgtaattatgaaagttgtaggatattgcagattttcgtccgaaggtcaaaaggacggttattcaatc

SEQ ID NO: 16586 - DNA, 260 bp, Unknown; identical to SEQ ID NO: 16551
  Description of Unknown: LeftRegion for integrase B3587 sequence

SEQ ID NO: 16587 - DNA, 260 bp, Unknown; identical to SEQ ID NO: 16532
  Description of Unknown: LeftRegion for integrase B3588 sequence

SEQ ID NO: 16588 - DNA, 260 bp, Unknown; identical to SEQ ID NO: 16534
  Description of Unknown: LeftRegion for integrase B3589 sequence

SEQ ID NO: 16589 - DNA, 109 bp, Unknown
  Description of Unknown: LeftRegion for integrase B3590 sequence
atttgcaacaactgctatatcttacagaagcagaggtgagttttgagctatgtactacctgatgtatctgcgcaagtcgcgggcggatctggaggcggaggcgcgcggc

SEQ ID NO: 16590 - DNA, 260 bp, Unknown
  Description of Unknown: LeftRegion for integrase B3591 sequence
actaagacgctatttttacagaacattttgaaaccgccccactctaccaaagcaggacggtcacgcttccgaatgatacgaaagccctaagcaagcatattgtatcattcggagcagccaaacgcaagcggaacaaacgttccttgctggctgttatttttatacccatttttcatatatttttatgagggagtgatactatgtacgaattaactcaatcaatggaatccttaagtgtagatgaaattattgtctatctg

SEQ ID NO: 16591 - DNA, 260 bp, Unknown; identical to SEQ ID NO: 13018
  Description of Unknown: LeftRegion for integrase B3592 sequence

SEQ ID NO: 16592 - DNA, 260 bp, Unknown
  Description of Unknown: LeftRegion for integrase B3593 sequence
tatattccgataccctatggatagggtatctataccgtatccataccgtagcgatacttcgcgtgcgcgcgtgcgtgtgcgcgcgatcgtgcgcgcactatctctgtacctgtctctgtatctgagactgtatctgtaatctgttcctgattctgaagttctactactgcaaatctatcgttagaaggggggtggcgctgttgccgaaaaagactgcaaagcacccggcaaagccgaagcggggcaagaaactggaaatc

SEQ ID NO: 16593 - DNA, 260 bp, Unknown
  Description of Unknown: LeftRegion for integrase B3594 sequence
acatatttttgtcaatttaaaaccgcccctgcggaccggacaccagtcaacaacagaggcggaaacgtgctccgaagatacacgccctaagcaagtatattgtatcattcggaacagccaaacgcaagcggaacaaacgttccttgctagctgttatttttatacccatttttcatatatttttatgagggagtgatactatgtacgaattaactcaatcaatggaatccttaagtgtagacgaaattattgtctatctg

SEQ ID NO: 16594 - DNA, 260 bp, Unknown
  Description of Unknown: LeftRegion for integrase B3595 sequence
ttgggcgctttccaaaaggaaaacaaaagagatgtgtcatgtgcagaggtgggtctatcgaaaactggatatttatatctgcggtaggagagttgcgtggagtgttcggaataatggtagggcaaatttcaaaggcttatggaattgatgttgaggatgagttagcacaaatcattcccgaataattaggaggcgaatcaatgaacattgtcatttatgctcgctattccagccacagccagaccgagcaatccattgag

SEQ ID NO: 16595 - DNA, 260 bp, Unknown; identical to SEQ ID NO: 13516
  Description of Unknown: LeftRegion for integrase B3596 sequence

SEQ ID NO: 16596 - DNA, 260 bp, Unknown
  Description of Unknown: LeftRegion for integrase B3597 sequence
ccgatgaccggggaactgtaacaatccctatccaggaatctattcagctttctgaggaagaacgtattttgatttccgcatttaggagtgcttctatagaaggacgcatgagaatcatccaagtctgtatgaatgaaaaggatgcaaaaggggaaactatcattgcaggataataagcattgaagaatggaggaagaaccatgtacgaagagattaagactgcttgtctatatctgcgatattcaagcagcaaccaaact

SEQ ID NO: 16597 - DNA, 260 bp, Unknown
  Description of Unknown: LeftRegion for integrase B3598 sequence
actaagacgctatttttacagaacattttgaaaccgccccactctaccaaagcaggacggtcacgcttccgaatgatacgaaagctctaagcaagcatattgtatcattcggagcagccaaacgcaagcggaacaaacgttccttgctggctgttatttttatacccatttttcatatatttttatgagggagtgatactatgtacgaattaactcaatcaatggaatccttaagtgtagacgaaattattgtctatctg

SEQ ID NO: 16598 - DNA, 260 bp, Unknown
  Description of Unknown: LeftRegion for integrase B3599 sequence
aattaacagcataaatgaaaaccgcctctgttgacgcagagacggtttcaaatcggcaataccgaagatggtatcaaccaaccttttgaccaagatattgtatcatcttcgggcagtcatcgcaagcggaacacctgttctttgctggctgttatttttatacccttttttacatacatttacacaggaggaatgatactatgcaggaaaatatctccatcaatcaaattatcatgtatctgagaaaatccagatcagat

SEQ ID NO: 16599 - DNA, 260 bp, Unknown
  Description of Unknown: LeftRegion for integrase B3600 sequence
tgacctcatgtccttgcagtcccagctcaaaaacgagattgcctctctgcttgaccggctcatgcaagccgatatggaaatcgcttttaacgtcaagaacggcgtaacaggcgcattctccggcaagacggcaatgtgattgttgttgacttccgcccctccgtgtgaggggcttttcttttactgaggaggtgtttattttggcttactgcctttacctgcgtaaatcccgtgccgacatcgaggcggaggctcacggc

SEQ ID NO: 16600 - DNA, 260 bp, Unknown
  Description of Unknown: LeftRegion for integrase B3601 sequence
gaaggagcgtagcatgaataaagcgttattgctggcattgaacgagcacatataccttcagggattaatcagtaaagaaatgaaagagaaaattgacattgaaattctctctgaaaattagcttaaactattgagcggagatgagatagaagttataataatcttatctctgctcttccaaacagaagggagaacggggcatgaacgtttatcgcactagagaaatactgaagacttgcagtattttcgatttgaaatta

SEQ ID NO: 16601 - DNA, 260 bp, Unknown
  Description of Unknown: LeftRegion for integrase B3602 sequence
gagctggtgcgacaggtcacggatgaccctttcagcgtcaaaaaaatcattgccgatgacggcaacaccctgcactttcacttttcagacggcactgcggtcacacgcacctggacagaccgttcacgagctgaaagctggacgccggaaatgaaagaaaaggcacgacagcagtcactggcaagaaggaggcaaaaatcatgaacactgcggttcggacggttacggtgataccaccgtccatcaaccccatgacccac

SEQ ID NO: 16602 - DNA, 260 bp, Unknown; identical to SEQ ID NO: 14830
  Description of Unknown: LeftRegion for integrase B3603 sequence

SEQ ID NO: 16603 - DNA, 260 bp, Unknown
  Description of Unknown: LeftRegion for integrase B3604 sequence
acaggtcttttgattgtgtgtagtgacccggcgcaaaagaaaattgatagagccgatgccctgaatattccgattgtttcggagcagcaatggtttgaacttatgccggaacttgaggccgttggaatatggaacggaaagcaaattctgtttgcggacaatgatggcatctaccgtgttgaagtgggcggtgaaagctgatggccagaaaaaagaatattgctgctggcctcgatgccgtcatctatgcccggtactca

SEQ ID NO: 16604 - DNA, 260 bp, Unknown
  Description of Unknown: LeftRegion for integrase B3605 sequence
aggtgacgatgatagggaatactgaaatatacataataaacaatgataaatatatagtagaagttcaatttggcgatgaagaattggaaaatattattgcagatataattgaaaaacaaaacctatacagttgacaaccaagtattatcgtgttacaattaataagttgtaacacgattttttattgttaggagaaatatatgatttataatgccgctttatattgccgtttgtcaaaagatgataataatgttggcgat

SEQ ID NO: 16605 - DNA, 260 bp, Unknown
  Description of Unknown: LeftRegion for integrase B3606 sequence
ttcaacgagcagatttttataaacaaggtttcccaaatacgcatccttgataacaaccgagtgcagttccttctttccaatggcaaaaccgaagaacgcacttggaaagaccgctcaaggtcggaaagctggacggacgaaatgaaggaaaccgcacggcaaagaacactgcaacgctacgcatcgaaagaggtggaatgatggcaagagaagtaagagtaatccctgcaagtgtacacaaatttacgaccgttcctttc

SEQ ID NO: 16606 - DNA, 260 bp, Unknown
  Description of Unknown: LeftRegion for integrase B3607 sequence
cgcaacattatggcgattcttgaagctcgaagccgtgagatcatcgccaaatggaccgcttattttggccaggcgcatttctactgctaaacaaaaaacgcccgccgggcgcatcggtgggcatgggaagatagcgtattcagccgatattcagtattatggcacaatactacctttccgtaaatacaagggaggctcttatggcaaaaaagaaaaagtcccttgggggcaacgccatcgtctatgcccgctattcgtcc

SEQ ID NO: 16607 - DNA, 260 bp, Unknown
  Description of Unknown: LeftRegion for integrase B3608 sequence
cagcattactgtttaattttaaaaattcatcaaatatcaccagcattccctcctacaaacattatattgtaaaagagcaattatgtaaaggaaaatactacttgagtttccgcatttttatccacgaccacattattttctattgacagtcacaaataaaagatataaattgtacatatactacaaatgggggtacgtttatggatgcgattgactctactaaatcttatgcgatgtatttaagaaaatcacgaaaagat

SEQ ID NO: 16608 - DNA, 260 bp, Unknown
  Description of Unknown: LeftRegion for integrase B3609 sequence
agattttttcgataccattaactaaataaaaaaccgccccactctaccaaagcaggacggtcacgcttccgaatgatacgaaagccctaagcaagcatattgtatcattcggagcagccaagcgcaagcggaacaaatgttccttgctggctgttatttttatacccatttttcatatatttttatgagggagtgatactatgtacgaattaactcaatcaatggaatccttaaatgtagacgaaattattgtctatctg

SEQ ID NO: 16609 - DNA, 260 bp, Unknown
  Description of Unknown: LeftRegion for integrase B3610 sequence
ctatgcaaagcactcagcgacaatgcttgtctttcactggcggttctcctcgctccgctggccttgacagtaatgctaaccatcatcataattaaaagataaagcaaaaaagccccgccttttggcggggcaaaaaaagagcctttgatagaacaaatgttttcttatcgttaatcatatgattaattggaggtgacgatatgcccgaacaatactgcttatatctccgtaaatcgagagcggatatggatgcagagaaa

SEQ ID NO: 16610 - DNA, 260 bp, Unknown
  Description of Unknown: LeftRegion for integrase B3611 sequence
tgacctcatggccttgcagtcccagctcaaaaatgagattgcctctctgcttgaccggctcatgcaagccgatatggaaatcgcttttaacgtcaagaacggcgtaaccggcgtattctccggcaagacggcaatgtgattgttgttgacttccgcccctccgtgtgaggggcttttattttaccgaggaggtgtttattttggcttactgcctttacctgcgtaaatcccgtgccgacatcgaggcggaggctcacggc

SEQ ID NO: 16611 - DNA, 260 bp, Unknown
  Description of Unknown: LeftRegion for integrase B3612 sequence
ggatatacacaagttacggaaaaattctacaccacaaaatcagggaaactgtttgtgcgtctcagaaatagcaatgatgttgaatcgattctcgacactttgaataaagctaataatattgttttcgctgtttctttcgcgctgaccattatttcaattatagcaagtataatttattcttttatgcattgaggggttttatgaaagcagtcatctacgcccggtactcgccgggccccaaccagaaggataagagcgtt

SEQ ID NO: 16612 - DNA, 260 bp, Unknown
  Description of Unknown: LeftRegion for integrase B3613 sequence
ccgatgaccggggaactgtaacaatccctattcaggaatctattcagctttctgaggaagaacgtattttgatttccgcatttaggagtgcttctatagaaggacgcatgagaattatccaagtctgtatgaatgaaaaggatgcaaaaggggaaactatcattgcaggataataagcattgaagaatggaggaagaaccatgtacgaagagattaagactgcctgtctatatctgcgatattcaagcagcaaccaaact

SEQ ID NO: 16613 - DNA, 260 bp, Unknown; identical to SEQ ID NO: 13341
  Description of Unknown: LeftRegion for integrase B3614 sequence

SEQ ID NO: 16614 - DNA, 260 bp, Unknown; identical to SEQ ID NO: 14039
  Description of Unknown: LeftRegion for integrase B3615 sequence

SEQ ID NO: 16615 - DNA, 260 bp, Unknown
  Description of Unknown: LeftRegion for integrase B3616 sequence
acatatttttgtcaatttaaaaccgcccctgcggaccggataccagccaacaacagaggcggaaacgtgctccgaagatacacgccctaagcaagcatattgtatcattcggagcagccaaacgcaagcggaacaaatgttccttgctggctgttatttttatacccatttttcatatatttttatgagggagtgatactatgtacgaattaactcaatcaatggaatccttaagtgtagacgaaattattgtctatctg

SEQ ID NO: 16616 - DNA, 260 bp, Unknown
  Description of Unknown: LeftRegion for integrase B3617 sequence
atttgcgtatgtgcgaggacgttttgatgtataataaacgctttgcgtttattataccacagaaccaaatcttttacaacggtaaacagtatcaaatttgcagcttttacgctttagcgtcttgaattttatttgagaatagtgtataatataaagtgcaaatattccgattctgtctgctgaaagaaaggacggttattatgaacatacagcagaacaggattacagcgctttattgcaggctcagccgagatgatgat

SEQ ID NO: 16617 - DNA, 260 bp, Unknown; identical to SEQ ID NO: 13967
  Description of Unknown: LeftRegion for integrase B3618 sequence

SEQ ID NO: 16618 - DNA, 260 bp, Unknown
  Description of Unknown: LeftRegion for integrase B3619 sequence
acaggtcttttgattgtgtgtagtgacccggcgcaaaagaaaattgacagagccgatgacttgaatattccaatcatttcagagcagcaatggtatgaactcatgccagaacttgaagccgttggaatgtggaacggaaagcaaattctgtttacggataatgatggcatctaccgtgttgaagtgggcggtgaaagctgatggccagaaaaaagaatattgctgccggcctcgatgccgtcatctatgcccggtactca

SEQ ID NO: 16619 - DNA, 260 bp, Unknown
  Description of Unknown: LeftRegion for integrase B3620 sequence
gcatctgatcccctatggatagggtatctataccgtatccatagggtagtgatacctcgcgtgcgcgtgcgcgggtgcgcgagatcgggcgcgcactgttactgtctctgtatctgtaactggtactgtatctgtaaactgttatctgtttctgtatttctatcttaggaaatctatcgttagaagaaggaggtggcgctgtgcctaaaaaacctacaaagcacccggccaagccgaaacggggcaagaagctggaaacc

SEQ ID NO: 16620 - DNA, 260 bp, Unknown
  Description of Unknown: LeftRegion for integrase B3621 sequence
ttaaccgggaactacgaagctaccgtctactacaaggctggtggcaccgacatcatcacttgggagccggttcccaagaaaagctacccacatacagaagaatacaaagagcttatgcgagagcgtatgaacgaatactggacagacgagcgcaaagctgaaatgagtacaagagtaaaaaagttaaggagtgagaaacattggtcgtccaaaagaaagtaaccaccataccggcatcgctgacccgctttacagcgacg

SEQ ID NO: 16621 - DNA, 260 bp, Unknown
  Description of Unknown: LeftRegion for integrase B3622 sequence
gtctgacctcatggccttgcagtcccagctcaaaaacgagattgcctctctgcttgaccggctcatgcaagccgatatggaaattgcttttaacgtcaagaacggcgtaacaggcgagttctccggcaagacagcaatgtaatcgttgttgatttccgcccctctgtatgaggggcttttttactgaggaggtgtttattttggcttactgcctttacttgcgtaaatcccgtgccgacatcgaggcggaggctcacggc

SEQ ID NO: 16622 - DNA, 260 bp, Unknown
  Description of Unknown: LeftRegion for integrase B3623 sequence
gatggaagaggtgtttgatgcgagggtccaccgcattgaggaaagatactcgcgtatgctcaaaatgcaaaacaggtggcttcggtttacggttatcttgtgtctttgccttaccgtgtttatcatcgtcatgctgttgtatgatgttgcgcatccggacatcggatggatacgagatcatcttaattagggagaaaaaaatggaaagtacagcgcttgcagatgttgtcgtttatgccagatatagctccgcagggcaa

SEQ ID NO: 16623 - DNA, 260 bp, Unknown; identical to SEQ ID NO: 15161
  Description of Unknown: LeftRegion for integrase B3624 sequence

SEQ ID NO: 16624 - DNA, 260 bp, Unknown
  Description of Unknown: LeftRegion for integrase B3625 sequence
gcgtcgctttgcagagttttacggcgtggggcttgattatttcggtgtatcaacagaaaatgaaagttttgaattgttaagccgtgctaaaaatatttttctcaacaaagacattccaaaagaagaacgagaacggctttataaagaagtaatgaaaatgtatcttgaaatgcctgaataaacatcaaaggagcaacataatggggaaattcatcaagaataaagcagatataaaaagggtggtagcatacgcccgattt

SEQ ID NO: 16625 - DNA, 260 bp, Unknown; identical to SEQ ID NO: 13967
  Description of Unknown: LeftRegion for integrase B3626 sequence

SEQ ID NO: 16626 - DNA, 260 bp, Unknown
  Description of Unknown: LeftRegion for integrase B3627 sequence
acaggtcttttgattgtgtgtagtgatacagcgcaaaagaaaattgacagagccgatgccttgaatattccaatcatttcagagcagcaatggtatgaactcatgccagaacttgaagccgttggaatgtggaacggaaagcaaattctgtttgcggacaatgatggcatctaccgtgttgaagtggacggtgaaagctgatggccagaaaaaagaatattgctgctggcctcgatgccgtcatctatgcccggtactcg

SEQ ID NO: 16627 - DNA, 260 bp, Unknown
  Description of Unknown: LeftRegion for integrase B3628 sequence
acatatttttgtcaatttaaaaccgcccctgcggaccggacaccagtcaacaacagaggcggaaacgtgctccgtagatacacgccctaagcaagcatattgtatcattcggagcagccaaacgcaagcggaacaaacgttccttgctggctgttatttttatacccatttttcatatatttttatgagggagtgatactatgtacgaattaactcaatcaatggaatccataagtgtagatgaaattattgtctatctg

SEQ ID NO: 16628 - DNA, 260 bp, Unknown
  Description of Unknown: LeftRegion for integrase B3629 sequence
acatatttttgtcaatttaaaaccgcccctgcggaccggacaccagtcaacaacagaggcggaaacgtgctccgtagatacacgccataagcaagcatattgtatcattcggagcagccaaacgcaagcggaacaaatgttccttgctggctgttatttttatacccatttttcatatatttttatgagggagtgatactatgtacgaattaactcaatcaatggaatccttaagtgtagacgaaattattgtctatctg

SEQ ID NO: 16629 - DNA, 260 bp, Unknown
  Description of Unknown: LeftRegion for integrase B3630 sequence
caagacggtgacaaattgtcaccaactaaaaatgcccccggcactgcaaataccagaggcgcacgcttccgaatgatacgaaagccctaagcaagcatattgtatcattcggagcagccaaacgcaagcggaacaaacgttccttactggctgttatttttatacctatttttcatatatttttatgagggagtgatactatgtacgaattaactcaatcaatggaatccttaagtgtagacgaaatcattgtctatctt

SEQ ID NO: 16630 - DNA, 260 bp, Unknown
  Description of Unknown: LeftRegion for integrase B3631 sequence
agattttttcaataccattaactaaataaaaaaccgccccactctaccaaagcaggacggtcacgcttccgaatgatacgaaagccctaagcaagcatattgtatcattcggagcagccaaacgcaagcggaacaaacgttccttgctggctgttatttttatacccatttttcatatatttttatgagggagtgatactatgtacgaattaactcaatcaatggaatccttaagtgtagatgaaattattgtctatctg

SEQ ID NO: 16631 - DNA, 260 bp, Unknown; identical to SEQ ID NO: 16610
  Description of Unknown: LeftRegion for integrase B3632 sequence

SEQ ID NO: 16632 - DNA, 260 bp, Unknown; identical to SEQ ID NO: 16598
  Description of Unknown: LeftRegion for integrase B3633 sequence

SEQ ID NO: 16633 - DNA, 260 bp, Unknown
  Description of Unknown: LeftRegion for integrase B3634 sequence
acatatttttgtcaatttaaaaccgcccctgtggaccggacaccagtcaacaacagaggcggaaacgtgctccgtagatacacgccataagcaagcatattgtatcattcggagcagccaaacgcaagcggaacaaatgttccttgctggctgttatttttatacccatttttcatatatttttatgggggagtgatactatgtacgaattaactcaatcaatggaatccttaagtgtagacgaaattattgtctatctg

SEQ ID NO: 16634 - DNA, 260 bp, Unknown
  Description of Unknown: LeftRegion for integrase B3635 sequence
cagtcggaaggcttatactgtcactacgacaggcataccatatcggccgcatttccacaatgcgcagaaatcggtcgcgtgtccgggaaacgggattttcgacaaagttcttttggattttcttcccattttctgggcaatcctgctcggaaatgcttgtatatcaacgttttgacaaaaaccaaaaaccggaaaggggaatggaaatgcgcgaaaccatgaaagctgtaatttacgctcgatattcgtcggaaaagcag

SEQ ID NO: 16635 - DNA, 260 bp, Unknown
  Description of Unknown: LeftRegion for integrase B3636 sequence
tgacctcatggccttacagtcccagctcaaaaatgagattgcctctctgcttgaccggctcatgcaagccgatatggaaatcgcttttaacgtcaagaacggcgtaaccggcgcattctccggcaagacggcaatgtgattgttgttgacttccgcccctccatgtgaggggcttttcttttaccgaggaggtgtttattttggctcactgcctttacctgcgtaaatcccgtgctgacatcgaggcggaggctcacggc

SEQ ID NO: 16636 - DNA, 260 bp, Unknown
  Description of Unknown: LeftRegion for integrase B3637 sequence
atgcaaagcactcagcgacaatgcttgtcttttactggcggttctcctcgcttcgctggtcttgacagtaatgctaaccatcatcataattaaaagataaaacaaaaagccccgccttttggcggggcaaaaaaagagctttaaacagaacaaatgtttctgtggttttaatcatacaaattaattgtgggggtgaaataatgcctgaacaatactgcttatatctccgcaaatcaagggcggacatggatgccgaaaaa

SEQ ID NO: 16637 - DNA, 260 bp, Unknown
  Description of Unknown: LeftRegion for integrase B3638 sequence
gcatattttaagaaaacgtgaaatccgtgtaattcgcgcctataatatcaatatattgttaagaaaacacgtataacttattattaatattgaaattgaaatgaagattgtagttttagacggcttaggaacataatcgcaatttgctattttgattcttaattactatatttacataatcaattaaaatacaatgtattatggaagatatagtagtttatttacgtgtttctactgaagaacaagattataataggcaa

SEQ ID NO: 16638 - DNA, 260 bp, Unknown
  Description of Unknown: LeftRegion for integrase B3639 sequence
tgacctcatggccttgcagtcccagctcaaaaacgagattgcctctctgcttgaccggctcatgcaagccgatatggaaatcgcttttaacgtcaagaacggcgtaacaggcgcattctccggcaagacggcaatgtgattgttgttgacttccgcccctccgtgtgaggggcttttcttttactgaggaggtgtttattttggcttactgcctttacctgcgtaaatcccgtgccgacatcgaggcggaggctcacggt

SEQ ID NO: 16639 - DNA, 260 bp, Unknown
  Description of Unknown: LeftRegion for integrase B3640 sequence
tgatgttctagctaaaatgtcatgctattttaatgcgccgattgaatgcctattaggactgcccgaaaagaacgaccaccagaacacggtatcagctctgtttaatgctctggatagcgaaaatcaaaaatccgtgttactatacatggagtttgcactgtccaaacaaaaagcccgcacactggcgggcgggtgatggtatgaaaaaagagaacgaaatccgggcagttgtctatgcccggtactcatcccattcgcaa

SEQ ID NO: 16640 - DNA, 260 bp, Unknown
  Description of Unknown: LeftRegion for integrase B3641 sequence
acatatttttgtcaatttaaaaccgcccctgcggaccggataccagccaacaacagaggcggaaacgtgctccgaagatacacgccctaagcaagcatattgtatcattcggagcagccaaacgcaagcggaacaaatgttccttgctggctgttatttttatacccatttttcatatatttttatgagggagtgatactatgtacgaattaactcaatcaatggaatccttaagtgtagacgaaatcattgtctatctg

SEQ ID NO: 16641 - DNA, 260 bp, Unknown
  Description of Unknown: LeftRegion for integrase B3642 sequence
accttatgggtctaagtgaacttagaacccccggtatggtattgacagaggaagaacttctactgctcaacacctatcgcaattccagcacccagggacgcttccgtattattcaggtctgtatgaatgaaatggataccactggaaaaggggcaaccgtaaatgccggataattgacttgaatgagtggaggaagaaccatgtatgaagaaatcaaagaagtagcgctgtatgtacgctattccagtgccaaccagaca

SEQ ID NO: 16642 - DNA, 260 bp, Unknown; identical to SEQ ID NO: 13005
  Description of Unknown: LeftRegion for integrase B3643 sequence

SEQ ID NO: 16643 - DNA, 260 bp, Unknown
  Description of Unknown: LeftRegion for integrase B3644 sequence
acatatttttgtcaatttaaaaccgcccctgcggaccggacaccagtcaacaacagaggcggaaacgtgctccgtagatacacgccataagcaagcatattatatcattcggagcagccaaacgcaagcggaacaaacgttccttgctggctgttatttttatacccatttttcatatatttttatgagggagtgatactatgtacgaattaactcaatcaatggaatccttaagtgtagatgaaattattgtctatctg

SEQ ID NO: 16644 - DNA, 260 bp, Unknown
  Description of Unknown: LeftRegion for integrase B3645 sequence
ctgaatcttgacgagtttgacaatgaagtatttcaggacgagatcgaatatatctctgtaccaaaaccgaatgtgttaacctttatcttcaaaactggtgagaagcgcacagtccactggcttgaccactcacgcacagaagcgtggacacctgaaatgcggaaaaaagccgctgagcatagcaagaaaagaggtaagaaatgtcaagagtaacagttattccggcaaaacttgatagggctacattcatgccgctggat

SEQ ID NO: 16645 - DNA, 260 bp, Unknown
  Description of Unknown: LeftRegion for integrase B3646 sequence
agattttttcgataccattaactaaataaaaaaccgccccactctaccaaagcaggacggtcacgcttccgaatgatacgaaagccctaagcaagcatattgtatcattcggagcagccaaacgcaagcggaacaaacgttccttgttggctgttatttttatacccatttttcatatatttttattagggagtgatactatgtacgaattaactcaatcaatggaatccttaagtgtagacgaaattattgtctatctg

SEQ ID NO: 16646 - DNA, 260 bp, Unknown
  Description of Unknown: LeftRegion for integrase B3647 sequence
ctgactatcttctgggtctaagtaaagttagattttcacaagatgaactttcggaagaagaattgcttttactcaatgcctacagaactgccactgtgcagggacgattccacattatccaagtctgtatgaatgaaaaggatgcaaaaggggaaactatcattgcaggataataagcattgaagaatggaggaagaaccatgtacgaagagattaagactgcctgtctatatctgcgatattcaagtagcaaccaaacc

SEQ ID NO: 16647 - DNA, 260 bp, Unknown
  Description of Unknown: LeftRegion for integrase B3648 sequence
ctgactatcttctcggtctaagtaaagttagattttcacaggacgaactttcggaagaagaattgcttttactcaacgcttatagaactgccagtgtacagggacgattccatattatccaagtctgtatgaacgaaaaggattcaaaaggggaaactatcattgcaggataataagcattgaggaatggaggaagaaccatgtacgaagagattaagactgcttgtctatatctacgatattcaagtagcaaccaaact

SEQ ID NO: 16648 - DNA, 260 bp, Unknown
  Description of Unknown: LeftRegion for integrase B3649 sequence
ttttgtaatatggttgtaaaataaccgtaatacaaataaaggaagtgtacatatatgaataaatcaaacaatgacgaatattctgaaatggtaaagctatttaaccaacttaccgttgaagaagctgaacttgtactgatttttataagaaatcttcgtcaaaaccgtaaaaccgatgaaaagcgaaaggatgactgattatgcaatattgtttatatctaagaaaatctcgtgccgacagtgaagcagaagcacgaggt

SEQ ID NO: 16649 - DNA, 260 bp, Unknown; identical to SEQ ID NO: 16187
  Description of Unknown: LeftRegion for integrase B3650 sequence

SEQ ID NO: 16650 - DNA, 260 bp, Unknown
  Description of Unknown: LeftRegion for integrase B3651 sequence
attttgtaatgtagttgtaaaataactgtaatacaaataaaggagtgtacatatatgaataaatcaaacaatgacgaatattctgaaatggtaaagctatttaaccaacttaccgttgaagaagctgaacttgtactgatttttataagaaatcttcgtcaaaaccgaaaaaacgatgaaaagcgaaaggatgactgattatgcaatattgtttatatctaagaaaatctcgtgccgacagcgaggcagaagctcgaggt

SEQ ID NO: 16651 - DNA, 260 bp, Unknown; identical to SEQ ID NO: 16650
  Description of Unknown: LeftRegion for integrase B3652 sequence

SEQ ID NO: 16652 - DNA, 260 bp, Unknown
  Description of Unknown: LeftRegion for integrase B3653 sequence
taaaataaaagctcctgtgctggtaacacaagagcttttacacgatacttacatcaagcaatgctacaatgatataataccgccataatcaagccatattatatcatctgtaacaccgctttgacaagtaggtgttatttttatacccatttttaggcttgtatcggcacagcctgcatatatttaacagaaaggattagatgataaatatggtatcttttgacaatattattatatatcttagaaaatcacgctcagac

SEQ ID NO: 16653 - DNA, 260 bp, Unknown
  Description of Unknown: LeftRegion for integrase B3654 sequence
aacctattcttcttttgtgttccattgtcggatgcattgccgctttctacttctgctttataaggtaactgcaaaaaataccttccctgcacccccttcgggtgcttttttatttggaaattttctgtgttcgcttttttctcccctcgttctgtgctatcatgcaggcaagggaaaaatcatgagaaaggagaaaacctatgccgtattgcatttatttgagaaaatcaagagcagatgcagaggcagaattggcaggc

SEQ ID NO: 16654 - DNA, 260 bp, Unknown
  Description of Unknown: LeftRegion for integrase B3655 sequence
ttttgtaatatagttgtaaaataactgtaatgcaaataaaggaagtgtacatatatgaataaatcaaacaatgacgaatattctgaaatggtaaagctatttaaccaacttaccgttgaagaagctgaacttgtactgatttttataagaaatcttcgtcaaaaccgtaaaaccgatgaaaagcgaaaggatgactgattatgcaatattgtttatatctaagaaaatctcgtgccgacagtgaagcagaagcactaggt

SEQ ID NO: 16655 - DNA, 260 bp, Unknown
  Description of Unknown: LeftRegion for integrase B3656 sequence
agccttcgaccgaggccttataactatcactccttccatgaaaatctatgtttctccgataattttggatagccctcaggacgcttttacagcccgctggctggcttctcttgacggaatggttttcccccccccccccgatttccgccgcgtagagagcttctggagtaccataacgacgaaatttttaggagggtcacatgaatacagtaatttatgctcggtattctgccggcccgagacagaccgaccagagtatc

SEQ ID NO: 16656 - DNA, 260 bp, Unknown
  Description of Unknown: LeftRegion for integrase B3657 sequence
acctgtttttcttttgtgttccattgtcggatgcattgccgctttctacttcctctttttaaggtaactgcaaaaaataccttcccagcactcccttcgggtgcttttttttattgcaaattccccttgttcgcttttctcctctgccattctgtgctatcatgcaggcaaggggaaaatcatgagaaaggagtaaacctatgccgtattgcatttatttgagaaaatcaagagcagatgcagaggcagaattggcaggc

SEQ ID NO: 16657 - DNA, 260 bp, Unknown
  Description of Unknown: LeftRegion for integrase B3658 sequence
cctgtacgagcgtgccggagtgccggagtattggattgtcagccccgaggagcgcaccgtacaggtcagcaccctggtggatggccgctaccgtgtccaggagctctacaccgctgaggccgtggccaaggtcaacaccctgtctggctgctttatcgagctgtccaaggtgttcccggcagagcagtgagggccgccctatggacgaatattgcctgtatctccgtaaatcccgtatagacctggaggccgaggccaac

SEQ ID NO: 16658 - DNA, 260 bp, Unknown; identical to SEQ ID NO: 16654
  Description of Unknown: LeftRegion for integrase B3659 sequence

SEQ ID NO: 16659 - DNA, 260 bp, Unknown
  Description of Unknown: LeftRegion for integrase B3660 sequence
taccgcagaaataattaagagcaaggtggaccacattgatgtcctcaaaggtaacagactggtttttcatttgaagaacggttcgaccatcgaagaaacatggaagagcctatcaagaaaagacaactggacaccagaaatgaaagaaaaggctcgtcaaagggcgatagcgcaatatcgaagaaaggaaggcaagcacaatggctaaggttaccatcatcccatcgaaaataaacccaataacgcttactcccgttggg

SEQ ID NO: 16660 - DNA, 260 bp, Unknown
  Description of Unknown: LeftRegion for integrase B3661 sequence
tcgcgccctcggcattctgctgattgcgcttggcgttctcctgctggtgcttgggcttctatcatgggcgtgggcgattcttggtgcgctgagtgccgtcggcggggtgctgctgcttaaaaatgcaaaattgatttctgaacgcgggaacgctgctgctttggctgcggctcgaaacgtggccgaggcaaggatggaagatgaagaagaagccgattgaacctgaaatgcaggatgccgtgatctacactcggtactcg

SEQ ID NO: 16661 - DNA, 260 bp, Unknown
  Description of Unknown: LeftRegion for integrase B3662 sequence
aagctggcgattgccgatgtggcgaagtacaaggataagctgatagcgacgactagacgggttgtcggagcgtaaaagaataagcccgtcgctcttttgggcggcgggttttataattaaatgcgtatttacgcaattcatcatataggtgggactaacgtgaaagcctataagcagaaattacgggagggggtaaacctatggcacgtaagaagaaattcgcgccgaacgacaacaaccttgcgatagcgtactatcgc

SEQ ID NO: 16662 - DNA, 260 bp, Unknown; identical to SEQ ID NO: 16656
  Description of Unknown: LeftRegion for integrase B3663 sequence

SEQ ID NO: 16663 - DNA, 260 bp, Unknown; identical to SEQ ID NO: 15474
  Description of Unknown: LeftRegion for integrase B3664 sequence

SEQ ID NO: 16664 - DNA, 260 bp, Unknown
  Description of Unknown: LeftRegion for integrase B3665 sequence
ttttgtaatatggttgtaaaataactgtaatacaaataaaggaagtgtacatatatgaataaatcaaacaatgacgaatattctgaaatggtaaagctatttaaccaacttactgttgaagaagctgaacttgtactgatttttataagaaatcttcgtcaaaaccgtaaaaccgatgaaaagcgaaaggatgactgattatgcaatattgtttatatctaagaaaatctcgtgccgacagtgaagcagaagcacgaggt

SEQ ID NO: 16665 - DNA, 260 bp, Unknown; identical to SEQ ID NO: 14792
  Description of Unknown: LeftRegion for integrase B3666 sequence

SEQ ID NO: 16666 - DNA, 260 bp, Unknown
  Description of Unknown: LeftRegion for integrase B3667 sequence
gccgatcagcattctcaggatatactcatcacaaggaggaagtcccatgtaggattcatccatcggcaacacacatgcacaaattgtcgatcttccgaatgtccgcttattttttgcgccggcatccaatccgcaggttgagaaagaggttctcaccatgtagcttcgcgataccgccgcgcccgaaggaggaaacgacaatgaaacgggttctgtgtctctacagagtgtccacgataggacaggttgatcatgacgac

SEQ ID NO: 16667 - DNA, 260 bp, Unknown; identical to SEQ ID NO: 16654
  Description of Unknown: LeftRegion for integrase B3668 sequence

SEQ ID NO: 16668 - DNA, 260 bp, Unknown; identical to SEQ ID NO: 16654
  Description of Unknown: LeftRegion for integrase B3669 sequence

SEQ ID NO: 16669 - DNA, 260 bp, Unknown; identical to SEQ ID NO: 16664
  Description of Unknown: LeftRegion for integrase B3670 sequence

SEQ ID NO: 16670 - DNA, 260 bp, Unknown
  Description of Unknown: LeftRegion for integrase B3671 sequence
atatgatttttggctccatttaaattgttttgttaataaaaaaaatcccgcatcctgctgaccaggacacgggacgcgcggcagtattgcagtactgctggcaagtgtaaatcatctaaaaagatacttggatttagggtgattcacggtatcattatatcatgaatcagccccattcgcctacgaaaggactgatttttatgtcaacaaatgctgttatctacgcccgtttttcctctgacaaacaaagagaagaatcc

SEQ ID NO: 16671 - DNA, 260 bp, Unknown
  Description of Unknown: LeftRegion for integrase B3672 sequence
tcggcaacggagatggttttccatttcaaggacggcaggacggtcagccgcacatgggagcagccgaaacgagtcggcagaccttggacggacgaacagagagccaagttcaaggaatccatcaaaggcaggtacacgccggaggtacggcagcggatgagtgaacacatgaagcagctacggaaggagcgtgggaaagcatggcgcaaagaaaagtaacggcgatcccggctaccatcagcaggtacacagccacgccg

SEQ ID NO: 16672 - DNA, 260 bp, Unknown
  Description of Unknown: LeftRegion for integrase B3673 sequence
taaaataaaagctcctgtgctggtaacacaagagcttttacacgatacttacatcaagcaatgctacaatgatataataccgccataatcaagccatattatatcatctgtaacaccgctttgacaagtaggtgttatttttatacccatttttaggcttgtatcggcacagcctgcatatatttaacagaaaggattagatgataaatatggtatcttttgacaatattattatatatctcagaaaatcacgctcagac

SEQ ID NO: 16673 - DNA, 260 bp, Unknown
  Description of Unknown: LeftRegion for integrase B3674 sequence
attatttattctgtttatctgattcaccatacccaaaagtagagatttccctaacggaagaagagcaattactgcttgacgcattccgttccgctaccccacaaggtagattcaacattattactacctgtatgtgtgagaagcgaaaaggggacaacgaaagtgccgggtgattgattttgtagagtggaggaagaaccatgtatgaggatataaaaacagcctgcctatacgttagattctcaagccataaccagact

SEQ ID NO: 16674 - DNA, 260 bp, Unknown
  Description of Unknown: LeftRegion for integrase B3675 sequence
ttttgtaatatagttgtaaaataactgtaatgcaaataaaggaagtgtacatatatgaataaatcaaacaatgacgaatattctgaaatggtaaagctatttaaccaacttactgttgaagaagctgaacttgtactgatttttataagaaatcttcgtcaaaaccgaaaaaacgatgaaaagcgaaaggatgactgattatgcaatattgtttatatctaagaaaatctcgtgccgacagcgaggcagaagctcgaggt

SEQ ID NO: 16675 - DNA, 260 bp, Unknown; identical to SEQ ID NO: 16654
  Description of Unknown: LeftRegion for integrase B3676 sequence

SEQ ID NO: 16676 - DNA, 260 bp, Unknown
  Description of Unknown: LeftRegion for integrase B3677 sequence
attttgtaatatagttgtaaaataactgtaatacaaataaaggagtgcacatatatgaataaatcaaacaatgacgaatattctgaaatggtaaagctatttaaccaacttactgttaaagaagctgaacttgtactgatttttataagaaatcttcgtcaaaaccgtaaaaccgataaaaagcgaaaggatgactgattatgcaatattgtttatatctaagaaaatctcgtgccgacagtgaggcagaagcacgaggt

SEQ ID NO: 16677 - DNA, 260 bp, Unknown
  Description of Unknown: LeftRegion for integrase B3678 sequence
ttttgtaatatggttgtaaaataactgtaatacaaataaaggaagtgtacatatatgaataaatcaaacaatgacgaatattctgaaatggtaaagctatttaaccaacttaccgttgaagaagctgaacttgtactgatttttataagaaatcttcgtcaaaaccgtaaaaccgatgaaaagtgaaaggatgactgattatgcaatattgtttatatctaagaaaatctcgtgccgacagcgaggcagaagcacgaggt

SEQ ID NO: 16678 - DNA, 260 bp, Unknown; identical to SEQ ID NO: 16654
  Description of Unknown: LeftRegion for integrase B3679 sequence

SEQ ID NO: 16679 - DNA, 260 bp, Unknown
  Description of Unknown: LeftRegion for integrase B3680 sequence
gccttcgaccgaggccttataactatcactccttccatgaaaatctatgtttctccaataattttggatagccctcaggacgcttttacagcccgctggctggcttctcttgacggaatggttttacccccccccccccgatttccgccgcgtagagagcttctggagtaccataacgacgaaatttttaggagggtcacatgaatacagtaatttatgctcggtattctgccggcccgagacagaccgaccagagtatc

SEQ ID NO: 16680 - DNA, 260 bp, Unknown
  Description of Unknown: LeftRegion for integrase B3681 sequence
taaaataaaagcccctgtgttactaacacaagagcttttacacgatacttacatcaagcaatgctacaatgatataataccgccatagacaagctatattatatcatctgtaacaccactttgacaagtaggtgttatttttatacccatttttaggcttgcatcggcacagcctgcatatattaaacggaaaggattagatgataaatatggtatcttttgacaatattattatatatcttagaaagtcacgctcggac

SEQ ID NO: 16681 - DNA, 260 bp, Unknown
  Description of Unknown: LeftRegion for integrase B3682 sequence
gccttcgaccgaggccttataactatcactccttccatgaaaatctatgtttctccgataattttggatagccctcaggacgcttttgctgcccgggggctggcttctgttgagggaatggttttccccccccccccccgatttccgccgcgtagagagcttctggagtaccataacgacgaaatttttaggagggtcacatgaatacagtaatttatgctcggtattctgccggcccgagacagaccgaccagagtatc

SEQ ID NO: 16682 - DNA, 260 bp, Unknown
  Description of Unknown: LeftRegion for integrase B3683 sequence
ttttggggctgaaccagatttcatggttggcgccttcgcgtacaatataacaaccatttttcttaagtagttttttcagttcgctgtacctcatgttcctcacctcttgattatattatagcacgtattaatacgtgtgtcaacactttttagaaaaattatacgtatttttacgtataaagagaaaggtggttattagtatgaatacaactaacgctgttatatatgctcggtattcgtccgataagcaaaccgagcaa

SEQ ID NO: 16683 - DNA, 260 bp, Unknown; identical to SEQ ID NO: 16657
  Description of Unknown: LeftRegion for integrase B3684 sequence

SEQ ID NO: 16684 - DNA, 260 bp, Unknown; identical to SEQ ID NO: 16677
  Description of Unknown: LeftRegion for integrase B3685 sequence

SEQ ID NO: 16685 - DNA, 260 bp, Unknown
  Description of Unknown: LeftRegion for integrase B3686 sequence
tgcgggtctgtgcatcttcctggccctggtatttgtggcgtatctgtttgtggatgtgtcggacgctgaccatggctttatccggaataatcaggtttcccctacattgatcatcttgatattggcaatcgtagtgacggcccttggcacggcccatagtatcgcaaaaagaaaagcaacaatgaaaaggaatggtaaacatgacagcaactgacgaaatgatagaaaaggcttgtaataagtacaaaaagacacggtat

SEQ ID NO: 16686 - DNA, 260 bp, Unknown; identical to SEQ ID NO: 15409
  Description of Unknown: LeftRegion for integrase B3687 sequence

SEQ ID NO: 16687 - DNA, 260 bp, Unknown
  Description of Unknown: LeftRegion for integrase B3688 sequence
taaaacaaaagctcctgtgctggtaacacaagagcttttacacgatacttacatcaagcaatgctacaatgatataataccgccctaatcaagccatattatatcatctgtaacaccactttgacaagcaggtgttatttttatacccatttttaggcttgcatcggcacagcctgcatatatttaacagaaaggattagatgataaatatggtatcttttgacaatattattatatatcttagaaagtcacgctcggac

SEQ ID NO: 16688 - DNA, 260 bp, Unknown; identical to SEQ ID NO: 15631
  Description of Unknown: LeftRegion for integrase B3689 sequence

SEQ ID NO: 16689 - DNA, 260 bp, Unknown
  Description of Unknown: LeftRegion for integrase B3690 sequence
attatcttttctgtttatctgattcaccttgcccgaaagtagagatttccctaacagaagaagagcaattactgcttgacgcatttcgttccgctaccccacaaggtagattcaacattattactacctgtatgtgtgagaagcgaaaaggggacaacgaaaatgtcgggtaattgatttcatagaatggaggaaaaaccatgtatgaggatataaaaacagcctgcctatacgttagattctcaagccataaccagact

SEQ ID NO: 16690 - DNA, 260 bp, Unknown
  Description of Unknown: LeftRegion for integrase B3691 sequence
gggtcagaatgattttactcacgagtggctttgccaccgaattcagcatattcgcgtctgcaatgataataccctgattttctatttcaaggacggttcggaaattactcgaatttggaaagaccgctcacgcagtcaaagttggacggacgagatgaaagaagccgcccgtcagaaaacattagaaaggagcaagcataatgcctaaagttacgatgataccggcgactgtaaattccttgacgcatctgccaaaggca

SEQ ID NO: 16691 - DNA, 260 bp, Unknown
  Description of Unknown: LeftRegion for integrase B3692 sequence
aatgccgatcagtacaaggctatattggaataagtccgcaagcgttatgtacatccgcacccctcccttctggggagggaaaaagaaggattcccctcccgggataatgggagggactaaccgcctaccgttatcgatagcaccttacggctttgagtataccataacatgcgatacttgtccacaggggaggtgatctcgtgtcagaaaaatctgctgtcatttatgcccgatacagcagccacaaccagcgggaggaa

SEQ ID NO: 16692 - DNA, 260 bp, Unknown; identical to SEQ ID NO: 16657
  Description of Unknown: LeftRegion for integrase B3693 sequence

SEQ ID NO: 16693 - DNA, 260 bp, Unknown
  Description of Unknown: LeftRegion for integrase B3694 sequence
tctgcctgctgtgatgttttggaaatatcggaatttgatgcggaacaatttgcggaacgaatcgaacagattcagattccggcacccaatgaactgcaattctgcttttcagacggaacggaacaaaccgtacattggaaagaccgttcccgttcggaaagctggacggcggaaatgcgagagaaagcgaggcagaaaaaatggcgacagtcctaaaaataccagcaaagtttcaccccataacgcatttgccggaaatc

SEQ ID NO: 16694 - DNA, 260 bp, Unknown; identical to SEQ ID NO: 14115
  Description of Unknown: LeftRegion for integrase B3695 sequence

SEQ ID NO: 16695 - DNA, 260 bp, Unknown; identical to SEQ ID NO: 16676
  Description of Unknown: LeftRegion for integrase B3696 sequence

SEQ ID NO: 16696 - DNA, 260 bp, Unknown
  Description of Unknown: LeftRegion for integrase B3697 sequence
ttcgatcgaggccttataactatcactccttccatgaaaatctatgtttctccaataattttggatagccctcaggacgcttttacagcccgctggctggcttctcttgacggaatggttttaccccccccccccccccgatttccgccgcgtagagagcttctggagtaccataacgacgaaatttttaggagggtcacatgaatacagtaatttatgctcggtattctgccggcccgagacagaccgaccagagtatc

SEQ ID NO: 16697 - DNA, 260 bp, Unknown
  Description of Unknown: LeftRegion for integrase B3698 sequence
tcagatcttctccgataaaaataaaaccggctcctgcgtcaacaggaaccggcaaggaatatatccgaagatgataccccaaaattaagcaaacatattgtatcatcttcggacagcccccgcaagcggaacatccgttccccgctggctgttatttttatacccttttttacatacatttgatacaggaggatgatactatgcaggaaatgaacatctctatcaatgatctgatcatgtatctgagaaaatcccggtct

SEQ ID NO: 16698 - DNA, 260 bp, Unknown
  Description of Unknown: LeftRegion for integrase B3699 sequence
attttgtaatatagctgtaaaataactgtaatacaaataaaggagtgtacatatatgaataaatcaaacaatgacgaatattctgaaatggtaaagctatttaaccaacttaccgttgaagaagctgaacttgtactgatttttataagaaatcttcgtcaaaaccgaaaaaacgatgaaaagcgaaaggatgactgattatgcaatattgtttatatctaagaaaatctcgtgccgacagcgaggcagaagctcgaggt

SEQ ID NO: 16699 - DNA, 260 bp, Unknown; identical to SEQ ID NO: 16664
  Description of Unknown: LeftRegion for integrase B3700 sequence

SEQ ID NO: 16700 - DNA, 260 bp, Unknown
  Description of Unknown: LeftRegion for integrase B3701 sequence
ccttcgaccgaggccttataactatcactccttccatgaaaatctatgtttctccaataattttggatagccctcaggacgcttttacagcccgctggctggcttctcttgacggaatggttttaccccccccccccccgatttccgccgcgtagagagcttctggagtaccataacgacgaaatttttaggagggtcacatgaatacagtaatttatgctcggtattctgccggcccgagacagaccgaccagagtatc

SEQ ID NO: 16701 - DNA, 260 bp, Unknown
  Description of Unknown: LeftRegion for integrase B3702 sequence
gatatatcctctgaatggttggaaaactcatacacatacacgccaaagccgtataagccttcaaagcgcgccctccaaatggaggcggacatcaaagaaactgctcacaaatacataacaagcgaaaaagccctcctgctgggcgcagaagggcgtaacgggtaacagatatgtcgatagatattaaatggcaagtgccaatggcaaagccagaggtcagcgaactggccgtcgtatatgcccggtattcaagccacagt

SEQ ID NO: 16702 - DNA, 260 bp, Unknown
  Description of Unknown: LeftRegion for integrase B3703 sequence
agccttcgaccgaggccttataactatcactccttccatgaaaatctatgtttctccgataattttggatagccctcaggacgcttttacagcccgttggctgggttctcttgtcggaatggttttaacccccccccccgatttccgccgcgtagagagcttctggagtaccataacgacgaaatttttaggagggtcacatgaatacagtaatttatgctcggtattctgccggcccgagacagaccgaccagagtatc

SEQ ID NO: 16703 - DNA, 260 bp, Unknown
  Description of Unknown: LeftRegion for integrase B3704 sequence
cagacgtatgtaaaacacgttgaaatgtggcataaagagtttggtatggatccgttcacagatgaagaacatgaaaaactgatggaatatggcaggtttctcatttcgttaagaaagaagtagataaaactaaagaataaagggggtgataccaggcgaaatataattctgcatcaagacaaacttaggaggaatacaacatgacagcatttgaaaagaacaacatcgtcgagagctccatacccacacatatggataaa

SEQ ID NO: 16704 - DNA, 260 bp, Unknown
  Description of Unknown: LeftRegion for integrase B3705 sequence
aacctgtttttcttttgtgttccattgtcggaggcgttgttgctttctactttctctttttaaggtaaccgcaaaaaataccttccctgcacccccttcgggtgcttttttatttggaaattttctgtgttcgcttttttctcccctcgttctgtgctatcatgcaggcaagggaaaaatcatgagaaaggagaaaacctatgccgtattgcatttatttgagaaaatcaagagcagatgcagaggcagaattggcaggc

SEQ ID NO: 16705 - DNA, 260 bp, Unknown
  Description of Unknown: LeftRegion for integrase B3706 sequence
tctttttggatatataatgttgaagctgccaaagtcgaaggctatactccttgcaaagattgcaaccctccccaataatcatcccctgcacccccttcgggtgctttttttatttggaaattttctgtgttcgcttttttctcccctcgttctgtgctatcatgcaggcaaggggaaaatcatgagaaaggagaaaacctatgccgtattgcatttatttgagaaagtcaagagcagatgcagaggcggagctgctgggc

SEQ ID NO: 16706 - DNA, 260 bp, Unknown; identical to SEQ ID NO: 16687
  Description of Unknown: LeftRegion for integrase B3707 sequence

SEQ ID NO: 16707 - DNA, 260 bp, Unknown
  Description of Unknown: LeftRegion for integrase B3708 sequence
ccttgcggtctgcatcgtgtcgctcccgatcggcttgatcattgtagccgttggagcgtaccgggcggtaaaagccggggatatttatgatgctgcagttgctcggtacgagcagcaaatctcggactatgttgactggctggatgaagtcaacgcaaaataaaaagccgccctcggtgggcggcgggaggttgctctgaatgtgcgcaaaaaagaaaccggccatgcttgagccggatatgcaggatgccgtgatctac

SEQ ID NO: 16708 - DNA, 260 bp, Unknown
  Description of Unknown: LeftRegion for integrase B3709 sequence
ccttcgaccgaggccttataactatcactccttccatgaaaatctatgtttctccgataattttggatagccctcaggacgcttttacagcccgctggctggcttctcttgacggaatggtttttccccccccccccccgatttccgccgcgtagagagcttctggagtaccataacgacgaaatttttaggagggtcacatgaatacagtaatttatgctcggtattctgccggcccgagacagaccgaccagagtatc

SEQ ID NO: 16709 - DNA, 260 bp, Unknown; identical to SEQ ID NO: 16698
  Description of Unknown: LeftRegion for integrase B3710 sequence

SEQ ID NO: 16710 - DNA, 260 bp, Unknown
  Description of Unknown: LeftRegion for integrase B3711 sequence
ttctttttggatatataatgttgaagctgccaaagtcgaaggctatactccttgcaaagattgcaaccctccccaataatcatcccctgcacccccttcgggtgcttttttatttggaaattttctgtgttcgcttttttctcccctcgttctgtgctatcatgcaggcaaggggaaaatcatgagaaaggagaaaacctatgccgtactgcatttatttgagaaagtcaagagcagatgcagaggcggagctgctgggc

SEQ ID NO: 16711 - DNA, 260 bp, Unknown
  Description of Unknown: LeftRegion for integrase B3712 sequence
attttgtaatatggttgtaaaataactgtaatacaaataaaggagtgtacatatatgaataaatcaaacaatgacgaatattctgaaatggtaaagctatttaaccaacttaccgttgaagaagctgaacttgtactgatttttataagaaatcttcgtcaaaaccgaaaaaacgatgaaaagcgaaaggatgactgattatgcaatattgtttatatctaagaaaatctcgtgccgacagcgaggcagaagctcgaggt

SEQ ID NO: 16712 - DNA, 260 bp, Unknown
  Description of Unknown: LeftRegion for integrase B3713 sequence
acctattcttcttttgtgtacgattttcggatgcattgccgctttctactttctctttttaaggtaactgcaaaaaataccttctcagcaccccccttcgggtgcttttttatttggaaattttctgtgttcgcttttttctcccctcgttctgtgctatcatgcaggcaaggggaaaatcatgagaaaggagaaaacctatgccgtattgcatttatttgagaaagtcaagagcagatgcagaggcggagctgctgggc

SEQ ID NO: 16713 - DNA, 260 bp, Unknown
  Description of Unknown: LeftRegion for integrase B3714 sequence
catgtcctttactctgcttgtttatattatcctcgatgcgaatgtgccggacgccgggttcatccgctacggacgtcccagcgctgccgcattggtcgttatcgccgtcattgcagccgcagcaatcattgtcgcgtggtcaatcatacacgccgtgcgtaaaccgaagaaacactccaagaaataattgaggttcccttatggactatacaaatttgaatcttgccaacgtcgtcatctatgcccgctattcctccgac

SEQ ID NO: 16714 - DNA, 260 bp, Unknown; identical to SEQ ID NO: 16654
  Description of Unknown: LeftRegion for integrase B3715 sequence

SEQ ID NO: 16715 - DNA, 260 bp, Unknown; identical to SEQ ID NO: 16657
  Description of Unknown: LeftRegion for integrase B3716 sequence

SEQ ID NO: 16716 - DNA, 260 bp, Unknown
  Description of Unknown: LeftRegion for integrase B3717 sequence
tttgcccccatcttttcccaaaagcaaaaaccgctcctggcgggaaccaggaacggtttttgtgatactattgccgagtgcacacacaaggcgatataatatcagcatgacatctgtattatatcatcctgaagtgcacccggtcaatgggtgtattttttgtacgtttttttaatacattttacgaggaggatggtataatggagcttagaaaagatggattatattttgcatatctgcgcaagtcccgggaggatcgg

SEQ ID NO: 16717 - DNA, 260 bp, Unknown
  Description of Unknown: LeftRegion for integrase B3718 sequence
gacgatcggctggcccaccgcaccgccctgctggccgaagatcagcgcagggccgacgcggatctgcagcgtgagcgccatcgcgcccatgtggccagcattatttcgtatgtcgcgctgatcctgtttgtaatattgtttttaatggatttccttttgcccaaccgcggctggttcgtccgctgaagggaggactatgcatgcccactctctcctcggccggaaattactgcatgtacctccgccgatcccgcgccgac

SEQ ID NO: 16718 - DNA, 260 bp, Unknown
  Description of Unknown: LeftRegion for integrase B3719 sequence
catgtcctttactctgcttgtttatattatcctcgatgcgaatgtgccggacgccgggttcatccgctacggacgtcccagcgctgccgcattggttgttatcgccgtcattgcagccgcagcaatcattgtcgcgtggtcaatcatacacgccgtgcgtaaaccgaagaaacactccaagaaataattgaggttcccttatggactatataaatttgaatcttgccaacgtcgtcatctatgcccgctattcctccgac

SEQ ID NO: 16719 - DNA, 260 bp, Unknown; identical to SEQ ID NO: 16664
  Description of Unknown: LeftRegion for integrase B3720 sequence

SEQ ID NO: 16720 - DNA, 260 bp, Unknown; identical to SEQ ID NO: 14115
  Description of Unknown: LeftRegion for integrase B3721 sequence

SEQ ID NO: 16721 - DNA, 260 bp, Unknown; identical to SEQ ID NO: 15409
  Description of Unknown: LeftRegion for integrase B3722 sequence

SEQ ID NO: 16722 - DNA, 260 bp, Unknown
  Description of Unknown: LeftRegion for integrase B3723 sequence
caccttggcactccaaattggagtgatggtgttatccctgcctttgcttttactcttcattaaataaaaaagccccggcttcagccagggccctccatgagttatgctcatgtaatctcgcaaattatattatagcatagctcccggagtatttcattatgttccgggcatttttatgcccatttttaggaggatgctatatgaattttggtatttacggaagaaaatcatattttgttgatacctcagagagcactcag

SEQ ID NO: 16723 - DNA, 260 bp, Unknown
  Description of Unknown: LeftRegion for integrase B3724 sequence
attgcttcttggaagcggcaaatattctgttgatgatattgtatccatttgtaaaaacaccaaataaaaaagccccggcatctctgccagggccatgagctatgctcatatataatctcgcaaattgtattatagcatagctcccggactatttcactatgttccgggcatttttatgcccatttttaggaggatgctatatgaattttggtatttacggaagaaaatcatattttgttgatacctcagagagcactcag

SEQ ID NO: 16724 - DNA, 260 bp, Unknown
  Description of Unknown: LeftRegion for integrase B3725 sequence
tgcgggtctgtgcatcttcctggccctggtatttgtggcgtatctgtttgtggatgtgtcggacgctgaccatggctttatccggaataatcaggtttcccctacattgatcatcttgatattggcaatcgtagtgacggcccttggcacggcccacagtatcgcaaaaagaaaagcaacaatgaaaaggaatggtgaacatgacagcaactgacgaaataataaaaaaggcttgtaataagtacaaaaagacacggtat

SEQ ID NO: 16725 - DNA, 260 bp, Unknown
  Description of Unknown: LeftRegion for integrase B3726 sequence
gatttattcaataagaaaatagattatattattgcaaagcctaacaatgttttagaaattcatttatttgatggaaaaattgatgaaattaaatggactgatccaactagaaaaaatagctggactcctgaaatgaaagaaaaagcaagaattaaatcaaaagaaatagaaaaaaatctaaaaagaggagctgatggaaaatgggtaaagtcagagtaataccatcaacgattaatcctttaacgcatcaaagtattgtc

SEQ ID NO: 16726 - DNA, 260 bp, Unknown; identical to SEQ ID NO: 14174
  Description of Unknown: LeftRegion for integrase B3727 sequence

SEQ ID NO: 16727 - DNA, 260 bp, Unknown
  Description of Unknown: LeftRegion for integrase B3728 sequence
tttggatatacaactttgaagctgccaaaagcgaaggctatactccttgcaaagattgtaatccccctcaataaaacacaacgcagcaccccccccttcgggtgcttttttatttggaaattttctgtgttcgcttttttctcccctcgttctgtgctatcatgcagacaaggggaaaatcatgagaaaggagtaaacctatgccgtattgcatttatttgagaaaatcaagagcagatgcagaggcggagctgctgggc

SEQ ID NO: 16728 - DNA, 260 bp, Unknown; identical to SEQ ID NO: 16654
  Description of Unknown: LeftRegion for integrase B3729 sequence

SEQ ID NO: 16729 - DNA, 260 bp, Unknown
  Description of Unknown: LeftRegion for integrase B3730 sequence
ccggtatcgcttgcaataattcagtaaaccttccctgtctggatagcttataaaaaatctgccccagtacgccaataccggggcagattaaggaaccacatcgggaaaacccgatacagtcgccctacacaagcagattgtaccattttcccggtgaaaatacaagcaccgggcatttttatgtccaaaaaggaggaattatgttatatgaattgtctccaagtgacatatctcacattattatctatctaagaaagtca

SEQ ID NO: 16730 - DNA, 260 bp, Unknown; identical to SEQ ID NO: 15405
  Description of Unknown: LeftRegion for integrase B3731 sequence

SEQ ID NO: 16731 - DNA, 260 bp, Unknown
  Description of Unknown: LeftRegion for integrase B3732 sequence
tgcgcattgattggtcttgcaatcactgttttaggtgctgcaatcgtcggtgttccaattgctatattgggcgctttgcttgccgtaggtgcaaggggaaggaaatagaaaaccctgcgcggcttcttggcagtcggcgcgcagggcaagtgcaaagaacgaagcgcattagcgcactcgctctaaggggtgattttagcatggtgaagaacagagcagccatatacgcgcgcttcagctcgcacaatcagcgctctgaa

SEQ ID NO: 16732 - DNA, 260 bp, Unknown
  Description of Unknown: LeftRegion for integrase B3733 sequence
gacattcgatccgacatttattgatcagaatgtgagggaaattattctgtacgacaataggttggtgttcagtatgactgatgggcgagaggagaaaattagttggaaaaataaatcacgctctcaatcgtggacgccggaaatgaaagaacgtgcaagacaaaggactatggaacggttgcagaataggaggataaacgatgccgacagtaaaggtaataccagcgactcgtgattttcatacgggcatagaaaagaca

SEQ ID NO: 16733 - DNA, 260 bp, Unknown
  Description of Unknown: LeftRegion for integrase B3734 sequence
ccagtctttccgcactggatagtcagacacttactcttaccgcagaggaagtgcgcttaattctcaaataccgggctttagataaagagggacgcacaatggttgagtctactcttattcaggaaacccgtagaatggatacggagaaaggggaaactgtaagtgccgggtaatcagccttgccgaatggaggaagaaccatgtatgaagaagtgaaaaccgcctgcatttatgcccggtattccagcaataatcaaacc

SEQ ID NO: 16734 - DNA, 260 bp, Unknown
  Description of Unknown: LeftRegion for integrase B3735 sequence
tgacctcatggccttgcagtcgcagctcaaaaacgagattgcctctctgcttgaccggctcatgcaagccgatatggaaattgcctttaacgtcaagaacggcgtaacaggcgtattctccggcaagacggcaatgtgattgttgttgacttccgcccctctgtgtgaggggcttttcttttaccgaggaggtgtttattttggcttactgcctttacctgcgcaaatcccgttccgacatcgaggcggaggctcacggc

SEQ ID NO: 16735 - DNA, 260 bp, Unknown
  Description of Unknown: LeftRegion for integrase B3736 sequence
tgcgcattggttggtcttgcaatcactgttttaggtgctgcaatcgtcggtgttccaattgctatattgggcgctttgcttgccgtaggtgcaaggggaaggaaatagaaaaccctgcgcggcttcttggcggtcggcgcgcagggcaagtgcaaagaacgaagcgcattagcgcactcgctctaaggggtgattctagcatggtgaagaacagagcagccatatacgcgcgcttcagctcgcacaatcagcgctctgag

SEQ ID NO: 16736 - DNA, 260 bp, Unknown
  Description of Unknown: LeftRegion for integrase B3737 sequence
atctgtgatgtacttaaattggatgaatttgatacggctgtatttcgagataacattcatcacattgtgattccaaaaccatttgaggtacagtttttctttcatgatggaacatcagaaatacgccactgggaatacccatcaagggcagaaagttggacagaggaaatgaaacaagccgcacgagaaaggaatcagaaatgggtcgaaaagtaactgtaataccgccaacaatcagtctgcaaacgcacctgccgaca

SEQ ID NO: 16737 - DNA, 260 bp, Unknown
  Description of Unknown: LeftRegion for integrase B3738 sequence
gaatatcgagagcgtgaagcgctatgcgaaacgtgcgccggaaacactgcctagcatgctcgttctttcaggcagaatcgccgagctgaacgagatcaggcaataaaaaaatccccgcacggcttcttggcggttggcgcgcggggaataggtgaaaagcaggtcgctttgccgcgaccgctctaagaggtgattttagcatggcgaagaaccgagccgccatatatgcgcgcttcagctcgcacaatcagcgttcggaa

SEQ ID NO: 16738 - DNA, 260 bp, Unknown
  Description of Unknown: LeftRegion for integrase B3739 sequence
atatggtatcgcacgcaaactttttggggaaatcatcatggtataccgtagtgatacctcgcgtgcgcgcgtgcgtgtgcgcgcgatcgtgcgcgcactgtctctgtacctgtatctgtatctgagactgtatctgtattctgtttctgattctgaatatctactactgcaaatctatcgttagaaggggggtggcgctgttgccgagaaaacctgcaaagcacccggcgaagccgaagcggggcaagaagctggaaatc

SEQ ID NO: 16739 - DNA, 260 bp, Unknown
  Description of Unknown: LeftRegion for integrase B3740 sequence
agatagatggatttttgctgaaagcttttatatttacttatgttttgttacatgttattatatttttacacaaaaaaccgactcctgcgaccaacaggaaccggtttaataaataagataatctcggagaaaatcttacctacaccataattatatcatctcctggattatcgcacaagtaaaaaaaggagaatgataaaatgaatgaatcagtatgcatctatctaaggaaatccagagccgatcgggaagctgaagca

SEQ ID NO: 16740 - DNA, 260 bp, Unknown
  Description of Unknown: LeftRegion for integrase B3741 sequence
gcggccttcggcaatgcgctctgtgtgcaaagcctatcgcttttgtgtatggacattctcgtgtgtatcactcgacgacttggtgtaccgatgcaatgtcacaaccgtttcaaatgtttgaagaagaagctattgcaaaaggatttcggaagtgcaaggcttgtcaaaagcgagatgaaagcattaaggagtaatggtgtatggcacgttcagcgaagaaaattgaatatgcactcgctgaacagatcggtgtgatctat

SEQ ID NO: 16741 - DNA, 260 bp, Unknown
  Description of Unknown: LeftRegion for integrase B3742 sequence
cttacgacctctgtgatccaacgtaactgcaagtgcggaatcaaccgcgcgtactcgatactacgcaatcttcaggtctacgggcttattcatgaggccggaaaagacacctatgaatggacagaaaaagccctcctgctgggcgcagaagggcgtaacgggtaacagatatgtcgatagatattaaatggcaagtgccaatggcaaagccggaggtcagcgaactggccgtcgtatatgcccggtattcaagccacagt

SEQ ID NO: 16742 - DNA, 260 bp, Unknown
  Description of Unknown: LeftRegion for integrase B3743 sequence
gacattcgatccgacatttattgagcagaatgtgaggaaaattattctgtacgacaataggttggtgttcagtatggctgatgggcgagaggagaaaattagttggaaaaataaatcacgctctcaatcgtggacgccggaaatgaaagaacacgcaagacaaaggactatggaacggttgcagaataggaggataaacgatgccgacagtaaaggtaataccagcgactcgtgattttcatacgggcatagaaaagaca

SEQ ID NO: 16743 - DNA, 260 bp, Unknown
  Description of Unknown: LeftRegion for integrase B3744 sequence
ggatggaagaggtttttgatgcgagggtccgccgcattgaggcaagatactcgcatatgctcaaaatgcaaaacaggtggctgcggtttacggttatcttgtgtctttgccttaccgtgtttatcatcgtcatgctgttgtatgatgttacgcatccggacatcggatggatacgagatcatcttaattagggagaaaaaatggatacgcttgcagatgttgtcgtttatgccagatacagctcagcagggcaaaacgat

SEQ ID NO: 16744 - DNA, 260 bp, Unknown
  Description of Unknown: LeftRegion for integrase B3745 sequence
cttacgacctctgcgatccaacgtagctgcaagtgcggaatcaaccgcgcgtactcgatactacgcaatcttcaggtctacgggcttattcatgaggccggaaaagacacctatgaatggacagaaaaagccctcctgctgggcgcagaagggcgtaacgggtaacagatatgtcgatagatattaaatggcaagtgccaatggcaaagccggaggtcagcgaactggccgtcgtatatgcccggtattcaagccacagt

SEQ ID NO: 16745 - DNA, 260 bp, Unknown
  Description of Unknown: LeftRegion for integrase B3746 sequence
aagatacttatgaatacaagagggaagacggaaccgtcggaaaccttcacaaagagaataccgggatgtacgattttgagttgccagatgaacttccatcggctgaaactattccagagccgttatacggttatgtcgtagaatggcttgcagaaaaagcaaagtcatacagttgaatttgatctttgaggtaaggaactatggcacgttcagcgaagaaaattgaatacgcgcccgctgaacagatcggcgtgatctat

SEQ ID NO: 16746 - DNA, 260 bp, Unknown
  Description of Unknown: LeftRegion for integrase B3747 sequence
aatcaaggctctgcttgaaaatcacgaacaattaaatacgctcgatataggcttattcaaagcgtgtgtttcacgaatttggataagccatttttgcaccatagaggttgaatttatcaacggcatacacatcaaaaatataacggaaaggaagcttgaaaatgaccacagcaacaaatgtaacgataattcctgcgaaagtgcagactgcggaaaatcgcagtaaataccaccagttgagagttgccgcatactgccga

SEQ ID NO: 16747 - DNA, 260 bp, Unknown
  Description of Unknown: LeftRegion for integrase B3748 sequence
atatcgccaactggtcggccgctcaaggtgcagctaccgcaccgcagcccgttcagcaggtagtggagcagaaaccgtctcccgccaatgaaatccgcaaatacaagggcctgctggatgacggtatcatcacgcaggaagaatttgaagctaagaaaaagcaactgctgggcctgtaaatttgaaaggagcgtgacggcatgagaaaaaagtccaacctcaatgcggctactcgtgccgtcatctatgccaggtattcc

SEQ ID NO: 16748 - DNA, 260 bp, Unknown
  Description of Unknown: LeftRegion for integrase B3749 sequence
cgattgcgtgttcgtgcacaagaatatggatatagcagcaaacacggcacaattttgagaaattttcaggacaaatgctgtgagtataaagcaaagatcaaggaaaatgcgtctattgaaaacctcaccgcttatgcagcatatttgcaaagcggtgagggattgccaaaacgctatgagcggataaagaggacaagaccatgaatgtagtcatatatgcccggttctcatcgcacagtcaaacagaacagagtattgag

SEQ ID NO: 16749 - DNA, 260 bp, Unknown; identical to SEQ ID NO: 16742
  Description of Unknown: LeftRegion for integrase B3750 sequence

SEQ ID NO: 16750 - DNA, 260 bp, Unknown
  Description of Unknown: LeftRegion for integrase B3751 sequence
tctttaacaactgttggctatggcgatatatacccggtatcaaccgccgggcgtgttttcactatgctgtcgtcgctggttggtattgccgttgtagccttgcccgccggtatcataacggcggggtacatggacgcgctgcgcgaagattccgacaaaaagaaatagcccaccaatcggcgggcagggggggtgcttatatgcgggcgtttatttactgccgattttccagccataagcagcaagagcttagcatagag

SEQ ID NO: 16751 - DNA, 260 bp, Unknown
  Description of Unknown: LeftRegion for integrase B3752 sequence
ccttaacggcaacatgtaagcaacaacaaaagccgtgcagtgcctcagcacagaacggctttcacgtagattctctcttgccggacgctccggaagatataatctgtctcgcaaactaattatatcatttctggtacgtccttggcaaggggcgtatttttgtaccttttatttcataccatatttaaggagatgatattatgttggacccgaatgggatttattttgcttatcttagaaagtcgcgtgaggatcgtgag

SEQ ID NO: 16752 - DNA, 260 bp, Unknown
  Description of Unknown: LeftRegion for integrase B3753 sequence
ccttgagtgccttgatgacttctcttgacgagtagcttctcatgtcggcttccctcctgacatgagaagtataacacatagtattatatttgtcaatcggcaattacaaatatttctatatttgttttttgatttcagcataacaaaagctgccctgcatcgattgctcggggcaattatgaaagaaggagtcaatcaaaatgtggatgcttccccaaatgtccgtcgatgacatcataatgtatctccggaagtcccga

SEQ ID NO: 16753 - DNA, 260 bp, Unknown
  Description of Unknown: LeftRegion for integrase B3754 sequence
aagggaaatgtacagatgttggagaagtctttggatattctcttgatattgatgaaatagaataaataataaaaaagccggcttctgcgaccaacaggaaccggttttaataaataagataattcggagaaaatcttacctacaccataattatatcatctcctggattatcgcacaagtaaaaaaaggagaatgataaaatgaatgaatcagtatgcatctatctaaggaaatccagagccgatcgggaagctgaagcg

SEQ ID NO: 16754 - DNA, 260 bp, Unknown
  Description of Unknown: LeftRegion for integrase B3755 sequence
cgaactcggctaccgcggcgacgcgtttgctgcggaggacgtctccatcagcgacgacctcggccccgatgaccgcatcggctggccgaatacgcactatgtctgcatccgccggatgggcgacgacgactttgtggcaaggttcggatcgccgcaggccatcgggttctgcgcgtttttagaggaaaaggagaaattaaatggatacggtaaataaatttggcagctattgcatgtatctgcgccgatcccgcgcggac

SEQ ID NO: 16755 - DNA, 260 bp, Unknown
  Description of Unknown: LeftRegion for integrase B3756 sequence
tcgccagacgcagttttggaatttcaattcaatgatggccatgcagaaatacataattggtcatacgagcgccatgggcacaaatggacagccgctcagagagcacgtttttcagaaaccatgaagcgtcattacacaccggagcgcaggcagaccatgagtgagaaaatgaagcagatcaggaaggagcgcggagcacagtggcgaaaagagtaacgacgatcatgccgacattggtgcggtttacggaagcgcccatt

SEQ ID NO: 16756 - DNA, 260 bp, Unknown
  Description of Unknown: LeftRegion for integrase B3757 sequence
atctgtgatgtacttaaattggatgaatttgatgcggctgtatttcgggataatattcaccatattgtgattccgaaaccgtttgaggtgcagtttttctttcacgatggaacatctgatatacggcattggaagtacccatcaagggcagaaagttggacagaggaaatgaaacaagccgcacgagaaaggaatcagaaatgggtcgaaaagtaactgtaataccgccaacaatcagtctgcaaacgcacctgccgaca

SEQ ID NO: 16757 - DNA, 260 bp, Unknown
  Description of Unknown: LeftRegion for integrase B3758 sequence
ccttgagcgccttgatgacttctcttgacgagtagcttctcatgtcggcttccctcctgacatgatcagcataacacatagtattatatttgtcaatcggcaattacgaatatttctatatttgttttttgatttcagcataacaaaagctgccctgcaccgattgctcggggcaattatgaaagaaggtgtcaatcaaaatgtggatgcttcccccaatgtccgtcgatgacatcataatgtacctccggaagtcccga

SEQ ID NO: 16758 - DNA, 260 bp, Unknown; identical to SEQ ID NO: 16187
  Description of Unknown: LeftRegion for integrase B3759 sequence

SEQ ID NO: 16759 - DNA, 260 bp, Unknown; identical to SEQ ID NO: 16751
  Description of Unknown: LeftRegion for integrase B3760 sequence

SEQ ID NO: 16760 - DNA, 260 bp, Unknown; identical to SEQ ID NO: 16475
  Description of Unknown: LeftRegion for integrase B3761 sequence

SEQ ID NO: 16761 - DNA, 260 bp, Unknown
  Description of Unknown: LeftRegion for integrase B3762 sequence
ggttggtttagataatattgattgggttgaggtatttcctaataatgaattaaaaatatatttacgtgatggtacaaatgtaattgaaaaatggaatgactattcacgtaagaattcttggactgatgaaatgaaagcaaaggctagagagcaagctataaaaaagtcattagttaattatttgaggggcggtaatattaatggctaaagttacaattatcccctcaaagaaaaatccaataaccttaactccaatcaat

SEQ ID NO: 16762 - DNA, 260 bp, Unknown
  Description of Unknown: LeftRegion for integrase B3763 sequence
cgatctcggttatcgcggcgacgcgtttgccgcggaggacgtctccatcagcgacgacctcggccccgatgaccgcatcggttggccgaatacgcactatgtctgcatccgccggatgggcgacgacgactttgtggcaaggttcgggtcgccgcaggccatcgggttctgcgcgtttttcgagggaaaggatgaattaaatggatacggtaaataaatttggcagctattgcatgtatctgcgccgatcccgcgcggac

SEQ ID NO: 16763 - DNA, 260 bp, Unknown
  Description of Unknown: LeftRegion for integrase B3764 sequence
tactgatgagttttttgataaatcaatacaatatatgcgtcttaaatatggtgttcaaagaatttgtaaaggtattttattttattttgaacctatttttatgatctacaaggaaatagaataatttattgaaatattttcaaatagattattgtattttatttgtatagattgttaataaagaagaaaggaatgattttatgaaaaaagttgctatttattctcgtaaatctaaatttactggtaaaggtgaatcaata

SEQ ID NO: 16764 - DNA, 260 bp, Unknown; identical to SEQ ID NO: 13709
  Description of Unknown: LeftRegion for integrase B3765 sequence

SEQ ID NO: 16765 - DNA, 260 bp, Unknown; identical to SEQ ID NO: 15752
  Description of Unknown: LeftRegion for integrase B3766 sequence

SEQ ID NO: 16766 - DNA, 260 bp, Unknown
  Description of Unknown: LeftRegion for integrase B3767 sequence
catcttctccgcagaaaagacagggcgttttggaacgagttgaacctaaacgtgcaactctacttatataaatgactcccagatatgatatttcggaaatgaatttaactttttgactgttgaaagtgtggaaagatttattttccccagaacttgcaacggcttgcaacaaacttaaaactacttgaaaggtggtatttatgcctcgcaaaaagaaactgcaagaggtaggcggactgcggctggtggcgtactatcgc

SEQ ID NO: 16767 - DNA, 260 bp, Unknown
  Description of Unknown: LeftRegion for integrase B3768 sequence
ggaaaatgtacagatgttggagaagtccttggatattctcttgatattgatgaaatagaataaataataaaaaagccggctctcgctaccaacgggaaccggttttaataaataagataatccggagaaaaatcttacctacaccataattatatcatctcctggattatcgcacaagtaaaaaaaaggagaatgataaaatgaatgaatcagtatgtatctatttaaggaaatccagagccgatcgggaagctgaagca

SEQ ID NO: 16768 - DNA, 260 bp, Unknown
  Description of Unknown: LeftRegion for integrase B3769 sequence
cttgagcgccttgatgacttctcttgacgagtagcttctcatgtcggcttccctcctgacatgaggagtataacacatagtattatatttgtcaatcggcaattacaaatatttctatatttgtttttttgatttcagcataacaaaagctgccctgcatcgattgctcggggcaattatgaaagaaggtgtcaatcaaaatgtggatgcttcccccaatgtccgtcgatgacatcataatgtatctccggaaatcccga

SEQ ID NO: 16769 - DNA, 260 bp, Unknown
  Description of Unknown: LeftRegion for integrase B3770 sequence
aggaaaaatgccgtccttcgtccatagactacgatgcgggtatggccatttttgagggttcaggtaaaaagccttacgaaaccacggtaaattcctgcacctgcagagatttctttgtccgccgtttgccgtgtaagcatatctaccggcttcggatggagcttgaaaacagagaagctcgttaaaaatgggggcgttatatggctcgatcaaagaaaactgaatgcttgccacttgagcggatcggcgtgatctatgcc

SEQ ID NO: 16770 - DNA, 260 bp, Unknown
  Description of Unknown: LeftRegion for integrase B3771 sequence
atttgaacgttttaaagtttggaataaagagtttggacgaatacattttactgatgaagaaatcaataaaataatggaatatacaaggttcttacttagccaaagaagacagtaagtctacataggtttactctatttaaaggaggtgatgcctgaattcagttcatcgtagaatttacatcaaaggaaaggtggaaccaatgacaacgtttgatatgaacaacgctgtagacaatgcgttcggtatggacgtatatgct

SEQ ID NO: 16771 - DNA, 260 bp, Unknown; identical to SEQ ID NO: 14662
  Description of Unknown: LeftRegion for integrase B3772 sequence

SEQ ID NO: 16772 - DNA, 260 bp, Unknown
  Description of Unknown: LeftRegion for integrase B3773 sequence
caaaggcattagcgccaaagattaggaagttctatgatagtgacaagggcaaagcttactttgaaaaatggcttaccaaacaccctgaatatgatgaacggacacctgatgcaactgcatcgggcgtctgagttttcgcacattcgacagcaaataaaggaggattataattatgtatagaaagaattggaggctcacagatgaatgttgtaatatacgctcggttttccagccatagtcaaaccgagcaatctattaaa

SEQ ID NO: 16773 - DNA, 260 bp, Unknown
  Description of Unknown: LeftRegion for integrase B3774 sequence
ttatttggtattttataaatttgccgtgcggcattggtgctgctgtcggtctgttttttgccatgtacaaggcattaataaaagaaattagccagcgtccgcttcctggtgcctataaaacaaaagaggctgcgcagttggctatgcttaatactttaaaagctattaaagccaaaaaacaaagcaaggaagggtaggaaatggcaacaaaaaagaaaaccgccacccaaagggcggacggcgtatataatcgggcggtt

SEQ ID NO: 16774 - DNA, 260 bp, Unknown
  Description of Unknown: LeftRegion for integrase B3775 sequence
ccttgagcgccttgatgacttctcttgacgagtagcttctcatgtcggcttccctcctgacatgattagtataacacatagtattatatttgtcaatccgcaattacgaatatttctatatttgttttttgatttcggcataacaaaagctgccctgcaccgattgctcggggcaattatgaaagaaggtgtcaatcaaaatgtggatgcttcccccaatgtccgtcgatgacatcataatgtacctccggaagtcccga

SEQ ID NO: 16775 - DNA, 260 bp, Unknown; identical to SEQ ID NO: 16767
  Description of Unknown: LeftRegion for integrase B3776 sequence

SEQ ID NO: 16776 - DNA, 260 bp, Unknown
  Description of Unknown: LeftRegion for integrase B3777 sequence
ggcaatccctgtagggggcacaacctgcgcgaaacactcctcgaacaagcctgcgcagacatgctcggcacccagggtttcgaccccgtccaggttggcgagcagatcgtgatgatcgaggccttcgagcatcagctcaccttccacctcgcggatggaaccatgacaccagtggggttaaccagtgaggggaggctggcatgaaccgcaccgtcaccgcgatacccgcaacaaagaaacttgggaatctcacagcctca

SEQ ID NO: 16777 - DNA, 260 bp, Unknown
  Description of Unknown: LeftRegion for integrase B3778 sequence
tgcgcattgattggtcttgcaatcactgttttaggtgctgcaatcgtcggtgttccaattgctatattgggcgctttgcttgccgtaggtgcaaggggaaggaaatagaaaaccctgcgcggcttcttggcggtcggcgcgcagggcaagtgcaaagaacgaagcgcattagcgcactcgctctaaggggtgattttagcatggtgaagaacagagcagccatatacgcgcgcttcagctcgcacaatcagcgctctgag

SEQ ID NO: 16778 - DNA, 260 bp, Unknown
  Description of Unknown: LeftRegion for integrase B3779 sequence
ccttgagcgccttgatgacttctcttgacgagtagcttctcatgtcggcttccctcctgacatgattagcataacacatagtattatatttgtcaatcggcaattacgaatatttctatatttgttttttgatttcagcataacaaaagctgccctgcaccgattgctcagggcaattatgaaagaaggtgttaatcaaaatgtggatgcttcccccaatgtccgtcgatgacatcataatgtacctccggaagtcccga

SEQ ID NO: 16779 - DNA, 260 bp, Unknown
  Description of Unknown: LeftRegion for integrase B3780 sequence
taactattatctattatataagcatgacggaggaatttggcctatgaaaacaaaacagattgacgaaacccatgtggaaatagccggtctgccaaatgtgcggctctttttcagccaatccccctctcccggtctcgaagctgctgtgctggggatgtagttgcgtgattcactgtcgcaggatcagggagggaatagcgatgaagaaacgggttctatgcctgtacagggtatcgacaatcggtcaggtagatcatgac

SEQ ID NO: 16780 - DNA, 260 bp, Unknown
  Description of Unknown: LeftRegion for integrase B3781 sequence
attttatctttgacggtcatactaaatatgctgaatacaatgtaacgcaagttacagcattaagaaaagcatttggtgaagaagtggaaaatatactacttccgttagcaaagttgaatgataaagggttagcaaaagttcgtaattacatttccgatatgctgaaaatagaagaatatcgcaattaggaggaatattacttgaagtcgaaaaacaagccattcatacggaaagccgttgcttacgctcggttttcatca

SEQ ID NO: 16781 - DNA, 260 bp, Unknown
  Description of Unknown: LeftRegion for integrase B3782 sequence
aacatccggcaacagctcgggcgaatgcggaaaagaatctatgattctctgtacaatagcctcgaaatgccgctcacaagcggacgcaatataacagaatttctttgtaagtgcgacagatttcaaggagtttccgttcaagtatttaatgattactacgcttttttgaatgaaaagctgattgaaagggggccgctggtatgaatgtagtcatatatgcccggttttcctcacacagtcaaacagaacagagtattgag

SEQ ID NO: 16782 - DNA, 260 bp, Unknown
  Description of Unknown: LeftRegion for integrase B3783 sequence
cttgagcgccttgatgacttctcttgacgagtagcttctcatgtcggcttccctcctgacatgagaagtataacacatagtattatatttgtcaatcggcaattacaaatatttctatatttgttattttgatttcagcataacaaaagctgccctgcatcgattgctcggggcaattatgaaagaaggagtcaatcaaaatgtggatgcttccccaaatgtccgtcgatgacatcataatgtatctccggaagtcccga

SEQ ID NO: 16783 - DNA, 260 bp, Unknown
  Description of Unknown: LeftRegion for integrase B3784 sequence
cgactggaactatatctatggaattgactcggtagggcttttaactatcgttcattgtatctatacagaatccaataagtccttaacacaacttttggatgaatatttcagagcatatctttcatgttcgcttgaaatgactaacaaagctatgttaccatatttaaagtgactggtcgcttatttcaaggaggaatatgatgtatttagaaataagcaaccccatggattatcatgttgcattgtatattcgtttatca

SEQ ID NO: 16784 - DNA, 260 bp, Unknown; identical to SEQ ID NO: 14662
  Description of Unknown: LeftRegion for integrase B3785 sequence

SEQ ID NO: 16785 - DNA, 260 bp, Unknown
  Description of Unknown: LeftRegion for integrase B3786 sequence
ggaaacccctgtagggggcacaacctgcgcgaaacgctcctcgaacacgcctgcgcagacatgctcggcacccagggtttcgaccctgtccaggttggcgagcaggtcgtgatgatcgaggccttcgagcatcagctcaccttccacctcgcagatggaaccatgatgccggtgggcttaaccagtgaggggtggttggcatgagtcgcacggtcacagcgatacccgcaacaaagaaacttgggaatgtcacaaccccg

SEQ ID NO: 16786 - DNA, 260 bp, Unknown
  Description of Unknown: LeftRegion for integrase B3787 sequence
ttgatgaaggaggtgtgccatgaaagcacaggaactggtaatcagctgtttttacgataatgatggggagtccatacgggacttgctatattcatccttcgctgccttcctcaagcgggagcttggaaaatttgcgcccgcacaggatcatcctgtatgatagacgggatgaatggccgcttatctcaggaggttagagtatgtatcaagagataagcaaccctatggattatcatgtggcattatacatcagactgtca

SEQ ID NO: 16787 - DNA, 260 bp, Unknown; identical to SEQ ID NO: 16598
  Description of Unknown: LeftRegion for integrase B3788 sequence

SEQ ID NO: 16788 - DNA, 260 bp, Unknown
  Description of Unknown: LeftRegion for integrase B3789 sequence
aattattgcagcgtcattattttgctgcgccagttggtggcagcgggtcactgcacaaaaaaggaagccaacaggatcgctgcccggatcgcgagaaagaccggtgtggatctgatcctttctatataaaattatcgaattaacactagctattccagaaaaggtgtggtaatgtgtgttgctgacaaggggggggaggaatggcagtggcaagggacaatttggcaagaaagcagattttcataccagccaatatgccg

SEQ ID NO: 16789 - DNA, 260 bp, Unknown
  Description of Unknown: LeftRegion for integrase B3790 sequence
aaagatagcacgttttgcattccagtcgaaaaataaaacgcccacggtgttaccagcaccgtaggcgttccagatcagcttacccggagatagtacggaaaccagttcagttctatccagaagggcaataacagccaacctcacagatgttattgtaccacctccgggcaggcttgtcaaagtgtacccggaggtattttatgggcaaaaagcaaaaaatcactggcggtgacgccgtcatttacgcccgctactcgtcc

SEQ ID NO: 16790 - DNA, 260 bp, Unknown
  Description of Unknown: LeftRegion for integrase B3791 sequence
actgccttacagcgctggataatcaggctctttctcttacagcagatgaagtgcgccttattttgaagtaccgtgctttggacgatgaaggacggactatggttgagtccacccttattcaggaaacacgtagagtggaaacggctaaaggggaaaccgcaaatgccgggtgataaattttgcagaatggaggaagcaccatgtatgacgatataaaaacctgtgtcctgtatgtcaggtattcaagcaataaccaaaca

SEQ ID NO: 16791 - DNA, 260 bp, Unknown
  Description of Unknown: LeftRegion for integrase B3792 sequence
atatcgccaactggtcggccgctcaaagtgcagctaccgcaccgcagcccgttcagcaggtagtggagcagaaaccgtctcccgccgatgaaatccgcaaatacaagggcctgctggatgacggtatcatcacgcaggaagaatttgaagctaagaaaaagcaactgctgggcctgtaaatttgaaaggagcgtgacggcatgagaaaaaagtccaacctcaatgcggctactcgtgccgtcatctatgccaggtattcc

SEQ ID NO: 16792 - DNA, 260 bp, Unknown
  Description of Unknown: LeftRegion for integrase B3793 sequence
ataaaaccgttcttggttcaagtgttaccctgccgcttgcttatgcggattccgtcaggcttgacccataaaaaaaccgcccctgcattcacaggagcggaccatttgagagagacaccagcaccacccgatgtcccaccaccgcgcttagtatagcacagcggcggcggggctgtaaaccccttatgaaaggattttttatgaacgctgtgatttatgcccgctactcttctcataatcagaccgaacaatctatcgaa

SEQ ID NO: 16793 - DNA, 260 bp, Unknown
  Description of Unknown: LeftRegion for integrase B3794 sequence
attagatgaatttgactcaaatgcatttgacgaacaaataaaaaaagtaatagtaattggtgatgacttgctagaatttcattttaatgatggaaagataataagtgagaaatgggaatacaatgctagaaaagaatattggacagaagaaaaaagaagagaacgtggagaaaaattaaaaaagagttggaggatgaaaaatgacaaaaaaagtaacaacgataccagcattactaaataagcaatctacaaatcaggtt

SEQ ID NO: 16794 - DNA, 260 bp, Unknown
  Description of Unknown: LeftRegion for integrase B3795 sequence
taaagataataattttgttattccgttgaaatacggctcctcaagcggcgaattctttgagggaattgcttgtgttgaggtaaacaaaaaatccgaaacttattacaaatatatttttacaaatgataaagattcgttctaatgataacatttgtgtctttggacttgattaatactgcacaaagagcgatgaatggagtatgacaaaagttttaaaatgtgccatatatacaagaaaatcatctgaagaaggtcttgaa

SEQ ID NO: 16795 - DNA, 260 bp, Unknown; identical to SEQ ID NO: 15029
  Description of Unknown: LeftRegion for integrase B3796 sequence

SEQ ID NO: 16796 - DNA, 260 bp, Unknown
  Description of Unknown: LeftRegion for integrase B3797 sequence
ccttgagcgccttgatgacttctcttgacgagtagcttctcatgtcggcttccctcctgacatgattagtataacacatagtattatatttgtcaatcggcaattacaaatatttctatatttgttttttgatttcagtataacaaaagctgccctgcaccgattgctcggggcaattatgaaagaaggtgttaatcaaaatgtggatgcttccccaaatgtccgtcgatgacatcataatgtacctccggaagtcccga

SEQ ID NO: 16797 - DNA, 260 bp, Unknown
  Description of Unknown: LeftRegion for integrase B3798 sequence
tatgagcgcagcgcccgcacgaaaaatattatcatttatctgctatctgcaattttagcacttgcccttgctgcgctgattattgatctgtgcagcccgaatctcggctggctgcgcgccgcgcttcacatgcagttcctgcatttataaaaaacaaagccgccccggcgcataccggagcggcaattttggaggttcttatgggctatgatatcaaccttgcaaatgtagtgatctatgcccgctactcgtccgccggg

SEQ ID NO: 16798 - DNA, 260 bp, Unknown
  Description of Unknown: LeftRegion for integrase B3799 sequence
attggactggccctctacggtatgattgtgatgagcattctggatgcggagttacacgccgccattcttcccggcatcttcatgatgctggcgttcaacgcacctgacctgatccggctgaaactgggcaagttccgggataacgtgggcgattatctgcggcaataaaaaagcccgcgcaatggcgggcgggtgatggcatgaaaaaagagaacgaaatccgggcagttgtctacgcccggtactcatcccattcgcaa

SEQ ID NO: 16799 - DNA, 260 bp, Unknown
  Description of Unknown: LeftRegion for integrase B3800 sequence
cattattcctataactatagtaaataatgttatcagtactatacacgttttcttcataaataccaactcccttaaattatacttataatttttaaataataattcataattaaatatttgattttaaccatttaacctcaataagtttaccatatttttactattttgttatattatataataaggaaggggtgaatcttgtgattgctgcaatatattctagaaaatcaaaatttacaggaaaaggcgaatctatagaa

SEQ ID NO: 16800 - DNA, 260 bp, Unknown
  Description of Unknown: LeftRegion for integrase B3801 sequence
cagcactgggggaatccagtgcaaggctgcttgaactcgcggatgaagatccgctggaagaataaaaaacgcccccggtgctaccaacaccgagagcgtttacagagcagcttgcccacaagggtacaagacgacccaaccaattgttattgtactccaaaaaggcaggcttgtcaaagtataccggtttggagggcaaaatggaaaacgcaaagcgaaaaaaggatgatctggccgggagccgggcggtgatctatgcc

SEQ ID NO: 16801 - DNA, 260 bp, Unknown; identical to SEQ ID NO: 14830
  Description of Unknown: LeftRegion for integrase B3802 sequence

SEQ ID NO: 16802 - DNA, 260 bp, Unknown; identical to SEQ ID NO: 15606
  Description of Unknown: LeftRegion for integrase B3803 sequence

SEQ ID NO: 16803 - DNA, 260 bp, Unknown; identical to SEQ ID NO: 15411
  Description of Unknown: LeftRegion for integrase B3804 sequence

SEQ ID NO: 16804 - DNA, 260 bp, Unknown; identical to SEQ ID NO: 16737
  Description of Unknown: LeftRegion for integrase B3805 sequence

SEQ ID NO: 16805 - DNA, 260 bp, Unknown
  Description of Unknown: LeftRegion for integrase B3806 sequence
ttataatccaaaagggttattttgagagggctatcagtgtaagggctgatagccctattttttttgtctaaaaatgaggagtatctctggttattactcaaataacaagtaatgggtttacatagtatcaaaaaggtgtataataactatgagatattatgacaaacctgtacaaattctatcaaacaggaggaaacaggatggtacaggaaagattaagagcggtattttatgcaagagtttctacagaggaggagaaa

SEQ ID NO: 16806 - DNA, 260 bp, Unknown
  Description of Unknown: LeftRegion for integrase B3807 sequence
agaatatcgagagcgtgaagcgctatgcgaaacgtgcgccggaaacactgcctagcatgctcgttctttcaggcagaatcgccgagctgaacgagatcaggcaataaaaaatccccgcacggcttcttggcggttggcgcgcggggaataggtgaaaagcaggtcgctttgccgcgaccgctctaagaggtgattttagcatggcgaagaaccgagccgccatatatgcgcgcttcagctcgcacaatcagcgttcggaa

SEQ ID NO: 16807 - DNA, 260 bp, Unknown
  Description of Unknown: LeftRegion for integrase B3808 sequence
attttatttttgacggtcacactaaatacgccgaatacaatgtatcgcaagttacggctttaagaaaggcgtttggtgaagaagcggcaaatatactactgccgttagcaaagttaaatgatacagggttggcaaaagtccgtaattacatttccgatatgctaaaaatagaggaatatcgcaaatagggggagcattacttgaaatcgaaaaacaaaccgtatgtgcggaaagctgttgcttatgctcggttttcatca

SEQ ID NO: 16808 - DNA, 260 bp, Unknown; identical to SEQ ID NO: 14243
  Description of Unknown: LeftRegion for integrase B3809 sequence

SEQ ID NO: 16809 - DNA, 260 bp, Unknown
  Description of Unknown: LeftRegion for integrase B3810 sequence
tgcaatgctcagagctgtgtaggtgttgacaatgctgggacgtttaagatcaacgtgattcagtacgatggaaacggaaataagcagactgccactttcgttgtcaacgttcctgagaactaaaaaaaagccctcctgctgggcgcagaagggcgtaacgggtaacagatatgtcgatagatattaaatggcaagtgccaatggcaaagccggaggtcagcgaactggccgtcgtatatgcccggtattcaagccacagt

SEQ ID NO: 16810 - DNA, 260 bp, Unknown
  Description of Unknown: LeftRegion for integrase B3811 sequence
tactgatgagttttttgataaatcaatacaatatatgcgtcttaaatatggtgttcaaagaatttgtaaaggtattttattttattttgaacctatttttatgatctacaaggaaatagaataatttattgaaatattttcaaatagattattgtattttatttgtatagattgttaataaagaagaaaggaatgattttatgaaaaaagttgctatttattctcgtaaatctaaatttaccggtaaaggtgaatcaata

SEQ ID NO: 16811 - DNA, 260 bp, Unknown
  Description of Unknown: LeftRegion for integrase B3812 sequence
atctgtgatgtacttaaattggatgaatttgatgcggctgtatttcgggataatattcaccatattgtgattccgaaaccgtttgaggtgcagtttttctttcacgatggaacatctgatatacggcattggaaatacccatcaagggcagaaagttggacagaggaaatgaaacaagccgcacgagaaaggaatcagaaatgggtcgaaaagtaactgtaataccgccaacaatcagtctgcaaacgcacctgccgaca

SEQ ID NO: 16812 - DNA, 260 bp, Unknown
  Description of Unknown: LeftRegion for integrase B3813 sequence
ctggatcattgacatggttatgatctgttgcaacaaattcaccgacagcaccggcgcggtggtcggcctgaaggttgccgagtacaccagacagccggatcctgatcttgcagaggcttctctggaggagcagcgggaggcagcggccgagactgccagagcttacggctataccgtaatagagtcaggcgctcaggataatgccgacaagtaaaaacacggctcgaaaatgtgccgcaggaggtagctcggataattcc

SEQ ID NO: 16813 - DNA, 260 bp, Unknown
  Description of Unknown: LeftRegion for integrase B3814 sequence
tttgcatgaacgtgtgaaaataagttgtgcaatggcatggcaaataatcctttgtaacaaatgtttaatgaggatgaattgaaagtttatgataagaaatttcaagcaataggtattttagacaaagaagaacaaaaaaagatactggagttcttctatacattaggtgttattacgtttaacctttaatttaacgattgatgagtaagaaaaaaagtaaagagaaagtagtagagttttctaaattgacaaataaagtg

SEQ ID NO: 16814 - DNA, 260 bp, Unknown
  Description of Unknown: LeftRegion for integrase B3815 sequence
tatacatcttcttattcattcgacgattatgacagtgatgaagatgaataaataacaaaaaaccgccccggcgccaaccaggacggccctgcgaatataccaggttatggtaaaacgccttgacaagctcaattttatcatttccccgggatatttgcaaatattacggggcttttttcgcccttttaggaggaaattgtatgaaaagaataggtatttatggtagaaagtctgttttttcagataaatctgaatcaatt

SEQ ID NO: 16815 - DNA, 260 bp, Unknown; identical to SEQ ID NO: 15631
  Description of Unknown: LeftRegion for integrase B3816 sequence

SEQ ID NO: 16816 - DNA, 260 bp, Unknown; identical to SEQ ID NO: 15725
  Description of Unknown: LeftRegion for integrase B3817 sequence

SEQ ID NO: 16817 - DNA, 260 bp, Unknown
  Description of Unknown: LeftRegion for integrase B3818 sequence
gatggaagaggtgtttgatgcgagggtccgccgcattgaggcaagatactcgcatatgctcaaaatgcaaaacaggtggctgcggtttacggttgtcttgtgtctttgccttaccgtgtttatcatcgtcatgctgttgtatgatgttgcgcatccgaacatcggatggatacgagatcatcttaattagggagaaaaaaatggatacgcttgcagatgttgtcgtgtatgccagatacagctcagcagggcagaacgat

SEQ ID NO: 16818 - DNA, 260 bp, Unknown; identical to SEQ ID NO: 15411
  Description of Unknown: LeftRegion for integrase B3819 sequence

SEQ ID NO: 16819 - DNA, 260 bp, Unknown
  Description of Unknown: LeftRegion for integrase B3820 sequence
attattctggtatattataccagtggtaatatttggtattttttttgacgcataaaaaaaccgcccaactcggcaaagttggacggcggcacctaacaaaggtaggcactataatattaactgcaattatattataaaccataggcctgcttttgtataggcttattttttatgcaatttattagaaagtaggtatttctatggttagaatcgcaagttatttaagaaaatcagtatattcagacaaatcggacagtata

SEQ ID NO: 16820 - DNA, 260 bp, Unknown; identical to SEQ ID NO: 16746
  Description of Unknown: LeftRegion for integrase B3821 sequence

SEQ ID NO: 16821 - DNA, 260 bp, Unknown; identical to SEQ ID NO: 16741
  Description of Unknown: LeftRegion for integrase B3822 sequence

SEQ ID NO: 16822 - DNA, 260 bp, Unknown
  Description of Unknown: LeftRegion for integrase B3823 sequence
cttgagcgccttgatgacttctcttgacgagtagcttctcatgtcggcttccctcctgacatgattagtataacacatagtattatatttgtcaatcggcaattacaaatatttctatatttgtttttttgatttcagcataacaaaagctgccctgcaccgattgctcggggcaattatgaaagaaggagtcaatcaaaatgtggatgcttccccaaatgtccgtcgatgacatcataatgtatctccggaagtcccga

SEQ ID NO: 16823 - DNA, 260 bp, Unknown
  Description of Unknown: LeftRegion for integrase B3824 sequence
taggagatgatatacctaagataaaagaaattatcgtttatccaaataatactcttttattaaatttgaatgatggctctagtattactaaaacttggaatgacatatcaagaagtaattcctggactgatgagatgaaagaagaggctagaaagcgttctttgaagcaatgggaaaatataaaaagggagggtaagtaaatggcaaaagtaacagttattccttccactaaagttagtacattctctaatgcctttaat

SEQ ID NO: 16824 - DNA, 260 bp, Unknown; identical to SEQ ID NO: 14232
  Description of Unknown: LeftRegion for integrase B3825 sequence

SEQ ID NO: 16825 - DNA, 260 bp, Unknown
  Description of Unknown: LeftRegion for integrase B3826 sequence
agggaaatgtacagatgttggagaagtctttggatattctcttgatattgatgaaatagaataaataataaaaaagccggctcctgcgaccaacaggaaccggtttaataaataagataatctcggagaaaatcttacctacactatgattatatcatctcctggattatcgcacaagttaaaaaaaggagaatgataaaatgaatgaatcagtatgcatctatctaaggaaatccagagctgatcgggaagctgaagcg

SEQ ID NO: 16826 - DNA, 260 bp, Unknown
  Description of Unknown: LeftRegion for integrase B3827 sequence
aagggaaatgtacagatgttggagaagtctttggatattctcttgatattgatgaaatagaataaataataaaaaagccggctcctgcgaccaacaggaaccggttttaataaataagataatccggagaaaatcttacctacactatgattatatcatctcctggattatcgcacaagttaaaaaaggagaatgataaaatgaatgaatcagtatgcatctatctaaggaaatccagagccgatcgggaagctgaagcg

SEQ ID NO: 16827 - DNA, 260 bp, Unknown
  Description of Unknown: LeftRegion for integrase B3828 sequence
agagcttttagatagcggtattattactcaagaagaatttgaccagaaaaaatcagaacttttataaaaagaaccggctcctgctaccaacgggaaccggttttttgaaaaataagacaatctcggtgataatcttacctacacattaagtatatcatctccgggattgccgtacaagtgtaaaaaaggagaatgatgaaatgaatgaatcagtatgcatctatttaaggaaatccagagccgatcgggaagctgaagca

SEQ ID NO: 16828 - DNA, 260 bp, Unknown
  Description of Unknown: LeftRegion for integrase B3829 sequence
aagggaaatgtacagatgttggagaagtctttggatattctcttgatattgatgaaatagaataaataataaaaaagccggctcctgcgaccaacaggaaccggttttaataaataagataatccggagaaaatcttacctacaccataattatatcatctcctggattatcgcacaagtaaaaaaaggagaatgataaaatgaatgaatcagtatgcatctatctaaggaaatccagagccgatcgggaagctgaggcg

SEQ ID NO: 16829 - DNA, 260 bp, Unknown; identical to SEQ ID NO: 16828
  Description of Unknown: LeftRegion for integrase B3830 sequence

SEQ ID NO: 16830 - DNA, 260 bp, Unknown; identical to SEQ ID NO: 16825
  Description of Unknown: LeftRegion for integrase B3831 sequence

SEQ ID NO: 16831 - DNA, 260 bp, Unknown
  Description of Unknown: LeftRegion for integrase B3832 sequence
agatagatggatttttgctgaaagcttttatatttacttatgttttgttacatgttattatatttttacacaaaaaaccgactcctgcggccaacaggaaccggtttaataaataagatagtctcggagaaaatcttacctacaccataattatatcatctcctggattatcgcacaagtaaaaaaaggagaatgataaaatgaatgaatcagtatgtatctatttaaggaaatccagagccgatcgggaagctgaagca

SEQ ID NO: 16832 - DNA, 260 bp, Unknown
  Description of Unknown: LeftRegion for integrase B3833 sequence
gctttgtcagcgtttcggtagatttttccgtttttcagcaaaataaaaacgcccacggtgttacaagcaccgcaggcgttccagatcagcttgctcagagatggtacaggataaaacctgtccagagcaataacaaacctcgcagatgttattgtaccacctccgggcaggcttgtcaaagtgtacccggaggtatttttatgggcaaaaaacaaaagacaaacggcggcgatgcggtcatctacgcccgctattcttcc

SEQ ID NO: 16833 - DNA, 260 bp, Unknown
  Description of Unknown: LeftRegion for integrase B3834 sequence
tctgaagatgccttcaataagaaaatcgattatattactgtctttccaggcaatgtactaagaattaaaagagttgatggaaacgaagatgatattacatggaatgatccaaaaagaagtgaaggatggactccagaaatgagagaaaaggcaaggcaaagggctaaagcgcattacaagaaagaaggagctgatgaataatggcaaaagtaacaataataccttcaaagattaatccaattacacatcagcatcttgat

SEQ ID NO: 16834 - DNA, 260 bp, Unknown
  Description of Unknown: LeftRegion for integrase B3835 sequence
agatagatggatttttgctgaaagcttttatatttacttatgttttgttacatgttattatatttttacacaaaaaaccgactcctgcgaccaacaggaaccggtttaataaataagataatctcggagaaaatcttacctacaccataattatatcatctcctggattatcacacaagtaaaaaaaggagaatgataaaatgaatgaatcagtatgcatctatctaaggaaatccagagccgatcgggaagctgaagca

SEQ ID NO: 16835 - DNA, 260 bp, Unknown; identical to SEQ ID NO: 16825
  Description of Unknown: LeftRegion for integrase B3836 sequence

SEQ ID NO: 16836 - DNA, 260 bp, Unknown
  Description of Unknown: LeftRegion for integrase B3837 sequence
caatcatagaatcaaccattacagtcaatacagatttttacattgttggtgatatacctttagaaaaactcgacagcaattgcttgagcagcaacggacgaaagcttgaacgcctgcttgataagggtgagtgctatgcaacggagctggatgaagataaactgttagccctgctcgcggaagaataaccgaggtatcgcatgaaatttaagtatcccgccatgggaacaacaaaaaacgcggttatctatgcccgatac

SEQ ID NO: 16837 - DNA, 260 bp, Unknown; identical to SEQ ID NO: 16825
  Description of Unknown: LeftRegion for integrase B3838 sequence

SEQ ID NO: 16838 - DNA, 260 bp, Unknown
  Description of Unknown: LeftRegion for integrase B3839 sequence
cacaattaaagtctaaaataaaaagccgccccggtgcgccaacaccagagcggcaatcgatcatccggaaaatggataatccataacatttacataataccattttccgggacgccaaacaatcagaatatttgttctggtgtttttttgtactctttttactatgtatttacatgattatgatacggaggtatggaattatgagattttttaactacggacgtaaatctgtttactctgacaaatcagattctatcgat

SEQ ID NO: 16839 - DNA, 260 bp, Unknown
  Description of Unknown: LeftRegion for integrase B3840 sequence
aggaaaatgtacagatgttggagaagtccttggatattctcttgatattgatgaaatagaataaataataaaaaagccggctctcgctaccaacgggaaccggttttaataaataagataatccggagaaaaatcttacctacaccataattatatcatctcctggattatcacacaagtaaaaaaaggagaatgataaaatgaatgaatcggtatgtatctatctaaggaaatccagagctgatcgagaagctgaggcg

SEQ ID NO: 16840 - DNA, 260 bp, Unknown
  Description of Unknown: LeftRegion for integrase B3841 sequence
gtcgatgacctaaaaaaatatgaaagcggagaacggtgtatttctaggaacaccatggaaaaaatgataaattattctccattcaagcagtggagtgaagagtttggcgatacagtattcaacgattctgagtacaataaaatcgctgaatacgccagatttatgttatatctgagaaaaaataaaggagatgacagcacatgttaaaatataattctgaaacgaatctcgactccgatattgactctgacattgataaa

SEQ ID NO: 16841 - DNA, 260 bp, Unknown
  Description of Unknown: LeftRegion for integrase B3842 sequence
gtcgatgacttaaaaaaatatgaaagcggagaacggtgtatttctaggaacaccatggaaaaaatgataaattattctccattcaagcagtggagtgaagagtttggcgatacagtattcaacgattctgagtacaataaaatcgctgaatacgccagatttatgttatatctgagaaaaaataaaggagatgacagtacatgttaaaatataattctgaaacgaatctcgactccgatattgactctgacattgataaa

SEQ ID NO: 16842 - DNA, 260 bp, Unknown
  Description of Unknown: LeftRegion for integrase B3843 sequence
atgtacaactgtcggagaagtactggggtattctcttgatattgatgaaatagaataaatgtaaaaaaaaagaaccggctctcgctaccaacgggaaccggttttgaaaaataagacaattccagagaaaaatcttacctacacattaagtatatcatctccgggattgccatacaagtgcaaaaaaggagaatgataaaatgaatgaatcagtatgcatctatttaaggaaatccagagccgatcgggaagctgaagcg

SEQ ID NO: 16843 - DNA, 260 bp, Unknown
  Description of Unknown: LeftRegion for integrase B3844 sequence
tgcgcttcgcgcgcagctttcccagcagcagaaatccctgcgtatgcaccggcttgtgacactcatcctcttgggtattcttttgctgtgtgcccttgcgcttttggtcgacgtactcagtccatcaatcggctggatccgcacataaaaaatcaaccgccccggcctgataagccggagcggtatttctggaggttgccatggacggcctgaatcttgcaaacgttgtgatctatgcgcggtattcttctgccggtcag

SEQ ID NO: 16844 - DNA, 260 bp, Unknown
  Description of Unknown: LeftRegion for integrase B3845 sequence
taatagaccaactcatacagctccgcaaatctcaaggcctcactcagaaagacctagccgctgctgccaatcttgcacagccggccattgcacggcttgagagcaaatcagcggtaccgcagcttgataccttcgtgaaggtagccggagcactcggctataccatagaacttgtacaccaataactagggagtgattatatgctattacttgagaatttaataatgtatctccgaaaatcccgctccgatgacatcagc

SEQ ID NO: 16845 - DNA, 260 bp, Unknown
  Description of Unknown: LeftRegion for integrase B3846 sequence
ttatcgaccagctcattgcgcttcgcaaatctaaaggtctcacccaaaaagaccttgccgctgctgccaacctcgcacagcccgccattgcccgcatggaaagtaaagccgctgttccgcagcttgatactttcgtcaaagtagccggagcgctcggctacactatagagcttgtacaacaatgatataggagtgattatatgctattacctgaaaacttaataatgtatcttcgcaaatcccgttccgatgacgctgcc

SEQ ID NO: 16846 - DNA, 260 bp, Unknown; identical to SEQ ID NO: 16827
  Description of Unknown: LeftRegion for integrase B3847 sequence

SEQ ID NO: 16847 - DNA, 260 bp, Unknown
  Description of Unknown: LeftRegion for integrase B3848 sequence
cgtattgacgacctgcaacgtgccattgcgcggaaggagcgctggaacaaacgtttcttcgttctctgcgtctgccttactgcgtttatactccttctttttgcggtcgatatcctgaccccaaatatcggttggttccgagcataacaaaaaagccgccccggttggagaaaccggagcggcatctttggaggttttttatggatggtctgaatcttgccaacgttgtgatttatgctcggtattcttccgctgggcag

SEQ ID NO: 16848 - DNA, 260 bp, Unknown
  Description of Unknown: LeftRegion for integrase B3849 sequence
aaatattacctattcaattataacactgcatttatcaaaaagcaacaggaatatgtacaaacaatgtaagaatattttgttgcgaggtgatattatggaaataaccgaagcagagatagaaatcattacaaggcagattgttaaaatcatcataaatcatcaacgtgacgcatcagctgtcggtcctgaggacgctgacgatgaataagctcagagccgcagcctattgccgtgtttcaaccgaccgtgccgagcaatcc

SEQ ID NO: 16849 - DNA, 260 bp, Unknown
  Description of Unknown: LeftRegion for integrase B3850 sequence
aagggaaatgtacagatgttggagaagtctttggatattctcttgatattgatgaaatagaataaataataaaaaagccggctcctgcgaccaacaggaaccggttttaataaataagataatccggagaaaatcttacctacaccataattatatcatctcctggattatcacacaagtaaaaaaaggagaatgataaaatgaatgaatcagtatgcatctatctaaggaaatccagggccgatcgggaagctgaagcg

SEQ ID NO: 16850 - DNA, 260 bp, Unknown
  Description of Unknown: LeftRegion for integrase B3851 sequence
aaatgtacggatgtcggagaagtgcttggatattctcttgatattgatgaaatagaataaatgctaaaaaagaccggctctcgctaccaacggggaccggtttttaaaaataagacaattccagagaaaaatcttacctgcacattaagtatatcatctccgggattgccatacaagtgtaaaaaaaggagaatgataaaatgaatgaatcagtatgtatctatttaaggaaatccagagccgatcgggaagctgaagcg

SEQ ID NO: 16851 - DNA, 260 bp, Unknown
  Description of Unknown: LeftRegion for integrase B3852 sequence
ggcggattcgacggtatgaagtatggatgcaatatagaacttgcattttataaaaactaggcaaaacaaaaaccgcccgacgctgcaacgtcgaacggctcgtataaggcttattgccaatatttagcaaatatattatagcataagccttacaatttgtgtaggcttattttttatactcttttttaggtggtgttactatgttaatgattgctgattatagtagaaaatctgtatacagtgataaatcagatagcacg

SEQ ID NO: 16852 - DNA, 260 bp, Unknown
  Description of Unknown: LeftRegion for integrase B3853 sequence
tacttaccgccgagatcgcccaggcagtggaagccgaaaggctgagaagagatgccctttacaagggtacaagatacacgaaggaagcggtgactacggtgatccctacaaggtttgccatgaagcgtaccgctccgaaatgccaagatccaatcaagcaggcagaatacgcctacagtcagataaaggcggcgaagtaaatgcaggcactggcacagaatgttaccgtcattccggcacgaagacgagtcggttcacag

SEQ ID NO: 16853 - DNA, 260 bp, Unknown
  Description of Unknown: LeftRegion for integrase B3854 sequence
taaatttttttatcttggtaatatatgtaagaaatatattaagaattaaaataaccgcttccggcaagaagcggttacaaataattacctacaaaaagtaataggtcttatataaaaagccattgaaattataacataagccatactttttgtataggcttattttttatactcatttttaagaaagttggtgtttttttatgacaataattgcttgttacagtcgaaaatcaatttacagtgacaaatctgatagcaca

SEQ ID NO: 16854 - DNA, 260 bp, Unknown
  Description of Unknown: LeftRegion for integrase B3855 sequence
caaaagcctccgcacccagcgcgatcagcttcgaaaatccctgaaaatgcaccgtatcaccacccttgtcctgctcggcatcgtcgcgctttgcgcttttgctctggtggtggatatcctgagccccaacctcggttggttccgtgcataaaaaatagccgccccggcgcactgccggagcggtatctttggaggttcttatggatcatggcctgaatctcgtcaacgttgtgatttacgcccggtattcatccgtcggc

SEQ ID NO: 16855 - DNA, 260 bp, Unknown
  Description of Unknown: LeftRegion for integrase B3856 sequence
aggaaaatgtacagatgttggagaagtccttggatattctcttgatattgatgaaatagaataaataataaaaaagccggctcctgcgaccaacgggaaccggttttaataaataagataatctcggagaaaatcttacctacactatgattatatcatctcctggattatcgcacaagttaaaaaaggagaatgataaaatgaatgaatcagtatgcatctatctaaggaaatccagagccgatcgggaagctgaagca

SEQ ID NO: 16856 - DNA, 260 bp, Unknown; identical to SEQ ID NO: 16850
  Description of Unknown: LeftRegion for integrase B3857 sequence

SEQ ID NO: 16857 - DNA, 260 bp, Unknown
  Description of Unknown: LeftRegion for integrase B3858 sequence
cattatacatacaaaataaaaactactttccccttcggcggaattgtatataaaattttaatttattatatttaaaacaaaaaaatccccgactgctaccaacagtcggggaaatagtgtagtgttatggtacaccaattaaaaacatatatattgtaccataacaccgattaaaaatcaagttaagaggtgttatttttatgaaaaaaactaaaaattcagtgcaaagggctgttatatatgcacgttattcgtgtagt

SEQ ID NO: 16858 - DNA, 260 bp, Unknown
  Description of Unknown: LeftRegion for integrase B3859 sequence
aaatattacctatttaattataacactgcatttagcaaaaagcaacaggaatatgtacaaacaatgtaagaatattttgttgcgaggtgatattatggaaataaccgaagcagagatagaaataattacaaggcagattgttaaaatcatcataaatcatcaacgtgacgcatcagctgtcattcctgaggatgcagacgatgaataagctcagagccgcagcctattgccgtgtttcgaccgaccgtgccgagcaatcc

SEQ ID NO: 16859 - DNA, 260 bp, Unknown
  Description of Unknown: LeftRegion for integrase B3860 sequence
aataatagtgaatttacgtaatttgtaccaaattattatgctttatttatttttatattgtgctataatttaaaaaaccgactcctgcgaccaacaggaaccggtttaataaataagataatccggagaaaatcttacctacacaatgattatatcatctcctggattatcgcacaagtaaaaaaaaggagaatgataaaatgaatgaatcagtatgcatctatctaaggaaatccagagccgatcgggaagctgaagca

SEQ ID NO: 16860 - DNA, 260 bp, Unknown
  Description of Unknown: LeftRegion for integrase B3861 sequence
gaaaatgtacagatgttggagaagtccttggatattctcttgatattgatgaaatagaataaataataaaaaagccggctctcgctaccaacgggaaccggttttaataaataagataatccggagaaaaatcttacctacaccataattatatcatctcctggattatcgcacaagtaaaaaaaaaggagaatgataaaatgaatgaatcagtatgcatctatctaaggaaatccagagccgatcgggaagctgaagca

SEQ ID NO: 16861 - DNA, 260 bp, Unknown
  Description of Unknown: LeftRegion for integrase B3862 sequence
ctttttttacataccaaccatctttttttaacattttaagcagctctttacttgtcatcttatcgctcctttcaattatattatacgcctattttatgcgtatgtcaagtatattttcaattatctcagttattttttcttgtttcgaacaaattttcgttatataatagacttatcaaattcaaaaggagtgcttttctatgattacttttgacaacataattatatatttaagaaaatctcgttctgatgaccctaat

SEQ ID NO: 16862 - DNA, 260 bp, Unknown
  Description of Unknown: LeftRegion for integrase B3863 sequence
ttggaatgttggaggactggccgaaggtcagtcgtagtggaagcaaggctgcgctggaagacgcacaggctgaaattgagcggtggaggcaagagttccttgccgggaacatctcggcaaagaaatacgtcaaaatcgcggacgctctcatgtccaaataaaaaaagccgccctcggtgggcggcgggaggttgctctgaatgtgtgcaaaaaagaaaccggccatgcttgagccggatatgcaggatgccgtgatctac

SEQ ID NO: 16863 - DNA, 260 bp, Unknown
  Description of Unknown: LeftRegion for integrase B3864 sequence
cttgatcccgcggaacattgaaatcgttggcatttgatcaactcctttgttgtaactataatatagcgtattcgcgcttaaatgtcaatagcgaatttgctattgacttgcgggcatcttgcacaaaatatcctgttactttttgtgcacattgcgcccgctctgagatggtacaatctgtgtgataggaggttatccaaatgcccgattgtttgtatttgcgtaagtcccgcgttgatatggaggcggaggcgcgcggc

SEQ ID NO: 16864 - DNA, 260 bp, Unknown
  Description of Unknown: LeftRegion for integrase B3865 sequence
taataatagtgctttgccgtaatttgcaccaaattattatactttatttattttcatattatgctataatttaaaaaaccgactcctgctaccaacaggaaccggtttaataaataagataatctcggagaaaatcttacctacaccatgattatatcatctcctggattatcacacaagtaaaaaaggagaatgataaaatgaatgaatcagtatgcatctatttaaggaaatccagggccgatcgggaagctgaagca

SEQ ID NO: 16865 - DNA, 260 bp, Unknown
  Description of Unknown: LeftRegion for integrase B3866 sequence
tccaagcaggaacagatcatccgccagaagtccgtcgaggcgcggcgcaaggatgttttgatctgcgttctggtgtgcatcgttctcgtcgcgcttctgtcgctccttgtcgatctttgtaatcccaatatcggctgggtccgcacatgcaaattaccgccccggcccgatcagccagagcggtatctttggaggcttttgtggataatttgaatcttgccaacgtcgtgatctacgcccggtattcttccgccgggcaa

SEQ ID NO: 16866 - DNA, 260 bp, Unknown
  Description of Unknown: LeftRegion for integrase B3867 sequence
agatagatggatttttgctgaaagcttttatatttacttatgttttgttacatgttattatatttttacacaaaaaaccgactcctgcgaccaacaggaaccggtttaataaataagataatctcggagaaaatcttacctgcaccatgattatatcatctcctggattatcacacaagtaaaaaaaggagaatgataaaatgaatgaatcagtatgcatctatctaaggaaatccagggccgatcgggaagctgaagca

SEQ ID NO: 16867 - DNA, 260 bp, Unknown; identical to SEQ ID NO: 16834
  Description of Unknown: LeftRegion for integrase B3868 sequence

SEQ ID NO: 16868 - DNA, 260 bp, Unknown; identical to SEQ ID NO: 16828
  Description of Unknown: LeftRegion for integrase B3869 sequence

SEQ ID NO: 16869 - DNA, 260 bp, Unknown
  Description of Unknown: LeftRegion for integrase B3870 sequence
acgcggccctgcgtgagcagctggcgcagcagcagaaatccctgcgtatgcaccggcttgtgacgcttatcctgctcagcatcgtcgcgctttgcgcttttgctctggtggtggatatcttgagccctaccctcggttggtttcgtgcataaaaatagccgccccggcgcattgccggagcggtgtctttggaggtttttatggatcatgatctgaatctcgctaacgttgtgatttacgcccggtattcatccgccggc

SEQ ID NO: 16870 - DNA, 260 bp, Unknown
  Description of Unknown: LeftRegion for integrase B3871 sequence
gcacagatgtcggagaagtactggggtattctcttgatattgatgaaatagaataaatgttaaaaaaagaaccggctctcgctaccaacgggaaccggtttttaaaaataagacaattccagagaaaaatcttacctacacattaagtatatcatctccgggattgccgtacaagtgcaaaaaaaaaggagaatgataaaatgaacgaatcagtatgtatctatttgagaaaatccagagccgatcgggaagctgaggca

SEQ ID NO: 16871 - DNA, 260 bp, Unknown
  Description of Unknown: LeftRegion for integrase B3872 sequence
aactggagaagtggaagatctgaacgcagaggaaactgaataaaaaaatcgcccggcgcttccaacgccagacgatctcgtgaaatccttgcagacacagccgttcagctggctacaatgctctctagtcaagagaattatagcacagttcatggcgcctgcataggtgttatttttatacccttttttaggaggttcttatgaacatttgttgctatggcaggaagtcgatctattctgatcactcagattctatcgac

SEQ ID NO: 16872 - DNA, 260 bp, Unknown
  Description of Unknown: LeftRegion for integrase B3873 sequence
tcagacaacggatactcgaacttggataagtattcagcaatatttaacgtatcagtaaattaataaattaaaaaaagccggctcctgcgaccaacaggaaccggttttaataaataagataatccggagaaaaatcttacctacaccataattataccatctcctggattatcacacaagtaaaaaaggagaatgataaaatgaatgaatcagtatgcatctatctaaggaaatccagagcagatcgggaagctgaagca

SEQ ID NO: 16873 - DNA, 260 bp, Unknown
  Description of Unknown: LeftRegion for integrase B3874 sequence
attctttcccctgttacaatattttaattccagaaaactataaagttatgctgtaaaagaaccgcctttgcagacggtcctttaccggaaaaacttttttgaaataaaactatatttggggatagttcggttgtatctttcgatactttattattataatacgactttttatccccctacaacacaagtgaggtataaatatgcgtaatgatccaattttatctttaaaccaggttatcatatacctgcgaaaatcccgt

SEQ ID NO: 16874 - DNA, 260 bp, Unknown
  Description of Unknown: LeftRegion for integrase B3875 sequence
agaacttttagatagtggcattattacacaagaagaattcaatcagaaaaaaacagaacttttgtaaaaaaagaaccggctctcgctaccaacgaggaccggtttttaaaaataagacaattccagagaaaaatcttacctacgcattaagtatatcatttccgggattgccgcacaagtgcaaaaaggagaatgataaaatgaatgaatcagtatgtatctatctaagaaaatccagagccgatcgggaagctgaagcg

SEQ ID NO: 16875 - DNA, 260 bp, Unknown
  Description of Unknown: LeftRegion for integrase B3876 sequence
agagcttttagatagcggtattattactcaagaagaatttgaccagaaaaaatcagaacttttataaaaaagaaccggctctcgctaccaacgaggaccggtttttaaaaataagacaattccagagaaaaatcttacctacacattaagtatatcatctccgggattgccgtacaagtgtaaaaaaggagaatgatgaaatgaatgaatcagtatgcatctatttaaggaaatccagagccgatcgggaagctgaagca

SEQ ID NO: 16876 - DNA, 260 bp, Unknown; identical to SEQ ID NO: 16828
  Description of Unknown: LeftRegion for integrase B3877 sequence

SEQ ID NO: 16877 - DNA, 260 bp, Unknown
  Description of Unknown: LeftRegion for integrase B3878 sequence
aaatattacctatttaattataacactgcatttatcaaaaagcaacaggaatatgtacaaacaatgtaagaatattttgttgcgaggtgatattatggaaataaccgaagcagagatagaaataattacaaggcagattgttaaaatcatcataaatcatcaacgtgacgcatcagctgtcattcctgaggatgcagacgatgaataagctcagagccgcagcctattgccgtgtttcgaccgaccgtgccgagcaatcc

SEQ ID NO: 16878 - DNA, 260 bp, Unknown
  Description of Unknown: LeftRegion for integrase B3879 sequence
ccgcgcaacgtccgatgaccgcaaaaaatggcgcaatatcttctgcgttgttgcctttatagccattgcgacaatcatgctggcgattgtcgctgacgttcttaataaaggcgtgggcttcttctggcttgaagatcattcggttataggggattttgcaaacaatgttataaatcatataaaaggcgggaacttataggatgaatacagaccaaataatagaaaaagtaacaagtcaatatacacaagacaagtatgca

SEQ ID NO: 16879 - DNA, 260 bp, Unknown
  Description of Unknown: LeftRegion for integrase B3880 sequence
ctcggcggaatcaatgccgacagcgttacaaagaaaaccaactttcttgttttggggaacaacgacctgtgttcctcaatcaaagacggcaagagttccaaacataaaaaagccgaaaagtacattttgggcggtgcagacctgtctattatcccggaaaatgttttttatgatatgttagacgaataaagggtgattgtatgcgggcttttatttactgccgattttccagccataagcagcaagagcttagcatagag

SEQ ID NO: 16880 - DNA, 260 bp, Unknown
  Description of Unknown: LeftRegion for integrase B3881 sequence
atttgctgggtcttagtacagtaagaaaaccgcaaacctgcaatctcacggaagaagaacgccttttgctggaagcctaccgttcagccagcactcagggacgcttccatatcattcaggtttgcatgaacgaaaaaacagacgcacccaaaggggaggtagttgccgggtgattgacttagcagaatggaggaagaaccatgtatgaggatataaaaacagcctgcctttatgtcagattttccagccataatcagacg

SEQ ID NO: 16881 - DNA, 260 bp, Unknown; identical to SEQ ID NO: 16850
  Description of Unknown: LeftRegion for integrase B3882 sequence

SEQ ID NO: 16882 - DNA, 260 bp, Unknown
  Description of Unknown: LeftRegion for integrase B3883 sequence
atgccgcaaaagaaaaaggaattgacataaaaactgattaaaaataaaaaccgccccggcggcaaccggaacggcttttagatagattctcttaccaggtttacccggaaagataattcaactcaacacttgaattataccatctccggcgcgtcctggcaaggggcgtattttctatacactttttgggaggtggacatatgatattctgttgttatgggcgtaaatctgtgtactctgaccgctccgactccgtggac

SEQ ID NO: 16883 - DNA, 260 bp, Unknown; identical to SEQ ID NO: 16828
  Description of Unknown: LeftRegion for integrase B3884 sequence

SEQ ID NO: 16884 - DNA, 260 bp, Unknown
  Description of Unknown: LeftRegion for integrase B3885 sequence
ttccagaaaatgttttttatgatataatttctgaaaattaataaaaaccgcccctgcttaacagagacggctttaagaatctttgcagttgtaaatgctcaattctttcctggacagttagaattatagcatatttgtttacacctgcaaaggtgtattttttatacccttttttacataaaatatcacggaggtgtgttatgagtcttgaaaatgtatgtatctatttaagaaagtcccgcgctgatcaggaagctgag

SEQ ID NO: 16885 - DNA, 260 bp, Unknown
  Description of Unknown: LeftRegion for integrase B3886 sequence
aagagcttttagatagcggtattattactcaagaagaatttgaccagaaaaaatcagaacttttataaaaagaaccggctcctgctaccaacgggaaccggttttttgaaaaataagacaatctcggtgataatcttacctacacattaagtatatcatctccgtgattgccgcacaagtacaaaaaggagattgataacatgaatgaatcagtatgcatctatttaaggaaatccagagccgatcgggaagctgaagca

SEQ ID NO: 16886 - DNA, 260 bp, Unknown; identical to SEQ ID NO: 15796
  Description of Unknown: LeftRegion for integrase B3887 sequence

SEQ ID NO: 16887 - DNA, 260 bp, Unknown
  Description of Unknown: LeftRegion for integrase B3888 sequence
ccgcgcaacgtccgatgaccgcaaaaaatggcgcaacatcttctgcattgttgcctttatagccattgcgataatcatgctggcgattgtctttgacgttcttaataaaggcgtgggcttcttctggcttgaagatcattcggatataggggattttgcaaacaatgttataaatcatataaaaggcgggaacttataggatgaatacagaccaaataatagaaaaagtaacaagtcaatatacacaagacaagtatgca

SEQ ID NO: 16888 - DNA, 260 bp, Unknown
  Description of Unknown: LeftRegion for integrase B3889 sequence
aaagggaaatgtacagatgttggagaagtctttggatattctcttgatattgatgaaatagaataaataataaaaaagccggctcctgcgaccaacaggaaccggttttaataaataagataatccggagaaaatcttacctacaccataattatatcatctcctggattatcgcacaagtaaaaaaggagaatgataaaatgaatgaatcagtatgtatctatctaaggaaatccagagctgatcgggaagctgaagca

SEQ ID NO: 16889 - DNA, 260 bp, Unknown; identical to SEQ ID NO: 16888
  Description of Unknown: LeftRegion for integrase B3890 sequence

SEQ ID NO: 16890 - DNA, 260 bp, Unknown
  Description of Unknown: LeftRegion for integrase B3891 sequence
aaggaaaatgtacagatgttggagaagtctttggatattctcttgatattgatgaaatagaataaataataaaaaagccggctcctgcgaccaacaggaaccggtttaataaataagataatctcggagaaaatcttacctacaccataattatatcatctcctggattatcgcacaagttaaaaaaggagaatgataaaatgaatgaatcagtatgtatctatctaaggaaatccagagctgatcgggaagctgaggca

SEQ ID NO: 16891 - DNA, 260 bp, Unknown
  Description of Unknown: LeftRegion for integrase B3892 sequence
aggaaaatgtacagatgttggagaagtccttggatattctcttgatattgatgaaatagaataaataataaaaaagccggctctcgctaccaacgggaaccggttttaataaataagataatccggagaaaaatcttacctacaccataattatatcatctcctggattatcgcacaagtaaaaaaaggagaatgataaaatgaatgaatcagtatgcatctatctaaggaaatccagagcagatcgggaagctgaagca

SEQ ID NO: 16892 - DNA, 260 bp, Unknown; identical to SEQ ID NO: 16825
  Description of Unknown: LeftRegion for integrase B3893 sequence

SEQ ID NO: 16893 - DNA, 260 bp, Unknown
  Description of Unknown: LeftRegion for integrase B3894 sequence
agagcttttagatagcggtattattactcaagaagaatttgaccagaaaaaatcagaacttttataaaaagaaccggctcctgctaccaacgggaaccggttttttgaaaaataagacaatctcggtgataatcttacctacacattaagtatatcatctccgggattgccgtacaagtgtaaaaaaggagaatgatgaaatgaatgaatcagtatgcatctatttaaggaaatccagagccgatcgggaagctgaaaca

SEQ ID NO: 16894 - DNA, 260 bp, Unknown
  Description of Unknown: LeftRegion for integrase B3895 sequence
taatagaccaactaatacagctccgcaaagctaaaggtctcacccaaaaagaccttgccgctgctgccaacctcgctcagcctgccattgcacggcttgaaagtaagtcagcagttccacagcttgacacattcgtcaaggtagccggagcacttggctacaccatagagcttgtgcaggaataataaagaggtgattgaatgatactgcttgaaaatctgataatgtatctcaggaagtcccgctccgatgacataagc

SEQ ID NO: 16895 - DNA, 260 bp, Unknown; identical to SEQ ID NO: 16875
  Description of Unknown: LeftRegion for integrase B3896 sequence

SEQ ID NO: 16896 - DNA, 260 bp, Unknown
  Description of Unknown: LeftRegion for integrase B3897 sequence
ggcagagtaacattaactgatgaagaattcgaaaaaataattgagtatggaaaatttctgttatatatgagaaacgatgacgaatgatgtagtgctaagattgcttacatagtaaagtaagtggcattaaaggaggtgagtacaatgtagtcgcctaattaattcgcgtatatcaccaaaacaatcggaggagaaaagtcatgacagtatttgaaatgaatgacgcgattaatgatgcattcactggaaagatggacaaa

SEQ ID NO: 16897 - DNA, 260 bp, Unknown
  Description of Unknown: LeftRegion for integrase B3898 sequence
ccgcgcaacatccgatgaccgcaaaaaatggcgcaatatcttctgcgttgttgcctttatagccattgcgataatcatgctggcgattgccgctgacgttcttaataaaggcgtgggcttcttctggcttgaagatcattcggttataggggattttgcaaacaatgttataaatcatataaaaggcgggaacttataggatgaatacagaccaaataatagaaaaagtaacaagtcaatatacacaagacaagtatgca

SEQ ID NO: 16898 - DNA, 260 bp, Unknown
  Description of Unknown: LeftRegion for integrase B3899 sequence
aaaatgtacagatgttggagaagtccttggatattctcttgatattgatgaaatagaataaataataaaaaagccggctctcgctaccaacgggaaccggttttaataaataagataatccggagaaaaatcttacctacaccataattatatcatctcctggattatcacacaagtaaaaaaaaaaggagaatgataaaatgaatgaatcagtatgcatctatctaaggaaatccagagcagatcgggaagctgaagca

SEQ ID NO: 16899 - DNA, 260 bp, Unknown
  Description of Unknown: LeftRegion for integrase B3900 sequence
gatagatggatttttgctgaaagcttttatatttacttatgttttgttacatgttattatatttttacacaaaaaaccgactcctgcgaccaacaggaaccggtttaataaataagataatctcggagaaaatcttacctacaccatgattatatcatctcctggattatcacacaagtaaaaaaaaggagaatgataaaatgaatgaatcagtatgtatctatttaaggaaatccagagccgatcgggaagctgaagca

SEQ ID NO: 16900 - DNA, 260 bp, Unknown
  Description of Unknown: LeftRegion for integrase B3901 sequence
cgtttccgctctttgattgtagcgcggctctgcgatttctgcaagccgtgagtttttgaaaaaagaagtgcccggcgctggtacgaacagcgtcgggctgaatggaagcattcacacaaaacgaaggtaaatctttttgcgcctgctgggtctattgtaccacctcccggccgggcgcgcaagccgggaggttttattttatgtctcgcacatctcgcaaagtaaaagcaccggactccaccgaggcggtcacccgtctg

SEQ ID NO: 16901 - DNA, 260 bp, Unknown
  Description of Unknown: LeftRegion for integrase B3902 sequence
aaggaaaatgtacagatgttggagaagtccttggatattctcttgatattgatgaaatagaataaataataaaaaagccggctctcgctaccaacgggaaccggttttaataaataagataatccggagaaaatcttacctacaccataattatatcatctcctggattatcacacaagtaaaaaaaggagaatgataaaatgaatgaatcagtatgcatctatctaaggaaatccagggccgatcgggaagctgaagcg

SEQ ID NO: 16902 - DNA, 260 bp, Unknown; identical to SEQ ID NO: 16855
  Description of Unknown: LeftRegion for integrase B3903 sequence

SEQ ID NO: 16903 - DNA, 260 bp, Unknown
  Description of Unknown: LeftRegion for integrase B3904 sequence
gcagcccttcgcgcgcagtttgcccagcagcagaagtccctgcacatgcaccggcttgtgacgctcatcctcttgggtattcttttgctgtgcgcccttgcgcttgtggccgacgtgctcatcccatcgatcggctggattcgcacatgaaaattaccgccccggcctgatcagccggagcggtatctttggaggcttttgtggataatttgaatcttgccaacgtcgtgatctacgcccggtattcttccgccgggcaa

SEQ ID NO: 16904 - DNA, 260 bp, Unknown
  Description of Unknown: LeftRegion for integrase B3905 sequence
cgatgatgactttgacgatgacgatgacggcgaacctttaaaatggggtctgcattttaacattaaattcaggaaataaaaaaagacccgctcctgcgggaacaggaacgagtcagacatcaaccacccaaagcgtcagtaagttgatatatttattatatcagcccgctcgccaaaaagcaagaaagcgaggcttttttatggagaacgcagtaatttatgcgagatattcttccgataagcaaacggagcagagcatt

SEQ ID NO: 16905 - DNA, 260 bp, Unknown; identical to SEQ ID NO: 16850
  Description of Unknown: LeftRegion for integrase B3906 sequence

SEQ ID NO: 16906 - DNA, 260 bp, Unknown
  Description of Unknown: LeftRegion for integrase B3907 sequence
aaatattacctatttaattataacactgcatttagcaaaaagcaacaggaatatgtacaaacaatgtaagaatattttgttgcgaggtgatattatggaaataaccgaagcagagatagaaataattacaaggcagattgttaaaatcatcataaatcatcaacgtgacgcatcagctgtcggtcctgaggatgcagacgatgaataagctcagagccgcagcctattgccgtgtttcgaccgaccgtgccgagcaatcc

SEQ ID NO: 16907 - DNA, 260 bp, Unknown
  Description of Unknown: LeftRegion for integrase B3908 sequence
atagatggatttttgctgaaagcttttatatttacttatgttttgttacatgttattatatttttacacaaaaaaaccgactcctgcgaccaacaggaaccggtttaataaataagataatctcggagaaaatcttacctgcaccataattatatcatctcctggattatcacacaagtaaaaaaaaggagaatgataaaatgaatgaatcagtatgcatctatctaaggaaatccagagcagatcgggaagctgaagcg

SEQ ID NO: 16908 - DNA, 260 bp, Unknown
  Description of Unknown: LeftRegion for integrase B3909 sequence
aaaatgtacggatgtcggagaagtgcttggatattctcttgatattgatgaaatagaataaatgctaaaaaagaccggctctcgctaccaacgaggaccggtttttaaaaataagacaattccagagaaaaatcttacctacacattaagtatatcatctccgggattgccacacaagtgcaaaaaaggagaatgatgaaatgaacgaatcagtatgtatctatttgaggaaatccagagccgatcgggaagctgaagca

SEQ ID NO: 16909 - DNA, 260 bp, Unknown; identical to SEQ ID NO: 16834
  Description of Unknown: LeftRegion for integrase B3910 sequence

SEQ ID NO: 16910 - DNA, 260 bp, Unknown
  Description of Unknown: LeftRegion for integrase B3911 sequence
atattgatagctatgctggaaatagttacgcaaaatattccgcaatatttaatgtcccaattagataaataaaaaataccggctcctgcgaccaacaggaaccggtttaataaataagataatctcggagaaaatcttacctacaccataattatatcatctcctggattatcgcacaagtaaaaaaggagaatgataaaatgaatgaatcagtatgtatctatctaaggaaatccagagctgatcgggaagctgaggca

SEQ ID NO: 16911 - DNA, 260 bp, Unknown
  Description of Unknown: LeftRegion for integrase B3912 sequence
gtgattctcaatatattgtaagcaaataacttttatataaaaaccgcccctgctggtaacaaggacggcttttcaagaatctttgcagttgtgaatgctcaattctttcctggacagttagaattatagcatatttatttgcacctgcaaaggtgtattttttatacccttttttacataaaatatcacggaggtgtgctatgagtctcgaaaacgtatgtatctatttaagaaagtcccgcgctgatcaggaggctgaa

SEQ ID NO: 16912 - DNA, 260 bp, Unknown
  Description of Unknown: LeftRegion for integrase B3913 sequence
gcttatgatggtgcttataacggaatttcaaattatttttcaaatgatgaattggaaaatagcacaaacaacatttcactaaaaaatatacttaaaggctttgcacaatattataacaaagaacttaatcaaaaagtaataaatgaaggcaaataagccttcatttttaatagatattataaaaggaaggagcaataaaattgaatgtagtaatttatgcaagatttagttcacacaaccaaacagaacaatctattgaa

SEQ ID NO: 16913 - DNA, 260 bp, Unknown
  Description of Unknown: LeftRegion for integrase B3914 sequence
aataatagtgaatttacgtaatttgtactaaattattatgctttatttatttttatattgtgctataatttaaaaaaccgactcctgcgaccaacaggaaccggtttaataaataagataatctcggagaaaatcttacctacactataattatatcatctcctggattatcacacaagtaaaaaaaggagaatgataaaatgaatgaatcagtatgcatctatttaaggaaatccagagctgatcgggaagctgaagca

SEQ ID NO: 16914 - DNA, 260 bp, Unknown
  Description of Unknown: LeftRegion for integrase B3915 sequence
aaagtacactggtatatattgccagtggtaatatttggtagttttttaacacataaaaaaaccgcccaactcggcaaagttggacggcggcacctaacaaagtaggcactataatattaactgcaattatattataaaccataggcctgcttttgtataggcttattttttatgcaatttattagaaagtaggtatttctatggttagaatcgcaagttatttaagaaaatcagtatattctgataaatcagacagcata

SEQ ID NO: 16915 - DNA, 260 bp, Unknown; identical to SEQ ID NO: 15725
  Description of Unknown: LeftRegion for integrase B3916 sequence

SEQ ID NO: 16916 - DNA, 260 bp, Unknown
  Description of Unknown: LeftRegion for integrase B3917 sequence
tccttttggaattgcaccggtgcaactactttcaattttataaattaactaataataaaaaaccgccccggtgccaaccgggacggaaagcgaatataccagatgatggtaaaacgccctgaacaagcttattttatcatttgcctagtatatttgcaacgatattaccgggcatttttatgcccagaaatgaggtttctatgaagatcggtatttatggaaggaaatctgtgttttcggacaagtcggaatctatcgaa

SEQ ID NO: 16917 - DNA, 260 bp, Unknown
  Description of Unknown: LeftRegion for integrase B3918 sequence
caaaagcctccgcatccagcgcgagcatctgcagaaatccctgcgtatgcaccggcttgtgacgcttatcctgctcagcatcgtcgcgctttgcgcttttgctctggtggtagatatcctgagccccaccctcggttggttccgtgcataaaaaatagccgccccggcgcactgccggagcggtatctttggaggtttttatggatcatggtctgaatctcgccaacgttgtgatttacgcccggtattcatccgccggc

SEQ ID NO: 16918 - DNA, 260 bp, Unknown
  Description of Unknown: LeftRegion for integrase B3919 sequence
tattgatagctatgctggaaatagttacgcaaaatattccgcaatatttaatgtcccaattagataaataaaaaataccggctcctgcgaccaacaggaaccggtttaataaataagataatctcggagaaaatcttacctacaccataattatatcatatcctggattatcgcacaagtaaaaaaaggagaatgataaaatgaatgaatcagtatgcatctatctaagaaaatccagggccgatcgtgaagctgaagcg

SEQ ID NO: 16919 - DNA, 260 bp, Unknown
  Description of Unknown: LeftRegion for integrase B3920 sequence
aatgcacagatgtcggagaagtccttggatattcttttgatattacagaaatagaataaatactaaaaagaaccggctctcgctaccaacgggaaccggtttttgaaaaataagacaattccggagaaaaatcttacctacacattaagtatatcatctccgggattgccgtacaagtgtaaaaaaaggagaatgataaaatgaacgaatcagtatgtatctatttaagaaaatccagggccgatcgagaagctgaagca

SEQ ID NO: 16920 - DNA, 260 bp, Unknown; identical to SEQ ID NO: 16888
  Description of Unknown: LeftRegion for integrase B3921 sequence

SEQ ID NO: 16921 - DNA, 260 bp, Unknown
  Description of Unknown: LeftRegion for integrase B3922 sequence
aaaatgttttttatgatataatttctgaaaattaataaaaaccgccccctgctggtaacaaggacggcttttgagaatctttgcagttgtgaaactgtgttcaattcttcatggacagttgaattatagcacacttctttacatctgcaaaggtgtattttttatacccttttttacgtaaaatatagtggaggtgtgctatgagtcttgaaaatgtatgtatctatttaaggaaatcccgtgctgatcgggaagccgaa

SEQ ID NO: 16922 - DNA, 260 bp, Unknown; identical to SEQ ID NO: 16859
  Description of Unknown: LeftRegion for integrase B3923 sequence

SEQ ID NO: 16923 - DNA, 260 bp, Unknown
  Description of Unknown: LeftRegion for integrase B3924 sequence
aggaaaatgtacagatgttggagaagtccttggatattctcttgatattgatgaaatagaataaataataaaaaagccggctctcgctaccaacgggaaccggttttaataaataagataatccggagaaaaatcttacctacaccataattatatcatctcctggattatcgcacaagtaaaaaaaggagaatgataaaatgaatgaatcagtatgcatctatctaaggaaatccagagccgatcgggaagctgaagca

SEQ ID NO: 16924 - DNA, 260 bp, Unknown
  Description of Unknown: LeftRegion for integrase B3925 sequence
ttcttttaggtctaagtgaacttagaaaaccgcagacttgtacattttctgaggaagaacgcctcttactggaagcctaccgttcagccagcacccagggacgtttccatatcattcaggtttgcatgaacgaaaaaacaaccgcacccaaaggggaggtagttgccgggtgattgacttagcagaatggaggaaaaaccatgtttgaggatgtaaaaacagcctgcctttacgtcagattttccagccataatcagacg

SEQ ID NO: 16925 - DNA, 260 bp, Unknown
  Description of Unknown: LeftRegion for integrase B3926 sequence
gatagatggatttttgctgaaagcttttatatttacttatgttttgttacatgttattatatttttacacaaaaaaccgactcctgcgaccaacaggaaccggtttaataaataagataatctcggagaaaatcttacctacaccataattatatcatctcctggattatcgcacaagtaaaaaaaaggagaatgataaaatgaatgaatcagtatgcatctatctaaggaaatccagagccgatcgggaagctgaagca

SEQ ID NO: 16926 - DNA, 260 bp, Unknown
  Description of Unknown: LeftRegion for integrase B3927 sequence
tgtgattctcaatatactgtaagcaaataactttatataaaaaccgcccctgctggtaacaaggacggcttttcaagaatctttgcagttgtgaatgctcaattctttcctggacagttagaattatagcatatttatttacacctgcaaaggtgcattttttatacccttttttacataaaatatcacggaggtgtgctatgagtcttgaaaatgtatgtatctatttaagaaagtcccgcgctgatcgggaggctgaa

SEQ ID NO: 16927 - DNA, 260 bp, Unknown
  Description of Unknown: LeftRegion for integrase B3928 sequence
ttaggagagttcattgtagctctccttatttttatatacaaaaaaagaattagaaagtgtttgagttttcgcacagtacaaccacttatctaattccgacaatcactattgaaagcgatttctataatattataacattatagttactccgttttcaatagtttattagtaaatttaattgaaaatggaggtattttattttgtataataatataaataataatatggaaatgtatattaaatatttaagaaaatctaga

SEQ ID NO: 16928 - DNA, 260 bp, Unknown; identical to SEQ ID NO: 14770
  Description of Unknown: LeftRegion for integrase B3929 sequence

SEQ ID NO: 16929 - DNA, 260 bp, Unknown
  Description of Unknown: LeftRegion for integrase B3930 sequence
aatattcagataacggatattcggattcagacaaatattccgcaatatttaatgtatcagtaaactaataaaaaaaccggctctcgctaccaacgggaaccggtttaataaataagatagtctcggagaaaatcttacctacaccataattatatcatctcctggattatcacacaagtaaaaaaaaggagaatgataaaatgaatgaatcagtatgtatctatctaaggaaatccagggccgatcgggaagctgaagca

SEQ ID NO: 16930 - DNA, 260 bp, Unknown
  Description of Unknown: LeftRegion for integrase B3931 sequence
tgcttatgtaaaaatctgcactgcccttgccaaactgaagaaatgaaaaaaatcgcccggcgcttccaacgccagacgatctcttaaatcttgcagacagccgttcagctggctacaattccctctcgacacgagaattatagcacagttcatggcacctgcataggtgttatttttatacccttttttaggaggttcttatgaacatttgttgctatggtagaaagtcgatctattctgatcactcagattctatcgac

SEQ ID NO: 16931 - DNA, 260 bp, Unknown
  Description of Unknown: LeftRegion for integrase B3932 sequence
cttgtgcctgtcggcgaataattggcaaataactttatataaaaaccgcccctgttggtaacaaggacggctttaagaatctttgcagttgtgaatgctcaattctttcctggacagttagaattatagcatatttatttacacctgcaaaggtgtattttttatacccttttttacataaaatatcacggaggtgtgctatgagtcttgaaaatgtatgtatctatttaagaaagtcccgcgctgatcgggaagctgaa

SEQ ID NO: 16932 - DNA, 260 bp, Unknown
  Description of Unknown: LeftRegion for integrase B3933 sequence
acttttagatagtggcattattacacaagaagaattcaatcagaaaaaaacagaacttttgtaaaaaaagaaccggctctcgctaccaacgggaaccggttttgaaaaaaataagacaattccagagaaaaatcttacctacacattaagtatatcatctccgggattgccgtacaagtgtaaaaaaggagaatgatgaaatgaatgaatcagtatgcatctatctaaggaaatccagagccgatcgagaagctgaggca

SEQ ID NO: 16933 - DNA, 260 bp, Unknown
  Description of Unknown: LeftRegion for integrase B3934 sequence
atgtttgaaatggtgatggcttccgaccgttgccgtcaaataccatccatttgcttttaagattttgatgacttcccgtgacgaataacttttcatctccttcctccttatgtatatattataacacatattattatatttgtcaagggctttgactaatatttttctatttgttgtttggcgaaagaaggtatatgcggatgaatgcggtcatctatgcgagatactcgtcggataagcaaacggagcagtccattgaa

SEQ ID NO: 16934 - DNA, 260 bp, Unknown
  Description of Unknown: LeftRegion for integrase B3935 sequence
aagggaaatgtacagatgttggagaagtctttggatattctcttgatattgatgaaatagaataaataataaaaaagccggctcctgcgaccaacaggaaccggttttaataaataagataatccggagaaaatcttacctacaccataattatatcatctcctggattatcacacaagtaaaaaaaggagaatgataaaatgaatgaatcagtatgcatctatctaaggaaatccagggccgatcgtgaagctgaagcg

SEQ ID NO: 16935 - DNA, 260 bp, Unknown
  Description of Unknown: LeftRegion for integrase B3936 sequence
caaaagcctccgcatccagcgcgatcagcttcgaaaatccctgaaaatgcaccgcatcaccactcttgtcctgctcggcatcgtcgcgctttgtgcttttgctctggtggtggatatcctgagtccaaccctagggtggttccgtgcataaaaaatagccgccccggcgcactgccggagcggtatctttggaggtttttatggatcatggcctgaatctcgccaacgttgtgatttacgcccggtattcatccgccggt

SEQ ID NO: 16936 - DNA, 260 bp, Unknown
  Description of Unknown: LeftRegion for integrase B3937 sequence
atattgatagctatgctggaaatagttacacaaaatattccgcaatatttaatgttccaattagataaataaaaagccggctcctgcgaccaacaggaaccggtttaataaataagataatctcggagaaaatcttacctacaccataattatatcatctcctggattatcacacaagtaaaaaaaaggagaatgataaaatgaatgaatcagtatgtatctatttaaggaaatccagagccgatcgggaagctgaagcg

SEQ ID NO: 16937 - DNA, 260 bp, Unknown
  Description of Unknown: LeftRegion for integrase B3938 sequence
agcttttagatagtggcattatcactcaggaagaattcaatcagaaaaaaacagaacttttgtaaaaaaagaaccggctctcgctaccaacgggaaccggttttgaaaaataagacaattccagagaaaaatcttacctacacattaagtatatcatctccgggattgccgtacaagtgtaaaaaaaggagaatgataaaatgaacgaatcagtatgtatctatttgaggaaatccagagccgatcgggaagctgaagca

SEQ ID NO: 16938 - DNA, 260 bp, Unknown; identical to SEQ ID NO: 16828
  Description of Unknown: LeftRegion for integrase B3939 sequence

SEQ ID NO: 16939 - DNA, 260 bp, Unknown
  Description of Unknown: LeftRegion for integrase B3940 sequence
tcttgcggtctgcgtcgtgtcgctcccggtcggcttgatcattgtggccattggagcgtaccgggtggcaaaggccggggatatttatgacgctgcggtcgctcggtacgaacagcaaatctcggactatgttgactggctggatgaagtcaacgcaaaataaaaagccgccctcggtgggcggtgggaggttgctctgaatgtgtgcaaaaaagaaaccggccatgcttgagccggatatgcaggatgccgtgatctac

SEQ ID NO: 16940 - DNA, 260 bp, Unknown
  Description of Unknown: LeftRegion for integrase B3941 sequence
aataatagtgaatttacgtaatttgtaccaaattattatgctttatttatttttatattgtgctataatttaaaaaaccgactcctgcgaccaacaggaaccggtttaataaataagataatctcggagaaaatcttacctacaccataattataccatctcctggattatcgcacaagtaaaaaaaggagaatgataaaatgaatgaatcagtatgcatctatctaaggaaatccagggccgatcgggaagctgaagca

SEQ ID NO: 16941 - DNA, 260 bp, Unknown
  Description of Unknown: LeftRegion for integrase B3942 sequence
gacaggtaaaagaatctctcgattctgtatcattagaataataaaaaccgcccctgcttaacagagacggctttaagaatctttgcagttgtgattgctcaattctttcctggacagttagaattatagcatatttatttgcacctgcaaaggtgtattttttatacccttttttacataaaatatcacggaggtgtgctatgagtctcgaaaatgtatgtatctatttaagaaagtcccgcgctgatcgggaggctgaa

SEQ ID NO: 16942 - DNA, 260 bp, Unknown; identical to SEQ ID NO: 16855
  Description of Unknown: LeftRegion for integrase B3943 sequence

SEQ ID NO: 16943 - DNA, 260 bp, Unknown
  Description of Unknown: LeftRegion for integrase B3944 sequence
ggaaaatgtacagatgttggagaagtccttggatattctcttgatattgatgaaatagaataaataataaaaaagccggctctcgctaccaacgggaaccggttttaataaataagataatccggagaaaaatcttacctacaccataattatatcatctcctggattatcgcacaagtaaaaaaaaggagaatgataaaatgaatgaatcagtatgcatctatctaaggaaatccagagcagatcgggaagctgaagcg

SEQ ID NO: 16944 - DNA, 260 bp, Unknown; identical to SEQ ID NO: 16827
  Description of Unknown: LeftRegion for integrase B3945 sequence

SEQ ID NO: 16945 - DNA, 260 bp, Unknown; identical to SEQ ID NO: 16877
  Description of Unknown: LeftRegion for integrase B3946 sequence

SEQ ID NO: 16946 - DNA, 260 bp, Unknown; identical to SEQ ID NO: 16834
  Description of Unknown: LeftRegion for integrase B3947 sequence

SEQ ID NO: 16947 - DNA, 260 bp, Unknown; identical to SEQ ID NO: 16921
  Description of Unknown: LeftRegion for integrase B3948 sequence

SEQ ID NO: 16948 - DNA, 260 bp, Unknown
  Description of Unknown: LeftRegion for integrase B3949 sequence
cgtataaaaatgatttggacagctttacattagaggacgtttcagaattatgcggcatttttcgtgacgatgcgcacagaagtctctctgactgcttcgcaactggcgctgtgttcaaaaactgtattgaagatattacaaacaaataaccatgtgttgcgtggttatcaattcatctatgaaattaactgggggacggtatgcgggcttttatttactgccggttttcgagccacaaacagcaggaattaagcatcgaa

SEQ ID NO: 16949 - DNA, 260 bp, Unknown
  Description of Unknown: LeftRegion for integrase B3950 sequence
aaatattacctatttaattataacactgcatttatcaaaaagcaacaggaatatgtacaaacaatgtaagaatattttgttgcgaggtgatattatggaaataaccgaagcagagatagaaatcattacaaggcagattgttaaaatcatcataaatcatcaacgtgatgcatcagctaccaattctgaggacgcagacgatgaataagctcagagccgcagcctattgccgtgtttcgaccgaccgtgccgaacaatcc

SEQ ID NO: 16950 - DNA, 260 bp, Unknown; identical to SEQ ID NO: 16841
  Description of Unknown: LeftRegion for integrase B3951 sequence

SEQ ID NO: 16951 - DNA, 260 bp, Unknown; identical to SEQ ID NO: 16849
  Description of Unknown: LeftRegion for integrase B3952 sequence

SEQ ID NO: 16952 - DNA, 260 bp, Unknown
  Description of Unknown: LeftRegion for integrase B3953 sequence
ataatagtgttttgccgtaatttgcactaaattattatactttatttattttcatattatgctataatcaaaaaaaccgactcctgctaccaacaggaaccggttttaataaataagataatctcggagaaaatcttacctacaccatgattatatcatctcctggattatcacacaagttaaaaaaggagaatgataaaatgaatgaatcagtatgtatctatttaaggaaatccagagccgatcgggaagctgaagcg

SEQ ID NO: 16953 - DNA, 260 bp, Unknown
  Description of Unknown: LeftRegion for integrase B3954 sequence
ggaaaatgtacagatgttggagaagtccttggatattctcttgatattgatgaaatagaataaataataaaaaagccggctctcgctaccaacgggaaccggttttaataaataagataatccggagaaaaatcttacctacaccataattatatcatctcctggattatcgcacaagtaaaaaaaaggagaatgataaaatgaatgaatcagtatgcatctatctaaggaaatccagagctgatcgagaagctgaggcg

SEQ ID NO: 16954 - DNA, 260 bp, Unknown
  Description of Unknown: LeftRegion for integrase B3955 sequence
aaatattacctattaaattataacactgcatttatcaaaaagcaacaggaatatgtacaaacaatgtaagaatattttgttgcgaggtgatattatggaaataaccgaagcagagatagaaatcattacaaggcagattgttaaaatcatcataaatcatcaacgtgacgcatcagctgtgggtcctgaggatgcagacgatgaataagctcagagccgcagcctattgccgtgtttcgaccgaccgtgccgagcaatct

SEQ ID NO: 16955 - DNA, 260 bp, Unknown
  Description of Unknown: LeftRegion for integrase B3956 sequence
aatgtacggatgtcggagaagtacttggatattctcttgatattgatgaaatagaataaatactaaaaaagaccggctctcgctaccaacgaggaccggtttttaaaaaataagactattccagagaaaaatcttacctgcacattaagtatatcatctccgggattgccgtacaagtgtaaaaaaaggagaatgataaaatgaacgaatcagtatgcatctatttgaggaaatccagagccgatcgggaagctgaggcg

SEQ ID NO: 16956 - DNA, 260 bp, Unknown
  Description of Unknown: LeftRegion for integrase B3957 sequence
agatagatggatttttgctgaaagcttttatatttacttatgttttgttacatgttattatatttttacacaaaaaaccgactcctgcgaccaacaggaaccggtttaataaataagataatctcggagaaaatcttacctgcaccatgattatatcatctcctggattatcgcacaagtaaaaaaaggagaatgataaaatgaatgaatcagtatgcatctatctaaggaaatccagagccgatcgggaagctgaagca

SEQ ID NO: 16957 - DNA, 260 bp, Unknown
  Description of Unknown: LeftRegion for integrase B3958 sequence
aaatgtacggatgtcggagaagtgcttggatattctcttgatattgatgaaatagaataaatgctaaaaaagaccggctctcgctaccaacgaggaccggtttttaaaaataagacaattccagagaaaaatcttacctacacattaagtatatcatctccgggattgccatacaagtgcaaaaaaaggagaatgataaaatgaatgaatcagtatgtatctatttaaggaaatccagagccgatcgggaagctgaggcg

SEQ ID NO: 16958 - DNA, 260 bp, Unknown; identical to SEQ ID NO: 16825
  Description of Unknown: LeftRegion for integrase B3959 sequence

SEQ ID NO: 16959 - DNA, 260 bp, Unknown
  Description of Unknown: LeftRegion for integrase B3960 sequence
atgggactataataaatgtcgtgccgtttcccatgctgcaggagtttaatttggttcttgctgaacaatttcaacagctcgcttagcttcacgcgctctcccctcactttctgtatttattatagcacgtattcgcacgtatgtcaaggggtttcgaaaatattattattttttttgcttataaaaggagacatacatcagtgaacgcagtcatctatgcaagatattcctccgacaagcagacggagcaatctatcgaa

SEQ ID NO: 16960 - DNA, 260 bp, Unknown; identical to SEQ ID NO: 14762
  Description of Unknown: LeftRegion for integrase B3961 sequence

SEQ ID NO: 16961 - DNA, 260 bp, Unknown
  Description of Unknown: LeftRegion for integrase B3962 sequence
gaaaaacgcataataaaaaacgcccctttactaccagcacggaaataactaatctttatgcatttaaaacaaaaaagccggctcctgcgaccaacaggaaccggtttaataaataagataatctcggagaaaatcttacctacaccataattatatcatctcctggattatcacacaagtaaaaaaaggagaatgacaaaatgaacgaatcagtatgcatctatctaaggaaatccagagctgatcgggaagatgaggca

SEQ ID NO: 16962 - DNA, 260 bp, Unknown
  Description of Unknown: LeftRegion for integrase B3963 sequence
aaatattacctatttaattataacactgcatttatcaaaaagcaacaggaatatgtacaaacaatgtaagaatattttgttgcgaggtgatattatggaaataaccgaagcagagatagaaataattacaaggcagattgttaaaatcatcataaatcatcaacgtgacgcatcagctgtgggtcctgaggatgcagacgatgaataagctcagagccgcagcctattgccgtgtttcgaccgaccgtgccgagcaatcc

SEQ ID NO: 16963 - DNA, 260 bp, Unknown; identical to SEQ ID NO: 16844
  Description of Unknown: LeftRegion for integrase B3964 sequence

SEQ ID NO: 16964 - DNA, 260 bp, Unknown
  Description of Unknown: LeftRegion for integrase B3965 sequence
aaatgtacggatgtcggagaagtgcttggatattctcttgatattgatgaaatagaataaacgctaaaaaaagaccggctctcgctaccaacgaggaccggtttttaaaaataagacaattccagagaaaaatcttacctacacattaagtatatcatctccgggattgccgtacaagtgtaaaaaaggagaatgataaaatgaacgaatcagtatgtatctatttgaggaaatccagagccgatcgggaagctgaagcg

SEQ ID NO: 16965 - DNA, 260 bp, Unknown
  Description of Unknown: LeftRegion for integrase B3966 sequence
gacaggtaaaagaatctctcgattctgtatcattagaataataaaaaccgcccctgcttaacagagacggctttaagaatctttgcagttgtgaatgctcaattctttcctggacagttagaattatagcatatttatttacacctgcaaaggtgtattttttatacccttttttacataaaatatcacggaggtgtgctatgagtcttgaaaatgtatgtatctatttaagaaagtcccgtgctgatcgggaggctgaa

SEQ ID NO: 16966 - DNA, 260 bp, Unknown; identical to SEQ ID NO: 16825
  Description of Unknown: LeftRegion for integrase B3967 sequence

SEQ ID NO: 16967 - DNA, 260 bp, Unknown; identical to SEQ ID NO: 16921
  Description of Unknown: LeftRegion for integrase B3968 sequence

SEQ ID NO: 16968 - DNA, 260 bp, Unknown; identical to SEQ ID NO: 16955
  Description of Unknown: LeftRegion for integrase B3969 sequence

SEQ ID NO: 16969 - DNA, 260 bp, Unknown
  Description of Unknown: LeftRegion for integrase B3970 sequence
catcccttcgcgcgcagcttgcccagcatcagaagtccctgcgcatgcaccggcttgtgacgcttatcctcttgggtatcctttcgctgtgtgcccttgcgcttgtggccgacgtactcagcccatcaatcggctggatccgcacataaaaaacaaccgccccggtctgataagccggagcggtatttctggaggttgccatggacggcctgaatcttgcaaacgttgtgatctatgcgcggtattcttctgccgggcag

SEQ ID NO: 16970 - DNA, 260 bp, Unknown
  Description of Unknown: LeftRegion for integrase B3971 sequence
caaaagcctccgcatccagcgcgatcagcttcgaaaatccctgaaaatgcaccgcatcaccacccttgtcctgctcggcatcgtcgcgctttgcgcttttgctctggttgtggatatcttgagccctaccctcggttggtttcgtgcataaaaaatagccgccccggcgcactgccggagcggtatctttggaggtttttatggatcatggcctgaatctcgccaacgttgtgatttacgcccggtattcatccgtcggc

SEQ ID NO: 16971 - DNA, 260 bp, Unknown
  Description of Unknown: LeftRegion for integrase B3972 sequence
aagatagatggattttgctgaaagcttttatatttacttatgttttgttacatgttattatatttttacacaaaaaaccgactcctgcgaccaacaggaaccggtttaataaataagatagtctcggagaaaatcttacctacaccataattatatcatctcctggattatcacacaagtaaaaaaaggagaatgataaaatgaatgaatcagtatgtatctatttaaggaaatccagagccgatcgagaagctgaggca

SEQ ID NO: 16972 - DNA, 260 bp, Unknown
  Description of Unknown: LeftRegion for integrase B3973 sequence
agaaaaacgcataataaaaaacgcccctttactaccagcacggaaataactaatctttatgcatttaaaacaaaaaagccggctcctgcgaccaacaggaaccggtttaataaataagataatccggagaaaaatcttacctacaccataattatatcatctcctggattatcacacaagtaaaaaaggagaatgataaaatgaatgaatcagtatgcatctatctaaggaaatccagagccgatcgggaagctgaagca

SEQ ID NO: 16973 - DNA, 260 bp, Unknown
  Description of Unknown: LeftRegion for integrase B3974 sequence
taggcggttataatgataatagataaggacgtgaaatgcacgaatgaagctccatataaccgacgattcgcacgcatagatcgaagacatgccaaacattcggcttttcttcagctcttctcctgatcaggacattgagaatatggttttgggaatgtagttgcgggactctccacatcaacgggaggaagaaaacaagcatgaaacgagtattatgcctttacagggtttcaaccatcgggcaggtagaccatgacgat

SEQ ID NO: 16974 - DNA, 260 bp, Unknown; identical to SEQ ID NO: 16923
  Description of Unknown: LeftRegion for integrase B3975 sequence

SEQ ID NO: 16975 - DNA, 260 bp, Unknown
  Description of Unknown: LeftRegion for integrase B3976 sequence
gatagatggatttttgctgaaagcatttatatttacttatgttttgttacatgttattatatttttacacaaaaaaccgactcctgcgaccaacaggaaccggttttaataaataagataatccggagaaaaatcttacctacaccataattatatcatctcctggattatcacacaagtaaaaaaaggagaatgataaaatgaatgaatcggtatgtatctatctaaggaaatccagagctgatcgagaagctgaggcg

SEQ ID NO: 16976 - DNA, 260 bp, Unknown; identical to SEQ ID NO: 16959
  Description of Unknown: LeftRegion for integrase B3977 sequence

SEQ ID NO: 16977 - DNA, 260 bp, Unknown; identical to SEQ ID NO: 16828
  Description of Unknown: LeftRegion for integrase B3978 sequence

SEQ ID NO: 16978 - DNA, 260 bp, Unknown
  Description of Unknown: LeftRegion for integrase B3979 sequence
tgtgcctgtcggcgaataattggcaaataactttatataaaaaccgcccctgttggtaacaaggacggcttttcaagaatctttgcagttgtgaatgctcaattctttcctggacagttagaattatagcatatttatttgcacctgcaaaggtgtattttttatacccttttttacataaaatatcacggaggtgtgctatgagtcttgaaaatgtatgtatctatttaagaaagtcccgtgctgatcgggaggctgaa

SEQ ID NO: 16979 - DNA, 260 bp, Unknown
  Description of Unknown: LeftRegion for integrase B3980 sequence
tccaagcaagagcagatcatccgccagaagtccgtcgaggcgcggcgcaaggatgttttgatcggtgtgcttgtgtgcatcgttctcgtcgtgcttctggtgctcctcgtcgacctttgtaatctcaatatcggctgggtccgcgcataaataaaaccgccccgacccgatcagccggagcggtatctttggaggcttttgtggataatttgaatcttgccaacgtcgtgatctacgcccggtattcttccgccgggcaa

SEQ ID NO: 16980 - DNA, 260 bp, Unknown; identical to SEQ ID NO: 16882
  Description of Unknown: LeftRegion for integrase B3981 sequence

SEQ ID NO: 16981 - DNA, 260 bp, Unknown
  Description of Unknown: LeftRegion for integrase B3982 sequence
agaaaatgttttttatgatataatttctgaaaattaataaaaaccgcccctgctggtaacaaggacggcttttcaagaatctttgcagttgtgaatgctcaattctttcctggacagttagaattatagcatatttatttacacctgcaaaggtgcattttttatacccttttttacataaaatatcacggaggtgtgctatgagtcttgaaaatgtatgtatctatttaagaaagtcccgcgctgatcgggaggctgaa

SEQ ID NO: 16982 - DNA, 260 bp, Unknown; identical to SEQ ID NO: 16828
  Description of Unknown: LeftRegion for integrase B3983 sequence

SEQ ID NO: 16983 - DNA, 260 bp, Unknown
  Description of Unknown: LeftRegion for integrase B3984 sequence
aaagggaaatgtacagatgttggagaagtctttggatattctcttgatattgatgaaatagaataaataataaaaagccggctcctgcgaccaacaggaaccggttttaataaataagataatccggagaaaatcttacctacaccataattatatcatctcctggattatcgcacaagtaaaaaaaggagaatgataaaatgaatgaatcagtatgcatctatctaaggaaatccagagccgatcgggaagctgaggcg

SEQ ID NO: 16984 - DNA, 260 bp, Unknown
  Description of Unknown: LeftRegion for integrase B3985 sequence
tatgggacagagagaaacttgataatttaattgctacatccaaataaaagccgccccggcggcaaccggaacggcttttagatagattctcttaccaggtttacccggaaagataattcaaatcgacacttgaattataccatctccggcgcgtcctggcaaggggcgtattttttatacactttttgggaggtggacatatgatattttgttgctatgggcgtaaatctgtgtactctgaccgctccgactccgtggac

SEQ ID NO: 16985 - DNA, 260 bp, Unknown
  Description of Unknown: LeftRegion for integrase B3986 sequence
aaatattacctattcaattataacactgcatttatcaaaaagcaacaggaatatgtacaaacaatgtaagaatattttgttgcgaggtgatattatggaaataaccgaagcagagatagaaatcattacaaggcagattgttaaaatcatcataaatcatcaacgtgatgcatcagctgtgggtcctgaggatgcagacgatgaataagctcagagccgcagcctattgccgtgtttcgaccgaccgtgccgagcaatcc

SEQ ID NO: 16986 - DNA, 260 bp, Unknown
  Description of Unknown: LeftRegion for integrase B3987 sequence
ttggaatgttggaggactggccgaaggtcagtcgtagtggaagcaaggctgcgctggaagacgcacaggctgaaattgagcggtggaggcaagagttccttgccgggaacatctcggcaaagaaatacgtcaaaatcgcggacgctctcatgtccaaataaaaaaagccgccctcggtgggcggcgggaggttgctctgaatgtgtgcgaaaaagaaaccggccatgcttgagccggatatgcaggatgccgtgatctac

SEQ ID NO: 16987 - DNA, 260 bp, Unknown; identical to SEQ ID NO: 16858
  Description of Unknown: LeftRegion for integrase B3988 sequence

SEQ ID NO: 16988 - DNA, 260 bp, Unknown
  Description of Unknown: LeftRegion for integrase B3989 sequence
ttgtatgatcttatctggtattccggtgatactaaaatatcactttttatcggtacaccaaaggacaatgatacccttacatatttcagaatatggtatcagaaagatgatgatgcagccagcagatccgataatggaaatctttgatttataaataaaaatccccgcccggcgctggaacaccgaacggggagagggatatgtataaaatacacaccacagtaactgtattttatcatatcctgacgaaaaaatcaata

SEQ ID NO: 16989 - DNA, 260 bp, Unknown
  Description of Unknown: LeftRegion for integrase B3990 sequence
atgcaggaatatcaggtggataatctggatgacatcggctgttttgtaatccttgaaaaagaggaatttgcttgcgtcccgatgaatgaactagagtttatggaagtgttggaaatcggagcagaaagctatctgcacggtgtcagaatcattgatgacagctatggtgaagacatctatctgcccgttgaggtggtaagatgctgagtataccaaaggttgcacaatacgctcgattcagttcggataatcaacgaagt

SEQ ID NO: 16990 - DNA, 260 bp, Unknown
  Description of Unknown: LeftRegion for integrase B3991 sequence
tgtgcctgtcggcgaataattggcaaataactttatataaaaaccgcccctgttggtaacaaggacggcttttcaagaatctttgcagttgtgaatgctcaattctttcctggacagttagaattatagcatatttatttacacctgcaaaggtgtattttttatacccttttttacataaaatatcacggaggtgtgctatgagtcttgaaaatgtatgtatctatttaagaaagtcccgcgctgatcgggaagctgaa

SEQ ID NO: 16991 - DNA, 260 bp, Unknown
  Description of Unknown: LeftRegion for integrase B3992 sequence
gaaaatgtacggatgtcggagaagtacttggatattctcttgatattgatgaaatagaataaatgataaaaaaaaccggctctcgctaccaacgaggaccggtttttaaaaataagacaattccagagaaaaatcttacctgcacattaagtatatcatctccgggattgccatacaagtgtaaaaaggagaatgataaaatgaatgaatcagtatgcatctatttgaggaaatccagagccgaccgggaagctgaggcg

SEQ ID NO: 16992 - DNA, 260 bp, Unknown; identical to SEQ ID NO: 16866
  Description of Unknown: LeftRegion for integrase B3993 sequence

SEQ ID NO: 16993 - DNA, 260 bp, Unknown; identical to SEQ ID NO: 15631
  Description of Unknown: LeftRegion for integrase B3994 sequence

SEQ ID NO: 16994 - DNA, 260 bp, Unknown
  Description of Unknown: LeftRegion for integrase B3995 sequence
ggaaaatgtacagatgttggagaagtccttggatattctcttgatattgatgaaatagaataaataataaaaaagccggctctcgctaccaacgggaaccggttttaataaataagataatccggagaaaaatcttacctacaccataattatatcatctcctggattatcgcacaagtaaaaaaaaggagaatgataaaatgaatgaatcagtatgcatctatctaaggaaatccagagccgatcgggaagctgaagca

SEQ ID NO: 16995 - DNA, 260 bp, Unknown
  Description of Unknown: LeftRegion for integrase B3996 sequence
agcattgctgaatttgatgcaaatatctttgaaaatcaggttgaaaaaattcttgttcccgcaccaaacaaattgattattcaattaaaaaacgggaaatgcataaataccacatggaaagaccgttcacgttctgaaagctggacagaggaaaaacgggctgccgctgctaaatcatcaaaaacaaggagatggagaaaatgccaaaagtaacaaaaattccgccaagattaaatcctgccacttttgcacctttggag

SEQ ID NO: 16996 - DNA, 260 bp, Unknown
  Description of Unknown: LeftRegion for integrase B3997 sequence
aaaacgcataataaaaaaccgcccctgtgctaccagcgcggaattaactaatttttatgcatttaaaatgaaaaaagccggctcctgcgaccaacgggaaccggttttaataaataagataatctcggagaaaatcttacatacaccataattatatcatctcctggattatcgcacaagtaaaaaaggagaatgataaaatgaatgaatcagtatgtatctatttaaggaaatccagagccgatcgggaagctgaagca

SEQ ID NO: 16997 - DNA, 260 bp, Unknown
  Description of Unknown: LeftRegion for integrase B3998 sequence
aggagaatttgagcaaaagaaaaatcaattattaaatatgtaaaacaaaaccgccccggcggcaaccggaacggcttttagatagattctcttaccaggtttacccggaaagataattcaaatcgacacttgaattataccatctccggcgcgtcctggcaaggggcgtattttttatacacttttttggaggtggacatatgatattttgttgctatggacgtaaatctgtgtactctgaccgctccgattccgtggac

SEQ ID NO: 16998 - DNA, 260 bp, Unknown; identical to SEQ ID NO: 16882
  Description of Unknown: LeftRegion for integrase B3999 sequence

SEQ ID NO: 16999 - DNA, 260 bp, Unknown; identical to SEQ ID NO: 16849
  Description of Unknown: LeftRegion for integrase B4000 sequence

SEQ ID NO: 17000 - DNA, 260 bp, Unknown
  Description of Unknown: LeftRegion for integrase B4001 sequence
tatgggacagagagaaacttgataatttaattgctacatccaaataaaaaccgccccggcagcaaccggaacggcttttagatagattctcttaccaggtttacccggaaagataattcaaatcgacacttgaattataccatctccggcgcgtcctggcaaggggcgtattttttatacactttttgggaggtggacatatgatattttgttgttatggacgtaaatccgtgtactctgatcgctccgattccgtggac

SEQ ID NO: 17001 - DNA, 260 bp, Unknown
  Description of Unknown: LeftRegion for integrase B4002 sequence
gggaaatgtacagatgttggagaagtctttggatattctcttgatattgatgaaatagaataaataataaaaaagccggctcccgcgaccaacaggaaccggttttaataaataagataatccagagaaaaatcttacctacaccataattataccatctcctggattatcgcacaagtaaaaaaaaggagaatgataaaatgaacgaatcagtatgcatctatctaaggaaatccagagccgatcgggaagctgaagca

SEQ ID NO: 17002 - DNA, 260 bp, Unknown
  Description of Unknown: LeftRegion for integrase B4003 sequence
cggcggattcgacggtatgaagtatggatgcaatatagaacttgcattttataaaaactaggcaaaacaaaaaccgctcgacgctgcaacgtcgaacggctcgtataaggcttattgccaatatttagcaaatatattatagcataagccttacaatttgtgtaggcttattttttatactctttttaggtggtgttactatgttaatgattgctgattatagtagaaaatctgtatacagtgataaatcagatagcacg

SEQ ID NO: 17003 - DNA, 260 bp, Unknown
  Description of Unknown: LeftRegion for integrase B4004 sequence
tagaaaatgtggaagaatatttgaagtgaaactttaaggagaaatgaatatgaaaaagaaaaacgcataataaaaagccggctcctgcgaccaacaggaaccggttttaataaataagataatccggagaaaaatcttacctacaccataattataccatctcctggattatcacacaagtaaaaaaggagaatgataaaatgaacgaatcagtatgcatctatctaaggaaatccagggccgatcgtgaagctgaagca

SEQ ID NO: 17004 - DNA, 260 bp, Unknown
  Description of Unknown: LeftRegion for integrase B4005 sequence
aaatattacctattcaattataacactgcatttatcaaaaagcaacaggaatatgtacaaacaatgtaagaatattttgttgcgaggtgatattatggaaataaccgaagcagagatagaaatcattacaaggcagattgttaaaatcatcataaatcatcaacgtgatgcatcagctaccaattctgaggacgctgacgatgaataagctcagagccgcagcctattgccgtgtttcaaccgaccgtgccgagcaatcc

SEQ ID NO: 17005 - DNA, 260 bp, Unknown; identical to SEQ ID NO: 16855
  Description of Unknown: LeftRegion for integrase B4006 sequence

SEQ ID NO: 17006 - DNA, 260 bp, Unknown
  Description of Unknown: LeftRegion for integrase B4007 sequence
aagagcttttagatagcggtattattactcaagaagaatttgaccagaaaaaatcagaacttttataaaaagaaccggctcctgctaccaacgggaaccggttttttgaaaaataagacaatctcggtgataatcttacctacacattaagtatatcatctccgggattgccatacaagtgtaaaaaggagaatgataaaatgaatgaatcagtatgcatctatttaaggaaatccagagccgatcgagaagctgaggca

SEQ ID NO: 17007 - DNA, 260 bp, Unknown
  Description of Unknown: LeftRegion for integrase B4008 sequence
atcccttcgcgcgcagcttgcccagcatcagaagtccctgcgcatgcaccggcttgtgacgctcatcctcttgggtattctttcgctgtgtgcccttgcgcttgtggccgacgtactcagcccatcaatcggctggatccgcacataaaaaaacaaccgccccggtctgataagccggagcggtatttctggaggttgccatggacggcctgaatcttgcaaacgttgtgatctatgcgcggtattcttctgccgggcag

SEQ ID NO: 17008 - DNA, 260 bp, Unknown
  Description of Unknown: LeftRegion for integrase B4009 sequence
aaatgtacagatgtcggagaagtgctgggatattctcttgatattacagaaatagaataaatactaaaaagaaccggctctcgctaccaacgggaaccggtttttgaaaaataagacaattccggagaaaaatcttacctacacattaagtatatcatctccgggattgccgtacaagtgtaaaaaaggagaatgatgaaatgaatgaatcagtatgtatctatttgagaaaatccagagccgatcgggaagctgaggcg

SEQ ID NO: 17009 - DNA, 260 bp, Unknown; identical to SEQ ID NO: 16827
  Description of Unknown: LeftRegion for integrase B4010 sequence

SEQ ID NO: 17010 - DNA, 260 bp, Unknown; identical to SEQ ID NO: 16975
  Description of Unknown: LeftRegion for integrase B4011 sequence

SEQ ID NO: 17011 - DNA, 260 bp, Unknown; identical to SEQ ID NO: 14770
  Description of Unknown: LeftRegion for integrase B4012 sequence

SEQ ID NO: 17012 - DNA, 260 bp, Unknown
  Description of Unknown: LeftRegion for integrase B4013 sequence
ataactgtggtgcagactggaacgaacaggcagtaaagaaagcaaaggaatatttggactattcttctttctctcgttccgggctgattggtcagctgaaatatgaaggctttacaaatgagcaggccgaatacggcgtaactcaaaacggcctataattgtaatttcccgccacagcgggggcaaaggggtgaaatgcagtgcgggcgtttatctatggccgcttttccagccataagcagcaggaattaagcatagag

SEQ ID NO: 17013 - DNA, 260 bp, Unknown; identical to SEQ ID NO: 16991
  Description of Unknown: LeftRegion for integrase B4014 sequence

SEQ ID NO: 17014 - DNA, 260 bp, Unknown
  Description of Unknown: LeftRegion for integrase B4015 sequence
tccaagcaagagcagatcatccgccagaagtccgtcgaggcgcggcgcaaggatgttttgatcggtgtgcttgtgtgcatcgttctcgtcgtgcttctggtgctcctcgtcgacctttgtaatctcaatatcggctgggtccgcgcataaataaaaccgccccggcccgatcagccggagcggtatctttggaggcttttgtggataatttgaatcttgccaacgtcgtgatctacgcccggtattcttccgccgggcaa

SEQ ID NO: 17015 - DNA, 260 bp, Unknown
  Description of Unknown: LeftRegion for integrase B4016 sequence
agcattactgaatttgatgcaaatatctttgaaaatcaagttgaaaaaattcttgttcccgtaccaaacaaattgatttttcaattaacaaacgggaaatgcataaataccacatggaaagaccgttcccgttctgaaagctggacagaggaaaaacgtgctgccgctgctgaatcatcaaaaacaaggagatggagaaaatgccaaaagtaacaaaaattccgccaagattaaatcctgccacttttgcacctttggag

SEQ ID NO: 17016 - DNA, 260 bp, Unknown
  Description of Unknown: LeftRegion for integrase B4017 sequence
ttgacaaagaaatccagacaagatttctggaagaactgacacgaagggcagggaaccttggaaggctcaacagaagaagcaaggaacacaataagacagttcctacagcatttcatttcaagccagccgatttaacatttcctgatccatttgagcaggcagaatacatttacagtttgatagaaagcgaggaatgacacatggcaggagcaaagaacataacagttattccggcaaaaaaacgtgtaggtaatacagta

SEQ ID NO: 17017 - DNA, 260 bp, Unknown
  Description of Unknown: LeftRegion for integrase B4018 sequence
gacaggtaaaagaatctctcgattctgcatcattagaataataaaaaccgcccctgcttaacagagacggctttaagaatctttgcagttgtgaatgctcaattctttcctggacagttagaattatagcatatttatttacacctgcaaaggtgtattttttatacccttttttacataaaatatcacggaggtgtgctatgagtcttgaaaatgtatgtatctatttaagaaagtcccgcgctgatcgggaagctgaa

SEQ ID NO: 17018 - DNA, 260 bp, Unknown; identical to SEQ ID NO: 16850
  Description of Unknown: LeftRegion for integrase B4019 sequence

SEQ ID NO: 17019 - DNA, 260 bp, Unknown
  Description of Unknown: LeftRegion for integrase B4020 sequence
ccgcgcaacgtccgatgaccgtaaaaaatggcgcaatatcttctgcattgttgcctttatagccattgcgataatcatgctggcgattgtcgctgacgttcttaataaaggcgtgggattcttctggcttgaagatcattcggttataggggattttgcaaacaatgttataaatcatataaaaggcgggaacttataggatgaatacagaccaaataatagaaaaagtaacaagtcaatatacacaagacaagtatgca

SEQ ID NO: 17020 - DNA, 260 bp, Unknown
  Description of Unknown: LeftRegion for integrase B4021 sequence
aataatagtgaatttacgtaatttgtaccaaattattatgctttatttatttttatattgtgctataatttaaaaaaccgactcctgcgaccaacaggaaccggtttaataaataagataatctcggagaaaatcttacctgcaccataattatatcatctcctggattatcgcacaagtaaaaaaaggagaatgataaaatgaatgaatcagtatgcatctatctaaggaaatccagagccgatcgggaagctgaagca

SEQ ID NO: 17021 - DNA, 260 bp, Unknown
  Description of Unknown: LeftRegion for integrase B4022 sequence
atattctttcccctgttacaatattttaattccagaaaactataaagttatgctgtaaaagaaccgcctttgcagacggccctttaccggaaaaacttttttgaaataaaactatatttggggatagttcggttgtatctttcgatactttattattataatactactttttatcccctacaatacaaggaggcataaatatgcgtaatgatcctattttatctttgagtcatgttatcatctatcttcgaaaatcccgc

SEQ ID NO: 17022 - DNA, 260 bp, Unknown
  Description of Unknown: LeftRegion for integrase B4023 sequence
aagagcttttagatagcggtattattactcaagaagaatttgaccagaaaaaatcagaacttttataaaaagaaccggctcctgctaccaacgggaaccggttttttgaacaataagacaatctcggtgataatcttacctacacattaagtatatcatctccgtgattgccgcacaagtgtaaaaaggagaatgataaaatgaatgaatcagtatgcatctatttgagaaaatccagagccgatcgggaagctgaagca

SEQ ID NO: 17023 - DNA, 260 bp, Unknown
  Description of Unknown: LeftRegion for integrase B4024 sequence
tgttaagtatattatatgtcaaatccgtttatttgtcaaactgcaaaaaccgcccctgcgccaacaggaacggctttctataaccccgaagagttacatcaacattcataattcattgtatcatctccggggcagccatgcaagcggaacattcgttcctgctggctgttatttttgtactcaaaaaggaggatgattgaatgttttttggaatttatggaagaaaatctgtctattctgataagtctgattccgtagat

SEQ ID NO: 17024 - DNA, 260 bp, Unknown; identical to SEQ ID NO: 16943
  Description of Unknown: LeftRegion for integrase B4025 sequence

SEQ ID NO: 17025 - DNA, 260 bp, Unknown
  Description of Unknown: LeftRegion for integrase B4026 sequence
ataaataaaagcccctgtgctaccaacacaagagcttttaccacgatacttacataagctgtgcttatgatataataccgccttcgacaagccatattatatcattcatagcaccgcttttgcaagtggtgttatttttgtacccatttttgagttgcaccggtgcaacttgcatatattttacagaaaggatgattaatatggtatcatttgacagcattattatctatcttagaaagtcccgctctgatgatccggcg

SEQ ID NO: 17026 - DNA, 260 bp, Unknown
  Description of Unknown: LeftRegion for integrase B4027 sequence
aattcaactcgttagtaggacaaggaatcatgggaaatcaagagggatttaatactatgatcttatataaataaaaaaggacctattgcagcaacaataggaccgagtacagaaaataaaattacctaccacagcaattctttttctgtactctcattatagcaaatttaacgaatattcgcaataaggagagtaataaaatgaacaataattatgaaaatattacagtagatgatttattaaagaatctgcctatatac

SEQ ID NO: 17027 - DNA, 260 bp, Unknown
  Description of Unknown: LeftRegion for integrase B4028 sequence
ctggaagatgaattagtggaaagttttcccggattacgggctctgattaagaattgtaaataaaaaatcgcccggtgctgcgaacaccaggcgacctgttcttccttgcggaagctgtaaactctacgaataaattttacagcgtttccgataaatccgcaagggtttattttttatactcttttttgggaggtgggacgatgaggttcttttcctacggacgaaaatccgtattttctgataaatcagattcaatcgat

SEQ ID NO: 17028 - DNA, 260 bp, Unknown
  Description of Unknown: LeftRegion for integrase B4029 sequence
ccagatcagcgccgacgcatatgtgaaggtctgcacgcctttggctaagatggcaaaataaaaaaatcgcccagtgctgcgaacaccaggcgacctgttcttccttgcggaagctgtaaactctacgaataaattttacagcgtttccgataaatccgcaagggtttattttttatactctttttttgggaggtgagacgatgaggttcttttcctacggacgaaaatccgtattttctgataaatcagattcaatcgat

SEQ ID NO: 17029 - DNA, 260 bp, Unknown; identical to SEQ ID NO: 17026
  Description of Unknown: LeftRegion for integrase B4030 sequence

SEQ ID NO: 17030 - DNA, 260 bp, Unknown
  Description of Unknown: LeftRegion for integrase B4031 sequence
ttaagtatattatatgtcaaatacgtttatttgtcaaattacaaaaccgcccagtgctaccaacactgaacggttttagaaccccggagggctcatatagattttccaaatttcattgtatcatctccggggcagccatgcaagcggaacattcgttcctgctggctgttatttttgtactcaaaaaggaggatgattgaatgttttttgggatttatggaagaaaatctgtctattccgataagtctgattccgtagat

SEQ ID NO: 17031 - DNA, 260 bp, Unknown
  Description of Unknown: LeftRegion for integrase B4032 sequence
ctggatgatgaattcgtggaaaacttccccggattacgggctctgattaagaattgtaaataaaaaaatcgcccagtgctgcgaacaccaggcgacctgttcttccttgcggaagctgtaaactctacgaataaattttacagcgtttccgataaatccgcaagggtttatttttatactcttttttgggaggtgagacgatgaggttcttttcctacggacgaaaatccgtattttctgataaatcagattcaatcgat

SEQ ID NO: 17032 - DNA, 260 bp, Unknown
  Description of Unknown: LeftRegion for integrase B4033 sequence
aaatattgcagaattattaaaataaataaaaaaccgccccactctaaagcaggacggtcacgctctcgaatgatacgaaagccctagacaagcatattgtatcattcggagcagccaaacgcaagcggaacaccagttctctgctggctgttatttttatacccttttttacatacattttcacaaaggagtgataccttatgccaaacaccaaatcattcactgtaaatgaagtcttagtctatctccgcaagtcccgg

SEQ ID NO: 17033 - DNA, 260 bp, Unknown
  Description of Unknown: LeftRegion for integrase B4034 sequence
gacaggtaaaagaatctctcgattctgcatcattagaataataaaaaccgcccctgcttaacagagacggctttaagaatctttgcagttgtgaatgctcaattctttcctggacagttagaattatagcatgtttcttcacacctgtataggtgtattttttatacccatttttcataaaatataacggaggtttacctatgaatgaaaatgtatgtatctatttaagaaagtctcgtgctgatcaggaagctgagctt

SEQ ID NO: 17034 - DNA, 260 bp, Unknown
  Description of Unknown: LeftRegion for integrase B4035 sequence
tggatgatgaattcgtggaaaacttccccggattacgggctctgattaagaattgtaaataaaaaaatcgcccagtgctgcgaacaccaggcgacctgttcttccttgcggaagctgtaaactctacgaataaattttacagcgtttccgataaatccgcaagggtttattttttatactctttttgtggaggtgagacgatgaggttcttttcctacggacgaaaatccgtattttctgataaatcagattcaatcgat

SEQ ID NO: 17035 - DNA, 260 bp, Unknown
  Description of Unknown: LeftRegion for integrase B4036 sequence
cgtggagactctccccggattgcgtgcgttaattaagaaatgtaaataaaaaaatcgcccagtgctgcgaacaccaggcgacctgttcttccttgcggaagctgcataatttgacgtaaatcatcaaatcttattttacagccgtttccgtaaatccgcaagggtttattttttatactctttttttgggaggtgggacgatgaggttcttttcctacggacgaaaatccgtattttctgataaatcagattcaatcgat

SEQ ID NO: 17036 - DNA, 260 bp, Unknown
  Description of Unknown: LeftRegion for integrase B4037 sequence
cggatgcatatgtgaaagtctgcagcgcgcttgcgaaattgaagaaataaaaaaccgcccggtgctaccaacaccaggcgacttgctcttccttgcggaagctgtaaatataagatatgttttgcataaatattttacagccgtttccgtaaatccgcaagggtttattttttatactctttttttgggaggttaggacaatgaggttcttttcatacggacgaaaatccgtattttctgataaatcagattctatcgat

SEQ ID NO: 17037 - DNA, 260 bp, Unknown
  Description of Unknown: LeftRegion for integrase B4038 sequence
acgctttacttcatgatgacaagttaataaatcaatttaaagataaccataatggaaattatgagtttgaagcaaatttatttgcagtagcattactatttaatgaagaagactttaatattaagtttaataaattagataattacatcctacagggaattcttgatagtaatatagaattagtctaaggagatgataaattgaacaccattgctatttatactcgtaaatctaaattcactggaaaaggtgaatctatt

SEQ ID NO: 17038 - DNA, 260 bp, Unknown
  Description of Unknown: LeftRegion for integrase B4039 sequence
tacctgcgagataggaagcaaatctgtatctgacacagaaactgaataaaaaatcgcccggcgcttccaacgccagacgatctcataaatcttgcagacagccgttcagctggctacaattccctctagacaagagaattatagcacagttcatggcacctgcataggtgttatttttataccctttttaggaggttcttatgaacatttgttgctatggtaggaagtcgatctattctgatcactcagattctatcgac

SEQ ID NO: 17039 - DNA, 260 bp, Unknown
  Description of Unknown: LeftRegion for integrase B4040 sequence
tggatgatgaattcgtggaaaacttccccggattacgggctctgattaagaattgtaaataaaaaaatcgcccagtgctgcgaacaccaggcgacctgttcttccttgcggaagctgtaaactctacgaataaattttacagcgtttccgataaatccgcaagggtttattttttatactcttttttgggaggtgggacgatgaggttcttttcctacggacgaaaatccgtattttctgataaatcagattcaatcgat

SEQ ID NO: 17040 - DNA, 260 bp, Unknown
  Description of Unknown: LeftRegion for integrase B4041 sequence
ctggaggatgaattcgtggagactctccccggattgcgtgcgttaattaagaaatgtaaataaaaaatcgcccagtgctgcgaacaccaggcgacctgttcttccttgcggaagctgtaaactctacgaataaattttacagcgtttccgataaatccgcaagggtttattttttatactcttttttgggaggtgagacgatgaggttcttttcctacggacgaaaatccgtattttctgataaatcagattcaatcgat

SEQ ID NO: 17041 - DNA, 260 bp, Unknown
  Description of Unknown: LeftRegion for integrase B4042 sequence
ggaagatgaattcgtggagactctccccggattgcgtgcgttaattaagaaatgtaaataaaaaaatcgcccagtgctgcgaacaccaggcgacctgttcttccttgcggaagctgtaaactctacgaataaattttacagcgtttccgataaatccgcaagggtttattttttatactctttttttgggaggtgggacgatgaggttcttttcctacggacgaaaatccgtattttctgataaatcagattcaatcgat

SEQ ID NO: 17042 - DNA, 260 bp, Unknown
  Description of Unknown: LeftRegion for integrase B4043 sequence
cgagataggaaacaaatctgtatctgacacagaaactgaataaaaaaatcgcccagcgctaccaacaccagacgattttgtgaaatccttgcagacacagccgtttggctggctacaatgctctctagtcaagagaattatagcacagttcatggcacctgcataggtgttatttttatacccttttttaggaggttcttatgaacatttgttgctatggcaggaagtcgatctattctgatcactcagattccatcgac

SEQ ID NO: 17043 - DNA, 260 bp, Unknown
  Description of Unknown: LeftRegion for integrase B4044 sequence
tgaggatgaatttctggacggactgccaggtcttcgtggattgattaagaaatgtaaataaaaaaatcgcccggtgctgcgaacaccaggcgacctgttcttccttgcggaagctgtcaaactttgcataaatattttacagccgtttccgtaaatccgcaagggtttattttttatactcttttttgggaggtgggacgatgaggttcttttcctacggacgaaaatccgtattttctgataaatcagattctatcgat

SEQ ID NO: 17044 - DNA, 260 bp, Unknown
  Description of Unknown: LeftRegion for integrase B4045 sequence
gcaacaatcctcgaccacatggtcacgttccatttcagggacggccacatcgaatccagagacttcttggataagcggcacggcaccccttggaccgaggaacggcgggaaaaagcaaaaaaatccatgaaggccgcttggacagacgagcgcagggaggcaatgagtgaaagaatcaagaaaataaggagcgaaaagaaatggccaaatccgtaaccacgataccggcgacgctgtcacgcttcacggcggcaccgatt

SEQ ID NO: 17045 - DNA, 260 bp, Unknown; identical to SEQ ID NO: 17025
  Description of Unknown: LeftRegion for integrase B4046 sequence

SEQ ID NO: 17046 - DNA, 260 bp, Unknown
  Description of Unknown: LeftRegion for integrase B4047 sequence
tggaagatgaattagtggaaagttttcccggattacgggctctgattaagaattgtaaataaaaaaatcgcccggtgctgcgaacaccaggcgacctgttcttccttgcggaagctgtaaactctacgaataaattttacagcgtttccgataaatccgcaagggtttattttttatactcttttttgggaggtgggacgatgaggttcttttcctacggacgaaaatccgtattttctgataaatcagattcaatcgat

SEQ ID NO: 17047 - DNA, 260 bp, Unknown
  Description of Unknown: LeftRegion for integrase B4048 sequence
ataaataaaagcccctgtgctaccaacacaagagcttttactgcgacttacaattaagctgtgctcaaatgatataatcgccctagacaagccatattatatcattcatagcaccgcttttgcaagtggtgttatttttgtacccatttttgagttgcaccggtgcaacttgcatatattttacagaaaggatgattaatatggtatcatttgacagcattattatctatcttagaaagtcccgctctgatgatccggcg

SEQ ID NO: 17048 - DNA, 260 bp, Unknown
  Description of Unknown: LeftRegion for integrase B4049 sequence
ataaataaaagcccctgtgctatcaacacaagagcttttaccacgatacttacataagctgtgcttatgatataataccgccttcgacaagccatattatatcattcatagcaccgcttttgcaagtggtgttatttttgtacccatttttgagttgcaccggtgcaacttgcatatattttacagaaaggatgattaatatggtatcttttgacagcattattatctatcttagaaagtcacgttctgatgatccggcg

SEQ ID NO: 17049 - DNA, 260 bp, Unknown
  Description of Unknown: LeftRegion for integrase B4050 sequence
tgcatcgaagcaaatcccggaagatgtgttgcaacaactcataccatcgaattttgaagaaatacgagtgactgaacgaaataaagtagtaattgttttgcaggatggttctaagatagaaaaaacatggcagtataagtcacgcagtgaatcttggactggggaaatgagaaaaaaagccagcgaaaggagacagaaacgtgaatacagcaagaactgtgacggtgattcctgcaacgcttaatttgtttacaagtacg

SEQ ID NO: 17050 - DNA, 260 bp, Unknown
  Description of Unknown: LeftRegion for integrase B4051 sequence
tggatgatgaattcgtggaaaacttccccggattacgggctctgattaagaattgtaaataaaaaatcgcccagtgctgcgaacaccaggcgacctgttcttccttgcggaagctgtaaactctacgaataaattttacagcgtttccgataaatccgcaagggtttatttttttatactcttttttgggaggtgggacgatgaggttcttttcctacggacgaaaatccgtattttctgataaatcagattcaatcgat

SEQ ID NO: 17051 - DNA, 260 bp, Unknown
  Description of Unknown: LeftRegion for integrase B4052 sequence
ctggatcattgacatggttatgatctgctgcaacaaattcaccgacagcaccggtgcggtggtcggtctgaaggttgctgagtataccggacagccggatcccaatcttgcagaggcttctctggaggagcagcgggaggcagcggccgagactgccagagcttacggctataccgtaatagagtcaggcgatcaggataatgccgacaagtaaaaacatggctcgaaaatatgccgcaggaggtggctcggataattcc

SEQ ID NO: 17052 - DNA, 260 bp, Unknown
  Description of Unknown: LeftRegion for integrase B4053 sequence
tgtgcctgtcggcgaataattggcaaataactttatataaaaaccgcccctgttggtaacaaggacggcttttcaagaatctttgcagttgtgaatgctcaattctttcctggacagttagaattatagcatgtttcttcacacctgtataggtgtattttttatacccatttttcataaaatataacggaggtttacctatgaatgaaaatgtatgcatctatttaagaaagtctcgtgctgatcaggaagctgagctt

SEQ ID NO: 17053 - DNA, 260 bp, Unknown
  Description of Unknown: LeftRegion for integrase B4054 sequence
ctggaggatgaattcgtggagactctccccggattgcgtgcgttaattaagaaatgtaaataaaaaatcgcccagtgctgcgaacaccaggcgacctgttcttccttgcggaagctgtaaactctacgaataaattttacagcgtttccgataaatccgcaagggtttattttttatactcttttttgggaggtgagacgatgaggttcttttcatacggacgaaaatccgtattttctgataaatcagattctatcgat

SEQ ID NO: 17054 - DNA, 260 bp, Unknown
  Description of Unknown: LeftRegion for integrase B4055 sequence
atccgtctccgagctgcttcagctggaaaacaaaagcctccgcatccagcgcgatcagcttcgaaaatccctgaaaatgcaccgcatcaccacccttgtcctgctcggcatcgtcgcgctttgcgcttttgctctggtggtggatatactgagtcccaccgtcggctggttccgtgcataagaataatttggaggcttttatggatggattaaatcttgcaaatgttgtaatttacgcccggtactcatccgtcggacag

SEQ ID NO: 17055 - DNA, 260 bp, Unknown
  Description of Unknown: LeftRegion for integrase B4056 sequence
agaacttttagatagtggcattattacacaagaagaattcaatcagaaaaaaacagaacttttgtaaaaaaagaaccggctctcgctaccaacgggaaccggttttgaaaaataagacaattccagagaaaaatcttacctacacattaagtatatcatctccgggattgccgtacaagtgtaaaaaggagaatgataaaatgaatgaatcagtatgtatctatttgaggaaatccagagccgatcgggaagctgaagca

SEQ ID NO: 17056 - DNA, 260 bp, Unknown
  Description of Unknown: LeftRegion for integrase B4057 sequence
ttccagaaaatgttttttatgatataatttctgaaaattaataaaaaccgcccctgcttaacagagacggctttaagaatctttgcagttgtgattgctcaattctttcctggacagttagaattatagcatgtttcttcacacctgtataggtgtattttttatacccatttttcataaaatataacggaggtttacctatgaatgaaaatgtatgtatctatttaagaaagtctcgtgctgatcaggaagctgagctt

SEQ ID NO: 17057 - DNA, 260 bp, Unknown
  Description of Unknown: LeftRegion for integrase B4058 sequence
tttggaggatgaattcgtggagactctccccggattgcgtgcgttaattaagaaatgtaaataaaaaatcgcccagtgctgcgaacaccaggcgacctgttcttccttgcggaagctgtaaactctacgaataaattttacagcgtttccgataaatccgcaagggtttattttttatactcttttttggaggtgggacgatgaggttcttttcctacggacgaaaatccgtattttctgataaatcagattcaatcgat

SEQ ID NO: 17058 - DNA, 260 bp, Unknown
  Description of Unknown: LeftRegion for integrase B4059 sequence
aaatattgcagaattattaaaataaataaaaaaccgccccactctaaagcaggacggtcacgctctcgaatgatacgaaagccctagacaagcacattgtatcattcggagcagccaaacgcaagcggaacaccagttctctgctggctgttatttttatactcttttttacatacattttcacaaaggagtgataccttatgccaaacaccaaatcgttcactgtaaatgaagtcttagtctatctccgcaagtcccgg

SEQ ID NO: 17059 - DNA, 260 bp, Unknown
  Description of Unknown: LeftRegion for integrase B4060 sequence
ataaataaaagcccctgtgctaccaacacaagagcttttaccacgatacttacataagctgtgcttatgatataataccgccctagacaagccatattatatcattcatagcaccgcttttgcaagtggtgttatttttgtacccatttttgagttgcaccggtgcaacttgcatatattttacagaaaggatgattaatatggtatcttttgacagcattattatctatcttagaaagtcacgttctgatgatccggcg

SEQ ID NO: 17060 - DNA, 260 bp, Unknown; identical to SEQ ID NO: 17059
  Description of Unknown: LeftRegion for integrase B4061 sequence

SEQ ID NO: 17061 - DNA, 260 bp, Unknown
  Description of Unknown: LeftRegion for integrase B4062 sequence
atattgcagaattattaaaataaataaaaaccgccccactctaccaaagcaggacggtcacgctcccggatgatccaagaaccctcaacaagcacattgtatcattcccggagcagctacgcaagcggaacacccgttccccgctggctgttatttttatacccttttttacatacattttcacaaaggagtgataccttatgccaaacatcgaatcattcactgtaaatgaagtcttagtctatctccgcaaatcccgg

SEQ ID NO: 17062 - DNA, 260 bp, Unknown
  Description of Unknown: LeftRegion for integrase B4063 sequence
tggaggatgaattcgtggagactctccccggattgcgtgcgttaattaagaaatgtaaataaaaaaatcgcccagtgctgcgaacaccaggcgacctgttcttccttgtggaagctgtaaactctacgaataaattttacagcgtttccgataaatccgcaagggtttattttttatactcttttttgggaggtgggacgatgaggttcttttcctacggacgaaaatccgtattttctgataaatcagattcaatcgat

SEQ ID NO: 17063 - DNA, 260 bp, Unknown
  Description of Unknown: LeftRegion for integrase B4064 sequence
taagtatattatatgccaatcacaattatttgtcaaatcataaaaccgcccagtgttaccagcactgaacggctttctatagctccggagagctacatcaatattcataattcattgtatcatctccggggcagccatgcaagcggaacattcgttcctgctggctgttatttttgtacccaaaaaaggaggatgattgaatgttttttggaatttatggaagaaaatctgtctattctgataagtctgattccgtagat

SEQ ID NO: 17064 - DNA, 260 bp, Unknown
  Description of Unknown: LeftRegion for integrase B4065 sequence
atccggctccgagctgcttcggctggaaaacaaaagcctccgcatccagcgcgatcagcttcgaaaatccctgaaaatgcaccgcatcaccacccttgtcctgctcggcatcgtcgcgctttgcgcttttgctctggtgctggatatcctgagccccaccgtcggctggttccgtgcataagaataatttggaggcttttatggatggattaaatcttgcaaatgttgtaatttacgcccggtactcatccgtcggacag

SEQ ID NO: 17065 - DNA, 260 bp, Unknown
  Description of Unknown: LeftRegion for integrase B4066 sequence
gctgattgatgaggagcttttcaataaggtgcaggagctacgaaacagtaatgccagatctcaaaaccgtattcgtgattatataaagcaggcgcctgttgcagaaaacattcaatatcgcattggaaaagttcagcagcgctatgaaaacccataccaacaagcagaatacgcctatgggttaatcaaggaggaaaaatatgaatgagaatgtaaccttaattccggccagaaaaaggcccggtaatagaatctcaaaa

SEQ ID NO: 17066 - DNA, 260 bp, Unknown; identical to SEQ ID NO: 17040
  Description of Unknown: LeftRegion for integrase B4067 sequence

SEQ ID NO: 17067 - DNA, 260 bp, Unknown
  Description of Unknown: LeftRegion for integrase B4068 sequence
acagaaatgcttatcgaatcgtaagagattatctaaataaataaaaaaaccgcccggtgctggtaacaccgaacggcttcttcgcttcccttgcgggatgcggttgcttaaccttcgcaggattaagtataccgcattttccacgagtccacaagggcttattttttatactcttttttagaatttcaggaggtggaacaatgaggttttttagctacggacgaaaatccgtattttctgataaatccgattcgattgac

SEQ ID NO: 17068 - DNA, 260 bp, Unknown
  Description of Unknown: LeftRegion for integrase B4069 sequence
gcacagatgtcggagaagtccttggatattcttttgatattacagaaatagaataaatattaaaaaaaaagaaccggctctcgctaccaacgaggaccggttttttaaaaataagacaattccagagaaaaatcttacctacacattaagtatatcatctccgggattgttacacaagtgtaaaaaaggagaatgataaaatgaacgaatcagtatgtatctatttgagaaaatccagagccgatcgagaagccgaagcg

SEQ ID NO: 17069 - DNA, 260 bp, Unknown
  Description of Unknown: LeftRegion for integrase B4070 sequence
ttagatagtggcattattacgcaagaagaatttgaacagaaaaaaatagaacttttataaaaaaaaaagaaccggctctcgctaccaacgggaaccggttttgaaaaaaataagacaattccagagaaaaatcttacctgcacattaagtatatcatctccgggattgccgtacaagtgtaaaaaaaggagaatgataaaatgaacgaatcagtatgtatctatttaagaaaatccagggccgatcgagaagctgaagca

SEQ ID NO: 17070 - DNA, 260 bp, Unknown; identical to SEQ ID NO: 17062
  Description of Unknown: LeftRegion for integrase B4071 sequence

SEQ ID NO: 17071 - DNA, 260 bp, Unknown
  Description of Unknown: LeftRegion for integrase B4072 sequence
tggaagatgaattagtggaaagttttcccggattacgggctctgattaagaattgtaaataaaaaaatcgcccggtgctgcgaacaccaggcgacctgttcttccttgcggaagctgtaaaccctacgaataaattttacagcgtttccgataaatccgcaagggtttattttttatactcttttttgggaggtgggacgatgaggttcttttcctacggacgaaaatccgtattttctgataaatcagattcaatcgat

SEQ ID NO: 17072 - DNA, 260 bp, Unknown
  Description of Unknown: LeftRegion for integrase B4073 sequence
tattttgtgccatatgattctagataaataaaaaccgccccactgtaaagcaaggcggcaatgctcccgatgatacggtagccctaagcaagcatattgtatcattcggagcagccaaacgcaagcggaacacccgttccccgctggctgttatttttatactcttttttacatacattttcacaaaggagtgataccttatgccaaacaccgaatcattcactgtaaatgaaatcttagtctatctccgcaagtcccgg

SEQ ID NO: 17073 - DNA, 260 bp, Unknown
  Description of Unknown: LeftRegion for integrase B4074 sequence
ataaataaaagcccctgtgctaccaacacaagagcttttaccacgatacttacataagctgtgcttatgatataataccgccctagacaagccatattatatcattcatagcaccgcttttgcaagtggtgttatttttgtacccatttttgagttgcaccggtgcaacttgcatatattttacagaaaggatgattaatatggtatcttttgacagtattattatctatcttagaaagtcacgttctgatgatccggcg

SEQ ID NO: 17074 - DNA, 260 bp, Unknown; identical to SEQ ID NO: 13549
  Description of Unknown: LeftRegion for integrase B4075 sequence

SEQ ID NO: 17075 - DNA, 260 bp, Unknown
  Description of Unknown: LeftRegion for integrase B4076 sequence
gtggagactctccccggattgcgtgcgttaattaagaaatgtaaataaaaaaatcgcccagtgctgcgaacaccaggcgacctgttcttccttgcggaagctgcataatttgacgtaaatcatcaaatcttattttacagccgtttccgtaaatccgcaagggtttattttttatactcttttttttgggaggtgggacgatgaggttcttttcctacggacgaaaatccgtattttctgataaatcagattcaatcgat

SEQ ID NO: 17076 - DNA, 260 bp, Unknown
  Description of Unknown: LeftRegion for integrase B4077 sequence
tggaggatgaattcgtggagactctccccggattgcgtgcgttaattaagaaatgtaaataaaaaaatcgcccagtgctgcgaacaccaggcgacctgttcttccttgcggaagctgtaaactctacgaataaattttacagcgtttccgataaatccgcaagggtttattttttatactcttttttgggaggtgggacgatgaggttcttttcctacggacgaaaatccgtattttctgataaatcagattcaatcgat

SEQ ID NO: 17077 - DNA, 260 bp, Unknown
  Description of Unknown: LeftRegion for integrase B4078 sequence
aaccataaaaatacacatataaaaaccgccccagtgctaccaacaccagagcggcaaacacattgctccgaaaagcatatgccctaagcaagcatattgtatcattcggagcagccaaacgcaagcggaacacctgttctctgctggctgttatttttatactcttttttacatacattttcacaaaggagtgataccttatgccaaacaccgaatcattcactgtaaatgaagtcttagtctatctccgcaagtcccgg

SEQ ID NO: 17078 - DNA, 260 bp, Unknown
  Description of Unknown: LeftRegion for integrase B4079 sequence
acctgcgagataggaagcaaatctgtatctgacacagaaactgaataaaaaatcgcccggcgcttccaacgccagacgatctcgtaaatcttgcagacagccgttcagctggctacaattccctctcgacaagagaattatagcacagttcatggcgcctgcataggtgttatttttatacccttttttaggaggttcttatgaacatttgttgctatggcaggaagtcaatctattctgatcactcagattccatcgat

SEQ ID NO: 17079 - DNA, 260 bp, Unknown
  Description of Unknown: LeftRegion for integrase B4080 sequence
ggccagatcagcgccgacgcatatgtgaaggtctgcacgcctttggctaagatggcaaaataaaaaatcgcccagtgctgcgaacaccaggcgacctgttcttccttgcggaagctgtaaactctacgaataaattttacagcgtttccgataaatccgcaagggtttattttttatactcttttttggaggtggaaacgatgaggttcttttcctacggacgaaaatccgtattttctgataaatcagattcaatcgac

SEQ ID NO: 17080 - DNA, 260 bp, Unknown
  Description of Unknown: LeftRegion for integrase B4081 sequence
ttgtagggaggttttcgaaaaagcagaggaggaaagacaatccagagctagaaagcttggaagggtttgggaactaaagactaaagaattgcctgccgcacccatgagttttacgatgggccgacagacaaaagcgtttaatgatccttatgagcaggctgaatatgaatatagcttaatagaaagtgagacaaatgctaatgaacgtgagtaagaatataacaataattcctgcgcgcaggcgcgtaggcaatacagct

SEQ ID NO: 17081 - DNA, 260 bp, Unknown
  Description of Unknown: LeftRegion for integrase B4082 sequence
tgactgcgttgtctacgtcaacgggcaggacgcaacactcaagcgaataaagcggtatgaagatggttcgttaagcctctgccctttgaatacaagttattcaccctgcacattcacggcaaaacaggttcaagagttgcccgttaccatcggcggtgtggctgttgagctgcgccgcaagttccgtacgaggtgaaactgtgtaccaacttcccaatttgcaatcctcgcaggtgctgatatacctgcgcaaatccaga

SEQ ID NO: 17082 - DNA, 260 bp, Unknown
  Description of Unknown: LeftRegion for integrase B4083 sequence
tggccagatcagcgccgacgcatatgtgaaggtctgtacgcctttggctaagatggcaaaataaaaaatcgcccagtgctgcgaacaccaggcgacctgttcttccttgcggaagctgtaaactctacgaataaattttacagcgtttccgataaatccgcaaggatttattttttatactcttttttggaggtgggacgatgaggttcttttcctacggacgaaaatccgtattttctgataaatcagattcaatcgat

SEQ ID NO: 17083 - DNA, 260 bp, Unknown; identical to SEQ ID NO: 13018
  Description of Unknown: LeftRegion for integrase B4084 sequence

SEQ ID NO: 17084 - DNA, 260 bp, Unknown
  Description of Unknown: LeftRegion for integrase B4085 sequence
ggaggatgaattcgtggagactctccccggattgcgtgcgttaattaagaaatgtaaataaaaaaaatcgcccagtgctgcgaacaccaggcgacctgttcttccttgcggaagctgtaaactctacgaataaattttacagcgtttccgataaatccgcaagggtttattttttatactcttttttgggaggtgagacgatgaggttcttttcctacggacgaaaatccgtattttctgataaatcagattcaatcgat

SEQ ID NO: 17085 - DNA, 260 bp, Unknown
  Description of Unknown: LeftRegion for integrase B4086 sequence
atccgacagctttttgattttggcaaagatatccgaccattcgctcgtagtcatacggcatggctcctttctcaaatttactgtcggcagcaactgaattatatcaaatacgcacccgcttttcagggattcgtagaattataccgaaaatcggaaaaatattgcgaattttgaagaagataatcgtgaggtgatggttgatggcccgaaaaaagaatattgctgcgggtcagaatgccgtcatttatgcccgctattcc

SEQ ID NO: 17086 - DNA, 260 bp, Unknown
  Description of Unknown: LeftRegion for integrase B4087 sequence
gcacttaaataatgtgtcgtatcctttagtgttattcattttcttcattccaggtttcattatatcatataaagagcaagatgtaaatatacattttgtaaaatttttttcgtttctgtttgtgttttatgtagaaataagaaatattacagcacactacaaattcaccagtggaaaaactataaaaaggaggtatcacaatgcccgattatgctatatacctgcgtaaatcccgtaaggacaacgaagccgaacagcgt

SEQ ID NO: 17087 - DNA, 260 bp, Unknown
  Description of Unknown: LeftRegion for integrase B4088 sequence
ggaagatgaattagtggaaagttttcccggattacgggctctgattaagaattgtaaataaaaaaaatcgcccggtgctgcgaacaccaggcgacctgttcttccttgcggaagctgtaaactctacgaataaattttacagcgtttccgataaatccgcaagggtttattttttatactcttttttgggaggtgggacgatgaggttcttttcctacggacgaaaatccgtattttctgataaatcagattcaatcgat

SEQ ID NO: 17088 - DNA, 260 bp, Unknown
  Description of Unknown: LeftRegion for integrase B4089 sequence
gacaggtaaaagaatctctcgattctgcatcattagaataataaaaaccgcccctgcttaacagagacggctttaagaatctttgcagttgtgattgctcaattctttcctggacagttagaattatagcatgtttcttcacacctgtataggtgtattttttatactcatttttcataaaatataacggaggtttacctatgaatgaaaatgtatgtatctatttaagaaagtctcgtgctgatcaggaagctgagctt

SEQ ID NO: 17089 - DNA, 260 bp, Unknown
  Description of Unknown: LeftRegion for integrase B4090 sequence
aagaaggcagagcttttataaaatataaaaaccgccccggtgctggtaacactggagcggtgggaatctccgaagagatacctatctttagcaggaatattgtatcaccttcggagcagccatgcaagcggaacctttgtttgcgctggctgttatttttgtaccccaatttccataattatatacgaggtgatacaactatgagcaattatcttgaaaacaactgtatctatctaagaaagtcccgcgctgatcgggaa

SEQ ID NO: 17090 - DNA, 260 bp, Unknown; identical to SEQ ID NO: 15610
  Description of Unknown: LeftRegion for integrase B4091 sequence

SEQ ID NO: 17091 - DNA, 260 bp, Unknown
  Description of Unknown: LeftRegion for integrase B4092 sequence
cggatgcatatgtgaaagtctgcagcgcgcttgcgaaattgaagaaataaaaaaccgcccggtgctaccaacaccaggcgacttgctcttccttgcggaagctgtaaatataagatatgttttgcataaatattttacagccgttttcgtaaatccgcaagggtttattttttatactcttttttagggaggtgaggacgatgaggttcttttcatacggacgaaaatccgtattttctgataaatcagattctatcgat

SEQ ID NO: 17092 - DNA, 260 bp, Unknown
  Description of Unknown: LeftRegion for integrase B4093 sequence
acactacaatagaatattttctaacaggaaaacgccctatatctaatctgactgatatggaaaatcttctattagaagcatacagatcagcagatgtaaaaggacaagctacaatcatccaagtctgcatgaatgaaaaggatgcaaaaagggaaactatcattgcaggataataagcattgaagaatggaggaagaaccatgtacgaagagattaagactgcttgtctatatctgcgatattcaagcagcaaccaaact

SEQ ID NO: 17093 - DNA, 260 bp, Unknown
  Description of Unknown: LeftRegion for integrase B4094 sequence
aaaataaaagctcctgtgctggtaacacaagagcttttacacgatacttacatcaagcaatgctacaatgatataataccgccctaatcaagccatattatatcacctgaagcaccgcttatgcaagtggtgttatttttgtacccatttttgagttgcaccggtgcaacttgcatatattttacaggaggatgattaatatggtatcttttgacaatattattatatatcttagaaagtcacgctctgatgatcctgtg

SEQ ID NO: 17094 - DNA, 260 bp, Unknown
  Description of Unknown: LeftRegion for integrase B4095 sequence
tattgacagcgagaccttttccaaagtcgcagaagagcggaatcgccgtgccggagcattaggcagaacccgggagcggacaacaccgccgccttgcgaagcagagaccgcctttattataggaaaggtcacacacagatacgatgacccattcaagcaggccgcatacatttacagtctgatagaaagtgaggtacggaatggctgagaaaacgatcaccgtaattccggcgagaaaacgagtcggcagcagaaagcag

SEQ ID NO: 17095 - DNA, 260 bp, Unknown; identical to SEQ ID NO: 17027
  Description of Unknown: LeftRegion for integrase B4096 sequence

SEQ ID NO: 17096 - DNA, 260 bp, Unknown
  Description of Unknown: LeftRegion for integrase B4097 sequence
tcgtggagactctccccggattgcgtgcgttaattaagaaatgtaaataaaaaaatcgcccagtgctgcgaacaccaggcgacctgttcttccttgcggaagctgcataatttgacgtaaatcatcaactcttattttacagccgtttccgtaaatccgcaagggtttattttttatactctttttttggaggtaggacgatgaggttcttttcctacggacgaaaatccgtattttctgataaatcagattcaatcgat

SEQ ID NO: 17097 - DNA, 260 bp, Unknown
  Description of Unknown: LeftRegion for integrase B4098 sequence
tgcgtattgattgggcttgcaatcactgttttaggcgcagcaatcgttggtgtcccgattgctatattgggcgctttgcttgccataggttcaaagggaaggaaatagaaaaccctgcgcggcttcttggcggtcggcgcgcagggcaagtgcaaagaacgaagcgcaattgcgcgctcgctctaaggggtgattttagcatggtgaagaaccgagctgccatatacgcgcggttcagctcgcacaaccaacgctcagaa

SEQ ID NO: 17098 - DNA, 260 bp, Unknown
  Description of Unknown: LeftRegion for integrase B4099 sequence
gccagatcagcgctgatgcatacgtgaaagtctgcgggcctctggcaaagatggccaaataaaaaaaccgccgggtgctggtaacacctgacggtccattccttccttgcggaagctgtaaactctacgaataaattttacagcgtttccgtaaatccgcaagggtttattttttatactcttttttgggaggtgagacgatgaggttcttttcctacggacgaaaatccgtattttctgataaatcagattcaatcgat

SEQ ID NO: 17099 - DNA, 260 bp, Unknown
  Description of Unknown: LeftRegion for integrase B4100 sequence
aaaactggaaaaataactaaaatccaataataaaagaaaaccgcccagctaccaaccggacggaatctcagaaacctatcaaccatggatggctgatataagttctgccttaacaacagaattatatcatacatcctataaatttacaaattgataagggtgtattttttgtacccttttttagaaaggaatgatgatatatgaacataggaaatcagttaggaaaactaaaaaaatcagatcaattctgcatttactta

SEQ ID NO: 17100 - DNA, 260 bp, Unknown
  Description of Unknown: LeftRegion for integrase B4101 sequence
tggaagatgaattcgtggagactctccccggattgcgtgcgttaattaagaaatgtaaataaaaaaatcgcccagtgctgcgaacaccaggcgacctgttcttccttgcggaagctgtaaactctacgaataaattttacagcgtttccgataaatccgcaagggtttattttttatactcttttttgggaggtgggacgatgaggttcttttcctacggacgaaaatccgtattttctgataaatcagattcaatcgat

SEQ ID NO: 17101 - DNA, 260 bp, Unknown
  Description of Unknown: LeftRegion for integrase B4102 sequence
acagaaatgcttatcgaatcgtaagagattatctaaataaataaaaaaaccgcccggtgctggtaacaccgaacggcttcttcgcttcccttgcgggatgcggttgcttaaccttcgcaggattaagtataccgcattttccacgagtccacaagggcttattttttatactctttttttaaattttaggaggtggaacaatgaggttttttagctatgggcgaaaatccatattttctgacaagtctgattcgatcgac

SEQ ID NO: 17102 - DNA, 260 bp, Unknown
  Description of Unknown: LeftRegion for integrase B4103 sequence
tattttgtgccatatgattctagataaataaaaaccgccccactgtaaagcaaggcggcaatgctcccgatgatacggtagccctaagcaagcatattgtatcattcggagcagccaaacgcaagcggaacacccgttctctgctggctgttatttttatactcttttttacatacattttcacaaaggagtgataccttatgccaaacaccgaatcattcactgtaaatgaaatcttagtctatctccgcaagtcccgg

SEQ ID NO: 17103 - DNA, 260 bp, Unknown
  Description of Unknown: LeftRegion for integrase B4104 sequence
cgtggagactctccccggattgcgtgcgttaattaagaaatgcaaataaaaaaatcgcccagtgctgcgaacaccaggcgacctgttcttccttgcggaagctgcataatttgacgtaaatcatcaaatcttattttacagccgtttccgtaaatccgcaagggtttattttttatactctttttttgggaggtgggacgatgaggttcttttcctacggacgaaaatccgtattttctgataaatcagattcaatcgat

SEQ ID NO: 17104 - DNA, 260 bp, Unknown
  Description of Unknown: LeftRegion for integrase B4105 sequence
aataccgaagagcagtatatcattgatacctaccgtatgtgtaccagctatgaggctcaccgcagtctgctcaatgtttgtgagcagcttcggtcggagaacgcccttgggaacaagacaactgcataattctggccgaatggtataagtatcacaaataaaaaaaaggcccaccttacggtgagccaagaggttctattatgaaagcctgtctttatctccgatattccagcagctctcaaacggagcaatccattgag

SEQ ID NO: 17105 - DNA, 260 bp, Unknown
  Description of Unknown: LeftRegion for integrase B4106 sequence
ggatgatgaattcgtggaaaacttccccggattacgggctctgattaagaattgtaaataaaaaaaatcgcccagtgctgcgaacaccaggcgacctgttcttccttgcggaagctgtaaactctacgaataaattttacagcgtttccgataaatccgcaagggtttattttttatactcttttttgggaggtgagacgatgaggttcttttcctacggacgaaaatccgtattttctgataaatcagattcaatcgat

SEQ ID NO: 17106 - DNA, 260 bp, Unknown; identical to SEQ ID NO: 15077
  Description of Unknown: LeftRegion for integrase B4107 sequence

SEQ ID NO: 17107 - DNA, 260 bp, Unknown
  Description of Unknown: LeftRegion for integrase B4108 sequence
cattgaaactggagaagtggaagatctgaacgcagaggaaactgaataaaaaatcgcccggcgcttccaacgccagacgatctcataaatcttgcaggcagccgttcagctggctacaattccctctagacaagagaattatagcacagttcatggcacctgcataggtgttatttttataccctttttaggaggttcttatgaacatttgttgctatggtaggaagtcgatctattctgatcactcagattctatcgac

SEQ ID NO: 17108 - DNA, 260 bp, Unknown
  Description of Unknown: LeftRegion for integrase B4109 sequence
ggccagatcagcgccgacgcatatgtgaaggtctgcacgcctttggctaagatggcaaaataaaaaatcgcccggtgctgcgaacacctggcgacctgttcttccttgcggaagctgtaaactctacgaataaattttacagcgtttccgataaatccgcaagggtttattttttatactcttttttgggaggtgggacgatgaggttcttttcctacggacgaaaatccgtattttccgataaatcagattcaatcgat

SEQ ID NO: 17109 - DNA, 260 bp, Unknown
  Description of Unknown: LeftRegion for integrase B4110 sequence
ataaataaaagcccctgtgctatcaacacaagagcttttaccacgatacttacataagctgtgcttatgatataataccgccctagacaagccatattatatcattcatagcaccgcttttgcaagtggtgttatttttgtacccatttttgagttgcaccggtgcaacttgcatatattttacagaaaggatgattaatatggtatcttttgacagcattattatctatcttagaaagtcacgttctgatgatccggcg

SEQ ID NO: 17110 - DNA, 260 bp, Unknown
  Description of Unknown: LeftRegion for integrase B4111 sequence
tacgacaatatttttttgccgtaagtctcttattgtttatgccgcttgactgccacgcctttttctgatttttcgtggttgtcgaaagacaaatcaaagcaaaaaattgctaacagagcaaaaaataatttcaaaccggtaaaaaagtgtccggtttgaaggttaaaatgtgctcaaaagctaatacaaggaggcttccaatgaagacagcggtcatctacgcccgttattcgagcgacagacaaacagaacaatctatc

SEQ ID NO: 17111 - DNA, 260 bp, Unknown
  Description of Unknown: LeftRegion for integrase B4112 sequence
ggccagatcagcgccgacgcatatgtgaaggtctgcacgcctttggctaagatggcaaaataaaaaatcgcccagtgctgcgaacaccaggcgacctgttcttccttgcggaagctgtaaactctacgaataaattttacagcgtttccgatgaatccgcaagggtttattttttatactcttttttggaggtgggaacgatgaggttcttttcctacggacgaaaatccgtattttctgataaatcagattcaatcgat

SEQ ID NO: 17112 - DNA, 260 bp, Unknown
  Description of Unknown: LeftRegion for integrase B4113 sequence
ataaataaaagcccctgtgctaccaacacaagagcttttaccacgatacttacataagctgtgcttatgatataataccgccctagacaagccatattatatcattcatagcaccgcttttgcaagtggtgttatttttgtacccatttttgagttacataacctaaactcacatatactttacagaaaggatgattaatatggtatcttttgacagcattattatctatcttagaaagtcccgatctgatgatcctgcg

SEQ ID NO: 17113 - DNA, 260 bp, Unknown
  Description of Unknown: LeftRegion for integrase B4114 sequence
cgtggagactctccccggattgcgtgcgttaattaagaaatgtaaataaaaaaatcgcccagtgctgcgaacaccaggcgacctgttcttccttgcggaagctgcataatttgacgtaaatcatcaaatcttattttacagccgtttccgtaaatccgcaagggtttattttttatactctttttttgggaggtgagacgatgaggttcttttcctacggacgaaaatccgtattttctgataaatcagattcaatcgat

SEQ ID NO: 17114 - DNA, 260 bp, Unknown
  Description of Unknown: LeftRegion for integrase B4115 sequence
gtcagatcagcgcggatgcatatgtgaaagtctgcagcgcgcttgcgaaattgaagaaataaaaaaccgcccagtgctgcgaacaccaggcgacctgttcttccttgcggaagctgtaaactctacgaataaattttacagcgtttccgataaatccgcaagggtttattttttatactctttttttgggaggtgagacgatgaggttcttttcctacggacgaaaatccgtattttctgataaatcagattctatcgac

SEQ ID NO: 17115 - DNA, 260 bp, Unknown
  Description of Unknown: LeftRegion for integrase B4116 sequence
ttgcgacattcaagaaaattgttgcagacattcttgcaggcaataatacgcttgtaacagattttgtatcacaaagaacgatgaaaaaatatgacaatgttccaagtgaggaagaacttgacagagagataacaaaacttggtgtataaaaacttccccgccgtaacaagcggggaaaactataaaaaggaggtatcacaatgcctgattacgctatatacctgcgtaaatcccgtaaggacaacgaagccgaacagcgt

SEQ ID NO: 17116 - DNA, 260 bp, Unknown
  Description of Unknown: LeftRegion for integrase B4117 sequence
ctggatgatgaattcgtggaaaacttccccggattacgggctctgattaagaattgtaaataaaaaaatcgcccagtgctgcgaacaccaggcgacctgttcttccttgcggaagctgtaaactctacgaataaattttacagcgtttccgataaatccgcaagggtttattttttatactcttttttggaggtgagacgatgaggttcttttcttacggacgaaaatccgtattttctgataaatcagattcaatcgat

SEQ ID NO: 17117 - DNA, 260 bp, Unknown
  Description of Unknown: LeftRegion for integrase B4118 sequence
cggagtcggaacaaacataaatgtgtccacactagcggtatccaagaagattggctgaaaaaaacagcggcagcccttcttggcgaatctacatttgatgagcaaaaatttcgggaacaggtggaatggattgaggttcagaagaatcggaccctgctgttccggttttattctagagaaaataaagaggtgcaattgccatgaaaaaagtgcaggttataccagctacactacagaattacacagaaaagcctattcat

SEQ ID NO: 17118 - DNA, 260 bp, Unknown
  Description of Unknown: LeftRegion for integrase B4119 sequence
ctggtgataccgacaaggacagctactatatttccagagttgaggacccggatgacccggacctgagaatagaaattgaatattctaagctggcaaatatcatccaccaggtgcttgaggatgccgatgctaagagagaggaatatatccaaaagcgcctggacgctgagttttcattgtgaaagtgagatgagccctacatgatacccgctgttatctatgcacggtttagcagccactctcaaacggagcagtctatt

SEQ ID NO: 17119 - DNA, 260 bp, Unknown
  Description of Unknown: LeftRegion for integrase B4120 sequence
ccgcaatctttaatataaaagtcaattaaatataaaaaccgccccagtacgccaataccgggacggtggtggatctccgaagagatatccaatttttaccaaagatattgtatcatcttcggagcggctacacaatcagaacgtttgtgtggtcgttatttttgtacctattttttcatattttaaaccgaggtgatattatggaacttttaaatgtatgtatctacctacgtaagtcccgtgctgatcgggaagctgaa

SEQ ID NO: 17120 - DNA, 260 bp, Unknown
  Description of Unknown: LeftRegion for integrase B4121 sequence
ttccagaaaatgttttttatgatataatttctgaaaattaataaaaaccgcccctgcttaacagagacggctttaagaatctttgcagttgtgaatgctcaattctttcctggacagttagaattatagcatgtttcttcacacctgtataggtgtattttttatacccatttttcataaaatataacggaggtttacctatgaatgaaaatgtatgtatctatttaagaaagtctcgtgctgatcaggaagctgagctt

SEQ ID NO: 17121 - DNA, 260 bp, Unknown
  Description of Unknown: LeftRegion for integrase B4122 sequence
ggccagatcagcgccgacgcatatgtgaaggtctgcacgcctttggctaagatggcaaaataaaaaatcgcccagtgctgcgaacaccaggcgacctgttcttccttgcggaagctgtaaactctacgaataaattttacagcgtttccgataaatccgcaagggtttattttttatactcttttttggaggtgggaacgatgaggttcttttcctacggacgaaaatccgtattttctgataaatcagattcaatcgac

SEQ ID NO: 17122 - DNA, 260 bp, Unknown
  Description of Unknown: LeftRegion for integrase B4123 sequence
taggtagagtaacattaaccgatgaagaattcgaaaaaataatcgagtatggaaaatttctgctatacatgagagaagaagataaatgatgtagtgctaagatttcttacatagtaaagtaggtggcattaaaggaggtgagtacaatgtagtcgcctaattaattcgcgcatataactataacgacaggaggagaaaacatgacagtatttgaaatgaacgacgcaattgataacgcgttcagtggaaaaatggacaaa

SEQ ID NO: 17123 - DNA, 260 bp, Unknown
  Description of Unknown: LeftRegion for integrase B4124 sequence
gccagatcagcgccgacgcatatgtgaaggtctgcacgcctttggctaagatggcaaaataaaaaatcgcccagtgctgcgaacaccaggcgacctgttcttccttgcggaagctgtaaactctacgaataaattttacagcgtttccgataaatccgcaagggtttattttttatactctttttttgggaggtgagacgatgaggttcttttcctacggacgaaaatccgtattttctgataaatcagattcaatcgat

SEQ ID NO: 17124 - DNA, 260 bp, Unknown
  Description of Unknown: LeftRegion for integrase B4125 sequence
tggaggatgaattcgtggagactctccccggattgcgtgcgttaattaagaaatgtaaataaaaaaatcgcccagtgctgcgaacaccaggcgacctgttcttccttgcggaagctgtaaactctacgaataaattttacagcgtttccgataaatccgcaagggtttattttttatactctttttttggaggtggggcgatgaggttcttttcctacggacgaaaatccgtattttctgataaatcagattcaatcgat

SEQ ID NO: 17125 - DNA, 260 bp, Unknown
  Description of Unknown: LeftRegion for integrase B4126 sequence
gcaacaatcctcgaccacatggtcacgttccatttcagggacggccacatcgaatccagagacttcttggataagcggcacggcaccccttggaccgaggaacggcgggaaaaagcaagagaatccatgaaggctgcttggacagacgagcgcagggaggcaatgagtgaaagaatcaagaaaataaggagcgaaaagaaatggccaaatccgtaaccacgataccggcgacgctgtcacgcttcacggcggcaccgatc

SEQ ID NO: 17126 - DNA, 260 bp, Unknown; identical to SEQ ID NO: 17088
  Description of Unknown: LeftRegion for integrase B4127 sequence

SEQ ID NO: 17127 - DNA, 260 bp, Unknown
  Description of Unknown: LeftRegion for integrase B4128 sequence
ggaggatgaattcgtggagactctccccggattgcgtgcgttaattaagaaatgtaaataaaaaaatcgcccagtgctgcgaacaccaggcgacctgttcttccttgcggaagctgtaaactctacgaataaattttacagcgtttccgataaatccgcaagggtttattttttatactcttttttggggaggtgagacgatgaggttcttttcctacggacgaaaatccgtattttctgataaatcagattcaatcgat

SEQ ID NO: 17128 - DNA, 260 bp, Unknown; identical to SEQ ID NO: 17052
  Description of Unknown: LeftRegion for integrase B4129 sequence

SEQ ID NO: 17129 - DNA, 260 bp, Unknown
  Description of Unknown: LeftRegion for integrase B4130 sequence
gccagatcagtgctgatgcatacgtgaaagtctgcgggcctctggcaaaaatggcaaaataaaaaaccgccgggtgctggtaacacctgacggtccattccttccttgcggaagctgtaaactctacgaataaattttacagcgtttccgataaatccgcaagggtttattttttatactcttttttgggaggtgagacgatgaggttcttttcctacggacgaaaatccgtattttctgataaatcagattcaatcgat

SEQ ID NO: 17130 - DNA, 260 bp, Unknown
  Description of Unknown: LeftRegion for integrase B4131 sequence
ggccagatcagcgccgacgcatatgtgaaggtctgcacgcctttggctaagatggcaaaataaaaaatcgcccagtgctgcgaacaccaggcgacctgttcttccttgcggaagctgtaaactctacgaataaattttacagcgtttccgataaatccgcaagggtttattttttatactcttttttgggaggtgagacgatgaggttcttttcctacggacgaaaatccgtattttctgataaatcagattcaatcgat

SEQ ID NO: 17131 - DNA, 260 bp, Unknown
  Description of Unknown: LeftRegion for integrase B4132 sequence
aaacgcgctccatagtaatatggggcgcgttttgctttataaagttcaacttgaacaaaataaaaaagcgcccccggcgctgcaacgccagggacgcttatgatagatcagcttgcccggaacggacaatatagaccctacaatctatataataccaccttcgggcaggctttgacaagtgtaccccggaggtattttttatgcgtgaatttaaacaggaagagctgctcccagcagtagcctactatcgctactcccca

SEQ ID NO: 17132 - DNA, 260 bp, Unknown
  Description of Unknown: LeftRegion for integrase B4133 sequence
tgacaataccgaaaatcagtaaataaaaaccgctccaccattaagcggagcggcaatgcaattgctctgaatgaacaatagccctaagcaagcatattgtatcatccggagcagccaaacgcaagcggaacaccagttctctgctggctgttatttttatacccttttttacatacattttcacaaaggagtgataccttatgccaaacaccgaatcattcactgtaaatgaagtcttagtctatctccgcaagtcccgg

SEQ ID NO: 17133 - DNA, 260 bp, Unknown
  Description of Unknown: LeftRegion for integrase B4134 sequence
cgagttagccgcggctgatgaggtgcaagacctcctggctcgcgctcgggatgtttttgttagccctgatgtctcccaggagacgaaggacgctctctacaaagagattgcgatgttatatcttaaattgaagtgagttatatctttttgaggattgacctctgtaaaatgttaattagaaagcaagggaatgttatatcatgaaaaagaaacaaagagtagtaatttatatccgttattcttcgcataaacaagcggag

SEQ ID NO: 17134 - DNA, 260 bp, Unknown
  Description of Unknown: LeftRegion for integrase B4135 sequence
tcgtggagactctccccggattgcgtgcgttaattaagaaatgtaaataaaaaaatcgcccagtgctgcgaacaccaggcgacctgttcttccttgcggaagctgcataatttgacgtaaatcatcaaatcttattttacagccgtttccgtaaatccgcaagggtttattttttatactctttttcgggaggtgagacgatgaggttcttttcctacggacgaaaatccgtattttctgataaatcagattcaatcgat

SEQ ID NO: 17135 - DNA, 260 bp, Unknown
  Description of Unknown: LeftRegion for integrase B4136 sequence
ccatgcaaacgatgttggaataaataaaaaccgccccactctaccaaagcaggacggtcacgctcccgtatgatacgaaagccctcaacaagcacattgtatcattcccggagcagctacgcaagcggaacacccgttccccgctggctgttatttttatactcttttttacatacattttcacaaaggagtgataccttatgccaaacaccgaatcattcactgtaaatgaagtcttagtctatctccgcaagtcccgg

SEQ ID NO: 17136 - DNA, 260 bp, Unknown
  Description of Unknown: LeftRegion for integrase B4137 sequence
gcggatgcatatgtgaaagtctgcagcgcgcttgcgaaattgaagaaataaaaagtcgcccagtgctaccaacaccagacgacttgctcttccttgcggaagctgtaaatataagaaatgttttgcataaatattttacagccgtttccgtaaatccgcaagggtttattttttatactcttttttgggaggtgaggacgatgaggttcttttcatacggacgaaaatccgtattttctgataaatcagattctatcgat

SEQ ID NO: 17137 - DNA, 260 bp, Unknown
  Description of Unknown: LeftRegion for integrase B4138 sequence
ggatgcatatgtgaaagtctgcagcgcgcttgcgaaattgaagaaataaaaaaccgcccggtgctaccaacaccaggcgacttgctcttccttgcggaagctgtaaatataagatatgttttgcataaatattttacagccgtttccgtaaatccgcaagggtttattttttatactcttttttttgggaggttaggacaatgaggttcttttcatacggacgaaaatccgtattttctgataaatcagattctatcgat

SEQ ID NO: 17138 - DNA, 260 bp, Unknown
  Description of Unknown: LeftRegion for integrase B4139 sequence
cttacaacgtccgcaattcagcgcaaatgtaaatgcggaagcaactgtgcgtatgcagttcttcaaagcctacaggtctacggaatgattcgagagattcggcaattcacatacgaatggacagaaaaagccctcctgctgggcgcagaagggcgtaacgggtaacagatatgtcgatagatattaaatggcaagtgccaatggcaaagccggaagtcagcgaactggccgtcgtatatgcccggtattcaagccacagt

SEQ ID NO: 17139 - DNA, 260 bp, Unknown; identical to SEQ ID NO: 17036
  Description of Unknown: LeftRegion for integrase B4140 sequence

SEQ ID NO: 17140 - DNA, 260 bp, Unknown; identical to SEQ ID NO: 13224
  Description of Unknown: LeftRegion for integrase B4141 sequence

SEQ ID NO: 17141 - DNA, 260 bp, Unknown
  Description of Unknown: LeftRegion for integrase B4142 sequence
ataaataaaagcccctgtgctaccaacacaagagcttttactgcgacttacaattaagctgtgctcaaatgatataatcgccctagacaagccatattatatcattcatagcaccgcttttgcaagtggtgttatttttgtacccatttttgagttgcaccggtgcaacttgcatatattttacagaaaggatgattaatatggtatcttttgacagcattattatctatcttagaaagtcccgatctgatgatcctgcg

SEQ ID NO: 17142 - DNA, 260 bp, Unknown; identical to SEQ ID NO: 15631
  Description of Unknown: LeftRegion for integrase B4143 sequence

SEQ ID NO: 17143 - DNA, 260 bp, Unknown; identical to SEQ ID NO: 17105
  Description of Unknown: LeftRegion for integrase B4144 sequence

SEQ ID NO: 17144 - DNA, 260 bp, Unknown; identical to SEQ ID NO: 17088
  Description of Unknown: LeftRegion for integrase B4145 sequence

SEQ ID NO: 17145 - DNA, 260 bp, Unknown
  Description of Unknown: LeftRegion for integrase B4146 sequence
aagagcttttagatagcggtattattactcaagaagaatttgaccagaaaaaatcagaacttttataaaaagaaccggctcctgctaccaacgggaaccggttttttgaaaaataagacaatctcggtgataatcttacctacacattaagtatatcatctccgtgattgccgcacaagtgtaaaaaggagaatgataaaatgaatgaatcagtatgcatctatttgagaaaatccagagccgatcgggaagctgaagca

SEQ ID NO: 17146 - DNA, 260 bp, Unknown
  Description of Unknown: LeftRegion for integrase B4147 sequence
tcgtggagactctccccggattgcgtgcgttaattaagaaatgcaaataaaaaaatcgcccagtgctgcgaacaccaggcgacctgttcttccttgcggaagctgcataatttgacgtaaatcatcaaatcttattttacagccgtttccgtaaatccgcaagggtttattttttatactcttttttgggaggtgggacgatgaggttcttttcctacggacgaaaatccgtattttctgataaatcagattcaatcgat

SEQ ID NO: 17147 - DNA, 260 bp, Unknown
  Description of Unknown: LeftRegion for integrase B4148 sequence
cgtggagactctccccggattgcgtgcgttaattaagaaatgtaaataaaaaaatcgcccagtgctgcgaacaccaggcgacctgttcttccttgcggaagctgcataatttgacgtaaatcatcaactcttattttacagccgtttccgtaaatccgcaagggtttattttttatactcttttttttggaggtgggacgatgaggttcttttcctacggacgaaaatccgtattttctgataaatcagattcaatcgat

SEQ ID NO: 17148 - DNA, 260 bp, Unknown
  Description of Unknown: LeftRegion for integrase B4149 sequence
cgatcaggaaactttcgatgcggtagaagaaaagaggatggaacgagcaagatgtctggggcgtattcgtgaactaaaagaaccaccaaaaccggaatgctcgactcagttttatcgtccaaaggtaaaaaaaatatatgaagacccatttaaacaggctgaatatgcctatagtttgattgaaagggaggattttataaatgacaacagctaagaatgttatggttattcctgccagacgcaggctaggaaacaccgta

SEQ ID NO: 17149 - DNA, 260 bp, Unknown
  Description of Unknown: LeftRegion for integrase B4150 sequence
tatacagttcatttcctgcccgagagtcgctcggtcttagttcctatatgacagcatctcagctggagggacactctccctcgactcattactgctacttctttctcataatataacttgtatttttcgcgaatcattaaaggaggtgatgcctgaattcagctcatcgtagaatatacatcaaaggaaaggtggaaccaatgacaacgtttgatatgaacaacgctgtagaaatcgcaaaaatggacatatacgctatt

SEQ ID NO: 17150 - DNA, 260 bp, Unknown
  Description of Unknown: LeftRegion for integrase B4151 sequence
cgtggagactctccccggattgcgtgcgttaattaagaaatgcaaataaaaaaatcgcccagtgctgcgaacaccaggcgacctgttcttccttgcggaagctgcataatttgacgtaaatcatcaaatcttattctacagccgtttccgtaaatccgcaagggtttattttttatactctttttttgggaggtgggacgatgaggttcttttcctacggacgaaaatccgtattttctgataaatcagattcaatcgat

SEQ ID NO: 17151 - DNA, 260 bp, Unknown
  Description of Unknown: LeftRegion for integrase B4152 sequence
ttaaaactggagaagtggaagatctgaacgcagaggaaactgaataaaaaatcgcccggcgcttccaacgccagacgatctcttaaatcttgcagacagccgttcagctggctacaattccctctcgacaagagaattatagcacagttcatggcacctgcataggtgttatttttatacccttttttaggaggtttgctatgaatatctgttgctatggcaggaagtcgatctattctgatcactcagattctatcgac

SEQ ID NO: 17152 - DNA, 260 bp, Unknown
  Description of Unknown: LeftRegion for integrase B4153 sequence
aaagaacttttagatagtggtattatcactcaagaagaattcgatcagaaaaaaatagaacttttgtaaaaagaaccggctcctgctaccaacgggaaccggttttaataaataagacgatctcggtgataatcttacctacacattaagtatatcatctccgggattgacgtacaagtgtaaaaaaggagaatgataaaatgaatgaatcagtatgcatctatttgagaaaatccagagccgatcgagaagccgaagca

SEQ ID NO: 17153 - DNA, 260 bp, Unknown; identical to SEQ ID NO: 17120
  Description of Unknown: LeftRegion for integrase B4154 sequence

SEQ ID NO: 17154 - DNA, 260 bp, Unknown
  Description of Unknown: LeftRegion for integrase B4155 sequence
acgaaggggactaaggtgtggtcttgcagtcagccacgcacaaagtgccaactgaggagattgcccgaatccgagctgagggaagctgcggcatccttctttggcaatggctacgagggcaagatcgttcagaacgtcgagcggatcatcatatccgacgatgaagttgttttccatttgaaagaaggaggcgcataccgatggcaaagaccgtgcgggtaatccctgcaagccctaaaatctttcgttctgaggttacg

SEQ ID NO: 17155 - DNA, 260 bp, Unknown
  Description of Unknown: LeftRegion for integrase B4156 sequence
acaggtcttttgattgtgtgtagtgacccggcgcaaaagaaaattgatagagccgatgccttgaatattccaatcatttcagagcagcaatggtatgaactcatgccagaacttgaagccgttggaatgtggaacggaaagcaaattctgtttgcggacaatgatggcatctaccgtgttgaagtggacggtgaaagctgatggccagaaaaaagaatattgccgctggcctcgatgccgtcatctatgcccggtactca

SEQ ID NO: 17156 - DNA, 260 bp, Unknown
  Description of Unknown: LeftRegion for integrase B4157 sequence
aggcatataaaaaagatttggacagcttttctcttcaagacgtttccgaattatgcggtgtttttcgtgacgatgcgcatagaagcctttctgactgtttcgcaaccggcattgtgttcaaaaactgtgttgaagatatcactggcaggtaagccctccaggtgtacggttgtcagtttcgaatctgaacgggggacagtatgcgggcatttatttactgccgattttccagccataagcagcaggaacttagtatagag

SEQ ID NO: 17157 - DNA, 260 bp, Unknown
  Description of Unknown: LeftRegion for integrase B4158 sequence
ccagatcagcgctgatgcatacgtgaaagtctgcgggcctctggcaaagatggccaaataaaaaaaccgccgggtgctggtaacacctgacggtccattccttccttgcggaagctgtaaactctacgaataaattttacagcgtttccgataaatccgcaagggtttattttttatactcttttttgggaggtgggacgatgaggttcttttcctacggacggaaatccgtattttctgataaatcagattcaatcgat

SEQ ID NO: 17158 - DNA, 260 bp, Unknown
  Description of Unknown: LeftRegion for integrase B4159 sequence
tgttaagtatattatatgtcaaatacgtttatttgtcaaattacaaaaaccgcccctgcgccaacaggaacggctttctataaccccgaagagttacatcaacattcataattcattgtatcatctccggggcagccatgcaagcggaacattcgttcctgctggctgttatttttgtactcaaaaaggaggatgattgaatgttttttggaatttatggaagaaaatctgtctattctgataagtctgattccgtagat

SEQ ID NO: 17159 - DNA, 260 bp, Unknown
  Description of Unknown: LeftRegion for integrase B4160 sequence
agagcttttagatagcggtattattactcaagaagaatttgaccagaaaaaatcagaacttttataaaaaggaccggctcctgctaccaacgggaaccggtttttttgaaaaataagacaatctcggtgataatcttacctacacattaagtatatcatctccgtgattgccgcacaagtacaaaaaggagattgataacatgaatgaatcagtatgcatctatttaaggaaatccagagccgatcgggaagctgaagca

SEQ ID NO: 17160 - DNA, 260 bp, Unknown; identical to SEQ ID NO: 17120
  Description of Unknown: LeftRegion for integrase B4161 sequence

SEQ ID NO: 17161 - DNA, 260 bp, Unknown
  Description of Unknown: LeftRegion for integrase B4162 sequence
tcgtggagactctccccggattgcgtgcgttaattaagaaatgtaaataaaaaaatcgcccagtgctgcgaacaccaggcgacctgttcttccttgcggaagctgcataatttgacgtaaatcatcaaatcttattttacagccgtttccgtaaatccgcaagggtttattttttatactcttttttgggaggtgggacgatgaggttcttttcctacggacgaaaatccgtattttccgataaatcagattcaatcgat

SEQ ID NO: 17162 - DNA, 260 bp, Unknown
  Description of Unknown: LeftRegion for integrase B4163 sequence
gcggatgcatatgtgaaagtctgcagcgcgcttgcgaaattgaagaaataaaaaaccgcccggtgctaccaacaccaggcgacttgctcttccttgcggaagctgtaaatataagatatgttttgcataaatattttacagccgtttccgtaaatccgcaagggtttattttttatactcttttttgggaggtgaggacgatgaggttcttttcatacggacgaaaatccgtattttctgataaatcagattctatcgat

SEQ ID NO: 17163 - DNA, 260 bp, Unknown; identical to SEQ ID NO: 17039
  Description of Unknown: LeftRegion for integrase B4164 sequence

SEQ ID NO: 17164 - DNA, 260 bp, Unknown
  Description of Unknown: LeftRegion for integrase B4165 sequence
aataatagtgaatttacgtaatttgtaccaaattattatgctttatttatttttatattgtgctataatttaaaaaaccgactcctgcgaccaacaggaaccggtttaataaataagataatctcggagaaaatcttacctacaccataattataccatctcctggattatcacacaagttaaaaaaggagaataataaaatgaatgaatcggtatgtatctatctaaggaaatccagagctgatcgggaagctgaagca

SEQ ID NO: 17165 - DNA, 260 bp, Unknown
  Description of Unknown: LeftRegion for integrase B4166 sequence
ttaagtatattatatgtcaaatccgtttatttgtcaaattataaaaccgcccagtgttaccagcactgaacggctttctatagctccggagagctacatcaacattcataattcattgtatcatctccggggcagccatgcaagcggaacattcgttcctgctggctgttatttttgtactcaaaaaggaggatgattgaatgttttttggaatttatggaagaaaatctgtctattctgataagtctgattccgtagat

SEQ ID NO: 17166 - DNA, 260 bp, Unknown
  Description of Unknown: LeftRegion for integrase B4167 sequence
tgcacagatgtcggagaagtccttggatattcttttgatattacagaaatagaataaatattaaaaaaaagaaccggctctcgctaccaacgaggaccggttttttaaaaataagacaattccagagaaaaatcttacctacacattaagtatatcatctccgggattgccgtacaagtgtaaaaaaggagaatgataaaatgaacgaatcagtatgtatctatttgaggaaatccagatccgatcgggaagctgaagca

SEQ ID NO: 17167 - DNA, 260 bp, Unknown
  Description of Unknown: LeftRegion for integrase B4168 sequence
cagcatgaacatattttactatattttagcacaatgttgcttgcagaagaagatttcaaacaaaataaaaaacgcccacggtgttaccagcaccgcaggcgttccagatcagcttacccagagggcaataacagccaacctcacagatgttattgtaccacctccgggcaggcttgtcaaagtgtacccggaggtattttatgggcaaaaagcaaaaaatcactggcggtgacgccgtcatttacgcccgctactcgtcc

SEQ ID NO: 17168 - DNA, 260 bp, Unknown
  Description of Unknown: LeftRegion for integrase B4169 sequence
cgtggaaaacttccccggattacgggctctgattaagaattgtaaataaaaaaatcgcccagtgctgcgaacaccaggcgacctgttcttccttgcggaagctgcataatttgacgtaaatcatcaactcttattttacagccgtttccgtaaatccgcaagggtttattttttatactctttttttgggaggtgagacgatgaggttcttttcttacggacgaaaatccgtattttctgataaatcagattcaatcgat

SEQ ID NO: 17169 - DNA, 260 bp, Unknown
  Description of Unknown: LeftRegion for integrase B4170 sequence
gcggatgcatatgtgaaagtctgcagcgcgcttgcgaaattgaagaaataaaaaaccgcccggtgctaccaacaccaggcgacttgctcttccttgcggaagctgtaaaatataagatatgttttgcatatatattttacagccgtttccgtaaatccgcaagggtttattttttatactcttttttggaggtgaggacgatgaggttcttttcgtacggaagaaaatccgtattttctgataaatcagattcaatcgat

SEQ ID NO: 17170 - DNA, 260 bp, Unknown
  Description of Unknown: LeftRegion for integrase B4171 sequence
cgtggagactctccccggattgcgtgcgttaattaagaaatgtaaataaaaaaatcgcccagtgctgcgaacaccaggcgacctgttcttccttgcggaagctgcataatttgacgtaaatcatcaaatcttattttacagccgtttccgtaaatccgcaagggtttattttttatactctttttttgggaggtgagacgatgaggttcttttcctacggacgaaaatccgtattttctgataaatcagattcgatcgat

SEQ ID NO: 17171 - DNA, 260 bp, Unknown
  Description of Unknown: LeftRegion for integrase B4172 sequence
aggcatataaaaaagatttggacagcttttctcttcaagacgtttccgaattatgcggtgtttttcgtgacgatgcacatagaagcctttctgactgtttcgcaaccggcattgtgttcaaaaactgtgttgaagatatcactggcaggtaagccttccgggtgtacggttgacagtttcgaatctgaacgggggacagtatgcgggcatttatttactgccgattttccagccataagcagcaggaacttagtatagag

SEQ ID NO: 17172 - DNA, 260 bp, Unknown
  Description of Unknown: LeftRegion for integrase B4173 sequence
gcacttaaataatgtgacgtatcctttagtgttattcattttcttcattccaggtttcattatatcatataaagagcaagatgtaaatatacattttgtaaaatttttttcgtttctgtttgtgttttatgtagaaataagaaatattacagcacactacaaattcaccagtgggaaaactataaaaaggaggtatcacaatgcccgattatgctatatacctgcgtaaatcccgtaaggacaacgaagccgaacagcgt

SEQ ID NO: 17173 - DNA, 260 bp, Unknown
  Description of Unknown: LeftRegion for integrase B4174 sequence
ggaggatgaattcgtagagactctccccggattgcgtgcgttaattaagaattgtaaataaaaaaatcgcccagtgctgcgaacaccaggcgacctgttcttccttgcggaagctgtaaactctacgaataaattttacagcgtttccgataaatccgcaagggtttattttttatactctttttttgggaggtgggacgatgaggttcttttcctacggacgaaaatccgtattttctgataaatcagattcaatcgat

SEQ ID NO: 17174 - DNA, 260 bp, Unknown; identical to SEQ ID NO: 17040
  Description of Unknown: LeftRegion for integrase B4175 sequence

SEQ ID NO: 17175 - DNA, 260 bp, Unknown
  Description of Unknown: LeftRegion for integrase B4176 sequence
cgtggagactctccccggattgcgtgcgttaattaagaaatgtaaataaaaaaatcgcccagtgctgcgaacaccaggcgacctgttcttccttgcggaagctgcataatttgacgtaaatcatcaaatcttattttacagccgtttccgtaaatccgcaagggtttattttttatactcttttttttggaggtgggacgatgaggttcttttcctacggacgaaaatccgtattttctgataaatcagattcaatcgat

SEQ ID NO: 17176 - DNA, 260 bp, Unknown
  Description of Unknown: LeftRegion for integrase B4177 sequence
gttaagtatattatatgtcaaatccgtttatttgtcaaattgcaaaaaccgcccctgcgccaacaggaacggctttatataaccccgaagagttacatcaacattcataattcattgtatcatctccggggcagccatgcaagcggaacattcgttcctgctggctgttatttttgtacccaaaaaaggaggatgattgaatgttttttggaatttatggaagaaaatctgtctattctgataagtctgattccgtagat

SEQ ID NO: 17177 - DNA, 260 bp, Unknown
  Description of Unknown: LeftRegion for integrase B4178 sequence
tattttgtgccatatgattctagataaataaaaaccgccccactgtaaagcaaggcggcaatgctcccgatgatacggtagccctaagcaagcatattgtatcattcggagcagccaaacgcaagcggaacacctgttccccgctggctgttatttttatactcttttttacatacattttcacaaaggagtgataccttatgccaaacaccgaatcattcactgtaaatgaaatcttagtctatctccgcaagtcccgg

SEQ ID NO: 17178 - DNA, 260 bp, Unknown
  Description of Unknown: LeftRegion for integrase B4179 sequence
tcgtggagactctccccggattgcgtgcgttaattaagaaatgtaaataaaaaaatcgcccagtgctgcgaacaccaggcgacctgttcttccttgcggaagctgcataatttgacgtaaatcatcaaatcttattttacagccgtttccgtaaatccgcaagggtttattttttatactcttttttgggaggtgagacgatgaggttcttttcctacggacgaaaatccgtattttctgataaatcagattcaatcgat

SEQ ID NO: 17179 - DNA, 260 bp, Unknown
  Description of Unknown: LeftRegion for integrase B4180 sequence
aatctaaaaattatcagcttttaaaagaaaaatgtgctgattgcggaataatcttaaatgaagaataaaaaatcccatcgaagcggttgatgtacctgctccggtgggattttttcttgcttttcatgtgaatgtatggtacaataaataaaaaatccgccttgcattttttgcagggcggtacaattaaggagcgattcatgaaaagagcagtgttttatggtcgttattccagcgaccgacaaacagaacagagcatt

SEQ ID NO: 17180 - DNA, 260 bp, Unknown
  Description of Unknown: LeftRegion for integrase B4181 sequence
tatatggtatcgcacgcaaactttttgggaaaatcatcatggtataccgtagtgatacctcgcgtgcgcgagtgcgtgtgcgcgcgatcgtgcgcgcactgtctctgtacctgtatctgtatctgagactgtatctgtattctgtttctgattctgaatatctactactgcaaatctatcgttagaagggggtggcgctgttgccgagaaaacctgcaaagcacccggcgaagccgaagcggggcaagaagctggaaatc

SEQ ID NO: 17181 - DNA, 260 bp, Unknown; identical to SEQ ID NO: 17025
  Description of Unknown: LeftRegion for integrase B4182 sequence

SEQ ID NO: 17182 - DNA, 260 bp, Unknown
  Description of Unknown: LeftRegion for integrase B4183 sequence
ataaataaaagcccctgtgctaccaacacaagagcttttaccacgatacttacataagctgtgcttatgatataataccgccctagacaagccatattatatcattcatagcaccgcttttgcaagtggtgttatttttgtacccatttttgagttgcaccggtgcaacttgcatatattttacagaaaggatgattaatatggtatcatttgacagcattattatctatcttagaaagtcccgctctgatgatccggcg

SEQ ID NO: 17183 - DNA, 260 bp, Unknown
  Description of Unknown: LeftRegion for integrase B4184 sequence
tcgtggaaaacttccccggattacgggctctgattaaaaattgtaaataaaaaaatcgcccagtgctgcgaacaccaggcgacctgttcttccttgcggaagctgcataatttgacgtaaatcatcaaatcttattttacagccgtttccgtaaatccgcaagggtttattttttatactcttttttgggaggtgagacgatgaggttcttttcctacggacgaaaatccgtattttctgataaatcagattcaatcgat

SEQ ID NO: 17184 - DNA, 260 bp, Unknown
  Description of Unknown: LeftRegion for integrase B4185 sequence
ctggatcattgacatggttatgatctgttgcaacaaattcaccgacagcaccggcgcggtggttggcctgaaggttgctgagtataccagacagccggatcctgatcttgcagaggcttctctggaggagcagcgggaggcagcggccgagactgccagagcttacggctataccgtaatagagtcaggcactcaggataatgccgacaagtaaaaacacggctcgaaaatatgccgcaggaggtggctcggataattcc

SEQ ID NO: 17185 - DNA, 260 bp, Unknown
  Description of Unknown: LeftRegion for integrase B4186 sequence
ataaataaaagcccctgtgctaccaacacaagagcttttaccacgatacttacataagctgtgcttatgatataataccaccctagacaagccatattatatcattcatagcaccgcttttgcaagtggtgttatttttgtacccatttttgagttgcaccggtgcaacttgcatatattttacagaaaggatgattaatatggtatcttttgacagcattattatctatcttagaaagtcacgttctgatgatccggcg

SEQ ID NO: 17186 - DNA, 260 bp, Unknown; identical to SEQ ID NO: 17040
  Description of Unknown: LeftRegion for integrase B4187 sequence

SEQ ID NO: 17187 - DNA, 260 bp, Unknown
  Description of Unknown: LeftRegion for integrase B4188 sequence
ataaataaaagcccctgtgctatcaacacaagagcttttaccacgatacttacataagctgtgcttatgatataataccgccctagacaagccatattatatcattcatagcaccgcttttgcaagtggtgttatttttgtacccatttttgagttgcaccggtgcaacttgcatatattttacagaaaggatgattaatatggtatcttttgacagtattattatctatcttagaaagtcacgttctgatgatccggcg

SEQ ID NO: 17188 - DNA, 260 bp, Unknown
  Description of Unknown: LeftRegion for integrase B4189 sequence
aagacaggtcttttgattgtgtgtagtgacccggcgcaaaggaaaattgacagagccgatgccatgaatattccgattgtttcggagcagcaatggtttgagctcatgccagaacttgaagccgttggaatgtggaacggaaagcgaatcctgttttcagacgacggcatctaccgtgttgaagtgggcggtgaaagctgatggccagaaaaaagaatattgctgctggcctcgatgccgtcatctatgcccggtactca

SEQ ID NO: 17189 - DNA, 260 bp, Unknown
  Description of Unknown: LeftRegion for integrase B4190 sequence
tagataaacataatcgtggatatgtatacaaaccacgaaaaaataaaaatgttgagcaataagacaattttatctataaaaaacgcccctaccctgcgccaacaggataggggcaatgcctatagtatatacaggcaaaccaacacaataacattatacctgtatatcctataaatttcaatacttataggagaatttttatgagcattaaagcagtaagctattgcagatatagcacagacaaccaaacggaaaacagc

SEQ ID NO: 17190 - DNA, 260 bp, Unknown
  Description of Unknown: LeftRegion for integrase B4191 sequence
cagataacggatactcaagttcagataagtactcagcaatatttaacgtatcagtaaattaataaattaaaaaaagccggctcctgcgaccaacaggaaccggttttaataaataagataatccggagaaaaatcttacctacacactaagtatatcattttccggattatcgcacaagtaaaaaaaggagaatgataaaatgaatgaatcggtatgtatctatctaaggaaatccagagccgatcgggaagctgaagca

SEQ ID NO: 17191 - DNA, 260 bp, Unknown; identical to SEQ ID NO: 17067
  Description of Unknown: LeftRegion for integrase B4192 sequence

SEQ ID NO: 17192 - DNA, 260 bp, Unknown
  Description of Unknown: LeftRegion for integrase B4193 sequence
ttgcgacattcaagaaaattgttgcagacattcttgcaggcaataatacgcttgtaacggattttgtatcacaaagaacgatgaaaaaatatgacaatgtaccgagcgaggaagagcttgacagagagatagcaaaacttggtgtataaaaactaccccgccgtaacaagcggggaaaactataaaaaggaggtatcccaatgcctgattacgccatatatcttcgtaagtcacgtaaggacaacgacgccgaacagcgt

SEQ ID NO: 17193 - DNA, 260 bp, Unknown
  Description of Unknown: LeftRegion for integrase B4194 sequence
tggaggatgaattcgtggagactctccccggattgcgtgcgttaattaagaaatgtaaataaaaaaatcgcccagtgctgcgaacaccaggcgacctattcttccttgcggaagctgtaaactctacgaataaattttacagcgtttccgataaatccgcaagggtttattttttatactcttttttgggaggtgagacgatgaggttcttttcctacggacgaaaatccgtattttctgataaatcagattcaatcgat

SEQ ID NO: 17194 - DNA, 260 bp, Unknown
  Description of Unknown: LeftRegion for integrase B4195 sequence
tggatgatgaattcgtggaaaactttcccggattacgggctctgattaagaattgtaaataaaaaaatcgcccagtgctgcgaacaccaggcgacctgttcttccttgcggaagctgtaaactctacgaataaattttacagcgtttccgataaatccgcaagggtttattttttatactcttttttgggaggtgggacgatgaggttcttttcctatggacgaaaatccgtattttctgataaatcagattcaatcgat

SEQ ID NO: 17195 - DNA, 260 bp, Unknown; identical to SEQ ID NO: 17078
  Description of Unknown: LeftRegion for integrase B4196 sequence

SEQ ID NO: 17196 - DNA, 260 bp, Unknown
  Description of Unknown: LeftRegion for integrase B4197 sequence
acaatttgtaaatattttcataaaaaccgccctagtgttggcagcactaagacggtccatatacatccgaagatgcactacatagtaagaacatgtatattgtatcatcttcggacacccattgcaatccgaactgtagttcgtgattgggtgctatttttatattcatttttaatatatttaattaggaggatatcattgtgatagcaatttataccagacaatccctttttaagaaagattctctttccacttctcag

SEQ ID NO: 17197 - DNA, 260 bp, Unknown
  Description of Unknown: LeftRegion for integrase B4198 sequence
tggaggatgaattcgtggagactctccccggattgcgtgcgttaattaagaaatgtaaataaaaaaatcgcccagtgctgcgaacaccaggcgacctgttcttccttgcggaagctgtaaactctacgaataaattttacagcgtttccgataaatccgcaagggtttattttttatactcttttttgggaggtgagacgatgaggttcttttcctacggacgaaaatccgtattttctgataaatcagattcaatcgat

SEQ ID NO: 17198 - DNA, 260 bp, Unknown
  Description of Unknown: LeftRegion for integrase B4199 sequence
tgatcaggaactgttcgacaaagccgaggaagaaagacaatccagagccagtcagcttggcagggtcagagaactgaagggcaaagaaatgcctgccgttcccctgtgttttacaatgggtcgacagacaaaggttttctatgacccttacgagcaggctgaatacgcctatagtctgatagaaagtgagatgaattctaatggaaacagttaaaaacataacggtgattccggcacgtaggcgtgttggtaacactgca

SEQ ID NO: 17199 - DNA, 260 bp, Unknown
  Description of Unknown: LeftRegion for integrase B4200 sequence
atattgcagaattattaaaataaataaaaaccgccccactctaccaaagcaggacggtcacgctcccggatgatccaagaaccctcaacaagcacattgtatcattcccggagcagctacgcaagcggaacacccgttccccgctggctgttatttttatacccttttttacatacattttcacaaaggagtgataccttatgccaaacaccgaatcattcaccgtaaatgaagtcttagtctatctccgcaagtcccgt

SEQ ID NO: 17200 - DNA, 260 bp, Unknown; identical to SEQ ID NO: 17040
  Description of Unknown: LeftRegion for integrase B4201 sequence

SEQ ID NO: 17201 - DNA, 260 bp, Unknown
  Description of Unknown: LeftRegion for integrase B4202 sequence
acagaatctaccacaagatgtatatcagttcttattagaacacaatggaatatctcaaacagatatttataaggcatttgaacccattctgaaaaacgatatccaagaactattatatcgttgggataaatctgggacgataaaaagagaaaagagcggtaaaacctacaacgtatttatagcaaaataaaggagttcttatgtctgtaagaaatataataatatatttacgaaaatcaagatctgatgacccaggcatg

SEQ ID NO: 17202 - DNA, 260 bp, Unknown
  Description of Unknown: LeftRegion for integrase B4203 sequence
ataaataaaagcccctgtgctaccaacacaagagcttttaccacgatacttacataagctgtgcttatgatataataccgccctagacaagccatattatatcattcatagcaccgcttttgcaagtggtgttatttttgtacccatttttgagttgcaccggtgcaacttgcatatattttacagaaaggatgattaatatggtatcttttgacagtattattatctatcttagaaagtcccgctctgatgatccggcg

SEQ ID NO: 17203 - DNA, 260 bp, Unknown; identical to SEQ ID NO: 17028
  Description of Unknown: LeftRegion for integrase B4204 sequence

SEQ ID NO: 17204 - DNA, 260 bp, Unknown
  Description of Unknown: LeftRegion for integrase B4205 sequence
aacagaaatgcttatcgaatcgtaagagattatctaaataaataaaaaaaccgcccggtgctggtaacaccgaacggcttcttcgcttcccttgcgggatgcggttgcttaaccttcgcaggattaagtataccgcattttccacgagtccacaagggcttattttttatactcttttttaaattttaggaggtggaacaatgaggttttttagctatgggcgaaaatccatattttctgacaagtctgattcgatcgac

SEQ ID NO: 17205 - DNA, 260 bp, Unknown
  Description of Unknown: LeftRegion for integrase B4206 sequence
aaccataaaaatacacatataaaaaccgccccagtgctaccaacaccagagcggcaaacacattgctccgaaaagcatatgccctaagcaagcatattgtatcattcggagcagccaaacgcaagcggaacaccagttctctgctggctgttatttttatactcttttttacatacattttcacaaaggagtgataccttatgccaaacaccgaatcattcaccgtaaatgaagtcttagtctatctccgcaagtcccgg

SEQ ID NO: 17206 - DNA, 260 bp, Unknown
  Description of Unknown: LeftRegion for integrase B4207 sequence
ataaataaaagcccctgtgctaccaacacaagagcttttaccacgatacttacataagctgtgcttatgatataataccgccttcgacaagccatattatatcattcatagcaccgcttttgcaagtggtgttatttttgtacccatttttgagttgcaccggtgcaacttgcatatattttacagaaaggatgatcaatatggtatcatatgacagcattattatctatcttagaaagtcacgttctgatgatccggcg

SEQ ID NO: 17207 - DNA, 260 bp, Unknown
  Description of Unknown: LeftRegion for integrase B4208 sequence
tgcgcattagttgggcttgttatcgctgttttaggcgctgcaattgtcggcgttccaattgcgatattgggcgctttgcttgcctttgggtcaaagggaaggaaatagaaaaccctgcgcggcttctttgcggtcggcgcgcagggcaagtgcaaagaacgaagcgcaatagcgcactcgctctaaggggtgattttagcatggtgaagaaccgagctgccatatacgcgcggttcagctcgcacaaccaacgctcagaa

SEQ ID NO: 17208 - DNA, 260 bp, Unknown; identical to SEQ ID NO: 17028
  Description of Unknown: LeftRegion for integrase B4209 sequence

SEQ ID NO: 17209 - DNA, 260 bp, Unknown
  Description of Unknown: LeftRegion for integrase B4210 sequence
aagacgggtcttttgattgtgtgtagtgacccggcgcaaaagaaaatcgacagagcggatgccctgaatattccgatcgtttcggagcagcaatggtttgagatcatgccagaacttgaagccgttggaatgtggagcggaaagcgaatcctgttttcagacgacggcatctaccgtgttgaagtgggcggtgaaagctgatggccagaaaaaagaatattgctgctggcctcgatgccgtcatctatgcccggtactca

SEQ ID NO: 17210 - DNA, 260 bp, Unknown
  Description of Unknown: LeftRegion for integrase B4211 sequence
ctgtgacgattgcggatttagctttgactttacaacgcaaaaggatattgacgacaagtgtaaaacgctattaaacggtgaaattggctctattgtagttgcgatcattttggggatcgctttgtttgttataaacggatatctgcattgaaagcgaataaaagtgttatacgtcgatcaaacggttaggaggtggtattttgagctcaatagataaaacagccgtaatttacgcgcggtattcatcccatggtcagacc

SEQ ID NO: 17211 - DNA, 260 bp, Unknown
  Description of Unknown: LeftRegion for integrase B4212 sequence
tgagaacatcgagcatgtgaagcgatttgcgaaatgtgccccggaaacgcttcttagcatgcttgttctttcaggccgaatcgctgagttgaacgagattaggcaatagaaaagccctgcgcgacttcttggcggtcggcgcgcagggcaatggtcgaattgagcgctttagcgcgctcgcttcaaggagtgattctagcatggtaaagaacagagctgccatatatgcgcgctttagctcgcacaatcagcgctcagag

SEQ ID NO: 17212 - DNA, 260 bp, Unknown
  Description of Unknown: LeftRegion for integrase B4213 sequence
gcgtcaatcccagactgcgctctcccggcgtcgtttaaacactagattccggccacacgagccttgatgcctctcagaaggcggctcgcctcgttcatcagcgagccacgccccggcttagatagaaagcgccccgtcacgggacgaggccgtgacggggcgaacgtccgcaccttgggattgggagggaccaccacattatgccacgcaggaggaaggtcgcggccaaggacaggggccgctgcgtcatatacgcgcgc

SEQ ID NO: 17213 - DNA, 260 bp, Unknown
  Description of Unknown: LeftRegion for integrase B4214 sequence
aaaacaggcggcttatcgcttagcttcaaagctgtgaactggtgttattcggttttagttatgttgggaagtggcgaaaaacggcgacataaagtgctgttttcagagagaaaccccgcgcgggaacttggcggaacgcgcgcggggctggtcaagaagcagagcgctttaccgcgctcgctctaaggggtgattttagcatggtgaagaaccgagcagccatatatgcgcgcttcagctcgcacaatcagcgctcagag

SEQ ID NO: 17214 - DNA, 260 bp, Unknown; identical to SEQ ID NO: 13188
  Description of Unknown: LeftRegion for integrase B4215 sequence

SEQ ID NO: 17215 - DNA, 260 bp, Unknown
  Description of Unknown: LeftRegion for integrase B4216 sequence
gataaagaattacaggacgcagtccgggcggaaaaggaacgccgtgctaaacgctgggggaaggataagctaaagaaaaagtccccaaagcctgccccgatatcgacacagttccatatgaagaaaaagctggcaacgcaccagaacccgtatcgtcaagccgaatacatgtacagtttaattgaaagcgaggaaaccacatggcaaatgtaacgataattcctgcccgcaggaaagcagacaagtcaacagaagaaaaa

SEQ ID NO: 17216 - DNA, 260 bp, Unknown
  Description of Unknown: LeftRegion for integrase B4217 sequence
caattgtttcacttgtaaaacataattaataaaaccaaaaccgcccctgctggtaacagagacggctttcaagaatctttgcagttataaaaaactgtgctatattcttcctgaacagttgaattatagcacacttctttacatctgcaaaggtgtattttttatacccttttttcgtaaaatgcaatggaggtgtgctaatgaatcttgaaaatgtatgtctttatttaagaaaatcccgtgctgatcgggaggctgag

SEQ ID NO: 17217 - DNA, 260 bp, Unknown
  Description of Unknown: LeftRegion for integrase B4218 sequence
tcccaaacagcggacagtcacaaaaatagcagaagccccggtgttaccagcaccagagcctctacctttgaatactatacaggtctcaagaacctagtacaataccaaaacgcaaatatattgtaccacattttcttagcacctgcataggtgttatttttatactcttttttacatattttaggaaaggtggtacatatatgcgcgaacaatatttaatctatctaagaaaatcccgtaacgatgcacaacttgaagca

SEQ ID NO: 17218 - DNA, 260 bp, Unknown
  Description of Unknown: LeftRegion for integrase B4219 sequence
ttaaaaaaccgcccctgcgccaacaggaacggtttgcgccttggccggataccagtcaagacattactataacatctccggagatgctacagctttcagcaaaaatattgtatcatcttcggagcggttgcacaatcagaacgtttgtgtggtcgttatttttgtacccatttttacatattttaaaccgaggtgatattatggaacttttaaatgtatgtatctacctgcgtaagtcccgtgctgatcgggaggctgaa

SEQ ID NO: 17219 - DNA, 260 bp, Unknown
  Description of Unknown: LeftRegion for integrase B4220 sequence
gtcttttacgttatctacaataaaataacagaagccccggtgttaccagcaccagagcctccatctttgaatactatacaggttccaagaacccagtacaataaccaaacgcaaatatattgtaccacactttcttagcacctgcataggtgttatttttatactcttttttacatatttttaggaaaggtggtacatatatgcgtgaacaatatctaatctatctaagaaaatcccgtaacgatgcacagcttgaagca

SEQ ID NO: 17220 - DNA, 260 bp, Unknown
  Description of Unknown: LeftRegion for integrase B4221 sequence
atttcatgggtgtcttttactttatataaatatatacaaaaaccggctcctgcgccaacaggaaccggtatgtagcttccgaagatgctactcatttcgcaaaaatattgtatcatcttcggagcggctgcacaatcagaacgtttgtgtggtcgttatttttgtacccttttttacatattttaaaccgaggtgatattatggaacttttaaatgtatgtatctacctgcgtaagtctcgcgccgatcgggaggccgaa

SEQ ID NO: 17221 - DNA, 260 bp, Unknown
  Description of Unknown: LeftRegion for integrase B4222 sequence
taaagaaaatgatttcaaaacaaaagtagaataccttattgctaaaccaaataatgagatagaaatgcacttcaaagatgggaatgttgcaataatcaaatgggaagatagaagtcgtagtgaatcttggacttctgagatgaaagaaaaagcaaggcaaaaaaagattgaacaatacaaaaaaagaggaggtggattaaatgggtaaagttagaataattccacaaacaatcaatccattaactcaagttaaaattggt

SEQ ID NO: 17222 - DNA, 260 bp, Unknown
  Description of Unknown: LeftRegion for integrase B4223 sequence
gcagtggcattgcagtacctcaaacggctctttacagcagggctgcttactgacgaggaatatcaaagggcttgtgacctgctgataagaaggtatctggcagcagcataagagcctatctgtctgcgcttcaccatagatatattgaggattgtgtggtagtgttgttgcttgaaaagagccgaaaggaggtgccctgcatgcccaaggtacgtgtgatacaggcaacgaaaggatcgcttgcaaacaggctgcctgtt

SEQ ID NO: 17223 - DNA, 260 bp, Unknown
  Description of Unknown: LeftRegion for integrase B4224 sequence
gccgttaaaggtgtctttaacggtgtcttgtcagaaaatattgtagagtggaacgagtttgaaatcaatggtaatcgttgccacgatgccacactattttatatgcgagcagccgcacaattatgctacacgaaaggaggcgatgcccgcaaagtacagcggcaacaccgatacaataacatcataaggacgtgaatcaagtgacagcattagaacaaaacagcgcggttgaatcggcgctgcacccacagatggacaaa

SEQ ID NO: 17224 - DNA, 260 bp, Unknown; identical to SEQ ID NO: 15387
  Description of Unknown: LeftRegion for integrase B4225 sequence

SEQ ID NO: 17225 - DNA, 260 bp, Unknown
  Description of Unknown: LeftRegion for integrase B4226 sequence
tactatcgattatcgatggagagcttcacaaaaggtacacgagattcgagagatagaaataacgtacgtctcgaacgatttaagatgtgggccgaaaattttggagaaatagaattaactgatgaagagcatgataagattattgaatataccaaatttttactttattcaagagagaaacaaaagaaaggaccaacatcatgacaacatttgatatgcacaacgcagccgatcgagctcttaaaatagacgtttatgca

SEQ ID NO: 17226 - DNA, 260 bp, Unknown
  Description of Unknown: LeftRegion for integrase B4227 sequence
ctcacgccggaggtgctcagccgagaaacatactgcgccacctttattggcggagacggggcgaggtataaaaccacgctgataggctgttcgtgcccagacttcgaggagcgggggcttccgtgtaagcatatgtactggctcgcgcagcagctcggactcaatgactccgtgccggccagcggcgccggcggagaggcgtgagcgccggaaagagtgcagcaggagggccgcccgatgctgccatgcgggcgtatatc

SEQ ID NO: 17227 - DNA, 260 bp, Unknown
  Description of Unknown: LeftRegion for integrase B4228 sequence
agacccccgttctatcggcggcaaacccccgaaaatcggtcacttcgtgccgataaaacggggttgtcgtccaaaatcaggccgttctggcggacaaatcaggttgtcgtccgcacgcggcggacaaaaaatggcccacgcgccgggttgggcgcgggggccgccgtccacaccttgggattgggagggaccaccacattatgccacgcaggaggaagttcgcggccaaggacaggggtcgctgcgtcatatacgcgagg

SEQ ID NO: 17228 - DNA, 260 bp, Unknown
  Description of Unknown: LeftRegion for integrase B4229 sequence
gttcaccgatgaagagcatgagaagttaatggagtatggtagattcttaatttcacagagacaaaaataaaagaaagagcccttgttaggactctgcctttatttcaaatttaggatcataggagttgaaaataacgcgaaggaggtgatgccaacttattcccttggcaagtacatcattagatataggaagtgactccatgacaacatttgatatgaataatgcgacatctaaagctttggatatggacgtttatgcg

SEQ ID NO: 17229 - DNA, 260 bp, Unknown
  Description of Unknown: LeftRegion for integrase B4230 sequence
tccgcaatctttaatataaaagtcaattaaacacaaaaaccgtcccagtacgccaataccgggacgggaatggatctccgaagagatacctcatttcaacaaaaatattgtatcatcttcggagcggctgcacaatcagaacatttgtgtggtcgttatttttgtacccatttttacatattttaaaccgaggtgatattatggaacttttaaatgtatgtatctacctgcgtaagtcccgtgctgatcgggaagctgaa

SEQ ID NO: 17230 - DNA, 260 bp, Unknown
  Description of Unknown: LeftRegion for integrase B4231 sequence
ttttatcatactaaaaaaaaaaaatccaacccaaatcacttctccatcaatactaagaatcataaaaaatggccccgctgtcatatagacaacggggcaccgaccgaccacgtatggtaacggtccatacatctgattatattttatcgtacttatcactaaaaatcaatacgtcaaacaaatagttaggagttgtttttatgtcaaatgccgttatatacgcccgctattcttccgggcatcagcgtgaagaaagtatt

SEQ ID NO: 17231 - DNA, 260 bp, Unknown
  Description of Unknown: LeftRegion for integrase B4232 sequence
tccgcaatctttaatataaaagtcaattaaacacaaaaaccgtcccagtacgccaataccgggacgggaatggatctccgaagagatacctcatttcagcaaaaatattgtatcatcttcggagcggctgcacaatcagaacatttgtgtggtcgttatttttgtacccatttttacatattttaaaccgaggtgatattatggaacttttaaatgtatgtatctacctgcgtaagtcccgtgctgatcgggaggctgaa

SEQ ID NO: 17232 - DNA, 260 bp, Unknown
  Description of Unknown: LeftRegion for integrase B4233 sequence
atggggcgataacggaagaagaatataatcttaagaaaattcagctgctgaataaataaaaaaatcccgcccgccctgcaccaccaggacgaacggggtaccatcagccggacggcaaacggcacggcataaacaccatgcctatcataccacacgccgtccgaacacgcaagaggcattatgcccggaaaggatggcaaatgaacggggtaatttacgcaagatacagcagccacaaccagagggaagaatccatagag

SEQ ID NO: 17233 - DNA, 260 bp, Unknown
  Description of Unknown: LeftRegion for integrase B4234 sequence
ccgcaatttttaatataaagatcaattaaacatataaaaaccgccccagtacgccaataccgggacggtggtggatctccgaagagatacctcatttcgcaaaaatattgtatcatcttcggagcggctgcacaatcagaacatttgtgtggtcgttatttttgtacccatttttacatattttaaaccgaggtgatattatggaacttttaaatgtatgtatctacctgcgtaagtcccgtgctgatcgcgaggctgaa

SEQ ID NO: 17234 - DNA, 260 bp, Unknown; identical to SEQ ID NO: 15411
  Description of Unknown: LeftRegion for integrase B4235 sequence

SEQ ID NO: 17235 - DNA, 260 bp, Unknown
  Description of Unknown: LeftRegion for integrase B4236 sequence
ttgtcagcgtttcggtagatttttccgtttttcagcaaaataaaaacgcccacggtgttaccagcaccgcaggcgttccagatcagcttgctcagagagatggtacagggataaaacctgtccagagcaataacagacctcgcagatgttattgtaccacctccgggcaggcttgtcaaagtgtacccggaggtatttttatgggcaaaaaacaaaagacaaacggcggcgatgcggtgatctacgcccgctattcttcc

SEQ ID NO: 17236 - DNA, 260 bp, Unknown
  Description of Unknown: LeftRegion for integrase B4237 sequence
ttcaaataaatccacttcatgtatgatattaccttgtttcttggaagatcgttcagctttcagcaaaccagatctaacccatcgtctaactgtttcttcgttgatatccaataagtcagcgatttctttagtgttatacatgctcatacaaccgctcctttctataaaggatatgaatcacaaaaagaggaagtgacatcatgacaacattcgatatgaatatcgcaacagaacacgctttaaagatggatgtatacgct

SEQ ID NO: 17237 - DNA, 260 bp, Unknown; identical to SEQ ID NO: 15411
  Description of Unknown: LeftRegion for integrase B4238 sequence

SEQ ID NO: 17238 - DNA, 260 bp, Unknown
  Description of Unknown: LeftRegion for integrase B4239 sequence
gccgggactgctgctgagggccgatgggtatgagacgagggaatataggaaggagtgacagttaaagtggaatctatcgaagccggaaagccagactgcttgactgtccatttcaagagtgggagaacagaagagatttcttatacgcctacgccatccaagcggcgtcccaaggcacggagaaaggagagcggagaaaagtggcaaagacagtaagggccatcccggccaccatcagccgttatacggcggctccgatt

SEQ ID NO: 17239 - DNA, 260 bp, Unknown
  Description of Unknown: LeftRegion for integrase B4240 sequence
tatgggtgtcttttactatgtaaaaataatagaagccccggtgttaccagcaccagagcctctacctttgaatactatacaggtctcaagaacctggtacaataccaaaacacaaatatattgtaccacattttcttagcacctgcataggtgttatttttatactcttttttacatatttttaaggaaaggtggtacatatgaacgaacaatatttaatctatcttagaaaatcccgtaacgatgcacagcttgaagca

SEQ ID NO: 17240 - DNA, 260 bp, Unknown
  Description of Unknown: LeftRegion for integrase B4241 sequence
atgggtgtcttttactatgtaaaaataatagaagccccggtgttaccagcaccagagcctccatctttgaatactatacaggttccaagaacccagtacaataaccaaacgcaaatatattgtaccacattttcttagcacctgcataggtgttatttttatactcttttttacatatttttaggaaaggtggtacatatatgcgcgaacaatatttaatctatctaagaaaatctcgtaatgatgcacagcttgaagca

SEQ ID NO: 17241 - DNA, 260 bp, Unknown
  Description of Unknown: LeftRegion for integrase B4242 sequence
ttattgcgtacctgttgactctttacttgcttttgatactaatgacaatgatagtttaaaggaattgatgaataacatggatgtaattagaaacgcacagagatggaatgatgaagtaggtttagctacatttacagaagaagaaatgacagagctaataaaatacgctaaatatattcttagccaaagaaagagtgatgatgaaaaagatgaaaaacaatgaattacttatgggtgaatatcttttgctgtatctacgt

SEQ ID NO: 17242 - DNA, 260 bp, Unknown; identical to SEQ ID NO: 14010
  Description of Unknown: LeftRegion for integrase B4243 sequence

SEQ ID NO: 17243 - DNA, 260 bp, Unknown
  Description of Unknown: LeftRegion for integrase B4244 sequence
caaagaataagccaaccccgccgcatccgtttaagactgcggcggggttctctttttggttgttctaaatctttttaaatcgctttcggctcttgtaaatcttttctgtgcgcggtatactatctacaaatatatatgatgttctgtgtgcatgaggcactttgcactaactgcaaaatcaaaatttcggaggtatcggcatgaacggtgaaatcaaaaatgtggtgctttatctccgctattccagcgccgcccagaac

SEQ ID NO: 17244 - DNA, 260 bp, Unknown
  Description of Unknown: LeftRegion for integrase B4245 sequence
ataaaaaaccgcccctgcgccaacaggaacggtttgcgccttggccggataccagtcaagacattactataacatctccggagatgctacagctttcaacaaaaatattgtatcatcttcggagcggctgcacaatcagaacgtttgtgtggtcgttatttttgtacccatttttacatattttaaaccgaggtgatattatggaacttttaaatgtatgtatctacctgcgtaagtcccgtgctgatcgggaggctgaa

SEQ ID NO: 17245 - DNA, 260 bp, Unknown
  Description of Unknown: LeftRegion for integrase B4246 sequence
aaaacaagcgttatctttgtcggctctatgcgttttagctggtgatattcgattgtaagggggatttgaaagacgaaaagacggcaacttaatgtgccgttttcaaagagaaaccccgcgcgggaacttggcggaacgcgcgcggggatggtcaagaagcagggcgctttaccgcgctcgctctaaggggtgattttagcatggtcaagaaccgcgctgccatatatgcgcgcttcagctcgcacaatcagcgctcagag

SEQ ID NO: 17246 - DNA, 260 bp, Unknown
  Description of Unknown: LeftRegion for integrase B4247 sequence
gccgttaaaggtgtctttaacggtgtcttgtcagaaaatattgtagagtggaacgagtttgaaatcaatggtaatcgttgccacgatgccacactattttatatgcgagcagccgcacaattatgctacacgaaaggaggcgatgcccgcaaagtacagcggcaacaccgatacaatgacatcataaggacgtgaatcatgtgacagtatttgaaaagaacagcgcggttgaatcggcactgcacccacagatggacaaa

SEQ ID NO: 17247 - DNA, 260 bp, Unknown
  Description of Unknown: LeftRegion for integrase B4248 sequence
ccttgcggtctgcatcgtgtcgctcccgatcggcttgatcattgtagccgttggagcgtaccgggcggtaaaagccggggatatttatgatgctgcagttgctcggtacgagcagcaaatctcggactatgttgactggctggatgaagtcaacgcaaaataaaaagccgccatcggtgggcggcgggaggttgctctgaatgtgcgcaaaaaagaaaccggccatgcttgagccggatatgcaggatgccgtgatctac

SEQ ID NO: 17248 - DNA, 260 bp, Unknown; identical to SEQ ID NO: 15411
  Description of Unknown: LeftRegion for integrase B4249 sequence

SEQ ID NO: 17249 - DNA, 260 bp, Unknown
  Description of Unknown: LeftRegion for integrase B4250 sequence
tattatagcaaaatatacaaaaatgtcaaataataaaaaccgccccggtgttaccagcaccaggacggcatatacctccgaagagatatgtacatcacaaatacattgtatcatcttcggagcagccatgcaagcggaacaaaagttcgctggctgttatttttgtacccaaaaatcatatcctatagagaggtgatacaatgaacacacttgaaagagactgtatctatttaagaaagtcccgtgcagatcgggaggcc

SEQ ID NO: 17250 - DNA, 260 bp, Unknown
  Description of Unknown: LeftRegion for integrase B4251 sequence
ctgcaaattactgtttttcttgtttgtcattgttactgttattatgttccttgttgcgccgcccgctgcgcttgtcgcttgcgttggtacgatttacgccgctgttttgtgggcacgctcttctaaacggtgcaaggttatccgttccgccttggccagcttctacaacggcaaggacttgcccgaaaagtggtgattttatgcgggcttttatttactgccgattttccagccataagcagcaagagcttagcatagag

SEQ ID NO: 17251 - DNA, 260 bp, Unknown
  Description of Unknown: LeftRegion for integrase B4252 sequence
atgggtgtcttttactatgtaaaaataatagaagccccggtgttaccagcaccagagcctctacctttgaatactatacaggtctcaagaacctggtacaataccaaaccgcaagtatattgtaccacattttcttagcacctgcataggtgttatttttatactctttttttcatatttttaggaaaggtggtacgtatatgcgtgaacaatatctaatctatctaagaaaatcccgtaacgatgcacagcttgaagca

SEQ ID NO: 17252 - DNA, 260 bp, Unknown
  Description of Unknown: LeftRegion for integrase B4253 sequence
cccaaacagtggacagtcacaaaaatagcagaggccccggtgttaccagcaccagagcctccatctttgaatactatacaggttccaagaacccagtacaataaccaaacgcaaatatattgtaccacattttcttagcacctgcataggtgttatttttatactctttttttcatatttttaggaaaggtggtacgtatatgcgtgaacaatatctaatctatctaagaaaatcccgtaacgatgcacagcttgaagca

SEQ ID NO: 17253 - DNA, 260 bp, Unknown
  Description of Unknown: LeftRegion for integrase B4254 sequence
ccgcaatttttaatataaagatcaattaaacatataaaaaccgccccagtacgccaataccgggacggtggtggatctccgaagagatacctcatttcgcaaaaatattgtatcatcttcggagcggctgcacaatcagaacatttgtgtggtcgttatttttgtacccatttttacatattttaaaccgaggtgatattatggaacttttaaatgtatgtatctacctgcgtaagtcccgtgctgatcgggaggctgaa

SEQ ID NO: 17254 - DNA, 260 bp, Unknown
  Description of Unknown: LeftRegion for integrase B4255 sequence
cccaaacagtggacagtcacaaaaataatagaagccccggtgttaccagcaccagagcctctatctttgaatactatacaggttccaagaacctggtacaataccaaactgcaagtatattgtaccacattttcttagcacctgcataggtgttatttttatactctttttttcatatttttaggaaaggtggtacgtatatgcgtgaacaatatctaatctatctaagaaaatcccgtaacgatgcacagcttgaagca

SEQ ID NO: 17255 - DNA, 260 bp, Unknown; identical to SEQ ID NO: 15411
  Description of Unknown: LeftRegion for integrase B4256 sequence

SEQ ID NO: 17256 - DNA, 260 bp, Unknown
  Description of Unknown: LeftRegion for integrase B4257 sequence
cactatacatacaaaataaaatctacttttcccctcggtggaattgtatataaaattttaatttattatatttaaacaaaaaaatccccaactgctaccaacagttgaggattttatataggtgctatgatacacaccaaaacaacatatatattgtatcatagcaccgattaaaaatcaagttaagaggtgttatttttatgaaaaaaactaaaaattcagtgcaaagggctgttatatatgcacgttattcgtgtagt

SEQ ID NO: 17257 - DNA, 260 bp, Unknown
  Description of Unknown: LeftRegion for integrase B4258 sequence
atcgataaggatacgtaccaaaaagcacaagaagaacgcaaacgtcgagcaataaagctcggacgaaataataagcaaacacagatgaggaagctacagatccctacccatttccgtatgggtgaggttgctgtcctttatgacaatcccgtcaaacaggcagcatacctgtacagcctcatagaaagcgagagtaaataatgggaaatgtaatgttaattcctgcaaggcgacaagtcggaaacaacgcccgaaagcag

SEQ ID NO: 17258 - DNA, 260 bp, Unknown
  Description of Unknown: LeftRegion for integrase B4259 sequence
ttggatcattgacatggttatgatctgctgtaacaaattcaccgacagcaccggtgcggtggtcggtctgaaggttgcggagtataccagacagccggatcccaatcttgcagaggcttctctggaggagcagcgggaggcagcggccgagactgccagagcatacggctatacagtgatagactcaggcaatcaggataatgtcaacgaataaaaacacggctcgaaaatacgccgcaggaggtggctcggataattcc

SEQ ID NO: 17259 - DNA, 260 bp, Unknown
  Description of Unknown: LeftRegion for integrase B4260 sequence
tttttatgataaagccttcgaccgaggccttataactatcactccttccatgaaaatctatgtttctccgataattttgaatagccctcaggacgcttttacagcccgctggctggcttctcttgacggaatggttttacccccccgccgcgtagagagcttctggagtaccataacgacgaaatttttaggagggtcacatgaatacagtaatttatgctcggtattctgccggcccgagacagaccgaccagagtatc

SEQ ID NO: 17260 - DNA, 260 bp, Unknown
  Description of Unknown: LeftRegion for integrase B4261 sequence
attttatcatactaaaaaaaaaaatccaacccaaatcacttctccatcaatactaagaatcataaaaaatggccccgctgtcatatagacaacggggcaccgaccgaccacgtatggtaacggtccatacatctgattatattttatcgtacttatcactaaaaatcaatacgtcaaacaaatagttaggagttgtttttatgtcaaatgccgttatatacgcccgctattcttccgggcatcagcgtgaagaaagtatt

SEQ ID NO: 17261 - DNA, 260 bp, Unknown
  Description of Unknown: LeftRegion for integrase B4262 sequence
aagacccccgttctatcggcggcaaacccccgaaatcgggcacctttggtcgagagaacggggctgtccgccagaatcaggccgttctggcggacaagtcgggttgtcgtccgcacgcggcggacaaaaaatggcccacgcgccgggttgggcgcgggggccgccgtccacaccttgggattgggagggaccaccacattatgccacgcaggaggaagttcgcggccaaggacaggggccgctgcgtcatatacgcgagg

SEQ ID NO: 17262 - DNA, 260 bp, Unknown
  Description of Unknown: LeftRegion for integrase B4263 sequence
ctccatattgcaagactcgctaccaacgaaccttgcgcccgtaatcaatacggacactcatttcaagactactgctccgaagaatacagtaatacgctcatataatattgtatcatcttcggagcggctgcacaatcagaacatttgtgtggtcgttatttttgtacccatttttacatattttaaaccgaggtgatattatggaacttttaaatgtatgtatctacctgcgtaagtcccgtgctgatcgggaggctgaa

SEQ ID NO: 17263 - DNA, 260 bp, Unknown
  Description of Unknown: LeftRegion for integrase B4264 sequence
actttatctttaattgaatctgaatcaaaataaataaaaaaccgccccagtacgccaataccgggacggtggtggatctccgaagagatacctcattcgcaaaaatattgtatcatcttcggagcggctgcacaatcagaacatttgtgtggtcgttatttttgtacccatttttacatattttaaaccgaggtgatattatggagcttttaaatgtatgtatctacctgcgtaagtcccgtgccgatcgagaggctgaa

SEQ ID NO: 17264 - DNA, 260 bp, Unknown
  Description of Unknown: LeftRegion for integrase B4265 sequence
aaaacaggcagtttatcgcttagcttcaaagctgtgaactggtgttattcggttttagttgtgttgggaagtggtgaaaaacggcaacataaagtgctgctttcagagagaaaccccgcgcgggaacttggcggaacgcgcgcggggctggtcaagaagcagagcgctttaccgcgctcgctctaaggggtgattttagcatggtaaagaaccgcgccgccatatatgcgcgcttcagctcgcacaatcagcgctcagag

SEQ ID NO: 17265 - DNA, 260 bp, Unknown; identical to SEQ ID NO: 14872
  Description of Unknown: LeftRegion for integrase B4266 sequence

SEQ ID NO: 17266 - DNA, 260 bp, Unknown; identical to SEQ ID NO: 17252
  Description of Unknown: LeftRegion for integrase B4267 sequence

SEQ ID NO: 17267 - DNA, 260 bp, Unknown
  Description of Unknown: LeftRegion for integrase B4268 sequence
gccaacgggtccatcgccgtggtggagaccgaggactaccgcgcggtcatgcgccgctggtacaagggcagcaccaagctgatgctgtcggcggacagcttcgaggactacgaggacatgatcttcggcatggacgacggacccgtgcgcgtgatcggcacggtggtgtggttccaggccgccgacgagatggagtagccgtgggcgggcgcgcggcgatatacgcccgcttctcgagccacaaccagcgcggcgagtcc

SEQ ID NO: 17268 - DNA, 260 bp, Unknown; identical to SEQ ID NO: 17217
  Description of Unknown: LeftRegion for integrase B4269 sequence

SEQ ID NO: 17269 - DNA, 260 bp, Unknown; identical to SEQ ID NO: 15411
  Description of Unknown: LeftRegion for integrase B4270 sequence

SEQ ID NO: 17270 - DNA, 260 bp, Unknown
  Description of Unknown: LeftRegion for integrase B4271 sequence
atcgcgtcacggatgaaaccgggcatctcataagtaacaatgaagacctttttaggaacgccagagaaaaaagcgaagccgatttgatatgtaggctgttttgaaaaaagaaaaccccgcacgggaacttggcggaacgcgcgcggggctggtcaagaagcagagcgctttaccgcgcttgctctaggggtgattttagcatggtgaagaaccgagccgctatatacgcgcgctttagctcgcacaatcagcgttcggaa

SEQ ID NO: 17271 - DNA, 260 bp, Unknown
  Description of Unknown: LeftRegion for integrase B4272 sequence
gtagtttacggttattatgttttttgataaataaaaaccgccccggtgttaccagcaccaggacggcccatatctccgaagagataaatgtacatcgcaaatacattgtatcatcttcggagcagccatgcaagcggaacaaaagttcgctggctgttatttttgtacccaaaaatcatatcctatagagaggtgatacaatgaacacacttgaaagagactgtatctatttaagaaagtcccgtgcagatcgggaggcc

SEQ ID NO: 17272 - DNA, 260 bp, Unknown
  Description of Unknown: LeftRegion for integrase B4273 sequence
actaatccgatagaaatagaactggaagatgccgtaaaaaaaggatattgtccttgtaaaagatgcactagtcaaactaaataaaaagtccccggtgctaccaacaccgaggacaagcattgctccgaagatgcaatctctatacattcatattgtatcacgttggagtatatcattacaagtaataaggaggtattccaatgcttacatctgctaatgtcattatctatttacgaaaatcaagatctgatgatccatcc

SEQ ID NO: 17273 - DNA, 260 bp, Unknown
  Description of Unknown: LeftRegion for integrase B4274 sequence
attgatcaggaaacctacgataaagctgccgccatccgtctggaacgtgccgggaaacttggcaggctgaacaggaaaaagaacgtggagcctgcagcgtctcctaccagctttcgcatggctgcggcagagcaacactatgaagatccgaggctgcaggcagaatacctctacagcctcattgaaagcgaggtaagctaatgggaaatgtaatggtgattccggccagacggcaggtcggaaatacagtaaagcaatca

SEQ ID NO: 17274 - DNA, 260 bp, Unknown
  Description of Unknown: LeftRegion for integrase B4275 sequence
ttggatcattgacatggttatgatctgctgtaacaaattcaccgacagcaccggtgcggtggtcggtctgaaggttgccgagtataccggacggccggatcctgaccttgcagaggcttctctggaggagcagcgggaggcagcggccgagactgccagagcatacggctatacagtgatagactcaggcaatcaggataatgtcaacgaataaaaacacggctcgaaaatacgccgcaggaggtggctcggataattcc

SEQ ID NO: 17275 - DNA, 260 bp, Unknown
  Description of Unknown: LeftRegion for integrase B4276 sequence
tattatgctagagtaactgaagtctatacataatttccaaacgacaaacatatttatttctgatgccagtagaaatagtggtctagttaaagtttgtctattttaacacttgtatagatgtgaacttataaatttacctgttgatttttgttagcaggtttttgtacctatttttacatattttacagagaggtgatacaatgaacacacttgaaagagactgtatctatttaagaaagtcccgtgcagaccgggaagcc

SEQ ID NO: 17276 - DNA, 260 bp, Unknown
  Description of Unknown: LeftRegion for integrase B4277 sequence
cgcaatttttaatataaaaatcaattaaacatataaaaaccgccccagtacgccaataccgggacggtggtggatctccgaagagatatccgttttcagcaaaaatattgtatcatcttcggagcggctgcacaatcagaacatttgtgtggtcgttatttttgtacccatttttacatattttaaaccgaggtgatattatggaacttttaaatgtatgtatctacctgcgtaagtcccgtgctgatcgggaggctgaa

SEQ ID NO: 17277 - DNA, 260 bp, Unknown
  Description of Unknown: LeftRegion for integrase B4278 sequence
cagaaagctgttaggcatcaaggcttccaggaaaagtaaagcaaaataaaaaagcccctgccatatcgcgaaatatgacagggaatgcagccaggcattaccagtaccggactgcggttataatccactcttgtaggaggcagattatgtgtatattatatcatgaaagcctccaatcaccatagaaggaggctttttttatgcctaaaacagaagaaaagcaaaccataaaggctgtcatatatgccagatattcgtcc

SEQ ID NO: 17278 - DNA, 260 bp, Unknown
  Description of Unknown: LeftRegion for integrase B4279 sequence
ctcggcggaatcaatgccgacagcgttacaaagaaaaccaacttccttgttttgggaaataatgacctgtgttcctcaatcaaagacggcaaaagttccaagcataaaaaagccgaaaagtatattttgggcggcgcagacttgtctattatcccggaaaatgttttttatgatatgttagacgaataaagggtgattgtatgcgggcttttatttactgccgattttccagccataagcagcaagagcttagcatagaa

SEQ ID NO: 17279 - DNA, 260 bp, Unknown
  Description of Unknown: LeftRegion for integrase B4280 sequence
acaggtcttttgattgtgtgtagtgacccggcgcaaaagaaaattgacagagccgatgccttgaatattccaatcatttcagagcagcaatggtatgaactcatgccagaacttgaagccgttggaatgtggaacggaaagcaaattctgtttgcggacaatgatggaatctaccgtgttgaagtggacggtgaaagctgatggccagaaaaaagaatattgctgctggcctcgatgccgtcatctatgcccggtactcg

SEQ ID NO: 17280 - DNA, 260 bp, Unknown
  Description of Unknown: LeftRegion for integrase B4281 sequence
tcgactcggacacgtttacagccgctgaagcggagcgtatcaggcgggctgagaaactcggtcgtatttatgaaccaaatgaagaaacaacggtcgtctatcccattgcctttcacgtaatagaaggaagagaagaattcgacgacccttcgcacaggcggaatacgcctacagtttaatagaaacgtaggtgaacaagaatggcagtaagtaaaagcgtcaccgtgattccggcaaggaagcatgttcgaaagagtggg

SEQ ID NO: 17281 - DNA, 260 bp, Unknown
  Description of Unknown: LeftRegion for integrase B4282 sequence
gccaacgggtccatcgccgtggtggagaccgaggactaccgcgcggtcatgcgccgctggtacaagggcagcaccaagctgatgctgtcggcggacagcttcgaggactacgaggacatgattttcggcatggacgacggacccgtgcgcgtgatcggcacggtggtgtggttccaggccgccgacgagatggagtagccgtgggcgggcgcgcggcgatatacgcccgcttctcgagccacaaccagcgcggcgagtcc

SEQ ID NO: 17282 - DNA, 260 bp, Unknown
  Description of Unknown: LeftRegion for integrase B4283 sequence
tatgggtgtcttttactatgtaaaaataatagaagccccggtgttaccagcaccagagcctctacctttgaatactatacaggtctcaagaacctggtacaataccaaaacacaaatatattgtaccacattttcttagcacctgcataggtgttatttttatactcttttttacatatttttaaggaaaggtggtacatatgaacgaacaatatttaatctatcttagaaaatcccgtaacgatgcacaacttgaagca

SEQ ID NO: 17283 - DNA, 260 bp, Unknown
  Description of Unknown: LeftRegion for integrase B4284 sequence
ttttcagacgtgttttaacgcatcgcaagccttctagctggtgttattcggttttagttgtgttgggaagtggtgaaaaacggcaatataaagtgctgttttcagagagaaaccccgcgcgggaactttggcggaacgcgcgcggggctggtcaagaagcagggcgctttaccgcgctcgctctaaggggtgattttagcatggtaaagaaccgcgccgccatatatgcgcgcttcagctcgcacaatcagcgctcagag

SEQ ID NO: 17284 - DNA, 260 bp, Unknown; identical to SEQ ID NO: 13539
  Description of Unknown: LeftRegion for integrase B4285 sequence

SEQ ID NO: 17285 - DNA, 260 bp, Unknown
  Description of Unknown: LeftRegion for integrase B4286 sequence
acgacaaagaataagccaaccccgccgcatccgtttaagactgcggcggggttctcttttgggttgttctaaatctttttaaatcgctttcagctcttgtaaatcttttctgtgcgcggtatactatttatatatatgatgctctgtgtgcgtgaggcactttgcactaactgcaaaatcaaaatttcggaggtatcggcatgaacggtgaaatcaaaaatgtggtgctctatctccgctattccagcgccgcccagaac

SEQ ID NO: 17286 - DNA, 260 bp, Unknown
  Description of Unknown: LeftRegion for integrase B4287 sequence
aatagtgggtgatgcaaacatggggaaaagcaaaaaatccttcacgattaggtatcacaaggtgtgtgatcaggaaaaatcagatgaaatcattcgagcctttgccaaaagagcgatcatgaaagcactagaaaataacggggctgtagcgtacaatgtggatgatgttttgcataaatacatttcgggggaaatgcgtaatggtcatgaaagatgatagagcatatgtccgtgtatccacgttaaaagattcgcagaag

SEQ ID NO: 17287 - DNA, 260 bp, Unknown
  Description of Unknown: LeftRegion for integrase B4288 sequence
gtcacaatctacttttctaaaaacagaaataaccatgttgaaaggaatattctcgaaaatcttttggatacatttgagaacagaatgaaaactcagattggatgctgaatttatttcaatttattttttggatttcgctggatattataggaattatgtagtattgttggtttgcaaaaatcgtatgaaagggtgataaaatgaaaagagtatattgcttgtacagagtatcaaccaaaggtcaggttgataaagatgat

SEQ ID NO: 17288 - DNA, 260 bp, Unknown
  Description of Unknown: LeftRegion for integrase B4289 sequence
caaagaaaacaaattttcttattttaggaaataccgattatcaaaaaaccggtggcggcaaaagttcgaagcacaaaaaggcggaagaatataaattaaacggtattgatattgaaataatcccggaaaatgttttttacgatatgttagagaattaaaaaagccgctcgacgaatcgaacggctgaaaggcggtgaaatatgaacggcgtaatttatgcccgctattcttcggatagacaaacggaacaaagtatcgaa

SEQ ID NO: 17289 - DNA, 260 bp, Unknown
  Description of Unknown: LeftRegion for integrase B4290 sequence
gccgttaaaggtgtctttaacggtgtcttgtcagaaaatattgtagagtggaacgagtttgaaatcaatggtaatcgttgccacgatgccacactattttatatgcgagcagccgcacaattatgctacacgaaaggaggcgatgcccgcaaagtacagcggcaacaccgatacaataacatcataaggacgtgaatcaagtgacagcattagaacaaaacagcgctggtgaatcggcgctgcaaccacagatggacaaa

SEQ ID NO: 17290 - DNA, 260 bp, Unknown
  Description of Unknown: LeftRegion for integrase B4291 sequence
atcgcgtcacggatgaaaccgggcatctcataagtaacaacgaagacctttttaggaacgccagagaaaaaagcgaagccgatttgatatgtaggctgttttgaaaaaagaaaaccccgcacgggaacttggcggaacgcgcgcggggctggtcaagaagcagagcgctttaccgcgcttgctctaggggtgattttagcatggtgaagaaccgagccgctatatacgcgcgcttcagctcgcacaatcagcgttcggaa

SEQ ID NO: 17291 - DNA, 260 bp, Unknown
  Description of Unknown: LeftRegion for integrase B4292 sequence
atgggtgtcttttactatgtaaaaataatagaagccccggtgttaccagcaccagagcctctatctttgaatactatacaggttccaagaacctggtacaataccaaaccgcaagtatattgtaccacattttcttagcacctgcataggtgttatttttatactctttttttcatatttttaggaaaggtggtacgtatatgcgtgaacaatatctaatctatctaagaaaatcccgtaacgatgcacagcttgaagca

SEQ ID NO: 17292 - DNA, 260 bp, Unknown; identical to SEQ ID NO: 15411
  Description of Unknown: LeftRegion for integrase B4293 sequence

SEQ ID NO: 17293 - DNA, 260 bp, Unknown
  Description of Unknown: LeftRegion for integrase B4294 sequence
attgataaggaaacctaccagaaagcacaagaagaacgtaaacgccgagccacagcgctcggacgaaataataagcaaacacagatgaggaagctacagatacctacacatttccatatgggtgaggttgctgccctgcatgacaatcctatgaaacaggcagaatatctgtacagtctcatagaaagcgagagtcaataatgggaaatgtaatgttgattcctgcacggcgacaagttggaaacaacgctcgcaagcag

SEQ ID NO: 17294 - DNA, 260 bp, Unknown
  Description of Unknown: LeftRegion for integrase B4295 sequence
gtcttttacgttatctaaaataaaataacagaagccccggtgttaccagcaccagagcctctatctttgaatactatacaggttccaagaacccagtacaataaccaaacgcaaatatattgtaccacattttcttagcacctgcataggtgttatttttatactcttttttacatatttttaggaaaggtggtacatatatgcgtgaacaatatctaatctatctaagaaaatcccgtaacgatgcacagcttgaagca

SEQ ID NO: 17295 - DNA, 245 bp, Unknown
  Description of Unknown: LeftRegion for integrase B4296 sequence
aaaaaaaaatccaacccaaatcacttctccatcaatactaagaatcataaaaaatggccccgctgtcatatagacaacggggcaccgaccgaccacgtatggtaacggtccatacatctgattatattttatcgtacttatcactaaaaatcaatacgtcaaacaaatagttaggagttgtttttatgtcaaatgccgttatatacgcccgctattcttccgggcatcagcgtgaagaaagtatt

SEQ ID NO: 17296 - DNA, 260 bp, Unknown
  Description of Unknown: LeftRegion for integrase B4297 sequence
gccttcgaccgaggccttataactatcactccttccatgaaaatctatgtttctccgataattttggatagccctcaggacgcttttacagctcgctggctggcttctcttgacggaatggttttacccccccccccccgatttccgccgcgtagagagcttctggagtaccataacgacgaaatttttaggagggtcacatgaatacagtaatttatgctcggtattctgccggcccgagacagaccgaccagagtatc

SEQ ID NO: 17297 - DNA, 260 bp, Unknown
  Description of Unknown: LeftRegion for integrase B4298 sequence
ccgatgaccgggaaactgtaacaatccctattcaggaatctattcagctttctgaggaagaacgtattttgatttccgcatttaggagtgcttctatagaaggacgcatgagaattatccaagtctgtatgaacgaaaaggattcaaaaggggaaactatcattgcaggataataagcattgaggaatggaggaagaatcatgtacgaagagattaagactgcttgtctatatctacgatattcaagtagcaaccaaact

SEQ ID NO: 17298 - DNA, 260 bp, Unknown
  Description of Unknown: LeftRegion for integrase B4299 sequence
gttttcatttctgtaaattatataaaaactatattgtactgccaagtaattttataaaaatcaaaaaaaatggccccgctgtcatatagacaacggggcaccgaccggccacgtatggtaacggtccattcacctgattacattttatcgtacttatcactaaaaatcaatacgtcaaaaaatagttaggagttgtttttatgtcaaatgcagttatatacgcccgctattcttccgggcatcagcgcgaagaaagtatt

SEQ ID NO: 17299 - DNA, 260 bp, Unknown
  Description of Unknown: LeftRegion for integrase B4300 sequence
gccgttaaaggtgtctttaacggtgtcttgtcagaaaatattgtagagtggaacgagtttgaaatcaatggtaatcgttgccacgatgccacactattttatatgcgagcagccgcacaattatgctacacgaaaggaggcgatgcccgcaaagtacagcggcaacaccgatacaataacatcataaggacgtgaatcaagtgacagcattagaacaaaacagcgctggtaaatcggcgctgcaaccacagatggacaaa

SEQ ID NO: 17300 - DNA, 260 bp, Unknown
  Description of Unknown: LeftRegion for integrase B4301 sequence
tctattgaaaacaggtactgtttttgaaccattcatgcagctttctaatttcaagcgagtttaccttgatgatgccggatgtgtcgcatgggatattgatccgaatgttgacagtaataaagtctggaataacaaagtagatctgagttcagacagctgctatgttgacagtgttcctgtctaatggaaaaggagattctatgattgctatctacacccgacagagcattgaaaagaaagattctctgtctattgatgcg

SEQ ID NO: 17301 - DNA, 260 bp, Unknown
  Description of Unknown: LeftRegion for integrase B4302 sequence
atgctttaatgcataatgataaattaataaatcagtttaaagatgaacataatggaaattatgaatttgaagcaaatttatttgcagtagcattactatttaatgaagaagactttaatattaagtttaataaattagataattacatcctacagggaattcttgatagtaatatagaattagtctaaggagatgataaattgaacaccattgctatttatactcgtaaatctaaattcactggaaaaggtgaatctatt

SEQ ID NO: 17302 - DNA, 260 bp, Unknown
  Description of Unknown: LeftRegion for integrase B4303 sequence
ggaggatgaattcgtggagactctccccggattgcgtgcgttaattaagaaatgtaaataaaaaaatcgcccagtgctgcgaacaccaggcgacctgttcttccttgcggaagctgtaaactctactaataaattttacagcgtttccgataaatccgcaagggtttattttttatactctttttttgggaggtgagacgatgaggttcttttcctacggacgaaaatccgtattttctgataaatcagattcaatcgat

SEQ ID NO: 17303 - DNA, 260 bp, Unknown
  Description of Unknown: LeftRegion for integrase B4304 sequence
accaactgccggttgctaaaaatgtcaaataataaaaaccggcccctgcgccaacagagaccggccatacatccgaagatgtacactattacccaaacactaatattgtatcatcttcggagcagccatgcaagcggaacaaaagttcgctggctgttatttttgtacccaaaaatcatatcctatagagaggtgatacgatgaatacacttgaaagagactgtatctatttaagaaagtcccgtgcagatcgggaggca

SEQ ID NO: 17304 - DNA, 260 bp, Unknown
  Description of Unknown: LeftRegion for integrase B4305 sequence
aagattaattttaaacgaagaaaatatacgttatataataaagcagcaacttgggcaaagtgcatccgattctcctaagattatagattactacgaatcattaaataattcaggaaaacaggaagccactaagagagttaaggaacttacgtatatttcagaatatatataatatattaattcatatcggagttgattttatggaaaatatcataatctatctaaggaaatcaagatcagatgaccccgcactttccgta

SEQ ID NO: 17305 - DNA, 260 bp, Unknown
  Description of Unknown: LeftRegion for integrase B4306 sequence
cctgtaatttaatcaaataacgcaaaaaccgccccggtattggcgtaccgaagcggagttgctaagattgtaacctacaaatcccgaaggactgcgtgatataatcttccttaagcaagagcattataccacacatccttccaatttgcatagggtgtattttttataccctttttacataatttagagaaggtgattctatgaaaaatgggaattatgctatgtacctgagaaagtcccgtgccgatcgggaagccgaa

SEQ ID NO: 17306 - DNA, 260 bp, Unknown
  Description of Unknown: LeftRegion for integrase B4307 sequence
aaaaaataaactagtaaaaagtcacatatactcatattatgtgacttttttactgtttttttatctaaatatttgtatattattgacacaataacttgttagatttataattcatttattatatgtgtaacaaaaatgggcgtgaaaatgagtgaacaacaagcatttttgaaaatataacataataggagcgtaatacgatgtcaacaaatagagccgtaatatatgcccgatattcaagtaataagcaaacagagcaa

SEQ ID NO: 17307 - DNA, 260 bp, Unknown
  Description of Unknown: LeftRegion for integrase B4308 sequence
tttagaggctatgatagcgctaggcaacgcccaacgcataggcaagtttacaccgccagcagccaaataaaaaaagagcccctattaaggggctttatttatacctaaaaccaaaaaccgccgagcataaacttcggcggttatggttatcacatctttacttcttgataagattataccattgaaaggaacatcacacaatgacaaataataaagatttacaaacaggggttatatacgctcgttattcatctgataaa

SEQ ID NO: 17308 - DNA, 260 bp, Unknown
  Description of Unknown: LeftRegion for integrase B4309 sequence
atagacaatgaaatttttaatgctgccaaaatggaattgagtgaacgatcctcaaggttaggtagaaacaatcgctacaagcctgaaaaaataaaaaagccaccaatagcatttaggcttggcagcataactgaaaattttgataatccaatcagacaggcagagtacatatatagtctgatagaaagtggggacatttgatgggaaatgttatgattattcctgcaaaacgacaggttggaaatacctcacgacggcag

SEQ ID NO: 17309 - DNA, 260 bp, Unknown
  Description of Unknown: LeftRegion for integrase B4310 sequence
tcaattttgacaccaagcaaaaacaattacttattcctgatgaaagtaaaaacttcacacgtcattacataaatgatattaatgatatatattcttttaaggatgacatcattaacgttattaagctttatatgtaattgaaaatacgcaggtatggcataccagtaattatcctaataattaacattggagatgaccttatggaaaatataataatatatttacgaaaatcaagatctgatgaccccgcactttccgta

SEQ ID NO: 17310 - DNA, 260 bp, Unknown
  Description of Unknown: LeftRegion for integrase B4311 sequence
aaataaaagcccctgtgctaccaacacaagagcttttacccgcgacttacaattaagctgtgctcaatgatacaatcgccctgaacaagccatattatatcatttgaaacaccgcttttgcaagtaggtgtattttttatacccatttttagagttgcaccggtgcaattcgcatatattttacagaaaggatggttaatatggctgaatttgaaaacataataatatatttaagaaagtctcgctctgatgatccaatg

SEQ ID NO: 17311 - DNA, 260 bp, Unknown
  Description of Unknown: LeftRegion for integrase B4312 sequence
agctgtaattcttataaacggtgatgaagctacagtaaaaaaagttataaaaacaaatgaaggaatagaattacatgcaatgaatccatattaccctataaaaaaattcacctatgatgaaatgaactctgtaccagtaaaaataataggtagagtaaaagaagcaaaaataaagggtatttttgaatagaggtgttagtatgatagcaatatatgcaagacaatctatagaaaaaaaagatagcgttagtattgaagct

SEQ ID NO: 17312 - DNA, 260 bp, Unknown
  Description of Unknown: LeftRegion for integrase B4313 sequence
aatgcaaatgaaactcttactcttgtggatgttgattttgatgcttatagaaaaatgcttgagaatcgtacagtaagaaaaaattgtactattccaagttggctaaatgaaaaagctgagcaagctggaatcaatttttctgcggtgttgcaaaaaggcttaaaagaagaacttaatcttgcttaattggaggtttttcaatgaaaggtgtgatatatgctcgatatagtccgggaccaaatcaaaccgaccagagcata

SEQ ID NO: 17313 - DNA, 260 bp, Unknown
  Description of Unknown: LeftRegion for integrase B4314 sequence
caaggattcggagctaatataggtaaaaacgtaaccagaaaaaccgacattctcgttgtcggaatacaggatttggtaaaaacaaaaggatatgaaaagagttcgaagcacagaaaggccgaagagctgatcagcgaaggccgggacattttgataatagatgaatcagagtttatgcgtttgataaatgagggttaattatgccttattgtatgtatctgcgtaagagccgcaaggattttgaggcagaaagcgccggg

SEQ ID NO: 17314 - DNA, 260 bp, Unknown
  Description of Unknown: LeftRegion for integrase B4315 sequence
cataaaggatgtaattccgcaagtcttcgtgatgatttgctgcgtactatggcagcacaggttctcagcattgatgcatttaatgaagaggagtttgaacggagaattgaccatatcgatgtggaagaagacagactgaagttctattttcgagatggtcattctgtaacggagcattggccaataccaaggaggaaaaaatgccaaaaataacgaaaatacctgcatcaatcagccgatacacatcagcaccgattgat

SEQ ID NO: 17315 - DNA, 260 bp, Unknown
  Description of Unknown: LeftRegion for integrase B4316 sequence
cctatcgactttgaaatgacacctgtactagctttttcaaacgataaattagagaaaaaatttacaatcgcataataaaaaaacgcccctaccctgcgccaacaggataggggcaatgcctatagtatatacaggcaaatcaacacaataacattatacctgtatatcctataaatttcaatacttataggagaatttttatgagcattaaagcagtaagctattgcagatatagcacagacaaccaaacggaaaacagc

SEQ ID NO: 17316 - DNA, 260 bp, Unknown
  Description of Unknown: LeftRegion for integrase B4317 sequence
gccgccgacaagatgatgaaagtgctggaagcagaaagcagcctgcccggaagcaggcgggaagccccacaaggaaaactggcgttttgacggcgcataaggaagcattttgacgcttttgccgctatacagacagccgccccatgtggtacaatcaaggtacggaatagtggggctggctgtcggaaacggaggaatttatgttaagacagaccacccagcaacttattaccgccctctacccaagactatcccatgag

SEQ ID NO: 17317 - DNA, 260 bp, Unknown
  Description of Unknown: LeftRegion for integrase B4318 sequence
ggtcctcgtaataatttgacaaaattataaataaaaaccgcccctgttaccagcagagacggctttcaagaaaatctttgcagtgtgttggcactgtgttattttctttcctcgcagttagaattatagcacagtttccagcacctgcaaaggtgtattttttatacccttttttaatattatttacaggaggttgtgctatgagtcttgaaaatgtatgtatctatctgaggaaatcccgcgccgatcgcgaagctgag

SEQ ID NO: 17318 - DNA, 260 bp, Unknown
  Description of Unknown: LeftRegion for integrase B4319 sequence
caaggattcggagctaatataggtaaaaacgtaaccagaaaaaccgacattctcgttgtcggaatacaggatttggtaaaaacaaaaggatatgaaaagagttcgaagcacagaaaggccgaagagctgatcagcgaaggccgggacattttgataatagatgaatcagagtttatgcgtttgataaatgagggttaattatgccttattgtatgtatctgcgtaagagccgcaaggattttgaagcagaaagcgccggg

SEQ ID NO: 17319 - DNA, 260 bp, Unknown
  Description of Unknown: LeftRegion for integrase B4320 sequence
atttaatggaacaaacaatatgtcaatacatggaattaaatatacctttaactaaaaatgattatatcttacttgaaaatgctatgttaaaagccttaaaaaatataaaaataagcaaaaatatacgcctaaaaatataggcattaatttttcaatttaaaacgaacatatgtacgcaaaaaaaggaagtgagtaaataagtgaaagccgcaatatatgcaagatattcttctgataatcaaagagaagaaagtattgaa

SEQ ID NO: 17320 - DNA, 260 bp, Unknown
  Description of Unknown: LeftRegion for integrase B4321 sequence
aattttgaaatttaattaaataacaaaaaccgccccgatgttaccagcaccgaagcggagttgcaaagattgtaacctacgaaccccgaaggattgtgtggcataatctccataagcaagagcattataccacatatccttctgatttcatagggtgtattttttatactctttttacataatatcaagaaggtgatttcatgaaaaacggtaattatgctatgtacctgagaaagtcccgtgccgatcgggaaaacgaa

SEQ ID NO: 17321 - DNA, 260 bp, Unknown
  Description of Unknown: LeftRegion for integrase B4322 sequence
gcttataaacatggtgtaaaagacaaatatgaacttgctgaatttctagaagttacaattgaatttttagaagaatccatagaatattatagaggcaaatatgggacatactataaaattaataactacataatatactttactccaacctttggaataatggaatttttttaagtcaataatgttattgaggtgatttaatgaatgttgcaatttatgcaagaaaatctaaagcaactaaaaaaggtgaatccattgca

SEQ ID NO: 17322 - DNA, 260 bp, Unknown
  Description of Unknown: LeftRegion for integrase B4323 sequence
gattttgactatgagatggcacagaagataacgaaaaatctaattgatgaggggctgatttccagtgacgaatacgacagaatatcggcattaaatgctcagaaattctctccgttttatggggatttgatggatatataacttgataattacacccttcagagtgatatatagtactgccaaaacaaggaggtgagacaatggcaaggataaccaagattgaggccacaaagagtttcatagaaaaaaagaaaatacga

SEQ ID NO: 17323 - DNA, 260 bp, Unknown
  Description of Unknown: LeftRegion for integrase B4324 sequence
tcctataggtgattattacctttatttagagccacatttagatattgccttaaataaagataaaaaaaataataaagtaaatgtttttaacggaaaagaacaacaatgatttatttcgattaatgactaaaatatatgaaaaattcaataaatatttaaagtaaaatacatattaaataatattaaggagatgattctatatgcgtaaagtcgctatttattcacgtaaaagtagatttactggaaaaggtgaatcaata

SEQ ID NO: 17324 - DNA, 260 bp, Unknown
  Description of Unknown: LeftRegion for integrase B4325 sequence
attacaatcactaagacaggcataccaccagcgccgcttatccgcaaggcgcagaaatcggacgagcgtcccagatatgggatttacgacaaaaagccgcctgtttcgcgtaccgttttccggccagacagtcctgggaatgcttgtatatcaacgttttacgcaaaaaatcaaaaaccaaaaacgggaaaggacgaaaaatgatgaaagctgttatctacgcccgctactcctccgaaaagcagcaggagatcagcatt

SEQ ID NO: 17325 - DNA, 260 bp, Unknown
  Description of Unknown: LeftRegion for integrase B4326 sequence
cgaaggaatatgagaaagcttttaacgagattatgggcgttgaaaaataaaaagaatataaaacaaaaccctctgttggcgcagagggtgatgctcaggtcgcgatgacgcaaacctaaattcgcaactttattgtatcatcacgacctcaaaaaatcaagttttggggtatttttatgcctaaaaaacgggaggatacaatgagaatagcaatctacgcacgcaaatctgtctttgcagaaaacagcgacagcgtaaag

SEQ ID NO: 17326 - DNA, 260 bp, Unknown
  Description of Unknown: LeftRegion for integrase B4327 sequence
cgaaggaatatgagaaagcttttaacgagattatgagcgttgaaaaataaaaagaatataaaacaaaaccctctgttggcgcagagggtgatgctcaggtcgcgatgacgcaaacctaaattcgcaactttattgtatcatcacgacctcaaaaaatcaagttttggggtatttttatgcctaaaaaacgggaggatacaatgagaatagcaatctacgcacgcaaatctgtatttgcagaaaacagcgacagcgtaaag

SEQ ID NO: 17327 - DNA, 260 bp, Unknown
  Description of Unknown: LeftRegion for integrase B4328 sequence
aaataaaagctcctgtgctaccaacacaagagcctttaccacgatacttacataagcagtgcctatgatataataccgccctgaacaagccatattatatcatttcgaacaccgcttttgcaagtaggtgtattttttatacccatttttagagttgcaccggtgcaattcgcatatattttacagaaaggatggttaatatggctgaatttgaaaacgtaataatatatttaagaaagtctcgctctgatgatccaatg

SEQ ID NO: 17328 - DNA, 260 bp, Unknown; identical to SEQ ID NO: 17313
  Description of Unknown: LeftRegion for integrase B4329 sequence

SEQ ID NO: 17329 - DNA, 260 bp, Unknown
  Description of Unknown: LeftRegion for integrase B4330 sequence
gcttggatcgttaggatgtagtctttctttttcatttcgggacactcctttttcatttggttgcccatctcgggcggcaagtggctcgcgctcagcaccgccataaagcgaacatttgttctgttttcattctacacccgtcggtgtccattaaacaacccacaatatcttttaacagataaagaaacaaggtgatttgattgacggaatgggagaaaaccggatccggcgtggagccctacgccatctatctccgaaaa

SEQ ID NO: 17330 - DNA, 260 bp, Unknown
  Description of Unknown: LeftRegion for integrase B4331 sequence
cgaaggaatatgagaaagcttttaacgagattatgggcgttgaaaaataaaaaaaatataaaacaaaaccctctgttggcgcagagggtgatgctcaggtcgcgatgacgcaaacctaaattcgcaactttattgtatcatcacgacctcaaaaaatcaagttttggggtatttttatgcctaaaaaacgggaggatacaatgagaatagcaatctacgcacgcaaatctgtatttgcagaaaacagcgacagcgtaaag

SEQ ID NO: 17331 - DNA, 260 bp, Unknown
  Description of Unknown: LeftRegion for integrase B4332 sequence
ggaatttctgattttgatgaagatatttttcaatctgaaattcagcagatcatcgttcctgcaccgaatcggcttgagtttattttccacaacggcacaacaaaaactgtggaatggcaggatcgttcacgctcggaaagttggacagctgaaaagcgtaaacaggcaggtcagatttcaaaagagaggagatggcacagatgcccgtagtaaccaaaattccagcaaggctgcaccctgcgacctttgtacctcttgaa

SEQ ID NO: 17332 - DNA, 260 bp, Unknown; identical to SEQ ID NO: 17309
  Description of Unknown: LeftRegion for integrase B4333 sequence

SEQ ID NO: 17333 - DNA, 260 bp, Unknown
  Description of Unknown: LeftRegion for integrase B4334 sequence
cgaaggaatatgagaaagcttttaacgagatcatgggcgttgaaaaataaaaagaatataaaacaaaaccctctgttggcgcagagggtgatgctcaggtcgcgatgacgcaaacctaaattcgcaactttattgtatcatcacgacctcaaaaaatcaagttttggggtatttttatgcctaaaaaacgggaggatacaatgagaatagcaatctacgcacgcaaatctgtatttgcggaaaacagcgacagcgtaaag

SEQ ID NO: 17334 - DNA, 260 bp, Unknown
  Description of Unknown: LeftRegion for integrase B4335 sequence
atgagcactgttatgaacagttgacggaaaaagacatttggcaaaaatgccaaacctccctgaagcattgccaaaataacgggcaataaggctcacaaaactttcaaatgaaggctggataacaaatccggccttcattgactttaacaacctgacaaaccattaatataaaaaactgacagattaaaaggataaaaaatatgccaagacaaacaaagaaacttcaaactaaagcaacaaaaggtgtcatttgggcacgt

SEQ ID NO: 17335 - DNA, 260 bp, Unknown
  Description of Unknown: LeftRegion for integrase B4336 sequence
agttttaatcgtaacccaaataattaaactataaaaaaccgccccagtgttaccagcaccaggacggcctatacctccgaagagatacgtacatcgcaaatacattgtatcatcttcggagcagccatgcaagcggaacaaaagttcgctggctgttatttttgtacctatttttacatattttacagagaggtgatacaatgaacacacttgaaagagactgtatctatttaagaaagtcccgtgcagatcgggaagcc

SEQ ID NO: 17336 - DNA, 260 bp, Unknown
  Description of Unknown: LeftRegion for integrase B4337 sequence
attgataaaaaaacctttgatgaagtagaaaatgaactgaaccgaagattagaaaaacttgaaagaaattgtaaggcaaaagaaatgccaaagaaaaaggttcctatactctttcattttggagatatttcagaatattatgataatccaattaaacaagctgagtatttgtatagccttatagaaagcgaggtcatttaatgggaaatgtaatggttattcctgcaaaaagaaaaataggcaacactaatcgtaaaaag

SEQ ID NO: 17337 - DNA, 260 bp, Unknown
  Description of Unknown: LeftRegion for integrase B4338 sequence
gaaggaatacgagaaagcttttaacgagattatgggcgttgaaaaataaaaagaatataaaacaaaaccctctgttggcgcagagggtgatgctcaggtcgcgatgacgcaaacctaaattcgcaactttattgtatcatcacgacctcaaaaaatcaagttttggggtattttttatacccaaaaatcgggaggatacaatgagaatagcaatctacgcacgcaaatctgtctttgcagaaaacagcgacagtgtaaag

SEQ ID NO: 17338 - DNA, 260 bp, Unknown
  Description of Unknown: LeftRegion for integrase B4339 sequence
ctggatcattgacatggttatgatctgttgcaataaattcaccgacagcaccggtgcggtggttggtctgaaggttgccgagtatacaagacagccggatcccgatcttgcagaggcttctctggaggagcagcgggaggcagcggccgagactgccagagcttacggctatactgtaatagagtcaggcgctcaggataatgccggcaagtaaaaacacggctcgaaaatatgccgcaggaggtggctcggataattcc

SEQ ID NO: 17339 - DNA, 260 bp, Unknown
  Description of Unknown: LeftRegion for integrase B4340 sequence
cgaaggaatatgagaaagcttttaacgagattatgggcgttgaaaaataaaaagaatataaaacaaaaccctctgttggcgcagagggtgatgctcaggtcgcgatgacgcaaacctaaattcgcaactttattgtatcatcccgacctcaaaaaatcaagttttggggtatttttatgcctaaaaaacgggaggatacaatgagaatagcaatctacgcacgcaaatctgtatttgcagaaaacagcgacagtgtaaag

SEQ ID NO: 17340 - DNA, 260 bp, Unknown
  Description of Unknown: LeftRegion for integrase B4341 sequence
aaaaaataaactagtaaaaagtcacatatactcatattatgtgacttttttactgtttttttatctaaacatttgtatattattgacataataactcgttagacttataattcatttattgtatgtgtaataaaaatgggcgtgaaaatgagtgaacaacaagcatttttgaaaatataacataataggagcgtaatacgatgtcaacaaatagagccgtaatatatgcccgatattcaagcaataagcagacagaacaa

SEQ ID NO: 17341 - DNA, 260 bp, Unknown
  Description of Unknown: LeftRegion for integrase B4342 sequence
atcgataaggataccttcattgccgcaggtagagaaatcaggcgcaggtcagcaaaacttggtcgcaacgacagattcaaagaaatacctgagaagaaggctccgatactcttccgcttcggcgacatcacagagtattttgacaatccagtaaaacaggctgagtacttatacagccttatagaaagcgaggctatttgatgggaaatgtaatggtcatccctgccaaacgacaaattggtaataccggtcgtaagcag

SEQ ID NO: 17342 - DNA, 260 bp, Unknown
  Description of Unknown: LeftRegion for integrase B4343 sequence
cagcgaggagatgttcaatgctgcagcagaggagcttcaaagccgtgctgaacggctcggcagaaacggtcatgtaagaaaagaacggtcggtgaatgtccctgtgcggttcacttttataagcgcagaggattatttcgaggatcctgttcagcaggcagaatatatgtatggattgataaagacagaggtgacgaacattgagtaacataacgataatcccggcaagaccccagcgggctaactcacagcagaatgaa

SEQ ID NO: 17343 - DNA, 260 bp, Unknown
  Description of Unknown: LeftRegion for integrase B4344 sequence
gtgatttcgattattatatggcacagcgcatagcagaaaagctgaaatccgagggacttatcacagttgacgaattcaacaaactgaccgctcttaaccgcagtacttttttacctatgaatgtcgagatattaccgaaaatacgttgattatatctcggtttagagttaatatgtcaacaccgaagagaggtgaaaaaagtgaaaactgtaacaaaaattgaagccaaccaacgtactacgggttctgagaaaaagctc

SEQ ID NO: 17344 - DNA, 260 bp, Unknown
  Description of Unknown: LeftRegion for integrase B4345 sequence
tgctgtggttcttataaatggtgatgaagctacagtaaaaaaagttataaagacaaacgatggaatcgaattacacgcaatgaacccatattatccagtcaaaaaatttacttatgatgaaatgaatacagtaccagtaaaaattataggtagagtaaaagaagctaaaataaaaggtgcttttgaataggagtgataatatgatagctatttatgcaagacaatctatagaaaaaaaagatagtgttagtattgaaaca

SEQ ID NO: 17345 - DNA, 260 bp, Unknown
  Description of Unknown: LeftRegion for integrase B4346 sequence
ttcggtttcgccacccatgcccagtaacggcatcaggtttttaaacgccagtgcgatgtccagatcgttaccgccaatacggcaaccactgtgacccagcaggctggcttcacgatcgagacgcgaacgccactgcggccccatcagcagcaatgaacagttatgttatgatgtacaccacagttaatggaggtaagtaaatgaaagttcccgtatggtgttatgcaaggatctcgacgctcaagcaaattgatggtttt

SEQ ID NO: 17346 - DNA, 260 bp, Unknown
  Description of Unknown: LeftRegion for integrase B4347 sequence
tttagccagtacgtcgatgatacaacgtcggcttaaactaggctatgcccgcgctgcaagactaatagatgccatggaagaaatggggtttattggccccttccaaggttcacggccccgtgcaatattagtgactaaggaacagtggcacaaaatgaaatccctcagccaagctgagggaaaaggatggagggatatatgtgaactccgacaaccaaatgtctgaacgaacaaatgccgttatatacgcccgctattcc

SEQ ID NO: 17347 - DNA, 260 bp, Unknown
  Description of Unknown: LeftRegion for integrase B4348 sequence
atctgtaatttaactaaataacaaaaaccgccccggtgctggtaacaccgaagcggagttgcaaagattgtaacctacaaatcccgaaggactgcgtgatataatcttccttaagcaagagcattataccacacatccttccaatttgcatagggtgtattttttataccctttttacataatttagagaaggtgattctatgaaaaatgggaattatgctatgtacctgagaaagtcccgtgccgatcgggaagccgaa

SEQ ID NO: 17348 - DNA, 260 bp, Unknown
  Description of Unknown: LeftRegion for integrase B4349 sequence
cagcgataaagagttcatagcaaactggctcgcggcgaataacgcgaagttgtacaaaacgcccgcaaaaggtgttcgctccgtcataattcaaggttctatggaatacgagcggtattacgattacagaagcaagggcaagaagctgtatcgggcagaagatgttatcgagtttataagagaaagaaaggtgggcagcaatgccgaaaaacaaaataatgacccctaaccgcaacggcaaaatagctgttgtgtacgcg

SEQ ID NO: 17349 - DNA, 260 bp, Unknown
  Description of Unknown: LeftRegion for integrase B4350 sequence
aaataaaagcccctgtgctaccaacacaagagcttttaccacgatacttacataagcagtgcctatgatataataccgccctgaacaagccatattatatcatttgaaacaccgcttttgcaagtaggtgtattttttatacccatttttagagttgcaccggtgcaatttgcatatattttacagaaaggatggttaatatggctgaatttgaaaacgttataatatatttaagaaaatctcgctctgatgatccaatg

SEQ ID NO: 17350 - DNA, 260 bp, Unknown
  Description of Unknown: LeftRegion for integrase B4351 sequence
attaaagatatgtgaggccgatgatggcaaaagctatgaggttttatttgacggtgaacccatcggcaaattgcccggtaaaattgcaaagagatatgatgccgaaggttgttatggcgtttttgtcgaagatttgcaggaagagtataaggacaatggggatatggtgaccatccccatattgaggatatattggtaatatgccttattgtatgtatctgcgtaagagccgcaaggattttgaggcagaaagcgccggg

SEQ ID NO: 17351 - DNA, 260 bp, Unknown
  Description of Unknown: LeftRegion for integrase B4352 sequence
ctgagcgcaattttgtcgtgcgggcttataacgcgcaagggcgccgcagtttgttggtcaatgagctcgataagtacagcggcaaagtcgtggcgaaagacccgattattttccatatttccgctgtcggcgattggagcataacattaaattaagcacatttcagagccccggacggggcccttactataggaggtcatatgccttattgtatgtatctgcgcaagagccgcaaggattttgaggcagagagcgccggg

SEQ ID NO: 17352 - DNA, 260 bp, Unknown
  Description of Unknown: LeftRegion for integrase B4353 sequence
aaatagattcgagtctctaaaggctatccttccctattgtgacgaagctgtcttttttgataatgataacggttttgcagaaatcgccgaatacaaaaatggagaattaattttaaaaggttctgaacatcctgaatggattaaagagtttcacgaatacattacaaaataaaaaaaacgcctaaaacggaggtatatttgtgagcaagcataaattagcggtggtttatgcccgttattcaagtcatagacaaggagaa

SEQ ID NO: 17353 - DNA, 260 bp, Unknown
  Description of Unknown: LeftRegion for integrase B4354 sequence
ctgtaatttaaccaaataacgcaaaaaccgccccggtgctagtaacaccgaagcggaattgctaagattgtaacctacaaatccctaaggactgcgtgatataatcttccttaagcaagagcattataccacacatccttccaatttgcatagggtgtattttttttaccctttttacataatttagagaaggtgattctatgaaaaatgggaattatgctatgtacctgagaaagtcccgtgccgatcgggaagccgaa

SEQ ID NO: 17354 - DNA, 260 bp, Unknown; identical to SEQ ID NO: 17313
  Description of Unknown: LeftRegion for integrase B4355 sequence

SEQ ID NO: 17355 - DNA, 260 bp, Unknown
  Description of Unknown: LeftRegion for integrase B4356 sequence
caaggattcggagctaatataggtaaaaacgtaaccagaaaaaccgacattctcgttgtcggaatacaggatttggtaaaaacaaaaggatatgaaaagagttcgaagcacagaaaggccgaagagctgatcagcgaaggccgggatattttgataatagatgaatcagagtttatgcgtttgataaatgagggttaattatgccttattgtatgtatctgcgtaagagccgcaaggattttgaggcagaaagcgccggg

SEQ ID NO: 17356 - DNA, 260 bp, Unknown
  Description of Unknown: LeftRegion for integrase B4357 sequence
gtgattttgattactatatggcgcagtgcatagcagaaaagctgaaatccatgggtcttatcacagttgacgaattcgacaaactgaccgctcttaaccgccgtacttttttacctatgaatgtcgagatattaccgaaaatacgttgattatatctcggtttagagttaatatgtcaacactgaagagaggtgaaaaaagtgaaaactgtaacaaaaatcgaatccaaccaacgtactgcgggctctgagaaaaagctc

SEQ ID NO: 17357 - DNA, 260 bp, Unknown
  Description of Unknown: LeftRegion for integrase B4358 sequence
cagcgaggagatgttcaatgctgcagcagaggagcttcaaagccgtgccgaacggctcggcagaaacggtcatgtaagaaaagaacggtcggtgaacgtccctgtgcggttcacttttataagcgcagaggattatttcgagggccctgttcagcaggcagaatatatgtatggattgataaagacagaggtgacgaacattgagtaacataacgataatcccggcaagaccccagcgggctaactcacagcagaatgaa

SEQ ID NO: 17358 - DNA, 260 bp, Unknown
  Description of Unknown: LeftRegion for integrase B4359 sequence
ccgtcgaggcttggctgaccggttcgcgctcttgcccgctcagcacgagaatgatgtttcagcagttactcggcctcctgccggtagccgttgagttaggaggcggcaatggctgaggagttcaaaagctcccagcccttgacaaaaaacccgtttgcggttactatagccgcaaacggtttttttgtgaggtggttttgatgcatggcgcatatatccttgcgcgctactccacggacaggcaaaacgaggacagcata

SEQ ID NO: 17359 - DNA, 260 bp, Unknown
  Description of Unknown: LeftRegion for integrase B4360 sequence
attataacttctttcaggcgcagaagatcgctaaaaatatgctggagcttggacttatttccttgtcagaattcaacaaattaactgagataaaccgtaaaacattctccccgttttgggttgagattatgcccaaaattccttgatatataagggattcagagctaatatgtgacactaacgaagggaggtgaactaccgtgaaaaagataactaaaatcgatggtgtacagaataatagcaccgtaaataaggagctc

SEQ ID NO: 17360 - DNA, 260 bp, Unknown
  Description of Unknown: LeftRegion for integrase B4361 sequence
cgacagagagcgttttgacaaggcagaagaaattagaatgtcgagggcatcctctttgggcagggtcagagaactgcaggatgcaccaaaaccaatggcagatacaatgtttaccatgccgtttgttgagagaaaatttacagatccatttgaacaggcagaatatgcctacagcttaattgaaagtgaggtgacgatacatgaataagagtatcacagttatcccggcacgaaggcgtgtgggaaataccgtaaataaa

SEQ ID NO: 17361 - DNA, 260 bp, Unknown; identical to SEQ ID NO: 17333
  Description of Unknown: LeftRegion for integrase B4362 sequence

SEQ ID NO: 17362 - DNA, 260 bp, Unknown
  Description of Unknown: LeftRegion for integrase B4363 sequence
attataacttctttcaggcgcagaaagtggctgaaaacatgttggagcttggacttatttccttgtcagagttcaacaaattatcgctgaaaaatcgtgagacattctctccattttgggtggagattatgcccgaaatccgttgatatataaggctttcagagctaatatgtgacactaacgaagggaggtgaactaccgtgaagaaggtaacaaaaatcgaaggtgcacagaataacatcaccataaaaaagaaactc

SEQ ID NO: 17363 - DNA, 260 bp, Unknown; identical to SEQ ID NO: 16689
  Description of Unknown: LeftRegion for integrase B4364 sequence

SEQ ID NO: 17364 - DNA, 260 bp, Unknown
  Description of Unknown: LeftRegion for integrase B4365 sequence
ggatccattagttcaaaaaccaattttctcgttccagcccccgaaagtatcgatcctggacgtagctctaataaaaagtacagaatggccctggtagcaatatctgaaggtcaagatataaagataatatctcccgatgaatgtcttgaattagtaaatgccgcaatgccatatattaaagctgaatagagggaggtcatatgccatattgtatgtatctgcgcaagagccgtaaggattttgaggcagaaagcgccggg

SEQ ID NO: 17365 - DNA, 260 bp, Unknown; identical to SEQ ID NO: 13018
  Description of Unknown: LeftRegion for integrase B4366 sequence

SEQ ID NO: 17366 - DNA, 260 bp, Unknown
  Description of Unknown: LeftRegion for integrase B4367 sequence
cgccgcggagatcgaggcgcgggagcagcacctccgcgccgaagtaaagcagatgcgcgtctggcgcgtggtggcgctggccttgcttgtgatcttggtcgtcatctgtctatggtttgcttgggacgtgaccggcggggatcgtggattgatccgctacggccacgcggcgatcggctcgccggtcagagggtgagcgtatgaaagctgtgatttacgcccgctactccagtgagaagcagcaggagatcagcatcgag

SEQ ID NO: 17367 - DNA, 260 bp, Unknown
  Description of Unknown: LeftRegion for integrase B4368 sequence
ctcataaagctggtgttagaggaagatatgaacttgcagaatttttagaaattccagaatggtttttacttgatgctatcgaatattataagagtaagtatgggacatgctataaaattgataactatttaatatacttctctcctaattttggaataatggaatttttttagtcaataatatacagcgaggtgatataaatgaatgttgctatttatgcaagaaaatcaaaagccactaaaaaaggtgaatccatttct

SEQ ID NO: 17368 - DNA, 260 bp, Unknown
  Description of Unknown: LeftRegion for integrase B4369 sequence
acaggtcttttgattgtgtgtagtgacccggcacaaaagaaaattgacagagccgatgccttgaatattccaatcatttcggagcagcaatggtatgaactcatgccagaacttgaagccgttggaatgtggaacggaaagcaaattctgtttgcggacaatgatggcatctaccgtgttgaagtgggcggtgaaagctgatggccagaaaaaagaatattgctgccggcctcgatgccgtcatctatgcccggtactca

SEQ ID NO: 17369 - DNA, 260 bp, Unknown
  Description of Unknown: LeftRegion for integrase B4370 sequence
aaatattacctattcaattataacactgcatttatcaaaaagcaacaggaatatgtacaaacaatgtaagaatattttgttgcgaggtgatattatggaaataaccgaagcagagatagaaatcattacaaggcagattgttaaaatcatcataaatcatcaacgtgacgcatcagctgtgggtcccgaggatgcagacgatgaataagctcagagccgcagcctattgccgtgtttcgaccgaccgtgccgagcaatcc

SEQ ID NO: 17370 - DNA, 260 bp, Unknown
  Description of Unknown: LeftRegion for integrase B4371 sequence
tggcacaatcacgcctacgcctatagttccaatcgtcgagggttccgacgagtataaaacagcaatatatgctttcaatttcgccgttcaaagtggcaaaatggccgaggtgcaagcaaaatataatagtaaacataagaaataaaaaaagccccctatcaagggggctatacttatacaatttgaaaggaaatcacacaatgaataataccgacttacaaacaggcgtgatatatgcacgctactcgtctgataagcaa

SEQ ID NO: 17371 - DNA, 260 bp, Unknown
  Description of Unknown: LeftRegion for integrase B4372 sequence
acgttatataataatttcataaataaaaaccgcccctgctaccaacaggaacggtctattgaatactatacagtgccgaggcacgatataacattccgtgaacaagagtattatatcacatttccccggcaccgtgtaggtgttatttttatacgcaaaattaagctacctcacacatatactaaggaaaggtgatacatatgcaatatgaagaatatcttatctatctccggaagtcccgaagtgacgcttctctggaa

SEQ ID NO: 17372 - DNA, 260 bp, Unknown
  Description of Unknown: LeftRegion for integrase B4373 sequence
acgaacatttgttcgatgcaagtggaggatccggataaaataaaaactgccccctgcgccaacagggggctctggaccatgcctctaaagatggcacagcacattccaaaaatattgtaccatcttttaggggcaggcggcaagtcggaacaaccgttcgaccggctgttatttttgtacctaaaaaggaggctggtgcaatgaattttgcaatttatgggaggaaatctgtctattctgatcattctgattccgtagat

SEQ ID NO: 17373 - DNA, 260 bp, Unknown
  Description of Unknown: LeftRegion for integrase B4374 sequence
cgccgcggagatcgaggcgcgggagcagcacctccgcgccgaagtaaagcagatgcgcgtctggcgcgtggtggcgctggccttgcttgtgatcttggtcatcatctgtctatggtttgcctgggacgtgaccggcggggatcgtggattgatccgctacggccacgcggcgatcggctcgccggtcagagggtgagcgtatgaaagcagttatctacgcccgttactccagtgagaagcagcaggagatcagcatcgag

SEQ ID NO: 17374 - DNA, 260 bp, Unknown
  Description of Unknown: LeftRegion for integrase B4375 sequence
cgccgcagagatcgaggcgcgggagcagcacctccgcgccgaagtaaagcaaatgcgcgtctggcgtgtggtggcgctggccttgcttgtgatcttggtcgtcatctgtctatggttttcctgggacgtgaccggcggggatcgtggattgatccgctacggccacgcggcgatcggctcgccggtcagagggtgagcgtatgaaagctgttatctacgcccgctactccagcgagaagcagcaggagatcagcatcgag

SEQ ID NO: 17375 - DNA, 260 bp, Unknown
  Description of Unknown: LeftRegion for integrase B4376 sequence
caaactttaataaataaacaagaatttagagcaaataaatgggcttttaaacaacttatatctccatctaaaattaaggacttaatttcaaaaggtataagtactaaatatgaaattgctgaagaattgggagttacagaaaatttattatgcttagcctatcaatattatacagaaaataattatatttaggaggaaatatgttagcttatggatattgtagatattcttctgacttgcagaatgaaaaatcaatagaa

SEQ ID NO: 17376 - DNA, 260 bp, Unknown
  Description of Unknown: LeftRegion for integrase B4377 sequence
ctcataaagctggtgttaggggcagatatgaacttgcagaatttttagaaattccagaatggtttttactagaagctatcgaatattataagagtaagtatggtacatgctataaaattgataactatttaatatacttctctcctaattttggaataatggaatttttttagtcaataatatacagcgaggtgatataaatgaatgttgctatctatgcaagaaaatcaaaagccactaaaaaaggtgaatctatttct

SEQ ID NO: 17377 - DNA, 260 bp, Unknown
  Description of Unknown: LeftRegion for integrase B4378 sequence
cgccgcggagatcgaggcgcgggagcagcacctccgcgccgaagtaaagcaaatgcgcgtctggcgcgtggtggcgctggccttgcttgtgatcttggtcgtcatctgtctatggtttgcttgggacgtgaccggcggggatcgtggattgatccgctacggccacgcggcaatcggctcgccggtcagagggtgagcgtatgaaagctgttatttacgcccgttactccagtgagaagcagcaggagatcagcatcgag

SEQ ID NO: 17378 - DNA, 109 bp, Unknown
  Description of Unknown: LeftRegion for integrase B4379 sequence
ataaatcatcaacgtgacgcatcagctgtgggttctgaggatgcagacgatgaataagctcagagccgcagcctattgccgtgtttcaaccgaccgtgccgagcaatcc

SEQ ID NO: 17379 - DNA, 260 bp, Unknown; identical to SEQ ID NO: 13018
  Description of Unknown: LeftRegion for integrase B4380 sequence

SEQ ID NO: 17380 - DNA, 260 bp, Unknown
  Description of Unknown: LeftRegion for integrase B4381 sequence
cgccgcggagatcgaggcgcgggagcagcacctccgcgccgaagtaaagcaaatgcgcgtctggcgcgtggtggcgctggccttgcttgtgatcttggtcgtcatctgtctatggtttgcttgggacgtgaccggcggggatcgtggattgatccgctacggccacgcggcgatcggctcgccggtcagagggtgagcgtatgaaagctgttatctacgcccgttactcctcggagaagcagcaggagatcagcatcgag

SEQ ID NO: 17381 - DNA, 260 bp, Unknown
  Description of Unknown: LeftRegion for integrase B4382 sequence
agaattacagtaaaatactaaaaaatccccggtgttaccagcaccagggaaaacgagaaaactatagggtgtttggaacacagtacaattctctccatcacaaagattattgtatcacaaaaatccggcaccgtataggtgttattttttatacgcaaaattaagcgacctcacacatatactaaggaaaggtgatacatatgcaatatgaagaatatcttatctatctccggaagtccagaagtgatgcttctctggaa

SEQ ID NO: 17382 - DNA, 260 bp, Unknown
  Description of Unknown: LeftRegion for integrase B4383 sequence
gtcctcaacgcgcttcaagataagggccttgggattatcagggtagaaaccaactctgttcctgaccaaggtatcagcggcgcagaccgttacgacacgctcataacgtacagatagcaaaatgccctgtatccatccgccaagaccagatacagggcgcgccattccgtagacaactgaaaaggcaaggtgataataccatggcaaagggtaaccgtgcggccatttacgcacgtttcagctcgcacaaccagcgagac

SEQ ID NO: 17383 - DNA, 260 bp, Unknown; identical to SEQ ID NO: 13029
  Description of Unknown: LeftRegion for integrase B4384 sequence

SEQ ID NO: 17384 - DNA, 260 bp, Unknown
  Description of Unknown: LeftRegion for integrase B4385 sequence
tagaattacagtaaaatattaaaaaatccccggtgttaccagcaccagggaaaacgagaaaactataaggtgtttggaacacagtacaattctctccatcacaaagattattgtatcacaaaaatccggcaccgtataggtgttatttttatacgcaaaattaagcgacctcacacatatactaaggaaaggtgatacatatgcaatatgaagaatatcttatctatctccggaagtcccgaagtgatgcttctctggaa

SEQ ID NO: 17385 - DNA, 260 bp, Unknown
  Description of Unknown: LeftRegion for integrase B4386 sequence
tctttccatgcgttgcctgcccttacagcataacacgctttttggatatgggcaagcaaaagccccggcgctggtacgatgcagcgccggggaaacatggagtacagcacaaaaccggacaaaggaaattttatgcttgcaggggtcagtataccacactccctgcatatgggcaaatcgcccggaaaggaagtgttttcatgccccgcaaaaaagctcctgcggccgaggcgccgcgcctggtggcttactaccgttac

SEQ ID NO: 17386 - DNA, 260 bp, Unknown
  Description of Unknown: LeftRegion for integrase B4387 sequence
agatataataaatgcatatagatatggtgtaagaaataaacatgaattagctgaatatttagatgttacagaagattttttatacgaagcaattgagtattataagtgcaaatatggaatttgttacaaaatagatacttacattatttattttgaaccattaggtgtaatgaaaatattttaaataggagaatttaaaaatgaataaaattgcaatttacacaagaaaatcaaagtttactggaaaaggtgaatctatt

SEQ ID NO: 17387 - DNA, 260 bp, Unknown; identical to SEQ ID NO: 13434
  Description of Unknown: LeftRegion for integrase B4388 sequence

SEQ ID NO: 17388 - DNA, 260 bp, Unknown
  Description of Unknown: LeftRegion for integrase B4389 sequence
ctttccatgcgttgcctgcccttacagcatagcacgctttttggatatgggcaagcaaaagccccggcgctggtacgatgcagcgccggggataacatggagtgcagcacaaaaccggacaaagaaaattttatgcttgcaggggtcagtataccacactccctgcatatgggcaaatcgcccggaaaggaagtgttttcatgccccgcaaaaaaaccactgcagccgatgcaccgcgcctggtggcttactaccgctac

SEQ ID NO: 17389 - DNA, 260 bp, Unknown
  Description of Unknown: LeftRegion for integrase B4390 sequence
cactggcaagtatcagacgggacttgatattgctgacgatgtttcgagcgcgataaaagatttaagctaaataaaaaagaacccccggtgcgggaacaccgagggttaagacatcaaaacacaccacgcgaatagagtgaattgatatacatattatatcagctcgctctcttaaatgcaagaaagcgaggcttttttatatggaaaacgcagtaatttacgcgagatattcatcggacaagcagacggagcagagcatc

SEQ ID NO: 17390 - DNA, 260 bp, Unknown; identical to SEQ ID NO: 13018
  Description of Unknown: LeftRegion for integrase B4391 sequence

SEQ ID NO: 17391 - DNA, 260 bp, Unknown
  Description of Unknown: LeftRegion for integrase B4392 sequence
aataagaaaaccgcccctgctaccaacaggaacggcttttcataggcaataccgaagatggtatcaaccaaacttttgacctacatattgtatcatcttcgaacagctatcgcaagcagaacgctagttctctgctggctgttatttttatactcatttttagtgcgacgtcgcacatatactaaggaaaggtgatacatatgcaatatgaagaatatcttatctatctccggaagtcccgaagtgatgcttctctggaa

SEQ ID NO: 17392 - DNA, 260 bp, Unknown
  Description of Unknown: LeftRegion for integrase B4393 sequence
aaaagacacaggtatttctgtgggacagagatgtgttggaaaaattaattcaaaatgcgaatatgtgataaaaagccggctcctgccactaacaggaaccggttttaataaataagataattccggagaaaaatcttacctacacactaagtatatcatctcctggattatcacacaagtaaaaaaaggagaatgataaaatgaatgaatcagtatgtatctatttgagaaaatccagagccgacagggaagctgaagcc

SEQ ID NO: 17393 - DNA, 260 bp, Unknown
  Description of Unknown: LeftRegion for integrase B4394 sequence
tgctacactttttctcgaatttacacgaaatcgcatggttattctcggttgaaaatggtatgttatagatttacatttttccatatttttacgaccgtgcagctaaacttgacagattgcttttttcgtggtgcaataatctcatctttgttgcactggtgcaactttatcatttttagccgttggggaggcttatcattatgcttacaaactatttaatctatttgagaaaatcccgcgcagacaatccagatatgacc

SEQ ID NO: 17394 - DNA, 260 bp, Unknown
  Description of Unknown: LeftRegion for integrase B4395 sequence
ataaaataagggggatattatgagaaagttaaattacttagataatatcagttatataaaaataaataataaaaacatatatataaaatcgaataaaaatatacatatattaaataaattattgcaagaaataaaaaataaagaaaaattaaaatgctaagcattaccttaaataaatgaaatatagagaggtgatataaatgaatgttgctatttatgcaagaaaatcaaaagcaactaaaaaaggagaatccatttct

SEQ ID NO: 17395 - DNA, 260 bp, Unknown
  Description of Unknown: LeftRegion for integrase B4396 sequence
attggtgttttggttgcgtgcagcaatccaatgcagaagaaaatcgatcaggccaaagctctaaatattccggtcatttcagaacaacagtggtttgagcttatgccagagctggaagcactcggaatgtggaacggaaagcaaattcagtttgcagatgataatggaatttaccatattgatgtgggcggtgatggttgatggcccgaaaaaagaatatcgctgcgggtcaagatgccgttatctacgcccgctactct

SEQ ID NO: 17396 - DNA, 260 bp, Unknown
  Description of Unknown: LeftRegion for integrase B4397 sequence
aaaagatagatagatttttattgaaagcttttatatttacttatgttttgttgcatgttattatatttttacacaaaaaaaccgactcctgctaccaacaggaaccggttttaaaataagataatccgtagaaaatcttgcctacacactaagtatatcattttccggattatcgcacaagtaaaaaaggagaatgataaatgaatgaatcagtatgtatctatctaaggaaatccagagccgatcgggaagctgaagaa

SEQ ID NO: 17397 - DNA, 260 bp, Unknown
  Description of Unknown: LeftRegion for integrase B4398 sequence
aggtcacaatctacttttctaaaaacagaaataaccatgttgaaagaaatgttcttgaaaatcttttggatacatttgagaacagaatgaaagctcagattggatgctgaatttctttaagttgtttttcagatttgctggatattataggaattatgtagtattgttggtttgcaaaaatcgtatgaaagggtgataaaatgaaaagagtatattgcttgtacagagtatcaactaaatgtcaggttgataaagatgat

SEQ ID NO: 17398 - DNA, 260 bp, Unknown
  Description of Unknown: LeftRegion for integrase B4399 sequence
ctcataaagctggtgttaaaggaagatatgaacttgctgaatttttagaagttccagaatggtttttagtagaagttatagagcactatagtcataagtatgggacatgctataagattgataactatattatatacttttctcctaattttggaataatggagtttttttagttaataatatacagcgaggtgatataaatgaatgttgcaatttatgctagaaaatcaaaagcaactaaaaagggtgaatctatttct

SEQ ID NO: 17399 - DNA, 260 bp, Unknown
  Description of Unknown: LeftRegion for integrase B4400 sequence
ggtaaaagatttaataagaattttagtaatataacttctctatctgatatagaatcagcattgttagacttatctgcatatgcttgtgtatttttttctgaaaatgatattaatataaacacttatattattcaagaatatacaatagaatttatatcaaaattagagcatttatcggactaaaatagaaaggtaattctatgaacgctgtaatatatgctagattctctagccacaaccaacaggaacaaagcattgaa

SEQ ID NO: 17400 - DNA, 260 bp, Unknown
  Description of Unknown: LeftRegion for integrase B4401 sequence
ctcataaagctggtgttagaaacagatatgaacttgcagaatttttagaaattccagaatggtttttactagaagctatcgaatattataagagtaagtatggtacatgctataaaattgataactatttaatatacttctctcctaattttggaataatggaatttttttagtcaataatatacagcgaggtgatataaatgaatgttgctatctatgcaagaaaatcaaaagccactaaaaaaggtgaatctatttct

SEQ ID NO: 17401 - DNA, 260 bp, Unknown; identical to SEQ ID NO: 16679
  Description of Unknown: LeftRegion for integrase B4402 sequence

SEQ ID NO: 17402 - DNA, 260 bp, Unknown
  Description of Unknown: LeftRegion for integrase B4403 sequence
cgccgcggagatcgaggcgcgggagcagcacctccgcgccgaagtaaagcagatgcgcgtctggcgcgtggtggcgctggccttgcttgtgatcttggtcgtcatctgtctatggtttgcttgggacgtgaccggcggggatcgtggattgatccgctacggccacgcggcggttggctcgccggtcagagggtgagcggatgaaagcagttatctacgcccgttactcctcggagaagcagcaggagatcagcatcgag

SEQ ID NO: 17403 - DNA, 260 bp, Unknown
  Description of Unknown: LeftRegion for integrase B4404 sequence
gagtcgcgccgatatactttactacgccaaataactttatacaccataacattttcaataaaaacgcccccggtgttggcgcaccgagagcgtttatatagatcagcttgccccatagtggtgggaacaataccgacccgacatctgtattgtaccaccttcgggcaggctttgacaagtgtaccccggaggtgttttttatgacagcagatattttggcccgctattccaccgatcaccagaacccggtcaccatcgac

SEQ ID NO: 17404 - DNA, 260 bp, Unknown
  Description of Unknown: LeftRegion for integrase B4405 sequence
ttgcggatttgttgagataaaataagaaaaccgctcctgcgccaacagaaacggtctctcgaatactatacagtgccgaggcacgatataacattccctgaacaagagtattatatcacattttcccggcaccgtgtaggtgttatttttatacgcaaaattaagcaacctcacacatatactaaggaaaggtgatacatatgcaatatgaagaatatcttatctatctccggaagtcccgaagtgatgcttctctggaa

SEQ ID NO: 17405 - DNA, 260 bp, Unknown
  Description of Unknown: LeftRegion for integrase B4406 sequence
aggttactaaaataaaaaaccgcccctgtattaccggcacagagataatttaatctttaaatatttaaaagaaaaaaccggctcctgcgaccaacaggaaccggttttaataaataagatagtctcggagaaaatcttacctacactataattatatcatctcctggattatcgcacaagtaaaaaaaggagaatgataaatgaatgaatcagtatgcatctatttaaggaaatccagagccgatcgggaagctgaagca

SEQ ID NO: 17406 - DNA, 260 bp, Unknown
  Description of Unknown: LeftRegion for integrase B4407 sequence
ctcataaagctggtgttagaggaagatatgaacttgcagaatttttagaaattccagaatggtttttacttgatgctatcgaatattataagagtaagtatggtacatgctataaaattgataactatttaatatacttctctcctaattttggaataatggaatttttttagtcaataatatacagcgaggtgatataaatgaatgttgctatctatgcaagaaaatcaaaagccactaaaaaaggtgaatctatttct

SEQ ID NO: 17407 - DNA, 260 bp, Unknown
  Description of Unknown: LeftRegion for integrase B4408 sequence
agatataataaatgcatatagatatggtgtaagaaataaacatgaattagctgaatatttagatgttacagaagattttttatgcgaagcaattgagtattataagtgcaaatatggaatttgttacaaaatagatacttacattatttattttgaaccattaggtgtaatgaaaatattttaaataggagaatttaaaaatgaataaaattgcaatttacacaagaaaatcaaaatttactggaaaaggtgaatctatt

SEQ ID NO: 17408 - DNA, 260 bp, Unknown
  Description of Unknown: LeftRegion for integrase B4409 sequence
aaaccaccgaattggttgaagataataaaaccgtccctgcgctaacaggaacggtctattgaatactatacagtgccgaggcacgatataataatccctgaacaagaatattatatcacatttccccggcaccgtgtaggtgttatttttatacgcaaaattaagcaacctcacacatatactaaggaaaggtgatacatatgcaatatgaagaatatcttatctatctccggaagtcccgaagtgatgcttctctggaa

SEQ ID NO: 17409 - DNA, 260 bp, Unknown; identical to SEQ ID NO: 17406
  Description of Unknown: LeftRegion for integrase B4410 sequence

SEQ ID NO: 17410 - DNA, 260 bp, Unknown; identical to SEQ ID NO: 13421
  Description of Unknown: LeftRegion for integrase B4411 sequence

SEQ ID NO: 17411 - DNA, 260 bp, Unknown; identical to SEQ ID NO: 17376
  Description of Unknown: LeftRegion for integrase B4412 sequence

SEQ ID NO: 17412 - DNA, 260 bp, Unknown
  Description of Unknown: LeftRegion for integrase B4413 sequence
ctttccatgcgtcgcctgcccttacagcatagcacgctttttcgatatgggcaaataaatgccccggcgctggtacgatgcagcgccggggataacatggagtgcagcacaaaaccggacaaagaaaattttatgcttgcgggggtcagtatatcacactccctgcatatgggcaaaccgcccggaaaggaagtgttatcatgccccgtaaaaaagctcctgcggccgaagcgccgcgcctggtggcttactaccgctac

SEQ ID NO: 17413 - DNA, 260 bp, Unknown
  Description of Unknown: LeftRegion for integrase B4414 sequence
tacggtttaaggaatggtctaaagaattcggtcatataaaattcactgatgaagaatataagaagatctttgaatactgcaaattcctagtctatttgagagatataaaatagcgaataaaatctacataaaggaggtgatttaagtgtaatcgatcagctattcaacttagaatatacaacgaaggaaaggtggaacaaatgtcaacttttgatatgaacgagtctgagggcagcacaaaaatagataaatatgcaatt

SEQ ID NO: 17414 - DNA, 260 bp, Unknown
  Description of Unknown: LeftRegion for integrase B4415 sequence
ttatataaaaataaataataaaaacatatatataaaatcgaataaaaatatacatctattagatattttcagaattttaaaattattcaaatcttgattcacatatatattaaataaattattgcaagaaataaaaaataaagaaaaattaaaatgctaagcattaccttaaataaatgaaatatagagaggtgatataaatgaatgttgctatttatgcaagaaaatcaaaagcaactaaaaaaggagaatccatttct

SEQ ID NO: 17415 - DNA, 260 bp, Unknown
  Description of Unknown: LeftRegion for integrase B4416 sequence
ataaaaaaagggggatattatgagaaagttaaattacttagataatatcagttatataaaaataaataataaaaacatatatataaaatcgaataaaaatatacatatattaaataaattattgcaagaaataaaaaataaagaaaaattaaaatgctaagcattaccttaaataaatgaaatatagagaggtgatataaatgaatgttgctatttatgcaagaaaatcaaaagcaactaaaaaaggagaatccatttct

SEQ ID NO: 17416 - DNA, 260 bp, Unknown
  Description of Unknown: LeftRegion for integrase B4417 sequence
aaggttacaatatattttataaacaaccgaaatgatcaggttgaaagaaatgttttggaaaatcttttagatacatttgaaaacagaatgaaagcacaaataaattgctgattttcttagatttatttttgatttcgctggatattatgaaaaatatgtagtattgttggtttgcgaaaatcgtatgaaaggttgataggatgaaaagagtatattgtttgtacagagtgtcaacaaaaggtcaggtagataaagacgat

SEQ ID NO: 17417 - DNA, 260 bp, Unknown
  Description of Unknown: LeftRegion for integrase B4418 sequence
gcgcccgcgtcccccggctctattgatattgacgcggaggtcgcctattaccgttcccagctggaggaacagaaaaaagcggcggacggatcatctgcttccgctgggcacagctccagcggcacaaaaatggcatgacaaataaaaagagccgcccgtaaaaaggcggctcttgaaataatcacaaatggagggattttatggcagtgtttgctcaggctgtgcggccggattttaacgacgatgtggccgatgtcgtg

SEQ ID NO: 17418 - DNA, 260 bp, Unknown
  Description of Unknown: LeftRegion for integrase B4419 sequence
taccattatcgagaaaaggcgcaaagccatgtccaccacggcgctttttgaaacggaagacggcaataggatactgctggaaatacccagagcggcggcggagtatatgaccgttggcgacgttgggatgctggattattacaaaaaaatattcagatcgtttgtcaggttgagggattaagggcgtgaaggagcctgccatgcaaaagagaagaacgaaatacgcaaacagccaaggggataacgccgtcatatacgca

SEQ ID NO: 17419 - DNA, 260 bp, Unknown
  Description of Unknown: LeftRegion for integrase B4420 sequence
ggtcacaatctacttttctaaaaacagaaataaccatgttgaaaggaatattctcgaaaatcttttggatacatttgagaacagaatgaacgcacagattggatgctgaatttctttaagttcattttcagatttcgctggatattatagaaattatgtagtattgttggtttgcaaaaatcgtatgaaagggtgataaaatgaaaagagtatattgcttgtacagagtatcaaccaaaggtcaggttgataaagatgat

SEQ ID NO: 17420 - DNA, 260 bp, Unknown
  Description of Unknown: LeftRegion for integrase B4421 sequence
atgggtgtagaaatcgctatgaaatggctgaatatctaaatgttacagttgaatatctaaatgaagctatcgaatattatgcaagtaaatatggtgtaatgcatagaatagatgactatataatctactttacccctaatctttgtattggtaaggcttttaattactaaaaaataatattatctatatgaggtataaaaatgaatgttgctatttatgctagaaaatcaaaagctactaaaaaaggagaatctatttct

SEQ ID NO: 17421 - DNA, 260 bp, Unknown; identical to SEQ ID NO: 17395
  Description of Unknown: LeftRegion for integrase B4422 sequence

SEQ ID NO: 17422 - DNA, 260 bp, Unknown
  Description of Unknown: LeftRegion for integrase B4423 sequence
tagaattacagtaaaatactaaaaaatccccggtgttaccagcaccagggaaaacaagaaaactatagggtgtttggaacacagtacaattctctctatcacaaagattattgtatcacaaaaatccggcaccgtataggtgttatttttatacgcaaaattaagcaacctcacacatatactaaggaaaggtgatacatatgcaatatgaagaatatcttatctatctccggaagtcccgaagtgatgcttctctggaa

SEQ ID NO: 17423 - DNA, 260 bp, Unknown
  Description of Unknown: LeftRegion for integrase B4424 sequence
cgctacactttttctcgaatttacgcaaaatcgcatggttattctcgtcggaaaatggtatgttataattttacatttttccatatttttacgaccgtgcagctacacttgacagattgcatttttcgtggtgcaataatctcatctttgttgcaccggtgcaactctatcatttttagccgttggggaggcttatcattatgcttacgaactatttaatctatttgcgcaaatcccgcgcagacaatccagatatgacc

SEQ ID NO: 17424 - DNA, 260 bp, Unknown; identical to SEQ ID NO: 14512
  Description of Unknown: LeftRegion for integrase B4425 sequence

SEQ ID NO: 17425 - DNA, 260 bp, Unknown
  Description of Unknown: LeftRegion for integrase B4426 sequence
gtgctacactttttctcaaatttacgcgaaatcgcatggttattctcggcgaaaaatggtatgttataaatttacatttttccatatttttacgaccgtgcagctacacttgacagattgcttttttcgtggtgcaataatctcatctctgttgcaccgatgcaactctatcatttttagccgttggggaggcttatcatatgcttacaaactatttaatctacttgcgcaaatcgcgcgctgacaatccagatatgacc

SEQ ID NO: 17426 - DNA, 260 bp, Unknown
  Description of Unknown: LeftRegion for integrase B4427 sequence
tcggtttgggggtggcagtagatgagtcaggaagaaggaaagcgtgagatcgtctttcagatgactatgagtgccgcccgtcagatgctcgaaaaggggctgatttcggtggatgactacaagcagtttgatacaaagatgcaacaaaaataccgcccgatattcggcacattattctccaaggatgggacggtaaagacatggcaaagaaagtaagaaaaatacctgctaccctcaatcagttcacatcggagccggtg

SEQ ID NO: 17427 - DNA, 260 bp, Unknown
  Description of Unknown: LeftRegion for integrase B4428 sequence
aaaaagctgagattatatcatttttgcgggtaaaatgcccggaatatgaaaaaagcctaataaatgagtttaatgaaaaatgctatattttaaatttagctgctaacatagaaaaatatagaataggtttacaaagaaatattacaccgtataaaggtgtagaacatagttatatattttaattgtagggaggccccataatggcacctaaaaagaaacaagccagcgcggacgctggtgcatataatcgcgctgttatc

SEQ ID NO: 17428 - DNA, 260 bp, Unknown
  Description of Unknown: LeftRegion for integrase B4429 sequence
cgcggggcgcgacttcaaggcggcggcttacgcagacccgaggcaggctgtgatgaacgacgactacgcccgcctctccgatgccgggaaggacgcggccgccggggcagtgaggggcatccgcgcatccgagggcgcgcgagctcaagcggcggggctggaagatcgtcagatcgcagcgtccgcgtaaaggttgagcgatgcagtcggtaccctgcgacaacccgagacccggcaggcgtgtggcctcctacgcccgc

SEQ ID NO: 17429 - DNA, 260 bp, Unknown
  Description of Unknown: LeftRegion for integrase B4430 sequence
acaggtcttttgattgtgtgtagtgacccggcgcaaaagaaaattgatagagccgattccctgaatattccgattgtttcggagcagcaatggtttgaacttatgccggaacttgaggccgttggaatgtggaacggaaagcaaattctgtttgcggacaatgatggcatctaccgtgttgaagtgggcggtgaaagctgatggccagaaaaaagaatattgctgctggcctcgatgccgtcatctatgcccggtactcg

SEQ ID NO: 17430 - DNA, 260 bp, Unknown
  Description of Unknown: LeftRegion for integrase B4431 sequence
acagaatatgccacaggacgtataccagttcttattagaacacaacggaatatctcaaacagatatttataaggcatttgagcctattttaaaaaatgatatccaagaactattatatcgttgggataaatctgggacaataaaaagagaaaagaatggtaaaacctacaacgtatttatagtgaaataaaggagttcttatgctggaaaaaaatataataatatatttacgaaaatcaagatctgatgacccaggaatg

SEQ ID NO: 17431 - DNA, 260 bp, Unknown
  Description of Unknown: LeftRegion for integrase B4432 sequence
aaatattacctatttaattataacactgcatttatcaaaaagcaacaggaatatgtacaaacaatgtaagaatattttgttgcgaggtgatattatggaaataaccgaagcagagatagaaatcattacaaggcagattgttaaaatcatcataaatcatcaatgtgacgcatcagctgtgggtcctgaggacgcagacgatgaataagctcagagccgcagcctattgccgtgtttcaaccgaccgtgccgagcaatcc

SEQ ID NO: 17432 - DNA, 260 bp, Unknown
  Description of Unknown: LeftRegion for integrase B4433 sequence
tctgcattgcggatttactgaattaaaaaaccgcccctgctaccaacaggaacggcctcttgaatactatacagtgccggagcacgtacaatactccctgaacaagagtattatatcacatttccccggcaccgtgtaggtgttatttttatacgcaaaattaagcaacctcacacatatactaaggaaaggtgatacatatgcaatatgaagaatatcttatctatctccggaagtcccgaagtgatgcttctctggaa

SEQ ID NO: 17433 - DNA, 260 bp, Unknown
  Description of Unknown: LeftRegion for integrase B4434 sequence
ctttccatgcgtcgcctgcccttacagcatagcacgctttttggatatgggcaagcaaaagccccggcgctggtacgatgcagcgccggggataacatggagtgcagcacaaaatcggacaaaggaaattttatgcttgcaggggtcagtataccacactccctgcatatgggcaaaccgcccggaaaggaagtgttatcatgccccgcaaaaaagctcctgcggccgaagcgccgcgcctggtggcttactaccgctac

SEQ ID NO: 17434 - DNA, 260 bp, Unknown
  Description of Unknown: LeftRegion for integrase B4435 sequence
aggttaccatttgcttttccaaaaacagaaatttacaggttgaaagaaatgttcttgaaaatcttttggatacatttgaaaacagaatgaaagctcagattggatgctgaatttctttaagttatttttcagatttgctggatattataggaattatgtagtattgttggtttgcaaaaatcgtatgaaagggtgataaaatgaaaagagtatattgcttgtacagagtatcaactaaaggtcaggttgataaagatgat

SEQ ID NO: 17435 - DNA, 260 bp, Unknown
  Description of Unknown: LeftRegion for integrase B4436 sequence
gcactggttctttgtgtgctgcttgggtatatggggatccaccgcttttatgttggaaagataggcaccggcatcctttggttgttgactcttggatgtttcgggatcggctggatcgtcgacattgtgatgctctgctgcaataagttcgcagacaagagcggcgccatcatcggtttgccagaaacgaggtgatccggatggcaaaaaggatgccagcggcagcgtcggattgtgatggaatgatcggcgtcatttat

SEQ ID NO: 17436 - DNA, 260 bp, Unknown
  Description of Unknown: LeftRegion for integrase B4437 sequence
ggtaaaagatttaataagaattttagtaatataacttctctatctgatatagaatcagcattgttagacttatctgcatatgcttgtgtatttttttctgaaaatgatattaatataaacacttatattattcaagaatatacaatagaatttatatcaaaattagagcatttatcggactaaaatagaaaggtaattctatgaacgttgtaatatatgctaggttctctagtcacaatcaacaggaacagagcattgaa

SEQ ID NO: 17437 - DNA, 260 bp, Unknown
  Description of Unknown: LeftRegion for integrase B4438 sequence
ttcaaggactgccaacaaaagcaatgggatatggttttgttttcgtcaattacaattttagggcgaagaataaacgatacgataaagttcttatcggagctttccgaatatgtcgattataaagttatcgaccaagaaaacgacaagttcctgaaagaagtaggaaaaatacttcaaacattgtataaggaaggacgcttatgaaaacagcagtcatttacgcgagatttagtagcgacaggcaaactgaacagtctatc

SEQ ID NO: 17438 - DNA, 260 bp, Unknown; identical to SEQ ID NO: 15083
  Description of Unknown: LeftRegion for integrase B4439 sequence

SEQ ID NO: 17439 - DNA, 260 bp, Unknown
  Description of Unknown: LeftRegion for integrase B4440 sequence
cgccgcagagatcgaggcgcgggagcagcacctccgcgccgaagtaaagcaaatgcgcgtctggcgcgtggttgcgctggccttgcttgtgatcttggtcgtcatctgtctatggtttgcttgggacgtgaccggcggggatcgtggattgatccgctacggccacgcggcggttggctcgccggtcagagggtgatcgtatgaaagctgttatctacgcccgctactccagcgagaagcagcaggagatcagcatcgag

SEQ ID NO: 17440 - DNA, 260 bp, Unknown
  Description of Unknown: LeftRegion for integrase B4441 sequence
atgtttttgatgatatggtaagactcagtcccgtgaatccggaatatcaacccaaagagctaaggggtgttgatatggaaacatatcacattctcggcgtaccacgtatgcttattcgcgaaataagttaaaaagcccgctcccgtgagaacaggaacgagtgagaaagtgccacagaaaagtaagaaagcggagagagtatgacaaatgcagtgatatatgcccggtatagcccgggaccaaatcaaacggatcaatca

SEQ ID NO: 17441 - DNA, 260 bp, Unknown
  Description of Unknown: LeftRegion for integrase B4442 sequence
taaaaaaaagggggatattatgagaaagttaaattacttagataatatcagttatataaaaataaataataaaaacatatatataaaatcgaataaaaatatacatatattaaataaattattgcaagaaataaaaaataaagaaaaattaaaatgttaagcattaccttaaataaatgaaatatagagaggtgatataaatgaatgttgctatttatgcaagaaaatcaaaagcaactaaaaaaggagaatccatttct

SEQ ID NO: 17442 - DNA, 260 bp, Unknown
  Description of Unknown: LeftRegion for integrase B4443 sequence
acagaatatgccacaggacgtataccagttcttattagaacacaacggaatatctcaaacagatatttataaggcatttgagcctattaaaaaaaatgatatccaagaactattatatcgttgggataaatctgggacaataaaaagagaaaagaatggtaaaacctacaacgtatttatagtgaaataaaggagttattatgctggaaaaaaatataataatatatttacgaaaatcaagatctgatgacccaggaatg

SEQ ID NO: 17443 - DNA, 260 bp, Unknown; identical to SEQ ID NO: 15667
  Description of Unknown: LeftRegion for integrase B4444 sequence

SEQ ID NO: 17444 - DNA, 260 bp, Unknown; identical to SEQ ID NO: 17415
  Description of Unknown: LeftRegion for integrase B4445 sequence

SEQ ID NO: 17445 - DNA, 260 bp, Unknown
  Description of Unknown: LeftRegion for integrase B4446 sequence
gtgattataaatattgtatggcacagaaaatgacaaaaacactgctcgataagggcctgatttccgtggatgaattcaccaaaatcagcgcaagaaaccgccaaactttctccccatatttagcggagattatgccctaaatgacttgatatatatcgattagtacgggaatatgtccatactgaaagtgaggtgagttgatgaaaaggataacaaaaattgaagaaaatagagccttatctattaagaagaaaacccgt

SEQ ID NO: 17446 - DNA, 260 bp, Unknown; identical to SEQ ID NO: 17395
  Description of Unknown: LeftRegion for integrase B4447 sequence

SEQ ID NO: 17447 - DNA, 260 bp, Unknown
  Description of Unknown: LeftRegion for integrase B4448 sequence
gattttgactattacagggcacagaaagtgttggaaaccatgtttatgttcggtatgatttctgtgaatgaattccacaaaatatcggctgtaaaccgcaaaactttctcaccgtttctggcggagattatgggctaaatgacttgctatttctgcgatagtacgggaatatgtcactgcccaaaaagtgaggtgagttgatgaaaaagataacaaaaatcgggacaaatgaacccctggctgagaagaaaaaattgaag

SEQ ID NO: 17448 - DNA, 260 bp, Unknown
  Description of Unknown: LeftRegion for integrase B4449 sequence
gcgcccgcttcccccggctctattgatattgaggcagaggtcgcctattaccgttcccagctggaggaacagaaaaaagcggcggacggatcatctgcttccgctgggcacagctccagcggcacaaaaatggcatgacaaataaaaagagccgcccgtaaaaaggcggctcttgaaataatcacaaatggagggattttatggcagtgtttgctcaggctgtgcggccggactttaacaacgatgtggccgacgtcgtg

SEQ ID NO: 17449 - DNA, 260 bp, Unknown
  Description of Unknown: LeftRegion for integrase B4450 sequence
tcaagacaacgatagccaaggcgacgggggatgcgtctttggatgttataaaggcgctggcagagaagatttcaaccaacatgctgctaagcagcgtgtagctatgggctttaagcataaagaagccccgtggcagtcggcaaactcacacggggcaaagccaatccccataggcaaggaataggcaaggtgattctatcatggccaagaggcgtgccgccatatacgcccgcttttcgtcgcacaatcaacggtcggaa

SEQ ID NO: 17450 - DNA, 260 bp, Unknown
  Description of Unknown: LeftRegion for integrase B4451 sequence
gaaggaatttgacttcattctcgctgaaaggatagtctgtaagatggctgaaaagggccttatttctgatgatgaattacacaaaatctccgagaaaaatcgacttattttctctccttatttaagcgagatttatctttaaatgacttgatatatatcgttatctacgggaatatgtccatacgagagaggtgatataagtgaagaatgtaacgaaaatcaatcaggttgatttctccgtttttaagaagacaagagtg

SEQ ID NO: 17451 - DNA, 260 bp, Unknown
  Description of Unknown: LeftRegion for integrase B4452 sequence
tagttacaacaatatcagcttagaaaagagtgtcattgatgattttgtagaaagtatatttaatgcaataaacaatttagaatataaaataatatatgaagatgaattaagagaagcttgttaaaggcttctttttttgttgtggataaaccttaaaaatgttaaaattaatataagaaattttgaggaggttgaactagatgttagaagaaggacaaaagttaaaatgtgctttatatgttagaacatcaacgacagaa

SEQ ID NO: 17452 - DNA, 260 bp, Unknown
  Description of Unknown: LeftRegion for integrase B4453 sequence
ataaaacaaataaatggtttactgattcccttaaaaaagaaagtaatggtaagtgtgttgttaacaccgctgtaagtagagcaaagaaaaaattagtattgttttgtgatacagactattggtcaactcaggacaaacaattaattggaaaaatcataaataatgcaacagaaattaatcttctataaaggagttaaattatgaacgcagtaatatatgctaggttctctagccacaatcaacaggaacagagcattgaa

SEQ ID NO: 17453 - DNA, 260 bp, Unknown
  Description of Unknown: LeftRegion for integrase B4454 sequence
aatattattttttgctttaattatatatattatatttttctaaccaaaaaaagcgtccagtgctaccaacactgaacgcttagctgatggaggacgccatcaacatgttgtattctcctacccaataaggctgaatacgttatcattataacatatatcagccttcttttttagtattttaaaaagaaaggttgttttttatgcgtaaaaataaaaaagaaattaaaaaagcggttatttatgctcgattttcatgtgat

SEQ ID NO: 17454 - DNA, 260 bp, Unknown; identical to SEQ ID NO: 17247
  Description of Unknown: LeftRegion for integrase B4455 sequence

SEQ ID NO: 17455 - DNA, 260 bp, Unknown
  Description of Unknown: LeftRegion for integrase B4456 sequence
agggtaaaaataaaaagcccctgtttgcagacagagactttttatccgaccaagcataagaggtatctaaaaacaaaaagatttcccttatggtataatcgccttaagcaagctatattataccattttagacaccttccatgcaaggtgttatttttatacccttttttcaatatatttaattaaggagtggttataatatggctgattttgaacatgtaattatctatttgagaaagtcccggtcagatgatccggca

SEQ ID NO: 17456 - DNA, 260 bp, Unknown
  Description of Unknown: LeftRegion for integrase B4457 sequence
ctcattaataaaaactaatttttttacattaaaaagccgcccggctgcaaccaggcggaataaaaagaaaactacttgcatctattggctagatgtgtacttttccccgacagttaaagtataccatttttagcctacactttgcaagaagtgtattttttgtacccaaataatcaaaatatggaaaggaacgatggtatatgaacataggaaatcagttaggaaaactaaaaaaatcagatcaattctgcatttactta

SEQ ID NO: 17457 - DNA, 260 bp, Unknown
  Description of Unknown: LeftRegion for integrase B4458 sequence
aaatggtatgctgaggtggatgcatcttcatataacgtactcaacgcctctatagataatgaatagccatacaacataaaaatcccgctatcgtacggcaatacgatagcgggaagatgtaatatacccaaccacgggctgattactattatattataacatgatcagcccattttaaacaaaggagctgatttttttttatgcttagagccgctttatacgccagattttcttctgaaaaccaacgtgaagaatctatt

SEQ ID NO: 17458 - DNA, 260 bp, Unknown
  Description of Unknown: LeftRegion for integrase B4459 sequence
ttatttcggctgcacaaaagctgacttaatagaaaagcaatcagaaacatatgcagcatacaaggaagtaaaaaatttattagataataacggtgcaagtgcagaaaaacacgaattgatagagttgattatagcaatggatgataaagacgttacaatgcttcttacacttgcaaaacaactgaaaggaagaagttaatatgaaagcaagtaatatgaatcaaattgatattatgtatcttcgtaaaagtcgtgaagat

SEQ ID NO: 17459 - DNA, 260 bp, Unknown
  Description of Unknown: LeftRegion for integrase B4460 sequence
agggtaaaaataaaaagcccctgtttgcagacagagactttttatccgaccaagcataagaggtatctaaaaacaaaaagatttcccttatggtataatcgccttaagcaagctatattataccattttagacaccttccatgcaaggtgttatttttatacccttttttcaatatatttaattaaggagtggttataatatggctgattttgaacatgtaattatctatttaagaaagtcccggtcagatgatccggca

SEQ ID NO: 17460 - DNA, 260 bp, Unknown
  Description of Unknown: LeftRegion for integrase B4461 sequence
tattcatcttggcattttctacaatatcaaacgcgtttgggaatccaggccggaccccagtatataatcagcccctctatatgaggaagtacgggcccattctttccatcattgagaacggcctgctgcttattggccttgtctggatgatatattccggtatcactagttttatgagtctgttttaagagggaattgtcatggctcaaagatgtgtcatatacgcgcgctattcgtccgatagacagcgtgaagaatcc

SEQ ID NO: 17461 - DNA, 260 bp, Unknown; identical to SEQ ID NO: 17459
  Description of Unknown: LeftRegion for integrase B4462 sequence

SEQ ID NO: 17462 - DNA, 260 bp, Unknown
  Description of Unknown: LeftRegion for integrase B4463 sequence
atcaaagacttagatagctataaactatctagcttgtgcgaggagcagaatatacaatgtagtaactatcatactgcacttgctgatgcactagcgtgtggaatactctttgtcgacattattaagattgtcaaagaagttaaaaatgtagaagaattataaacgttaaaaatactcaaaaataaaaaggtgaattaaaaatgaatgaaaaaattaatgcggtgatttatgctaggttttctagtcacaatcagcaagaa

SEQ ID NO: 17463 - DNA, 260 bp, Unknown
  Description of Unknown: LeftRegion for integrase B4464 sequence
actacaactattttatggcgcagaggttagctaaggatatgcttgaaaaaagacttatctcgttggaagaattcaacaaattaacaaagaaaaatcgtgatacattctctccatttttagccgagattatgccgaaaacaacttgacaattgtgacatttagagtgatgtatatacaagtgaaagtggaggtgagttatcatgaaaaaggttacgaaaattgacaaaattcaacctgcaaaaaatgccgagaataaactg

SEQ ID NO: 17464 - DNA, 260 bp, Unknown
  Description of Unknown: LeftRegion for integrase B4465 sequence
tgaaaatggaaatataacttataattacaacaaataacaaaaaagtcccctgctaccaacagaggacaaaaactaacctatcaaggcaagtgccaagatataatcagcctagacaactgtattatatcacacaaaacacctgccttgcaaggtgttatttttatacccaaaaacatattttttataaggagtgatataatatgtcatattgtatttatttaagaaaatctcgagcagataaagaactttgctcagaggaa

SEQ ID NO: 17465 - DNA, 260 bp, Unknown; identical to SEQ ID NO: 13412
  Description of Unknown: LeftRegion for integrase B4466 sequence

SEQ ID NO: 17466 - DNA, 260 bp, Unknown
  Description of Unknown: LeftRegion for integrase B4467 sequence
actgatgaaaaagaaactgtaaattttgacactaaagaacgaaacgagataatctcaaaaattttagccagaatgattttagataaaacgaaaaagtaatttttaagctgtaatttttaaccgtacaaaataaaggggtcaagcatatattatcatcttgataagggcttgaccctaacttattgaagaaaggaaaaaccatgaacacaaatcagataccagtagtaagttacagccgattcagctcggatatgcagcac

SEQ ID NO: 17467 - DNA, 260 bp, Unknown; identical to SEQ ID NO: 17459
  Description of Unknown: LeftRegion for integrase B4468 sequence

SEQ ID NO: 17468 - DNA, 260 bp, Unknown
  Description of Unknown: LeftRegion for integrase B4469 sequence
ccaacattttactaaatctgtaaaaaagacgcttactattcctcaatggttaaacgatgaagcaaaacgtagaagcataaatttttctaaagttctgcaggttgctttaatgaatgaaattaaaatcaataatatacaataaataaaatgcaaaaagaggtaatagtttattctattacctcttttttaggaggaaaatcatgagaaatgtagccatatatgtaagagtttctactatgcatcaagctgaacaaggatac

SEQ ID NO: 17469 - DNA, 260 bp, Unknown; identical to SEQ ID NO: 17468
  Description of Unknown: LeftRegion for integrase B4470 sequence

SEQ ID NO: 17470 - DNA, 260 bp, Unknown
  Description of Unknown: LeftRegion for integrase B4471 sequence
cgatcatttcagcgctgattgaccgaataacggtctatgacgattgttcactggacatccacttcaggatttccgcggaacagttccttggaaaagccgcgtaacgcaaatgtcgacaactcccattggaaagaatgatataatcaatcaagccaatcatccgggtgaggtggttggctcttttaatgggaggattgaatatgaaacgagtctattgtctttaccgcgtttctacagttggacaggtggatcatgacgat

SEQ ID NO: 17471 - DNA, 260 bp, Unknown
  Description of Unknown: LeftRegion for integrase B4472 sequence
gccaacattttactaaatctgtaaaaaagacgcttactattcctcaatggttaaacgatgaagcaaaacgtagaaacataaatttttctaaagttctgcaggttgctttaatgaatgaaattaaaatcaataatatacaataaataaaatacaaaaagaggtaatagtttattctattacctctttttaggaggaaaatcatgagaaatgtagccatatatgtaagagtttctactatgcatcaagctgaacaaggatac

SEQ ID NO: 17472 - DNA, 260 bp, Unknown; identical to SEQ ID NO: 17455
  Description of Unknown: LeftRegion for integrase B4473 sequence

SEQ ID NO: 17473 - DNA, 260 bp, Unknown
  Description of Unknown: LeftRegion for integrase B4474 sequence
ccaacattttactaaatctgtaaaaaagacgcttactattcctcaatggttaaacgatgaagcaaaacgtagaaacataaatttttctaaagttctgcaggttgctttaatgaatgaaattaaaatcaataatatacaataaataaaatgcaaaaagaggtaatagtttattctattacctcttttttaggaggaaaatcatgagaaatgtagccatatatgtaagagtttctactatgcatcaagctgaacaaggatac

SEQ ID NO: 17474 - DNA, 260 bp, Unknown
  Description of Unknown: LeftRegion for integrase B4475 sequence
acgatacgttcaatgccgtggaggcggaacggctgaagcgggagaaaaagctcggcagagacaacattccgccaaaggaaaagcccgttcccgttatattcacggagttcagaacaaaaaaggcagcacagaaatttaccgaccctatcacgcaggctgagtacgcatacggtcggatagaaggcaaggtgaacgaataaatggcaatggctcagaacatcacattcattccggcggtaaaaactgtgggaacgcagaag

SEQ ID NO: 17475 - DNA, 260 bp, Unknown
  Description of Unknown: LeftRegion for integrase B4476 sequence
gccaacattttactaaatctgtaaaaaagacgcttactattcctcaatggttaaacgatgaagcaaaacgtagaaacataaatttttctaaagttctgcaggttgctttaatgaatgaaattaaaatcaataatatacaataaataaaatgcaaaaagaggtaatagtttattctattacctctttttaggaggaaaatcatgagaaatgtagccatatatgtaagagtttctactatgcatcaagctgaacaaggatac

SEQ ID NO: 17476 - DNA, 260 bp, Unknown
  Description of Unknown: LeftRegion for integrase B4477 sequence
acagccacattccgcttcttgaccgtgtgtctgctgccggtattgttatggatatctaccggatgcgccgtgccagagatgagcttaccggccccgatgaccctctgcctgatgaggatattgtccaaaaagcagttgattctggaagagaatccgtgtatgttaaaaaagagaattattaaacttagggggaattaaatatgtatcgagaactttcttatcgttctgatgagatcatcgagtacctgcgaaaatccagg

SEQ ID NO: 17477 - DNA, 260 bp, Unknown
  Description of Unknown: LeftRegion for integrase B4478 sequence
tagaattacagtaaaatacaaaaaaatccccggtgttaccagcaccagggaaaacgagaaaactatagggtgtttggaacacagtacaattctctccctcacaaagattattgtatcacaaaaatccggcaccgtataggtgttatttttatacgcaaaattaagcaacctcacacatatactaaggaaaggtgatacatatgcaatacgaagaatatcttatctatctccggaagtcccgaagtgatgcttctctggaa

SEQ ID NO: 17478 - DNA, 260 bp, Unknown; identical to SEQ ID NO: 17473
  Description of Unknown: LeftRegion for integrase B4479 sequence

SEQ ID NO: 17479 - DNA, 260 bp, Unknown
  Description of Unknown: LeftRegion for integrase B4480 sequence
ttttgctgacatcagaaaaatagataaactaaaaaccgtccagttgcagctggacggaataaaaagaaaaactacttgcatctataggttagatgtgtacttttccccgacagttaaagtataccatttttaacctacactttgcaagaagtgtattttttgtacccaaataatcaaaatatggaaaggaacgatggtatatgaacataggaaatcagttaggaaaactaaaaaaatcagatcaattctgcatttactta

SEQ ID NO: 17480 - DNA, 260 bp, Unknown; identical to SEQ ID NO: 17475
  Description of Unknown: LeftRegion for integrase B4481 sequence

SEQ ID NO: 17481 - DNA, 260 bp, Unknown
  Description of Unknown: LeftRegion for integrase B4482 sequence
aacaactaaaaaaactaaaaaacaaagaaaacgcataaaaaaagtcccctgctaccaacagaggacaaagatactatagccttaggtgtttaaagcagatataatatccatacgcaagtttattatatcacgcttttcaacacctttcaaggtgttatttttatatccaaaaacatattttttataaggagtgatataatatgtcatattgtatttatttaagaaaatctcgagcagataaagaactttgctcagaggaa

SEQ ID NO: 17482 - DNA, 260 bp, Unknown
  Description of Unknown: LeftRegion for integrase B4483 sequence
gcgggatttttaaaaataacgttaccaaaaaaacaaactatctgattgtcggcaacgaagggaatccgtgctgggcgtattcctgctacggccgcaaggtggatgctgcgatcaagttgcgcaaatccggtgtcccgattgtgattgtgaacgaaacggatttctgggatatcctcgaagatctatagcgaggtgctagcatgagaattgctatctatgcgcgaaagagcgcattttcagaaaaaagtgagagtgtaaac

SEQ ID NO: 17483 - DNA, 260 bp, Unknown; identical to SEQ ID NO: 17479
  Description of Unknown: LeftRegion for integrase B4484 sequence

SEQ ID NO: 17484 - DNA, 260 bp, Unknown
  Description of Unknown: LeftRegion for integrase B4485 sequence
taatggcattacttaaaataactatatataaaggtacaaaaaaagaaataaaagaattggaagtaaatgataaattaaccgatgaagagttagaagaaatagcaaaagatgaatttttaagtgaatgtaactatgaatggaagatttataagaaaaggtaatagatttaatgctattaccttttttagtggaggaaaaatatgagaaatatagccatatatgtaagagtttctactatgcatcaagctgaacaaggatac

SEQ ID NO: 17485 - DNA, 260 bp, Unknown
  Description of Unknown: LeftRegion for integrase B4486 sequence
ccaacattttactaaatctgtaaaaaagacgcttactattcctcaatggttaaacgatgaagcaaaacgtagaaacataaatttttctaaagttctgcaggttgctttaatgaatgaaattaaaatccataatatacaataaataaaatacaaaaagaggtaatagtttattctattacctcttttttaggaggaaaatcatgagaaatgtagccatatatgtaagagtttctactatgcatcaagctgaacaaggatac

SEQ ID NO: 17486 - DNA, 260 bp, Unknown; identical to SEQ ID NO: 17459
  Description of Unknown: LeftRegion for integrase B4487 sequence

SEQ ID NO: 17487 - DNA, 260 bp, Unknown
  Description of Unknown: LeftRegion for integrase B4488 sequence
acataaaatctcccacaaattgatatgtgtatatttatattataccatatattttattacatatcaagaggtgaataaaaaaacgccccgctcgatgcgccaacaccgaacggggagagggatatgtataaaatacacactccacaacatctgtattttatcatatcctggcaaaaaaatcaataggagtgataaaaaatatgcaaaccgccgtgatatacgcccggtattcgtccgacaagcaaacggagcagtccatc

SEQ ID NO: 17488 - DNA, 260 bp, Unknown
  Description of Unknown: LeftRegion for integrase B4489 sequence
taatggcattacttaaaataactatatataaaggtacaaaaaaagaaataaaagaattggaagtaaatgataaattaaccgatgaagagttagaagaaatagcaaaagatgaatttttaagtgaatgtaactatgaatggaagatttataagaaaaggtaatagatttaatgctattaccttttttagtggaggaaaaatatgagaaatgtagccatatatgtaagagtttctactatgcatcaagctgaacaaggatac

SEQ ID NO: 17489 - DNA, 260 bp, Unknown; identical to SEQ ID NO: 15738
  Description of Unknown: LeftRegion for integrase B4490 sequence

SEQ ID NO: 17490 - DNA, 260 bp, Unknown
  Description of Unknown: LeftRegion for integrase B4491 sequence
cagggtaaaaataaaaagcccctgtttgcagacagagactttttatccgaccaagcataagaggtatctaaaaacaaaaagatttcccttatggtataatcgccttaagcaagctatattataccattttagacaccttacatgcaaggtgttatttttataccctttttcaatatatttaattaaggagtggttataatatggctgattttgaacatgtaattatctatttgagaaagtcccggtcagatgatccggca

SEQ ID NO: 17491 - DNA, 260 bp, Unknown
  Description of Unknown: LeftRegion for integrase B4492 sequence
ataactgtggtgcagactggaacgaacaggcagtaaagaaagcaaaggaatatttggactattcttctttctctcgttccgggctgattggtcagctgaaatatgaaggctttacaactgagcaggccgaatacggtgtaacccagaacggcctataattgtaatttcctgccacagcgggggcaaaggggtgaaatgcagtgcgggcgtttatctatggccgcttttccagccataagcagcaggaattaagcatagag

SEQ ID NO: 17492 - DNA, 260 bp, Unknown
  Description of Unknown: LeftRegion for integrase B4493 sequence
cttttgaaatattaaacaaaaataaaaccgcccctgcttatagcaggaacggcttaatgaatactatacagtgccgagggcacgtacaatactccctgaacaagaatattgtatcacacttccttggcacctgtacaggtgttatttttatacgcaaaattgtgcgacgtcgcacatatatactaaggagggtgatacatatgcaacaatatgaagaatatcttatctatctccggaaatcccgaagtgatgcctcactg

SEQ ID NO: 17493 - DNA, 260 bp, Unknown
  Description of Unknown: LeftRegion for integrase B4494 sequence
ataactgtggtgcagactggaacgaacaggcagtaaagaaagcaaaggaatatttggactattcttctttctctcgttccgggctgattagtcagctgaaatatgaaggctttacaactgagcaggccgaatacggtgtaacccagaacggcctataattgtaatttcccgccacagcgggggcaaaggggtgaaatgcagtgcgggcgtttatctatggccgcttttccagccataagcagcaggaattaagcatagag

SEQ ID NO: 17494 - DNA, 260 bp, Unknown; identical to SEQ ID NO: 17455
  Description of Unknown: LeftRegion for integrase B4495 sequence

SEQ ID NO: 17495 - DNA, 260 bp, Unknown; identical to SEQ ID NO: 17488
  Description of Unknown: LeftRegion for integrase B4496 sequence

SEQ ID NO: 17496 - DNA, 260 bp, Unknown; identical to SEQ ID NO: 13002
  Description of Unknown: LeftRegion for integrase B4497 sequence

SEQ ID NO: 17497 - DNA, 260 bp, Unknown
  Description of Unknown: LeftRegion for integrase B4498 sequence
gtagaaattgggcgggtagaccagaaagaaagcaaattaaaaagtcatcaaaatcgcattcaagcgaagcctcatgccaacagcaacatgatctaaacgaaaagcattttgatttctggaatttaaaatagccgcttccaacatggtcgaaatcgactagtttagaagcggctattttactaattaaaggagatgttattatgttaaatgcagtaatctatgctcgcttctcgtcagatatgcagcgtgaagaaagcata

SEQ ID NO: 17498 - DNA, 260 bp, Unknown; identical to SEQ ID NO: 17479
  Description of Unknown: LeftRegion for integrase B4499 sequence

SEQ ID NO: 17499 - DNA, 260 bp, Unknown
  Description of Unknown: LeftRegion for integrase B4500 sequence
taatggcattgcttaaaataactatatataaaggtacaaaaaaagaaataaaagaattggaagtaaatgataaattaaccgataaagagttagaagaaatagcaaaagatgaatttttaagtgaatgtaactatgaatggaagatttataagaaaaggtaatagatttaatgctattaccttttttagtggaggaaaaatatgagaaatgtagccatatatgtaagagtttctactatgcatcaagccgaacaaggatat

SEQ ID NO: 17500 - DNA, 260 bp, Unknown; identical to SEQ ID NO: 17456
  Description of Unknown: LeftRegion for integrase B4501 sequence

SEQ ID NO: 17501 - DNA, 260 bp, Unknown
  Description of Unknown: LeftRegion for integrase B4502 sequence
gaattactagatgctggtattatgacacaagaagaatttgacttgaagaaaaaagaattattaaatttataaactaaaaaatcacccactggcggcaaccagtaagtgatcggtgcaaaataaaattaaccgctcagttaatgtcttttttgcacccttagtatatcaaatttcataagatagtacaagggagtgatgatatggaacagtattgcctgtatcttagaaaatcaagaagtgatcaggaagctgaagcgcgc

SEQ ID NO: 17502 - DNA, 260 bp, Unknown; identical to SEQ ID NO: 17455
  Description of Unknown: LeftRegion for integrase B4503 sequence

SEQ ID NO: 17503 - DNA, 260 bp, Unknown; identical to SEQ ID NO: 17488
  Description of Unknown: LeftRegion for integrase B4504 sequence

SEQ ID NO: 17504 - DNA, 260 bp, Unknown; identical to SEQ ID NO: 17488
  Description of Unknown: LeftRegion for integrase B4505 sequence

SEQ ID NO: 17505 - DNA, 260 bp, Unknown
  Description of Unknown: LeftRegion for integrase B4506 sequence
actgatgaaaaagaaactgtaaattttgacactaaagaacgaaacgagataatctcaaaaattttagccagaatgattttagataggacgaagaagtaatttgtaagctgtaaattttaaccgtacaaaataaaggggtcaagcatatattatcatcttgataagggcttgacccccaattattgaagaaaggaaaaaccatgaacacaaatcagataccagtagtaagttacagccgattcagctcggatatgcagcat

SEQ ID NO: 17506 - DNA, 260 bp, Unknown
  Description of Unknown: LeftRegion for integrase B4507 sequence
attatgattatttcagagcacaggaagttgcaaaatcaatgctagattctggacttatttccttgttggaattcaacaaattaacgctccttaaccgtcaaacattctctccgctatatgtagaaataatgccggaaataacttgataaatacagcttttagagtgatgtatatacactgacgaagggaggtgaactaccgtgaagaaggttacaaaaatcgacaaaatccagaatgtaacaagcaaaaaacagaagctt

SEQ ID NO: 17507 - DNA, 260 bp, Unknown; identical to SEQ ID NO: 17456
  Description of Unknown: LeftRegion for integrase B4508 sequence

SEQ ID NO: 17508 - DNA, 260 bp, Unknown
  Description of Unknown: LeftRegion for integrase B4509 sequence
tgtcacttttgaaaaaattcgctgatttttacggtgtgacgcttgattatttcggtgtaacgacaaacgatgaaatatttgaattattaagccgtgcgcgtgaggtattcaacaatgacgctatttcaacgcaaacaaaagaggaattatacaaagaatttatgcgtttatatcttaatttgaacaaggaatgatgcatcatgaaaaacaaacacgatataaaagacatacgcgctgccgtttatatccgatattcttct

SEQ ID NO: 17509 - DNA, 260 bp, Unknown; identical to SEQ ID NO: 17455
  Description of Unknown: LeftRegion for integrase B4510 sequence

SEQ ID NO: 17510 - DNA, 260 bp, Unknown; identical to SEQ ID NO: 17476
  Description of Unknown: LeftRegion for integrase B4511 sequence

SEQ ID NO: 17511 - DNA, 260 bp, Unknown; identical to SEQ ID NO: 17455
  Description of Unknown: LeftRegion for integrase B4512 sequence

SEQ ID NO: 17512 - DNA, 260 bp, Unknown; identical to SEQ ID NO: 13018
  Description of Unknown: LeftRegion for integrase B4513 sequence

SEQ ID NO: 17513 - DNA, 260 bp, Unknown
  Description of Unknown: LeftRegion for integrase B4514 sequence
attatttattctgtttatctgattctccatatccaaaagtagagatttccctaacagaagaagagcaattactgcttgacgcattccgttccgctaccccacaaggtagattcaacattattactacctgtatgtgtgagaagcgaaaaggggacaacgaaagtgccgggtgattgattttgtagagtggaggaagaaccatgtatgaggatataaaaacagcctgcctatacgttagattctcaagccataaccagact

SEQ ID NO: 17514 - DNA, 260 bp, Unknown
  Description of Unknown: LeftRegion for integrase B4515 sequence
agggtaaaaataaaaagcccctgtttgcagacagagactttttatccgaccaagcataagaggtatctaaaaacaaaaagatttcccttatggtataatcgccttaagcaagctatattataccatttcagacaccttctatgcaaggtgttatttttatacccttttttcaatatatttaattaaggagtggttataatatggctgattttgaacatgtaattatctatttaagaaagtcccggtcagatgatccggca

SEQ ID NO: 17515 - DNA, 260 bp, Unknown
  Description of Unknown: LeftRegion for integrase B4516 sequence
cgatctggactaccgcagagcacagacaatcgcaaagaagatgctcgatgacggcctcatttctgtggctgaattcaacaaattaaccgccatcaatcgggaaactttctctcccttgttcgcggaaataatgccgaaaatcccttgatatgtagtccctttagagtgatgtatagacgtacggaaaggaggtacttcccttgaaaaaagttacgaaaatcgcggaaacaacgagcgcaaacgttaaactcaagaagatc

SEQ ID NO: 17516 - DNA, 260 bp, Unknown; identical to SEQ ID NO: 13422
  Description of Unknown: LeftRegion for integrase B4517 sequence

SEQ ID NO: 17517 - DNA, 260 bp, Unknown
  Description of Unknown: LeftRegion for integrase B4518 sequence
attatgattatttcagagcacaggaagtcgtaaaatcgatgctggattctggacttatttccttgttggaattcaacaaattaacgctccttaaccgccaaacattctcaccgctatatgtagaaataatgccggaaataacttgataaatacagcttttagagtgatgtatatacactgacgaagggaggtgaactaccgtgaagaaggttacaaaaatcgacaaagtaccgaatgtaacaagcaaaaaacagaagctt

SEQ ID NO: 17518 - DNA, 260 bp, Unknown; identical to SEQ ID NO: 17456
  Description of Unknown: LeftRegion for integrase B4519 sequence

SEQ ID NO: 17519 - DNA, 260 bp, Unknown; identical to SEQ ID NO: 17488
  Description of Unknown: LeftRegion for integrase B4520 sequence

SEQ ID NO: 17520 - DNA, 260 bp, Unknown
  Description of Unknown: LeftRegion for integrase B4521 sequence
gcggtattattactcaagaagaatttgaccagaaaaaatcagaacttttataaaaagaaccggctcctgctaccaacgggaaccggttttttgaaaaataagacaatctcggtgataatcttacctacacattaagtatatcatctccgggattgccgtacaagtgtaaaaaaggagaatgatgaaatgaatgaatcagtatgcatctatttaaggaaatccagagcgatcgggaagctgaagcacatggagagggcgaa

SEQ ID NO: 17521 - DNA, 260 bp, Unknown; identical to SEQ ID NO: 14232
  Description of Unknown: LeftRegion for integrase B4522 sequence

SEQ ID NO: 17522 - DNA, 260 bp, Unknown; identical to SEQ ID NO: 17492
  Description of Unknown: LeftRegion for integrase B4523 sequence

SEQ ID NO: 17523 - DNA, 260 bp, Unknown; identical to SEQ ID NO: 17479
  Description of Unknown: LeftRegion for integrase B4524 sequence

SEQ ID NO: 17524 - DNA, 260 bp, Unknown
  Description of Unknown: LeftRegion for integrase B4525 sequence
tgttctgtttatccgattcaccttacccaaaagtagagatttccctaacaggaaaagagaaaatccttattgacgcataccgtgctgctgatgacatgggacagttgaacataatctatgtctgcctggatgaaatgaaaaaagcaaaaggggacagcgaaagtgccgtgtgattgattttgtagagtggaggaagaaccatgtatgaggatataaaaacagcctgcctatatgttagattctcaagccataaccagact

SEQ ID NO: 17525 - DNA, 260 bp, Unknown; identical to SEQ ID NO: 17488
  Description of Unknown: LeftRegion for integrase B4526 sequence

SEQ ID NO: 17526 - DNA, 260 bp, Unknown; identical to SEQ ID NO: 17455
  Description of Unknown: LeftRegion for integrase B4527 sequence

SEQ ID NO: 17527 - DNA, 260 bp, Unknown; identical to SEQ ID NO: 17455
  Description of Unknown: LeftRegion for integrase B4528 sequence

SEQ ID NO: 17528 - DNA, 260 bp, Unknown
  Description of Unknown: LeftRegion for integrase B4529 sequence
catcgtcaataaaacttaaattaaaaaccgctcctgcgccaacagaaacggtcttaaatgtacatccgaagatatacacttttactttggtcggtaatattgtatcatctttggaacagtcacgcaagcggaacacttgttctttgctggctgttatttttgtaccttattttgcgtacacttaaaaggaggatgatattatgtatgaattaggggaatatcttatctatcttcgaaagtcaagaagtgattccgaacta

SEQ ID NO: 17529 - DNA, 260 bp, Unknown
  Description of Unknown: LeftRegion for integrase B4530 sequence
tatgaaaaagttaattgttgctgcattgttggctttgtgtattatgccagcagccaaataaaaaaagcccctatcaaggggctttatttctacctaaaacaaaaataaccgccatggatagcggcctcggcggttattttaagatatacattttattatttttactaaattaattatatcactaaaaggaacattacacaatgacaaaagacttacaaacaggcgttatatacgccagatattcaagcgataaacaaaga

SEQ ID NO: 17530 - DNA, 260 bp, Unknown
  Description of Unknown: LeftRegion for integrase B4531 sequence
acagccacattccgcttcttgaccgtgtgtctgctgccggtattgttatggatatctaccggatgcgccgtgccagagatgagcttaccggtcccgatgaccctctgcctgatgaggatattgtccaaaaggcagttgattctggaagagaatccgtgtatgttaaaaaagagaattattaaacttagggggaattaaatatgtatcgagaactttcttatcgttctgatgagatcatcgagtacctgcgaaaatccagg

SEQ ID NO: 17531 - DNA, 260 bp, Unknown
  Description of Unknown: LeftRegion for integrase B4532 sequence
tgttctgtttatctgattcaccttacccaaaagtagagatttccctaacagaaaaagagaaaatccttattgacgcataccgtgctgctaatgacatgggacagttgaacataatctatgtctgcctggatgaaatgaaaaaagcaaaaggggacaacgaaagtgccgtgtgattgatttagtagagtggaggaagaaccatgtatgaggatataaaaacagcctgcctatacgttagattttcaagccataaccagact

SEQ ID NO: 17532 - DNA, 260 bp, Unknown; identical to SEQ ID NO: 13171
  Description of Unknown: LeftRegion for integrase B4533 sequence

SEQ ID NO: 17533 - DNA, 260 bp, Unknown
  Description of Unknown: LeftRegion for integrase B4534 sequence
cgaacaatagataccctatggatatggtatctataccgtatctatagggtagcgatacatcgcgtgcgcgcgtgcgtgtgcgcgcgatcgtgcgcgcactgtctctgtacctgtatctgtatctgagactgtatctgtaatctgtttctgattctgaatatctactactgcaaatctatcgttagaagggggtggcgctgttgccgagaaaacctgcaaagcacccggcgaagccgaagcggggcaagaagctggaaatc

SEQ ID NO: 17534 - DNA, 260 bp, Unknown; identical to SEQ ID NO: 13377
  Description of Unknown: LeftRegion for integrase B4535 sequence

SEQ ID NO: 17535 - DNA, 260 bp, Unknown; identical to SEQ ID NO: 17473
  Description of Unknown: LeftRegion for integrase B4536 sequence

SEQ ID NO: 17536 - DNA, 260 bp, Unknown
  Description of Unknown: LeftRegion for integrase B4537 sequence
tgcgcttcattgtaagggaggacttaaatggaagcggaagagaacggcgcgaataatgaattattatatctttcggcgtggagtattatgagaaaagcctataaagcagggaatatcgaatattccgtgttgaaagaattgaacgaaagagtagcaaaaaggctgtcggtgcgagtaataagtttaagggacgtaagaaaatgagtttggctaatgattataaaggtatatccgatagagtaacggtaattgcggcaacc

SEQ ID NO: 17537 - DNA, 260 bp, Unknown
  Description of Unknown: LeftRegion for integrase B4538 sequence
ccctgacaaagattaggacgactattccaatagttacttaaaccgcccctgcgtaagcaggaacggtctttaagatgctatacagaccaaaggtcaatatagtctaccctgaacaagtagattatatcacaaacctttggcacctgtacaggtgtattttttatactcttttttcataaatttacaaaggaagtgatagaatgtcatattgtatttatttaagaaaatcccgaaaggatttagaagcggaacagcacgga

SEQ ID NO: 17538 - DNA, 260 bp, Unknown
  Description of Unknown: LeftRegion for integrase B4539 sequence
ctcctgaatcttgtaacgacaagaaaatgcgttttaaagatgcacttcttgctttaaaagatgaatctatgcccccaaaagaaaaaaatcatttattaaagaaatgtatagaaagaattgattatgatatagagggagtaagatatcactcaaaagtcaaattggatgtttattttaaattttaagcgaggtgtttcaaaatgcaggaaaatgaaacttatgtaatctatttgagaaagtctcgtgcagatagcgaaaaa

SEQ ID NO: 17539 - DNA, 260 bp, Unknown
  Description of Unknown: LeftRegion for integrase B4540 sequence
aggatgctttgatccaaaaggtcggtaatcagtaaaataaaatctgccccggtattggcgtaccggagcagatcaggaatcatatcgggagtaccgatataactcacctcgcaagtgaaattgtatcattctcccggtaaaattacaagcaccgggtatttttatgccctgctgccataaaatatacgggaggaatggatatgttcactgtaggaatctatgcccggaagtccgtttaccgtgacaactcggactctgtc

SEQ ID NO: 17540 - DNA, 260 bp, Unknown
  Description of Unknown: LeftRegion for integrase B4541 sequence
ttttgctgacatcagaaaaatagataaactaaaaaccgtccagttgcagctggacggaataaaaagaaaaactacttgcatctataggttagatgtgtacttttccccgacagttaaagtataccatttttaacctacactttgcaagaagtgtattttttgtacccaaataatcaaaatatggaaaggaacgatggtatatgaacataggaaatcagttaggaaaactaaaaaaatcagatcaattctgcatttaccta

SEQ ID NO: 17541 - DNA, 260 bp, Unknown
  Description of Unknown: LeftRegion for integrase B4542 sequence
aaagcccttgtgctggtaacacaagagcctttatataacgacacttacataagcataaagctccaatgataaatatcgccctaagcaagcatattatatcacctggagcaccgcttatgcaagtggtgttatttttgtactcatttttaaggttgtattgttgcagcttatatattcaagagaaagaaggttgaaataatatgctatcttttaataatattattatttatcttaggaaatcacgctctgatgaccctacg

SEQ ID NO: 17542 - DNA, 260 bp, Unknown
  Description of Unknown: LeftRegion for integrase B4543 sequence
gacagattccgaatatttgcggaggttattatggaattacggaacgacgatgccagggaatggatcgcccgggcggagcggaactggatcaaagcgtgcgccctgtacggtgaagaccatccgatctcaaaggcatacctgaaagatctggaaaaccgggagaacgctgatcgaattttaaaagagttggaggactagatatgagaatcgcaatctatgctcgaaaaagcgctttttccgataaaagcgaaagcgtgcac

SEQ ID NO: 17543 - DNA, 260 bp, Unknown
  Description of Unknown: LeftRegion for integrase B4544 sequence
aaaaaacaaactatctgatcgtcgggaacgaagggaatccgtgttgggcgtattcctgctacggccgcaaggtggatgctgcgatcaagctgcgcaaatccggcatcccgattgtgattgtgaacgaaacggatttctgggatatcctcgaagatctgtagcaacgctgatcgaattttaaaagagttggaggactatatatgagaattgcaatctacgctcgtaaaagcgcgttttccgataaaagcgaaagcgtgcac

SEQ ID NO: 17544 - DNA, 260 bp, Unknown
  Description of Unknown: LeftRegion for integrase B4545 sequence
taaaaagactatgttttgacattgattttggaacaaaagtgctaaaaaagaaaggtgcaaattatcatatagctattagcagcattctcagcgcatatcaaagaataagaaagctatgcggatatacagatcccataagaataaattggagtttttctttatcgctcgatcaagtccttccagattatgaggggtaatatatggcgcgtaaaacagataaaccattgtcaaatattgcagttatatacgctcggttctcc

SEQ ID NO: 17545 - DNA, 260 bp, Unknown
  Description of Unknown: LeftRegion for integrase B4546 sequence
aatgccccggcgttttcgtgtttagctacgaattaaacgaagtgcgcgacacggacacataccagttaagccccgtttggcgcggttatctcaataggcaccgccgatacttggaatagatagaaaaatgccctgcaacgggcacaaccattgcagggctgtttgtccgctaccaacgaacaaagcaaggtgattttaacatggaaaagaaacgcgccgctatatacgcccgcttttcgtcgcacaatcaacgttccgaa

SEQ ID NO: 17546 - DNA, 260 bp, Unknown
  Description of Unknown: LeftRegion for integrase B4547 sequence
ctcctgaatcttgtaacgacaagaaaatgcgttttaaagatgcgcttcttgctttaaaagatgaatctatgcccccaaaagaaaaaaatcatttattaaagaaatgtatagaaagaattgattatgatatagagggagtaagatatcactcaaaagtcaaattggatgtttattttaaattttaagcgaggtgtttcaaaatgcaggaaaatgaaacttatgtaatctatttgagaaagtctcgtgcagatagcgaaaaa

SEQ ID NO: 17547 - DNA, 260 bp, Unknown
  Description of Unknown: LeftRegion for integrase B4548 sequence
gcaccatcaattgcctgcgggccaaccaaatggccgtggcgctctttgatgccggacttattacggctgatgagctgactgctttgaaggctgctaaccagcgcagttttgccgcatatttatcagatttatattgatattcgacttgctatatcagttcgtttattggatatatacgtatggaaagtaggtgaaaactgatgaaaacagtaacaaaaatcatgccggacaaaccgaagaaaaagaagctccgtgtggca

SEQ ID NO: 17548 - DNA, 260 bp, Unknown
  Description of Unknown: LeftRegion for integrase B4549 sequence
gcaataaggaacataagaagctgaaacagctccgaatatgtaaccatagcaccacctcccttcatcagggatggtgggaataaccgccaaccgcggacgcggctgcgccttattttaagaatattataatagccgacaaaatacaagaaaaaatcccgcccctttcccgggcgggaatattactatctgagggtgaaaccatgtcttacgcaatatacctccgaaaatcacaggctgatttagaggcggaagcctccggc

SEQ ID NO: 17549 - DNA, 260 bp, Unknown
  Description of Unknown: LeftRegion for integrase B4550 sequence
atttacaaatggggacattgagtccacataacgaaagctgtcggtcatatcagctaaataattcacatctcttctcgattatcatacacctcgaagatctaccaaattcgctctaatcaatgataaaacagttgaattcggttgaaatttgatcaattttatccactacattgtattgaatcatccatgaggtttcgtgcatggctagcgaaaatgacaaaaatcatagagttagggtcgcgcagtacttgaggatgtct

SEQ ID NO: 17550 - DNA, 260 bp, Unknown
  Description of Unknown: LeftRegion for integrase B4551 sequence
ttttgctgacatcagaaaaatatataaactaaaaaccgtccagttgcagctggacggaataaaaagaaaaactacttgcatctataggttagatgtgtacttttccccgacagttaaagtataccatttttaacctacactttgcaagaagtgtattttttgtacccaaataatcaaaatatggaaaggaacgatggtatatgaacataggaaatcagttaggaaaactaaaaaaatcagatcaattctgcatttaccta

SEQ ID NO: 17551 - DNA, 260 bp, Unknown
  Description of Unknown: LeftRegion for integrase B4552 sequence
tgataggggtaaaaaaatctataccgaataccttaaaaataaggagtgtgaaaaatcgggaaccccttaattcctgctggctgttttctaatcataaaaaatgcgatttagcactttaaagcgttgacaaattgttttaaaagtggtatactattaaatatagaaggcaattgacaaagcagtaagacaggaggtatataatgataaaggcagtaatttatgcacgatactcttgtgacaaccagagagaagagagtatt

SEQ ID NO: 17552 - DNA, 260 bp, Unknown
  Description of Unknown: LeftRegion for integrase B4553 sequence
ttttgctgacatcaggaaaatggataaaataaaaaaccgcccagctacaactggacggaataaaaagaaaaactacttgcatctataggttagatgtgtacttttccccgacagttaaagtataccatttttaacctacactttgcaagaagtgtattttttgtacccaaaaatcacaatatagaaaggaaaaatggtatatgaacttagcagaacaattagggttaactgaatcagatcagttttgcatttatttaaga

SEQ ID NO: 17553 - DNA, 260 bp, Unknown
  Description of Unknown: LeftRegion for integrase B4554 sequence
aaaaaacaaactatctgatcgtcggcaacgaagggaatccgtgctgggcgtattcctgctacggccgcaaggtggatgatgcgatcaagctgcgcaaatccggtattccgattgtgattgtaaacgaaacggatttctgggatatcctcgaagatctgtagcaacgctgatcgaattttaaaagagttggaggactatatatgagaattgcgatctatgctcgaaaaagtgctttttccgacaaaagcgaaagcgtgcac

SEQ ID NO: 17554 - DNA, 260 bp, Unknown
  Description of Unknown: LeftRegion for integrase B4555 sequence
atttacgaatcgataccttgaggccacataacgaaagctgtcggtcatatcagctaaataattcacatctcttctcgattatcatacaccttgaagatttactaaattcgctctaatcaatgataaaacagttgaatttggttaaaaattgatcaattttatcctctacattgtattgaatcatccatgaggtttcgtgcatggctagcgaaaatgataaaaatcataaagttagggtcgcacagtacttgaggatgtct

SEQ ID NO: 17555 - DNA, 260 bp, Unknown
  Description of Unknown: LeftRegion for integrase B4556 sequence
gtccgacgacccatccgctcctgataatgatataatcgacagaagtgaagttgcgggcacatcaagctatcctcaaaaaacagaaaagaagtcctggatttactccgataatgttggcttattagtctttcttttggttggtgttatcgccctgtttctgtggctattggacaaactgattcaaaaaaggagataattccgtgaaaacctatacgcccaccgactacgccctgtacctccgcaaatcccgtgccgacctc

SEQ ID NO: 17556 - DNA, 260 bp, Unknown
  Description of Unknown: LeftRegion for integrase B4557 sequence
tctcattaataaaaactaattttttacattaaaaagccgcccggctgcaaccaggcggaataaaaagaaaactacttgcatctattggctagatgtgtacttttccccgacagttaaagtataccatttttagcctacactttgcaagaagtgtattttttgtacccaaataatcaaaatatggaaaggaacgatggtatatgaacataggaaatcagttaggaaaactaaaaaaatcagatcaattctgcatttaccta

SEQ ID NO: 17557 - DNA, 260 bp, Unknown
  Description of Unknown: LeftRegion for integrase B4558 sequence
aaacgattaccttttgaatatcgagatatacaataatctgattcttgcaagatacaatataattcacttctgcttccataatatcctccctatatatggcggttattatgaaatttgttgggtgtgtgatcacgattatattgtaaggcaaatattggtaattttaaactggtatttaattccagtgcggaggtttatgtatgaaaacagcgtatggatatggtaggttcagcactgatcggcagcgtgaagaatcaatc

SEQ ID NO: 17558 - DNA, 260 bp, Unknown
  Description of Unknown: LeftRegion for integrase B4559 sequence
caagtccgacgccagagaacggcaggaatacatcgaaagcgtatgggaagacggcgggctcctgcatcaggatcagtatatctaccgcgccgggacggctcttctgcgtgtaacctatcagatcacgccggatcaggctgcagcctatgaaaaagcgttctatgagatcatgggcgtggattctgggaagtaggcgcatcatgagaatcgcaatctacgctcgtaaaagcgcgttctccgataaaagcgaaagcgttcac

SEQ ID NO: 17559 - DNA, 260 bp, Unknown
  Description of Unknown: LeftRegion for integrase B4560 sequence
ctgaataaaaaaagaaatcgccaccccgttggctcagggtggctcgcatatccgaagatatactatatctgattgttcaagtcatattgtatcatcttcggagcagtcttgcaagcggaactgttgttctgtgcttggctgttatttttatacccatttttgtgcgacgtcgcgcatatatactaaggaaggtgatacatatgcaatacgaagaatatcttatctatctccggaaatcccgaagtgatgcctcactggaa

SEQ ID NO: 17560 - DNA, 260 bp, Unknown
  Description of Unknown: LeftRegion for integrase B4561 sequence
aatttcataaataaaaccgctcctgcgccaacaggaacggcttaaagactaatgccccgaaggatacaccagtacgttcaataattagtgtatcatcttcgggcagctatcgcaagcggaacacttgttcctcgctggctgttatttttatacgcaaaattgtgcgacgtcgcacatatatactaaggagggtgatacatatgcaatatgaagaatatcttatctatctccggaaatcccgaagcgatgcctcactggaa

SEQ ID NO: 17561 - DNA, 260 bp, Unknown; identical to SEQ ID NO: 17546
  Description of Unknown: LeftRegion for integrase B4562 sequence

SEQ ID NO: 17562 - DNA, 260 bp, Unknown
  Description of Unknown: LeftRegion for integrase B4563 sequence
tgaacaaaaataacgcagaaaaccgcccggtgctaccaacaccgaacggctttccatagatcatctcttcccggatcgctccaaaaagatacaatcagcttgaacacctgaattatatcatctctggagcgccccggtcaagaggcgtattttttgcacccaaaaacatatttttataacacagggtatcaggtgatataatggaaaatcaaatcaaaacggcagctctctacatccgggtctccaccgacaaacaggaa

SEQ ID NO: 17563 - DNA, 260 bp, Unknown
  Description of Unknown: LeftRegion for integrase B4564 sequence
tatctattctcaggacacatgcaaaaatacatagacagcggcaaggaaaagcactacagctctgccatgaaagatctgtctgccgcttcatctgcaaaatctgacattgatacagcgcgcaaggcttttttgaagtcggccggattttctgcggatgaaatttctgaaatcgttgattctgaaaaatagaggtggtatgtatgagaatcgcaatctatgctcgaaaaagtgctttttccgataaaagcgaaagcgtgcac

SEQ ID NO: 17564 - DNA, 260 bp, Unknown
  Description of Unknown: LeftRegion for integrase B4565 sequence
gatgccttgatccaaaaggtcggtaaccagtaaaataaaatctgccccggtacgccaataccggagcagagctggaactatatcgggagtaccgatataactcaccgtaagcaagtgaattatatcatactttccggtgaaaatacaagcaccgggtatttttatgccctgctgccatagaatatacgggaggaatggatatgttcactgtaggaatctatgcccggaagtccgtttaccgcgacaactcggactccgtc

SEQ ID NO: 17565 - DNA, 260 bp, Unknown
  Description of Unknown: LeftRegion for integrase B4566 sequence
taaaaaaatgctgtcggacggagttattaacgaaagggtttttatgaggctcaacgagaaaatagcaagcaggcagaattgcccgtcattttctcattaacctaaaatgccggggttccggcattctacataatcgcacatttcacaaatatcggattatgccgtacaattttgaaaagaaacatcagggagtgaaacaaatgcaggaagcaattaaaaaggatgtaaagataattcgtccgacaaaggggttgtgcggt

SEQ ID NO: 17566 - DNA, 260 bp, Unknown
  Description of Unknown: LeftRegion for integrase B4567 sequence
ggcaagaacgataacggctcgcacggcaccgtgtcgtaccttcgcgacgggtcgatggggaaggccgttatccattactggcgcaaccatgtgtactatggcgcgtatttcaagattatcgacggcgctatagccttgaatgtgctgaattacagggcaacgcctaacgatgaccccgtagagctgtacagggcgtagccatgggcggacgtgcggcgatatacgcccgcttctccagccacaaccagcgcggcgagtcc

SEQ ID NO: 17567 - DNA, 260 bp, Unknown
  Description of Unknown: LeftRegion for integrase B4568 sequence
caactatatttatatccccttttattgacacactttctgtcatccactaatatatatatataatattctattttactataaaataaatgatatttacatacctttttgagtaaaaacacttttaatagttattgtagcaaattacgatatttttttcaaatcaataattttatcaaataaaaatcaaaggaggtcaccacatggtagccatatatgtccgccaatcactcgacaaaaaagactccctctccatcgagtca

SEQ ID NO: 17568 - DNA, 260 bp, Unknown
  Description of Unknown: LeftRegion for integrase B4569 sequence
aaggtttccacgccgggaaactataagcatttgtcggcacgccggcaaaagaagttgcccgaaggcgaatcatagccgcgcctgcggaacggcgaacgctcctcgggcattgccgttcccatttcgtccccagcgactgcatagaatctatcaatcacttgcttccgctacggcgggaaaccgagaaaccaggaggccctatgtccaagctctattgcatgtatctccgcaagtcccgcgccgatctggaggccgaggca

SEQ ID NO: 17569 - DNA, 260 bp, Unknown
  Description of Unknown: LeftRegion for integrase B4570 sequence
acaatataaagaagttgattcgtttcaatacatttagcgaagctcaggattataaaagtagtaattatcaataaataaattttgtgaattccaacttagaagaatatctctaaggattcaacctttggaaaagccatttagggctttttctatttattctaatgtgtattgcttgtttaattatgtatagaggtgatgtaatgaattatcgtagtttcgaaatgcgattattggtctaccttagaaaaagccgttctgac

SEQ ID NO: 17570 - DNA, 260 bp, Unknown
  Description of Unknown: LeftRegion for integrase B4571 sequence
atttacggatgggtaacttgaggccacataccgaaagctgttggtcatatcagctacataattcacatatcttctcgattatcatacacctcgaagatttactaaattcgctctaatcaatgataaaacagttgaaattggttagaaattgatcaattttatcatctacattgtattgaatcatccatgaggtttcgtgcatggctagcgaaaatgataaaaatcataaagttagggtcgcacagtacttgcggatgtct

SEQ ID NO: 17571 - DNA, 260 bp, Unknown
  Description of Unknown: LeftRegion for integrase B4572 sequence
ctacaataaaatagaaatcgccaccccgttggctcagggtggctcgcatatccgaagatatactatatctgattgttcaagtcatattgtatcattttcggagcagtcttgcaagcggaactgttgttctgtgcttggctgttatttttatacccatttttgtgcgacgtcgcacatatatactaaggaaggtgatacatatgcaatacgaagaatatcttatctatctccggaagtccagaagtgacgcctcgcttgaa

SEQ ID NO: 17572 - DNA, 260 bp, Unknown
  Description of Unknown: LeftRegion for integrase B4573 sequence
gtacgacgacccatccgctcctgataatgatatcatcgacagaagtgaagttgcgggcacatcaagctatcctcaaaaaacagaaaagaagtcctggatttactccgataatgttggcttattagtctttcctttggttggtgttatcgccctgtttctgtggctattggacaaactgattcaaaaaaggagataattccgtgaaaacctatacgcccaccgactacgccctgtacctccgcaaatcccgcgccgacctc

SEQ ID NO: 17573 - DNA, 260 bp, Unknown
  Description of Unknown: LeftRegion for integrase B4574 sequence
ctcctgaatcttgtaacaacaagaaaatgcgttttaaagatgcacttcttgctttaaaagatgaatctatgcccccaaaagaaaaaaatcatttattaaagaaatgcatagaaagaattgattatgatatagagggagtaagatatcactcaaaagtcaaattggatgtttattttaaattttaagcgaggggtttcaaaatgcaggaaaatgaaacttatgtaatctatttgagaaagtctcgtgcagatagcgaaaaa

SEQ ID NO: 17574 - DNA, 260 bp, Unknown
  Description of Unknown: LeftRegion for integrase B4575 sequence
accaggaagaattgctagattatataagaaattaaataaattgggataaaaagagaattatgttccaaagtttgcgacacggtacataattctcactataaaaaatccttgaataaggtctttttatgttatttattataacatattaaaaacccttttttcaagagattatttaaaaaaatgaaagaaggtatttttatatggaaaaattaataaataataatatggaatattattgtgcatacttgagaaaatcaaga

SEQ ID NO: 17575 - DNA, 260 bp, Unknown
  Description of Unknown: LeftRegion for integrase B4576 sequence
tctcctttatatatatgtatatattatatccgagagccaagaaattatacaatataataaaaggttgtcgcctgtgggtagcaagcaacaacctttgtgtccttgtagagtaaacaaggaatatgaacaccttgctattatagcacttttcttttgtttactctactattttattaaacaagaaaggaaactaaagtgttatgtctattatgtcttttagtaatattattatctatcttagaaagtccagagcagacgac

SEQ ID NO: 17576 - DNA, 260 bp, Unknown
  Description of Unknown: LeftRegion for integrase B4577 sequence
caagtccgacgccagagaacggcaggaatacatcgaaagcgtatgggaagacggcgggctcctgcatcaggatcagtatatctaccgcgccgggacggctcttctgcgtgtaacctatcagatcacgccggatcaggctgcagcctatgaaaaagcgttctatgagatcatgggcgtggattctgggaagtaggcgcatcatgagaatcgcaatctatgctcgaaaaagtgctttttccgataaaagcgagagcgtgcac

SEQ ID NO: 17577 - DNA, 260 bp, Unknown
  Description of Unknown: LeftRegion for integrase B4578 sequence
ctttgttactcaaaaataaaacggaaaaaccgctcctgctaccaacaggaacggcttaatgaatactatacagtgccaagacacgtacaataccccgtgacaagagtattgtatcacatttccttggcacctgtacaggtgtattttttatacccatttttgtgcgacgtcgcacatatattacaaggaaggtgatacatatgcaatacgaagaatatcttatctatctccggaaatcccgaagtgatgcctcactggaa

SEQ ID NO: 17578 - DNA, 260 bp, Unknown
  Description of Unknown: LeftRegion for integrase B4579 sequence
ctcctgaatcttgtaacaacaagaaaatgcgttttaaagatgcacttcttgctttaaaagatgaatctatgcccccaaaagaaaaaaatcatttattaaagaaatgtataaaaagaattgattatgatatagagggagtaagatatcactcaaaagtcaaattggatgtttattttaaattttaagcgaggtgtttcaaaatgcaggaaaatgaaacttatgtaatctatttgagaaagtctcgtgcagatagcgaaaaa

SEQ ID NO: 17579 - DNA, 260 bp, Unknown
  Description of Unknown: LeftRegion for integrase B4580 sequence
cttttgttctaccaatacaagagctcggactttgtctatagtcaaaaagcaggggaattccctgctttttgattttatctgattatttgttaccgcgtttcatgtttttcttttcttcgacaagtttttattgactttttttattccgttgcagataatcaagtaggaagtgagaaagttctatttaaggaggttaaactatggatttatatgcccaatatttaagaaaatcccgtgctgatgttgaagccgaacagcat

SEQ ID NO: 17580 - DNA, 260 bp, Unknown
  Description of Unknown: LeftRegion for integrase B4581 sequence
aaagcccttgtgctggtaacacaagagcctttatataacgacacttacataagcataaagctccaatgataaatatcgccctaagcaagcatattatatcacctggagcaccgcttatgcaagtggtgttatttttgtacttatttttaaggttgtattgttgcaacttatatattcaagagaaagaaggttgaaataatatgctatcttttaataatattattatttatcttaggaaatcacgctctgatgaccctacg

SEQ ID NO: 17581 - DNA, 260 bp, Unknown
  Description of Unknown: LeftRegion for integrase B4582 sequence
cttttttggtaatgtatttgacagtgatacggcttcgtgcttcgtaagtgaggccttagcccaagagctgtcagtgtatgctggcggctctttttgttttaagcaggtagtttatcgagtgaaaaaaagaaagggccccttgctctaaatcttggcggattcgcaagggaccgaagcaccgacccaaaaggagtcgatagatggattctatcatgaattcggcagatcgccgtacatgggcatgctgcgcatacttgcgc

SEQ ID NO: 17582 - DNA, 260 bp, Unknown; identical to SEQ ID NO: 17538
  Description of Unknown: LeftRegion for integrase B4583 sequence

SEQ ID NO: 17583 - DNA, 260 bp, Unknown
  Description of Unknown: LeftRegion for integrase B4584 sequence
caagtccgacgccagagaacggcaggaatacatcgaaagcgtatgggaagacggcgggctcctgcatcaggatcagtatatctaccgcgccgggacggctcttctgcgtgtaacctatcagatcacgccggatcaggctgcagcctatgaaaaagcgttctatgagatcatgggcgtggattctgggaagtaggcgcatcatgagaatcgcaatctatgctcgaaaaagtgctttttccgataaaagcgaaagtgtgcac

SEQ ID NO: 17584 - DNA, 260 bp, Unknown
  Description of Unknown: LeftRegion for integrase B4585 sequence
tatagataccctatctatacggggaaactcaaacgctgataccgtatcgatacatcgcgtgcgcgcgtgcgtgtgcgcgcgatcgcgcgcgcactgtctctgtatctgtttctgtatctgtttctgtttctgtttctgtttctgtaatctgtttctgagactatcttaggaagactatcttgtagaaggaggtggcgctgttgccgaaaaaggctccgaagcatcccgcgaagccaaagcggggaaagaagctggaaatc

SEQ ID NO: 17585 - DNA, 260 bp, Unknown
  Description of Unknown: LeftRegion for integrase B4586 sequence
ggaagccatgcaaaactaagcataattcataataaaaaccgcccagctaccaactggacggaatttagaagcctatcaactactttgcagtgtatgatataacttctgcctcaacaccagaattatatcatacatcctgcaaaaacacaatttgatgagggtgtattttttgtaccctttttagaaaggaatgatgatatatgactttagctgaacaattaagactgactgaatcagatcagttctgtatttatcttaga

SEQ ID NO: 17586 - DNA, 260 bp, Unknown
  Description of Unknown: LeftRegion for integrase B4587 sequence
agcccttgtgctaccaacacaagagcctttatataacgacatttacataagcagtgctgctcacgatataatatcgccctaagcaagcatattatatcacctggagcaccgcttatgcaagtggtgttatttttgtacccatttttaaggttgcattcttgcagcttatatatttataagagaaagaaggttgaaataatatgctatcttttaataatattattatttatcttaggaagtcacgctctgatgaccctacg

SEQ ID NO: 17587 - DNA, 260 bp, Unknown
  Description of Unknown: LeftRegion for integrase B4588 sequence
atttataaataaaaaccgcccctgttggcgcaaggacggctcaaagactaatgccccgaaggatacaccagtacgttcaataattagtgtatcatcttcgggcagctatcgcaagcagaacatctgttctttgctggctgttatttttgtactcatttttagtgcgacgtcgcacatatatactaaggaaggtgatacatatgcaatacgaagaatatcttatctatctccggaaatcccgaagtgatgcctcactggaa

SEQ ID NO: 17588 - DNA, 260 bp, Unknown; identical to SEQ ID NO: 16547
  Description of Unknown: LeftRegion for integrase B4589 sequence

SEQ ID NO: 17589 - DNA, 260 bp, Unknown
  Description of Unknown: LeftRegion for integrase B4590 sequence
aaaaaacaaactatctgatcgtcggcaacgaagggaatccgtgctgggcgtattcctgctacggccgcaaggtggatgctgcgatcaagctgcgcaaatccggtatcccgattgtgattgtaaacgaaacggatttctgggatatcctcgaagatctgtagcaacgctgatcgaattttaaaagagttggaggactatatatgagaattgcaatctacgctcgtaaaagcgcgttttccgacaaaagcgaaagcgtgcac

SEQ ID NO: 17590 - DNA, 260 bp, Unknown
  Description of Unknown: LeftRegion for integrase B4591 sequence
atttacaaatggggacattgagtccacataacgaaagctgtcggtcatatcagctaaataattcacatctcttctcgattatcatacacctcgaagatctaccaaattcgctctaatcaatgataaaacagttgaattcggttaaaatttgatcaattttatccactacattgtattgaatcatccatgaggtttcgtgcatggctagcgaaaatgaaaaaaatcatagagttagggtcgcgcagtacttgaggatgtct

SEQ ID NO: 17591 - DNA, 260 bp, Unknown
  Description of Unknown: LeftRegion for integrase B4592 sequence
ccatgtcatcgctgccgataaaacgcaccatcggatggtgggccgtcaccagcgcatggacggggacttttggcttctttctttgcgcgtcgagcatcgccgggctgcgggcgacggcgctatgaaccggacggctatccaggattacacctttcttatgatacacttgttcaatctcttcataacccatcataaaccccatgccaaaagcaatctcatacatacgattttctacaaaaattcaatcggttggtgattct

SEQ ID NO: 17592 - DNA, 260 bp, Unknown
  Description of Unknown: LeftRegion for integrase B4593 sequence
atttacgaatgggtaccttgaggccacataacgaaagctgtcggtcatatcagctaaataattcacatctcttctcgattatcatacacctcgaagatttactaaattcgctctaatcaatgataaaacagttgaatttggttaaaaattgatcaattttatcctctacattgtattgaatcatccatgaggtttcgtgcatggctagcgaaaatgataaaaatcataaagttagggtcgcacagtacttgaggatgtct

SEQ ID NO: 17593 - DNA, 260 bp, Unknown; identical to SEQ ID NO: 16880
  Description of Unknown: LeftRegion for integrase B4594 sequence

SEQ ID NO: 17594 - DNA, 260 bp, Unknown
  Description of Unknown: LeftRegion for integrase B4595 sequence
ctgcgtaatatggggtttaaatatacacaccgcaaaagacatacaagatgtgtttgatgtaagttacacagccgccaaaatacgtgctgaacgaatgcaaatattgtacgaaagaaatagatttttgacgagcccgttggaaaaacgggtatatgataggtttgaaccatatataaaagcaaacaggagggcataaggccatgaatgttgttctatatatgagatacagtagcgatagacaaacggagcagtctatagag

SEQ ID NO: 17595 - DNA, 260 bp, Unknown
  Description of Unknown: LeftRegion for integrase B4596 sequence
accatgcaaaaacaagcataattcataattaaaaaaccgcccagctaccaactgggcggaatctcagaagtttatcaactactttgcagctatgatatcacttctccctaaccaagagaattatatcatacatcctgcaaaattacaatttgataagggtgtattttttgtaccctttttttagaaaggaatgatggtatatgaacataggaaatcagttaggaaaactaaaaaaatcagatcaattctgcatttactta

SEQ ID NO: 17596 - DNA, 260 bp, Unknown
  Description of Unknown: LeftRegion for integrase B4597 sequence
tccaacggctccatagccgtggtggagaccgaggactaccgcgcggtcatgcgccgctggtacaagggcagcaccaagctgatgctgtcggcggacagcttcgaggactacgaggacatgattttcggcatggacgacggccccgtgcgcgtgatcggcacggtggtgtggttccaggccgccgacgagatggagtagccgtgggcgggcgcgcggcgatatacgcccgcttctcgagccacaaccagcgcggcgagtcc

SEQ ID NO: 17597 - DNA, 260 bp, Unknown
  Description of Unknown: LeftRegion for integrase B4598 sequence
atgaccgccagcttgttgccggacgggaatccgggaaggattgaaagcgagtacgcgcttttcgaaaacggtgccgcgttcggccactattggaaagtgacttcaaaggtcgttaacggagaactcgtcgtctcccgaatcagcgaaacgagtccgacaggcgatactccgccaactctttacacattaggtaggtagccatgggcggacgtgcggcgatatatgcccgcttctccagccacaaccagcgcggcgagtcc

SEQ ID NO: 17598 - DNA, 260 bp, Unknown
  Description of Unknown: LeftRegion for integrase B4599 sequence
atttacaaatggggacattgagtccacataacgaaagctgtcggtcatatcagctaaataattcacatctcttctcgattatcatacacctcgaagatctaccaaattcgctctaatcaatgataaaacagttgaattcggttaaaatttgatcaattttatcctctacattgtattgaatcacccatgaggtttcgtgcatggctagcgaaaatgacaaaaatcatagagttagggtcgcgcagtacttgaggatgtct

SEQ ID NO: 17599 - DNA, 260 bp, Unknown
  Description of Unknown: LeftRegion for integrase B4600 sequence
caagtccgacgccagagaacggcaggaatacatcgaaagcgtatgggataagggcggctcactgcatcaggatcagtatatctaccgcgccgggacggctctgctgcgtgtaacctatcagatcacgccggatcaggctgcagcctatgaaaaagcgttctatgagatcatgggcgtggattccgggaagtaggcgcatcatgagaatcgcaatctatgctcgaaaaagcgcgttctctgataaaagcgagagcgtgcac

SEQ ID NO: 17600 - DNA, 260 bp, Unknown
  Description of Unknown: LeftRegion for integrase B4601 sequence
ataaaaaccgccctgctaccaacagagacggctatagactaatgtcccgaaggttacactagtacattccaacaaacagtgtatcatcttcgggcagctatcgcaagcagaacaatcgttctatgctagctgttatttttatacccttttttacagatttctgtgtaacatcgcacatatacttacaggaaggtgatatcatgaaaaacgaatattgtatctatctcagaaaatccagaggtgattcccagctagaatct

SEQ ID NO: 17601 - DNA, 260 bp, Unknown
  Description of Unknown: LeftRegion for integrase B4602 sequence
gtggtgtggattggcagcaaaagtctatgacgaggacggcgataagaaagtcaaaccgatttcacccaaattgctggagcagttttgcaaaacagcaccacttatggacagcacagaggttaattatttcagaggcgtatctgaggactgtgaaatgattgatttgaaagacattgaatatatattctaggaggcgctttatggttgctatatatgtaaggcagtcgcttgataaaaaggactctctctctatcgactct

SEQ ID NO: 17602 - DNA, 260 bp, Unknown
  Description of Unknown: LeftRegion for integrase B4603 sequence
atttacaaatggggacattgagtccacataacgaaagctgtcggtcatatcagctaaataattcacatctcttctcgattatcatacacctcgaagatctaccaaattcgctctaatcaatgataaaacagttgaattcggttaaaatttgatcaattttatcctctacattgtattgaatcatccatgaggtttcgtgcatggctagcgaaaatgacaaaaatcatagagttagggtcgcgcagtacttgaggatgtct

SEQ ID NO: 17603 - DNA, 260 bp, Unknown
  Description of Unknown: LeftRegion for integrase B4604 sequence
ttacttttgaaatattaaacaaaaataaaaccgctcctgctgccaacaggaacggcttaatgaatactatacagtgccaagacacgtacaataccccgtgacaagagtattgtaccacatttccttggcacctgtacaggtgttatttttgtactcattttttgtgcgacatcgcatatatactaaggagggtgatacatatgcaatatgaagaatatcttatctatctccggaaatcccgaagtgatgcctcactggaa

SEQ ID NO: 17604 - DNA, 260 bp, Unknown
  Description of Unknown: LeftRegion for integrase B4605 sequence
tctcctttatatatatgtatatattatatccgagagccaagaaattatacaatataataaaaggttgtcgcctgtgggtagcaagcaacaacctttgtgtccttgtagagtaaacaaggaatatgaacaccttgctattatagcacttttcttttgtttactctactattttattaaacaagaaaggaaactaaagtgttatgtctattatgtcttttaataatattattatctacttaagaaagtccagagcagacgac

SEQ ID NO: 17605 - DNA, 260 bp, Unknown
  Description of Unknown: LeftRegion for integrase B4606 sequence
ttaaaaaaagaaatcgccgcccctgttggcgcaaggacggctcaaagactaatgccccgaaggatacaccagtacgttcaataattagtgtatcatcttcggacagctatcgcaagcggaacatccgttctttgctagctgttatttttatacgcaaaattgtgcgacgttgcacatatatactaaggaaggtgatacatatgcaatacgaagaatatcttatctatctccggaaatcccgaagtgatgcctcactggaa

SEQ ID NO: 17606 - DNA, 260 bp, Unknown; identical to SEQ ID NO: 17603
  Description of Unknown: LeftRegion for integrase B4607 sequence

SEQ ID NO: 17607 - DNA, 260 bp, Unknown
  Description of Unknown: LeftRegion for integrase B4608 sequence
gtccgccgacccatccgctcctgataacgatataatcgaccgaagcgaagttgcgggcacatcaagctatcctcaaaaaacagaaaagaagtcctggatttactccgataatgttggcttattagtctttcctttggttggtgttatcgccctgtttctgtggctattggacaaactgattcaaaaaaggagataattccgtgaaaacctatacgcccaccgactacgccctgtacctccgcaaatcccgtgccgacctc

SEQ ID NO: 17608 - DNA, 260 bp, Unknown
  Description of Unknown: LeftRegion for integrase B4609 sequence
gtacgacgacccatccgctcctgataatgatatcatcgacagaagtgaagttgcgggcacatcaagctatcctcaaaaaacagaaaagaagtcctggatttactccgataatgttggcttattagtctttcctttggttggtgttatcgccctgtttctgtggctattggacaaactgattcaaaaaaggagataattccgtgaaaacctatacgcccaccgactacgccctgtacctccgcaaatcccgtgcggacctc

SEQ ID NO: 17609 - DNA, 260 bp, Unknown
  Description of Unknown: LeftRegion for integrase B4610 sequence
aaagtttccacgccgggaaactataagcatttgtcggcacgccggcaaaagaagttgcccgaaggcgaatcatagccgcgcctgcggaacggcgaacgctcctcgggcattgccgttcccatttcgtccccagcgactgcatagaatctatcaatcacttgcttccgctacggcgggaaaccgagaaaccaggaggccctatgtccaagctctattgcatgtatctccgcaagtcccgcgccgatctggaggccgaggca

SEQ ID NO: 17610 - DNA, 260 bp, Unknown
  Description of Unknown: LeftRegion for integrase B4611 sequence
ttgctggccgcaccgagttcgtcggcaccttctcagatcagcgccaagccgttatgaatgacgatttcgcccacctatcggatgccgggaaggacgcggccgccggggcagtgaggggcatacgcgcatccgaaggcgcgcgagttcaagcggcggggctggaagatcatccgatcgccgcatccgcgtaaggcagacccgtgcagctagttccatgtgacagaccaaggcccggcaggcgcgccgtatcctatgcgcgc

SEQ ID NO: 17611 - DNA, 260 bp, Unknown
  Description of Unknown: LeftRegion for integrase B4612 sequence
cggggagattggttctgtagtagcgacaattatattcggcgtcttattcattgcggttttaggttttctaaaatagtaaccgtttttcagccattaaacgcaattttgagagtttttgcatctaatttagccttttaagcataaaattggagccttaattacaaatttaggctcattttcgttagataagaggtgatacgttgagttcggttgataaaatcgccgttatttacgcgcgttattcgtctcacggccagacc

SEQ ID NO: 17612 - DNA, 260 bp, Unknown
  Description of Unknown: LeftRegion for integrase B4613 sequence
cttcgattatcaatacactcgcgcaatgaagacagccacattgatggccgtgagcaagatgttcaggctgataagggcaacggcgactttggtagacatggcggctccttccttctggtcgcaggatatggaaggtgtcgcaaagaaaaagcccccggcagtgtcttggcggacgcagggggctacctcgaaaggatggcatggagtatagcatctgcaagaacccaaggctaggcaagcgcggcgtgtcctatgcccgc

SEQ ID NO: 17613 - DNA, 260 bp, Unknown
  Description of Unknown: LeftRegion for integrase B4614 sequence
cctccagaatcttgtaatgacaagaaaatgcgttttaaagatgcacttcttgctttaaaagatgaatctatgcccccaaaagaaaaaaatcgtttattaaagaattgcatagaaagaattgattatgatatagagggagtaagatatcactcaaaagtcaaattagatgtttattttaaattttaagcgaggtgtttcagatgcaagaaaatgaaacttatgtaatctatttgagaaagtctcgtgcagatagcgaaaaa

SEQ ID NO: 17614 - DNA, 260 bp, Unknown
  Description of Unknown: LeftRegion for integrase B4615 sequence
ctttatatatatgtatatattatatccgagagccaagaaattatacaatataataaaaggttgtcgcctgtgggtagcaagcaacaacctttgtgtccttgtagagtaaacaaggaatatgaacaccttgttattatagcacttttctttagtttactctactgttttaacaattaaataagaaaggaaactaaagtgttatgtctattatgtcttttaataatattattatctacttaagaaagtccagagcagacgac

SEQ ID NO: 17615 - DNA, 260 bp, Unknown; identical to SEQ ID NO: 17540
  Description of Unknown: LeftRegion for integrase B4616 sequence

SEQ ID NO: 17616 - DNA, 260 bp, Unknown
  Description of Unknown: LeftRegion for integrase B4617 sequence
aaagcccttgtgctaccaacacaagagcctttatataacgacatttacataagcataaagctccaatgataaatatcgccctaagcaagcatattatatcacctggagcaccgcttatgcaagtggtgttatttttgtacccatttttaaggttgcattcttgaagcttatatgtttaggagaaagaaggttgaaataatatgctatcttttaataatattattatttatcttaggaagtcacgctctgatgaccctacg

SEQ ID NO: 17617 - DNA, 260 bp, Unknown; identical to SEQ ID NO: 15083
  Description of Unknown: LeftRegion for integrase B4618 sequence

SEQ ID NO: 17618 - DNA, 260 bp, Unknown; identical to SEQ ID NO: 17613
  Description of Unknown: LeftRegion for integrase B4619 sequence

SEQ ID NO: 17619 - DNA, 260 bp, Unknown
  Description of Unknown: LeftRegion for integrase B4620 sequence
caattgttagacactattgaagatgctcaaattcttgtaataaatactgatcgtataacaagagatattcaggaaatgcaaaaaatcttggaaaaatataatgtaataacacccaatatgacttatgagcagcttgtaagcgatattaatgacttaatgggaaatccgctggtataagataactaacatcaatttgtaatatggatattactaacaacttaaaagctgctgctgcatacggaaggtattcaagccactta

SEQ ID NO: 17620 - DNA, 260 bp, Unknown
  Description of Unknown: LeftRegion for integrase B4621 sequence
gaccattaaatcactatgatggagaagatcatgatttaaattaaaaaataagagaaatatgctacaagtttgcgacaaggtacatatttctcacaatataaaaaatccttgaataaggtctttttatgctatttattataacataattaaatgccttttttcaagtgattacaaaaatttttgaaagaaggtatttttatatgaaaaatttaataaataataatatggaaaattattgtgcatacttgagaaagtcaaga

SEQ ID NO: 17621 - DNA, 260 bp, Unknown
  Description of Unknown: LeftRegion for integrase B4622 sequence
atttacaaatgggtaccttgaggccacataacgaaagctgtcggtcatatcagctaaataattcacatctcttctcgattatcatacacctcgaagaactaccaaattcgctctaatcaatgataaaacagttgaattcggttaaaatttgatcaattttatcctctacattgtattgaatcatccatgaggttttgtgcatggctagcggaaatgaaaaaaatcatagagttagggtcgcacagtacttgaggatgtct

SEQ ID NO: 17622 - DNA, 260 bp, Unknown; identical to SEQ ID NO: 17605
  Description of Unknown: LeftRegion for integrase B4623 sequence

SEQ ID NO: 17623 - DNA, 260 bp, Unknown
  Description of Unknown: LeftRegion for integrase B4624 sequence
taaaaagactatgttttgacattgattttggaacaaaaatgctaaaaaagaaaggtgcaaattattatatagctattagcagcattctcggcgcatatcaaagaataagaaagctatgcggatatacagatcccataagaataaattggagtttttctttatcgctcgatcaagtccttccagattatgaggggtaatatatggcgcgtaaaacagataaaccattgtcaaatattgcagttatatacgctcggttctcc

SEQ ID NO: 17624 - DNA, 260 bp, Unknown
  Description of Unknown: LeftRegion for integrase B4625 sequence
atatgcctttcaaataaaaaccgcccctgctggtaacagagacggttgagactaatgccccgaaggatacactagtacgttcgaataatattgtatcatcttcgggcagctatcgcaagcggaacacccgttcctcgctggctgttatttttatacccatttttgtgcgacgtcgcacatatacttaggaaggtgatgttatgaaaaatgaatactgtatctatctgagaaaatcccgtggtgattccgctcttgaagct

SEQ ID NO: 17625 - DNA, 260 bp, Unknown
  Description of Unknown: LeftRegion for integrase B4626 sequence
ccttgcggtctgcgtcgtgtcgttcccggtcggcttgatcgttgtggccattggagcgtaccgggtagcaaaggccggggatatttatgacgctgcggtcgctcggtacgagcagcaaatctcggactatgttgactggctggatgaagtcaacgcaaaataaaaagccgccctcggtgggcggcgggaggttgctctgaatgtgtgcaaaaaagaaaccggccatgcttgagccggatatgcaggatgccgtgatctac

SEQ ID NO: 17626 - DNA, 260 bp, Unknown; identical to SEQ ID NO: 14669
  Description of Unknown: LeftRegion for integrase B4627 sequence

SEQ ID NO: 17627 - DNA, 260 bp, Unknown; identical to SEQ ID NO: 15711
  Description of Unknown: LeftRegion for integrase B4628 sequence

SEQ ID NO: 17628 - DNA, 260 bp, Unknown
  Description of Unknown: LeftRegion for integrase B4629 sequence
acaccacaatagaatattttctaacaggaaaacgccctatatctaatctgactgatatggaaaatcttctattagaagcatacagatcagcagatgtaaaaggacaagctacaatcatccaagtctgcatgaatgaaaaggatgcaaaaggggaaactatcattgcaggataataggcattgaagaatggaggaagaaccatgtacgaagagattaagactgcctgtctatatctgcgatattcaagcagcaaccaaact

SEQ ID NO: 17629 - DNA, 260 bp, Unknown
  Description of Unknown: LeftRegion for integrase B4630 sequence
ctgcgtcatatggggtttaaatatacacaccgcaaaagatatacaagatgtatttgatgtaagttacacagccgccaaaatacgtgctgaacgaatgcaaatattgtacgaaagaaatagatttttgacgagcccgttggaaaaacgggtatacgataggtttgagccatatatacaagcaaacaggagggtataaggcaatgaatgttgttctatatatgagatacagtagcgatagacaaacggagcagtctatagaa

SEQ ID NO: 17630 - DNA, 260 bp, Unknown
  Description of Unknown: LeftRegion for integrase B4631 sequence
ctgcgtcatatggggcttaaatttacacaccgcaaaagacatacaagatgtatttgacgtaagttacacagccgccgaaatacgtgctgaacgaatgcaaatattgtacgaaagaaatagatttttgacgagcccgttggaaaaacgggtatacgataggtttgagccatatatacaagcaaacaggagggtataaggcaatgaatgttgttctatatatgagatacagtagcgatagacaaacggagcagtctatagaa

SEQ ID NO: 17631 - DNA, 260 bp, Unknown; identical to SEQ ID NO: 15711
  Description of Unknown: LeftRegion for integrase B4632 sequence

SEQ ID NO: 17632 - DNA, 260 bp, Unknown
  Description of Unknown: LeftRegion for integrase B4633 sequence
tttctgtaccttgttttctatgcacagcccctttggcttgcagtgatttatgcagccattcgcattcttcctgttctttcctgtattgagattgtccagaaacaaaaacttcgttctggtaagtagtgcttatatttcgtttcgttctgttacaacgtttcagctgtggaaacattctaattttctgaaaggtggtatttatgcctcgcaaaaagaaactgcaagaggtaggcggtcggcgtctggtggcatactatcgc

SEQ ID NO: 17633 - DNA, 260 bp, Unknown
  Description of Unknown: LeftRegion for integrase B4634 sequence
tattatcccgcaatcgtcagccgacagactttttcaaaggcaaatgcagaactgattcgcagagctgagaagcatggcagaggaaagcggctgaaagcaccaacgatctatacggaatttacgcttgctgaaccggaaatgcaatatgacgatccgattgcgcaggcagaatatatgtacagcttgattggggtgataaaatgaatgttatcaaaattcctgccaaaccgcagaaaggtaatactgctgctaaaacggag

SEQ ID NO: 17634 - DNA, 260 bp, Unknown
  Description of Unknown: LeftRegion for integrase B4635 sequence
ttatagtcattttcaagaatttagagatgctacgttcgagggagcatttatgagattcaaaaaagcacttcttggatatggttttaaaaaataataacttgacttttcgcctgaaaactgttgccaactttacttttaaaagtcaagttggcgttacttttttgtgcaaaagtcaagtgtcaagttaaggagatgaacacatgcaaagagcagttatctacgcgcgcttctcttccgacatgcagcgcgaggaaagtatc

SEQ ID NO: 17635 - DNA, 260 bp, Unknown
  Description of Unknown: LeftRegion for integrase B4636 sequence
atttcgagtatgagatggcgcaaaaacttaccagaaacctttatgaaaaaggcatcatttctgttgatgaaatgcacagaatttttgcattgaacaaagaaaacttctccccattttatgcggaaattctggactaattaacttgatattatcgcccgtcagagtgatatatagtactgaccaaactaggaggtgaaacggtggcaaagataacaaaaattgaagctacacaagcgataaaaaagaagatacgagttgct

SEQ ID NO: 17636 - DNA, 260 bp, Unknown
  Description of Unknown: LeftRegion for integrase B4637 sequence
tctgtttggatcgacatccttgaggcggcgcaggcggaaaagctggggtatcaggacggtgacaagtacacgcagaatgacggcgttgtttacatcaacgggtttgacagcccgtctgccctgaacacctttatcgaagacctgcatggctgcgtgaaccgcagcgaagcgatggctgcccaccagcgggaggaacgctgatggctacggtaaaagagattgcgccacacgcactccaaccggaacacctgcgtgtcgcc

SEQ ID NO: 17637 - DNA, 260 bp, Unknown
  Description of Unknown: LeftRegion for integrase B4638 sequence
ggaaaaatgccgtccttcgtccatagactacgatgcgggtattgccatttttgagggttcaggtaaaaagccttacgaaaccacggtaaattcctgcacctgcagagatttctttgtccgccgtttgccgtgcaagcatatctaccggcttcggatggagcttgaaaacagagaagctcgttaaaaatggggggtgttatatggctcgatcaaagaaaactgaatgcttgccacttgagcggatcggcgtgatctatgcc

SEQ ID NO: 17638 - DNA, 260 bp, Unknown
  Description of Unknown: LeftRegion for integrase B4639 sequence
ctgccagttccttttcagctgacaattcattaaacaaatcatctacttcttttttccacttaattatctctaaatctttatttttggctacatttttatagtagtatgctactgcgatagctataacagctactgctgataaaattattaatgtatcacccatattaaacacctcaataattttcaaaggagatgactacatgcaaagagcagtaatctatgcacgcttttcgtctgatatgcagcgcgaagaaagcatt

SEQ ID NO: 17639 - DNA, 260 bp, Unknown
  Description of Unknown: LeftRegion for integrase B4640 sequence
ctctacggaatcaagcggcttttcctcattgatgctggcgtgcaggtcagcaatgaaatcggaatcgccggtaatcgagagcgtcgacgggccgcccttgcgccgcgtcatccgcacccctttttccggtaagatagtgtacaaagatacatcacaagtgttacacttgtgtggaagatcactagaaaggagagtcaaaaatgactcgaaaagtagctatttacctacgaatgagcctcgatatggacggcaagggagcc

SEQ ID NO: 17640 - DNA, 260 bp, Unknown
  Description of Unknown: LeftRegion for integrase B4641 sequence
agataatgaaggtgacaaaatcactagcgatgaacgtgaaatcgtcgataactaccgtgacagctcgccggaatggcaacagaacatttcgatgaccgccagagctgctgcatctgaatcaaaaagaaaataaaaaagccccagcgctaccgtccaaagtctcgcaggggcatacctagaaaaggcaaggtgattttatcatgccaaagggcacgcgtgccgccatctatgcacgttttagctcgcataaccagcgaagc

SEQ ID NO: 17641 - DNA, 260 bp, Unknown
  Description of Unknown: LeftRegion for integrase B4642 sequence
tcatgagcaggagcgctccgaccggtctatcgagcgcgaaacccgccgcgccaatcgcgcaacgctcgccgcctgcattatcggcgcgctgttcatcatttttatttttgttgaccttctctggccgactcgcggctggtttatccactgattgccaaaaataaaaaaagcggccttctggccgtatgggaggtttttctatggttgccgccgcttatgcccgctattcgacggagcggcagaacgaaacgtctatcctc

SEQ ID NO: 17642 - DNA, 260 bp, Unknown; identical to SEQ ID NO: 17636
  Description of Unknown: LeftRegion for integrase B4643 sequence

SEQ ID NO: 17643 - DNA, 260 bp, Unknown
  Description of Unknown: LeftRegion for integrase B4644 sequence
caaaatgtttgtgaaaatgacgatgttataattgtgaaaccaaaagaactcgatcacgctattatccgtagaatcgtaaggaaagaacatttcacggtcttacaatctattgatagtgcttatgattcatttgtttatatcgatgaaagcgaatttaaaataataggtgttgtaacaggaatgtatagaagtttttagttatgaaaaaagccgtaatctatgctcgatattcgagccacaagcagaatgaagaatccatt

SEQ ID NO: 17644 - DNA, 260 bp, Unknown
  Description of Unknown: LeftRegion for integrase B4645 sequence
cttggaatgttggaggactggccgaaggtcagtcgtagtggaagcaaggctgcgctggaagacgcacaggctgaaattgagcggtggaggcaagagttccttgccgggaacatctcggcaaagaaatacgtcaaaatcgcggacgctctcatgtccaaataaaaaagccgccctcggtgggcggcgggaggttgctctgaatgtgtgcgaaaaagaaaccggccacgcttgagccggatatgcaggatgccgtgatctac

SEQ ID NO: 17645 - DNA, 260 bp, Unknown
  Description of Unknown: LeftRegion for integrase B4646 sequence
gcgaatttgattattatagggcacagcaggtgcttgaaaccatgtttatgcttggcatgatttcagtggaggaataccacaaaatatcggactataatcgcaaatctttctatccttttttatctgatattatgagttaaattacttgatatatatacaatagtatgggaatatgtcattgataaaaaagaggtgatcttatgaaaaagttaacaaaaataaagataagggatgctgtgcatcaaaagaaaaagttaaaa

SEQ ID NO: 17646 - DNA, 260 bp, Unknown
  Description of Unknown: LeftRegion for integrase B4647 sequence
aacgaggtgcttaacgccctgcaagataaggggcttgaaatcattcgagtagaaacaaactcggtgcctaaccaaggtattagcggtgctgatcgttacgacacgttgattacgtatagaaaaacagccctgcacacatccgccaagaccagtgcagggcttgccaatccacacaactgaaaaggcaaggtgattttatcatgccaaaaggcacacgtgccgcgatttacgcgcggtttagttcgcataaccaacgaagc

SEQ ID NO: 17647 - DNA, 260 bp, Unknown
  Description of Unknown: LeftRegion for integrase B4648 sequence
agcaggagcttgcctttcgccgtgagaatatgaggagcactgccgagcagatagcgcaggaaacccagcttagacatatctgtcaggagaatcgggacgaatgccctgaaactgcctgagtactgccaaagcttctgatgtacttattttatcacaattcaggggcttttgcaaggcttagttgaaaggaagtgaaatcaatgctttacgcaatatatctcaggaaatcccgggcagaccttgaagcagaagccatggga

SEQ ID NO: 17648 - DNA, 260 bp, Unknown; identical to SEQ ID NO: 13134
  Description of Unknown: LeftRegion for integrase B4649 sequence

SEQ ID NO: 17649 - DNA, 260 bp, Unknown
  Description of Unknown: LeftRegion for integrase B4650 sequence
tgacttgcactaccatcaagcccaagccatcgcagaagattttctagctcgcggactaatcaatcaaagtcagtttgaagaaattgaaaaattaaaccggcaatcattcccaccactattagctgagttaatggtctgaatcgttgctatatcaaggttttagagctaacatcacacactgatgaaaggaggtacataaaatggcaagcgtaactaaacttactaaaccacaatcaaaagtccaggcaaccttacaagta

SEQ ID NO: 17650 - DNA, 260 bp, Unknown; identical to SEQ ID NO: 15711
  Description of Unknown: LeftRegion for integrase B4651 sequence

SEQ ID NO: 17651 - DNA, 260 bp, Unknown; identical to SEQ ID NO: 15240
  Description of Unknown: LeftRegion for integrase B4652 sequence

SEQ ID NO: 17652 - DNA, 260 bp, Unknown
  Description of Unknown: LeftRegion for integrase B4653 sequence
gtgaagaaaacgaagatgaccagatcactagtgacgagcgcgaaatagtagataactatcgcgaaagctcgccagagtggcagcagaacatttcgatgaccgccagggcggcagcatcggaatcaaaaaggaaataaaaaagccccgcgcaaccgtccaaagtctcgcagggcaataccaaaaggcaaggtgattttatcatgccaaagggcacacgtgccgctatctatgcgcgtttcagctcgcataaccagagaagc

SEQ ID NO: 17653 - DNA, 260 bp, Unknown
  Description of Unknown: LeftRegion for integrase B4654 sequence
tcgtttgtaatcttttttactttcttcccattgagtatacagattatcattttgtgatatgagattgtcaatcattccatctttttcttttgatttttctcgatacccgtacgctgccattacagatatcaaaagcactgttattataacaaaatccatacaaaacacctcattactatttgatcaaaggagatgattttatgcaaagagcagtaatctatgcacgcttttccagcgatatgcagcgtgaagaatccatt

SEQ ID NO: 17654 - DNA, 260 bp, Unknown
  Description of Unknown: LeftRegion for integrase B4655 sequence
taaaggaacaaccgcatataaagaagtcattaactttatataatataaaaataaccccttaactgcgccaacagtcaagaggtttgaataagcagagtgtgtgtacactcaaccgcaaatagattgtaccacacctgctgcaattttgcaacgggtatttttatacccttttatcaatataccttaaaaggggcgatatagtggaacaattcgatgttaatgaaataataatgtatctgcgaaaaagccgtgccgatgcg

SEQ ID NO: 17655 - DNA, 260 bp, Unknown
  Description of Unknown: LeftRegion for integrase B4656 sequence
gcagatgtaaaggcttggaaaaagtttattccctactcaaaaataaaagagcttttaaataatggtgtttctacaatagcagagctatcagattcttttgatgtagaagctccatatatggctagatgtatacattattattcaaatgaaagtgatagatttacaaaagaagatatagcataaaaaataggagggaaaatatgtatttagtagcttatgctagatactctagcgataaccaaagagaagagtctataact

SEQ ID NO: 17656 - DNA, 260 bp, Unknown
  Description of Unknown: LeftRegion for integrase B4657 sequence
tttttagagttttataccacaaaaattgccccggtgttggcgcaccagggcaataaaagtaataatatctccgaagagataccatcctttggacaagaattattgtatcatcttcggacagccaaagcaagagaacgaaagttcgctggctgttatttttgtacccatttttcacatacaatacataaggagatgatattatgtcgtattgtatctatctacgaaaatccaggaaagacctggaggcagaacaagccggg

SEQ ID NO: 17657 - DNA, 260 bp, Unknown
  Description of Unknown: LeftRegion for integrase B4658 sequence
attggttcggtaatgattttgaagctgttctaaaacagcttttgagagttttttattgtcagaaaaaacaataatcttgaagttatttttacaccatttctggtaaattttagtattagacattttatttcctttcgttaatagttaacgagaaatggtataatgccattgataaaaaatgatatattgaagagaataatatgctatttaattacacacaacctgaggagaaaattaaggcagcagcctatgtcagaatg

SEQ ID NO: 17658 - DNA, 260 bp, Unknown; identical to SEQ ID NO: 14669
  Description of Unknown: LeftRegion for integrase B4659 sequence

SEQ ID NO: 17659 - DNA, 260 bp, Unknown
  Description of Unknown: LeftRegion for integrase B4660 sequence
ctgcgtcatatggggtttaaatatacacaccgcgaaagacatacaagatgtatttgatgtaagttacgcatccgccaaaatacgtgctgaacgaatgcaaatattgtacgaaagaaatagatttttgacgagcccgttggaaaaacgggtatatgataggtttgaaccgtatatacaagcaaacaggagggtttgaggtaatgaatgttgttctatatatgagatacagtagcgatagacaaacggagcagtctatagaa

SEQ ID NO: 17660 - DNA, 260 bp, Unknown
  Description of Unknown: LeftRegion for integrase B4661 sequence
cttttgtagcaaagccattatcatcattattgctcctgagaaacgcaaaaagccccgcgtcctgctggaacaggatacggggcacgccgacggtattcgcagtaccgtatcggcaatttgtaaatctactgtgcgaggctgatttactatattattataccataaatcagtctcctatatagggaaggactgatttttttatgacaaaaaacaaaaaaactgatactgtaagcgaaaaatgcaaagccgttatctatgcc

SEQ ID NO: 17661 - DNA, 260 bp, Unknown
  Description of Unknown: LeftRegion for integrase B4662 sequence
acctttcgtctgacgagcgcgaaatgattgatcattaccgcgaaagttcgcccgagtggcagcaaaacatcgccatgacagccaaggcagctgcaagggaatcaaaagaagattagacataaaaatgccccgcacctatccgccaagaccagtgcagggcttgccaatccgttcaaatgaaaaggcaaggtgattttatcatgccaaaaggcacacgtgccgccatctatgcacgtttcagttcgcataaccagcgaagt

SEQ ID NO: 17662 - DNA, 260 bp, Unknown; identical to SEQ ID NO: 17634
  Description of Unknown: LeftRegion for integrase B4663 sequence

SEQ ID NO: 17663 - DNA, 260 bp, Unknown
  Description of Unknown: LeftRegion for integrase B4664 sequence
gaaatatatgcaaataatggggtttaaaaggataaaaaaataaaaaaacaccccctgctggaacagggggctgcattaaaaacaagagtacgaaaatgacactgtacgaactcacgccgttttcaatgctacatttattatagcattgaaacccatactccgcaagtgtatttttgtacacagaaggaggatataaggcaatgaatgttgttctatatatgagatacagtagcgacaggcaaacggagcagtctatagaa

SEQ ID NO: 17664 - DNA, 260 bp, Unknown
  Description of Unknown: LeftRegion for integrase B4665 sequence
cttgggatgctggaggactggccgaaggtcagtcgtagtggaagcaaggctgcgctggaagacgcacaggctgaaattgagcggtggaggcaagagttccttgccgggaacatctcggcaaagaaatacgtcaaaatcgcggacgctctcatgtccaaataaaaaagccgccctcggtgggcggcgggaggttgctctgaatgtgcgcaaaaaagaaaccggccatgcttgagccggatatgcaggatgccgtgatctac

SEQ ID NO: 17665 - DNA, 260 bp, Unknown
  Description of Unknown: LeftRegion for integrase B4666 sequence
ctgtaattttcttctcatctgacaattcattaaacaaatcatctacttcttttctccatctaagtatttctaaatctttatttttagctatatttttatagtagtatgctgttgcgatagctataacagctactgctaataaaattattaatgtatcacccatattttacacctcaataattttaaaaggagatgactctatgcaaagagcagttatctacgcgcgcttctcttccgacatgcaacgcgaggaaagtatc

SEQ ID NO: 17666 - DNA, 260 bp, Unknown
  Description of Unknown: LeftRegion for integrase B4667 sequence
aaaacacaaaatatttcaaaagataattacccgcttcaaaataaaaaaaatcccgtgccctgctggaaacaggaacacgggacgcgccggcggtattcgcagtaccgtatcggcaatttgtaaatctactgtgcgaggctgatttactatattattataccataaatcagtctcctatatagggaaggactgatttttttatgacaaaaaacaaaaaaactgatactgtaagcgaaaaatgcaaagccgttatctatgcc

SEQ ID NO: 17667 - DNA, 260 bp, Unknown
  Description of Unknown: LeftRegion for integrase B4668 sequence
aggaaaaatgccgtccttcgtccatagactacgatgcgggtattgctatttttgagggttcaggtaaaaagccttacgaaaccacggtaaattcctgcacctgcagagatttctttgtccgccgtttgccgtgcaagcatatctaccggcttcggatggagcttgaaaacagagaagctcgttaaaaatgggggcattatatggctcgatcaaagaaaactgaatgcttgccacttgagcggatcggtgtgatctatgcc

SEQ ID NO: 17668 - DNA, 260 bp, Unknown
  Description of Unknown: LeftRegion for integrase B4669 sequence
aaaggaatccgagcaagtcggcccaacagtcacctcatttcaacgagaggggtggctgttgggtcaattgttcaaaaagaaaaactgaagataataaaaagtcttgatttctccatcaaaacatggtatatacattatacgaaacaatgctttgaaagaacgtttcaccgttcaatgatgtggaatgagaggtgtccgccatgaccgccgtgatttacgcccgctattccagtgataaccagcgcgaagaatccattgag

SEQ ID NO: 17669 - DNA, 260 bp, Unknown
  Description of Unknown: LeftRegion for integrase B4670 sequence
gtggtggtgctcatcatgagcaccaccacacctgtgattttggatattaagggcagacgaaatcttacctatgctttcagcaaaacaattgctcaaatttccccttgcaatctcacttaagttgtggtatatacattatacgaaagctgcttttaaagaacgttccaccgttcaatgatgtgtaaagtgaggtgcctgccatgaccgccgtaatctatgctcgctattcctcggataaccagcgcgaagaatccattgaa

SEQ ID NO: 17670 - DNA, 260 bp, Unknown
  Description of Unknown: LeftRegion for integrase B4671 sequence
cttggaatgctggaggactggccgaaggtcagccgcagtggaagcaaggctgcgctggaagatgcacaggctgaaattgagcggtggaggcaagagttccttgccgggaacatctcggcaaagaaatacgtcaaaattgcggacgctctcatgtccaaataaaaaagccgccctcggtgggcggcgggaggttgctctgaatgtgcgcaaaaaagaaaccggccatgcttgagccggatatgcaggatgccgtgatctac

SEQ ID NO: 17671 - DNA, 260 bp, Unknown; identical to SEQ ID NO: 17636
  Description of Unknown: LeftRegion for integrase B4672 sequence

SEQ ID NO: 17672 - DNA, 260 bp, Unknown; identical to SEQ ID NO: 16986
  Description of Unknown: LeftRegion for integrase B4673 sequence

SEQ ID NO: 17673 - DNA, 260 bp, Unknown
  Description of Unknown: LeftRegion for integrase B4674 sequence
acgagcgcgaaatgattgatcattaccgcgaaagttcacccgagtggcagcaaaacatagccatgacagccaaggctgctgcaagggaatcaaaagaagattaggagatatagacataaaaaaatgccctgcatctatccgccaagaccagatgcagggcttgccaatccgttcaaatgaaaaggcaaggtgattttatcatgccaaagggcacacgtgccgctatctatgcgcgtttcagctcgcataaccagcgaagc

SEQ ID NO: 17674 - DNA, 260 bp, Unknown
  Description of Unknown: LeftRegion for integrase B4675 sequence
catcttctcaaaagaaaagacagggcattttgaaatgagttgaacctaaatgtgcaactccacttatataaatagctcccagatatgatatttcggaaatgaatttaactttttgactgttgaaagtgtggaaagatttattttccccagaacttgcaacggcttgcaacaaacttaaaactacttgaaaggtggtatttatgcctcgtaaaaagaaactgcaagaggtaggtggactgcggctggtggcgtactaccgc

SEQ ID NO: 17675 - DNA, 260 bp, Unknown
  Description of Unknown: LeftRegion for integrase B4676 sequence
attattaaatgctgcgttaaacgacataaattcaaagattgaaaagggctatgtatataagtccagaggaaagagtaggaaataaaaaatccccgcccggcgctggaacaccgaacggggaagaagctgtgatacaatcacaaccttagacaagtttattgtatcatagctccctgaaaatgtcaaggagtgatttaaatttgaaaaccgccgtaatatacgcccggtattcgtccgacaagcaaacggagcagtccatt

SEQ ID NO: 17676 - DNA, 260 bp, Unknown
  Description of Unknown: LeftRegion for integrase B4677 sequence
attgcgccgataatgctctgcgagcatttttttcagcgcttcagataaatccccgttgtttgtaaaaacaatgacgtcaagtgtttttttgcaccacttctggtgctttttagtattagacattttatatcctttcattaacaattaaaaagaaatggtacaatgccattgaaaatttttaatgttaagaagagaaaaatatgctgttaaactatacaaaaatggaggagaaaacaaaagcggccgcatatgtgcgtatg

SEQ ID NO: 17677 - DNA, 260 bp, Unknown
  Description of Unknown: LeftRegion for integrase B4678 sequence
ccttgcggtctgcattgtgtcgctcccggtcggcttgatcattgcgtccgttggagtgtaccgggtggcaaaggccggggatatttatgacgctgcggtcgctcggtacgagcagcaaatctcggactatgttgactggctggatgaagtcaacgcaaaataaaaagccgtcctcggtgggcggcgggaggttgctctgaatgtgtgcaaaaaagaaaccggccatgcttgagccggatatgcaggatgccgtgatctac

SEQ ID NO: 17678 - DNA, 260 bp, Unknown
  Description of Unknown: LeftRegion for integrase B4679 sequence
gcaaggacaacttcattgtgttcatctgcgaacaggatcatgctgtacggatcatccggcagacgttctttgttgagctgttccaattcttcttcggtcagctcgatgcacacttcctgttccagcatggtttcttcctccgaaaatcaatattttactatattatagcacatcattttccattgtgaaaggatattcccatggcgagaaagaagatcaaaaaaggagacggccagcggctcgttgcctactaccgatac

SEQ ID NO: 17679 - DNA, 260 bp, Unknown
  Description of Unknown: LeftRegion for integrase B4680 sequence
aaaataaaaaaccgctcctgcgccaacaggaacggtcaactggggaagcacactccaatgtgctttagtaactccgaagagatactgtcttaccaaagaatattgtatcatcttcggtgcagtcgcacaatcagaacttacgttctatgtatgactgttatttttgtacttttttacataatatatacggaggtgatatcatgtcgtattgtatttatttgaggaaatcaagaaaggatcttgaggccgagcagcatggt

SEQ ID NO: 17680 - DNA, 260 bp, Unknown
  Description of Unknown: LeftRegion for integrase B4681 sequence
cgtgcatttgatgatcgtaaattgaatatgattaacaaacgtcgtgaatttttccatgttacattggatgaaatcaaggaagtagttcgccaaaactatgataaaacagttgagtttgtggatattcctgacgcttcgcaatatcgtgaaagcctaaaaattaaagaagctatgtaaacaccatacgagggagggttagcatgaaagctatctacgtaagacagtcacttgataaaaaggattcgttatccatcgatgcg

SEQ ID NO: 17681 - DNA, 260 bp, Unknown
  Description of Unknown: LeftRegion for integrase B4682 sequence
caacactgataaatttaaaaactaaaaaaatcagccccagcgttggcacgccagagctgatccgatcttaccgggaaacccgataaaaatcatcctgaacaaatgaattttatcattttcccggacaaattgcaatgcgaacatatgtccgggcatttttatgcccatttttccgtacatttacttaggaggaatgtgcaatgtctaagaaagtgatgcgtaagtctacggagtccacggaccggatccgcaccggtgct

SEQ ID NO: 17682 - DNA, 260 bp, Unknown
  Description of Unknown: LeftRegion for integrase B4683 sequence
tcatttgtatgaaaaaatgaagattgaatgtaagcctttccggcaatcttacaatcaaagttcctttttcttcaaatctatcataagtaaaatcaagcacagcctcacctcctaaaacaatgtacttattcattattatataattagaatccactatttgtccatatttttcattagataaactataaggagttgattttatgcaaagagcagttatctacgcgcgcttttcctcggacatgcagcgcgaagagtctatt

SEQ ID NO: 17683 - DNA, 260 bp, Unknown
  Description of Unknown: LeftRegion for integrase B4684 sequence
caacactgataaatttaaaaactaaaaaatcagccccagtgcgccaacaccagagctgatccgatcttaccggggaatcccgtataaaatcaccttgaacaagtgcattttatcattttcccgggcagattgcaatgcaaacatatgtccgggcatttttatgcccatttttccatacatttacttaggaggaatgtgcaatggcaaagaaagtgatgcgtaaatctgctgagtccacggaccggatccgtaccggggct

SEQ ID NO: 17684 - DNA, 260 bp, Unknown
  Description of Unknown: LeftRegion for integrase B4685 sequence
acccggtctgcacttttattgtagcatgatccccctcagaacacaatccgacaaaaaagaatccccggcagctctgtacgatagagccgccggggccagatggggaatctgtctgtcggagaataatcataggataagaaaacacgcctgctgagcaagttcattgtaccatgatcctgctcagcgcacaaggagcaatcatggcaagaagaaagaaagtatctcccgggaaccgtctggttgcctactaccgttacagc

SEQ ID NO: 17685 - DNA, 260 bp, Unknown
  Description of Unknown: LeftRegion for integrase B4686 sequence
tgccccaccagataattaataataataaaatcagccccagtgcgccaacaccggagctgatccgatcttaccgggataaccgataaaaatcatcctaaacaaatgaattttatcatttttccgggcagattgcaatgcgaacatatgtccgggcatttttatgcccatttttccgtacatttacttaggaggaatgtgcaatgtctaagaaagtgatgcgtaagtctacggagtccacggaccggatccgtaccggtgct

SEQ ID NO: 17686 - DNA, 260 bp, Unknown
  Description of Unknown: LeftRegion for integrase B4687 sequence
aaatgatcagttttgtcaaatacataaaatcagccccagtgttggagcaccggagctgatccgatcttaccgggaaatcccgtataaaatcaccttagacaagtgcattttatcattttcccggacagattgcaatgcaaacatatgtccgggcatttttatgcccatttttccgtacatttacttaggaggaatgtgcaatgtctaagaaagtgatgcgtaagtctacggagtccacggaccggatccgtaccggtgct

SEQ ID NO: 17687 - DNA, 260 bp, Unknown
  Description of Unknown: LeftRegion for integrase B4688 sequence
ttcccataataatattttcataaatagtattataggcgaatttcattaactttagccctattttcttggtaatttatcatttacaattctgacagctattgctatacttacattgtcgaatgaggagtcatgaaaatttatctagaatgtaacaaatgttatttacttatctattaactaccatacgagggagggttagcatgaaagctatctacgtgagacagtcacttgataaaaaggattcgttatccatcgatgcg

SEQ ID NO: 17688 - DNA, 260 bp, Unknown
  Description of Unknown: LeftRegion for integrase B4689 sequence
aaatgatcagttttgtcaaatacataaaatcagccccagtgttggagcaccggagctgatccgatcttaccgggaaatcccgtataaaatcaccttagacaagtgcattttatcattttcccggacaaattgcaatgcgaacatatgtccgggcatttttatgcccatttttccgtacatttacttaggaggaatgtgcaatgtctaagaaagtgatgcgtaagtctacggagtccacggaccggatccgcaccggtgct

SEQ ID NO: 17689 - DNA, 260 bp, Unknown
  Description of Unknown: LeftRegion for integrase B4690 sequence
ttaaataaaaaccgctcctgcgccaacaggaacggtcaactggggaagcacacgccaatgtgctttagtaactccgaagagatactgtcttaccaaagaatattgtatcatcttcggcgcagtcgcacaatcagaacttacgttctatgtatgactgttatttttgtacttttttacataatatatacggaggtgatatcatgtcatattgtatttatttaaggaaatcgagaaaggatcttgaagccgagcagcatggt

SEQ ID NO: 17690 - DNA, 260 bp, Unknown
  Description of Unknown: LeftRegion for integrase B4691 sequence
ataaacggttcacgccaaccaataagtaaaaaaatcagccccagtgcgccaacaccggagctgatccgattaccgggtaaaccgataaatcaccttgaacaagtgcattttatcattttcccggacggattgcaatgcaaacatatgtccgggcatttttatgcccatttttccgtacatttacttaggaggaatgtgcaatgtctaagaaagtgatgcgaaaatctccggaagtcacggagcagatccgcaccggtgcc

SEQ ID NO: 17691 - DNA, 260 bp, Unknown
  Description of Unknown: LeftRegion for integrase B4692 sequence
actgtagcgattgcgggtttagctttgactttacaacgcaaaaagatatcgatgacaagtgtaaatcattgttaaatggcggaataggctctattgtagttgcggttattttggggattgctatgtttgctataaatggatatctgcattgaaagcgaataaaagtgttatgtgttgattaaaaggttaggggtgacagtttgagttcagttgacaaaatcgccgttgtttacgcgcggtattcgtcccacggtcagacc

SEQ ID NO: 17692 - DNA, 260 bp, Unknown
  Description of Unknown: LeftRegion for integrase B4693 sequence
gcgaggtgcagcgcttgatcgaatccgaaaagcgcccgtgatcttctttgcgccatccttggcaaaatagccattaaaaaacgccccgcccatgttactagcatggacgagacgaagtattcaattcacactctttttctttatgcggctcatcaagggattcattcaactgttatcactatttaagggggtgatccaatttgaaagccgtcatatatgcacgcttctccagccacaaccagcgcgaagaatccatcgaa

SEQ ID NO: 17693 - DNA, 260 bp, Unknown
  Description of Unknown: LeftRegion for integrase B4694 sequence
aatgatcagttttgtcaaattacataaaatcagccccagtgttggagcaccggagctgatccgatcttaccggggaatcccgtataaaatcaccttgaacaagtgcattttatcattttcccgggcagattgcaatgcaaacatatgtccgggcatttttatgcccatttttccgtacatttacttaggaggaatgtgcaatgtctaagaaagtgatgcgtaagtctacggagtccacggaccggatccgcaccggtgct

SEQ ID NO: 17694 - DNA, 260 bp, Unknown
  Description of Unknown: LeftRegion for integrase B4695 sequence
gcacctattaagccagatctgtttgaacatatagatggactgcgtacctgcgataaacggttcacgccaaccaataagtaaaaaaatcagccccagtgcgccaacaccggagctgatccgattaccgggtaaaccgataaatcaccttgaacaagtgcattttatcattttcccgtacatttacttaggaggaatgtgcaatggccaagaaagtgatacgtaaatctgccgagtccacggaccggatccgtaccggtgct

SEQ ID NO: 17695 - DNA, 260 bp, Unknown
  Description of Unknown: LeftRegion for integrase B4696 sequence
cttttacgtttataaaattacataaaaaatcagccccagtgttgacgcaccggagctgatccgatcttaccgggaatccccgtataaaatcaccttagacaagtgcattttatcattttcccggacagattgcaatgcaaacatatgtccgggcatttttatgcccatttttccgtacatttacttaggaggaatgtgcaatggcaaagaaagtgatacgtaaatctgccgagtccacggaccggatccgtaccggtgct

SEQ ID NO: 17696 - DNA, 260 bp, Unknown
  Description of Unknown: LeftRegion for integrase B4697 sequence
tgttgcaccgatgcaatttacaataaaaaatcagccccagtgcgccaacaccagagctgatccgatcttaccgggaaatccgataaaaatcaccttgaacaagtgcattttatcattttcccggacagatttcaatgcaaacatatgtccgggcatttttatgcccatttttccgtacatttacttaggaggaatgtgcaatggccaagaaagtgatacgtaaatctgccgagtccacggaccggatccgtaccggtgct

SEQ ID NO: 17697 - DNA, 260 bp, Unknown
  Description of Unknown: LeftRegion for integrase B4698 sequence
gatgaactaaactattacagagcgcagaaaatcactgaaatgctctatgaacagggtatgatttcctttgtagagtatgacaaattaaccgaactgaaccgcagatctttctctccgatgtttgcggacttattaccgaaaacacttgataaatcaacagtgcagagttaatatggtgtactgacaaaggaggtaatgacatgcttatcagaaaaattgatgcacagaagcccactgtatcaaagaaacttcgtgtggct

SEQ ID NO: 17698 - DNA, 260 bp, Unknown
  Description of Unknown: LeftRegion for integrase B4699 sequence
tttatcaaattttctttgtcttttcgtcaactcacgctccgcacaatctcttgcataagaatccccggcagctctgtacgatagagccgccggggccagatggggaatctgtctgtcggagaataatcataggataagaaaacacgcctgctgagcaatttcattgtaccatgatcctgctcagcgcacaaggagcaatcatggcaagaaaaaagaaagtatctcccgggaaccgtctggttgcctactaccgttacagc

SEQ ID NO: 17699 - DNA, 260 bp, Unknown
  Description of Unknown: LeftRegion for integrase B4700 sequence
tgttgcaccgatgcaattaacaataaaaaatcagccccagtgcgccaacaccagagctgatccgatcttaccgggaaatccgataaaaatcaccttgaacaagtgcattttatcattttcccggacagatttcaatgcaaacatatgtccgggcatttttatgcccatttttccgtacatttacttaggaggaatgtgcaatggccaagaaagtgatacgtaaatctgccgagtccacggaccggatccgtaccggtgct

SEQ ID NO: 17700 - DNA, 260 bp, Unknown
  Description of Unknown: LeftRegion for integrase B4701 sequence
cagcgcttgatcgaatccgaaaagcgcccgtgaccttcttcgtgccccttttgccacccttggcaaaatagccatcaaaaacgccccgcccatgtttccagcatggacgagacgaagtattcaattcacactctttttctttatgcggctcatcaagggattcattcaactgttatcactatttaagggggtgatccaatttgaaagccgtcatatatgcacgcttctccagccacaaccagcgcgaagaatccatcgaa

SEQ ID NO: 17701 - DNA, 260 bp, Unknown
  Description of Unknown: LeftRegion for integrase B4702 sequence
gttacagcatcattgtagactattctctacctcattgtcaaggtctaacggcaaaaaagaatccccggcagctctgtacgatagagccgccggggccagatggggaatctgtctgtcggagaataatcataggataagaaaacacgcctgctgagcaatttcattgtaccatgatcctgctcagcgcacaaggagcaatcatggcaagaaaaaagaaagtatctcccgggaaccgtctggttgcctactaccgttacagc

SEQ ID NO: 17702 - DNA, 260 bp, Unknown
  Description of Unknown: LeftRegion for integrase B4703 sequence
tgatgccccaccagataattaataataaaatcagccccagtgcgccaacaccggagctgatccgatcttaccgggataaccgataaaaatcatcctgaacaagtgaattttatcatttttccgggcagattgcaatgcgaacatatgtccgggcatttttatgcccatttttccgtacatttacttaggaggaatgtgcaatggcaaaaaaagtgatgcgtaaatctgccgagtccacggaccggatccgtaccggtgct

SEQ ID NO: 17703 - DNA, 260 bp, Unknown
  Description of Unknown: LeftRegion for integrase B4704 sequence
caacactgataaatttaaaaactaaaaaatcagccccagtgcgccaacaccggagctgatccgatcttaccgggaatccccgtataaaatcaccttgaacaagtgcattttatcattttcccgggcagattgcaatgcaaacatatgtccgggcatttttatgcccatttttccgtacatttacttaggaggaatgtgcaatgtctaagaaagtgatgcgtaagtctacggagtccacggaccggatccgcaccggtgct

SEQ ID NO: 17704 - DNA, 260 bp, Unknown
  Description of Unknown: LeftRegion for integrase B4705 sequence
acggttcacgccaaccaataagtaaaaaatcagccccagtgcgccaacaccggagctgatccgatcttaccgggaattcccgtataaaatcaccttgaacaagtgcattttatcatttttccgggcagattgcaatgcgaacatatgtccgggcatttttatgcccatttttccgtacatttacttaggaggaatgtgcaatgtctaagaatgtgatacgtaaatctgccgagtccacggaccggatccgtaccggtgct

SEQ ID NO: 17705 - DNA, 260 bp, Unknown
  Description of Unknown: LeftRegion for integrase B4706 sequence
tgccccaccagataattaataataataaaatcagccccagtgcgccaacaccggagctgatccgatcttaccgggataaccgataaaaatcatcctgaacaagtgaattttatcattttcccggacagattgcaatgcaaacatatgtccgggcatttttatgcccatttttccgtacatttacttaggaggaatgtgcaatgtctaagaaagtgatgcgaaaatcttcggaagtcacggagcagatccgcaccggtgcc

SEQ ID NO: 17706 - DNA, 260 bp, Unknown
  Description of Unknown: LeftRegion for integrase B4707 sequence
aagcaaagatggaattatgctaacagcgtttaatcaagatgtttttccgccaaaatttttttctaacgaggagatagaacaactgcccgtgagaatcgttggaaaggttatagaagttcgcagaaaaatgtagctagaagtccgcttagcggacttcttcgcatgtcaagataaatttatagtgtgctatggagacgaaaatgaaagacgccgttatctatgcccgctactcatctgaccgtcagcgggaagaatccatc

SEQ ID NO: 17707 - DNA, 260 bp, Unknown
  Description of Unknown: LeftRegion for integrase B4708 sequence
tgttgcaccgatgcaatttacaataaaaaatcagccccagtgcgccaacaccagagctgatccgatcttaccgggaaatccgataaaaatcaccttgaacaagtgcattttatcattttcccggacagatttcaatgcaaacatatgtccgggcatttttatgcccatttttccgtacatttacttaggaggaatgtgcaatggccaagaaagtgatgcgtaaatcagctgagtccatggaccggattcgtaccggtgcc

SEQ ID NO: 17708 - DNA, 260 bp, Unknown
  Description of Unknown: LeftRegion for integrase B4709 sequence
ttgagtttattatgtgaaggtctcgtagcaatacgggaccttttacgttatataaaaaaccgccccggtgcgccaacaccaggacggcaaccgcactccgaaaagctacggccgtacaagtcatagtataccacacggagcgcgggaaaatcaatgaaaccgcgctatttttgcgcccattttcagattggaggtacactatgaatgctgtaatttacgccagatactctcccggcccccggcagaccgatcagagcatt

SEQ ID NO: 17709 - DNA, 260 bp, Unknown
  Description of Unknown: LeftRegion for integrase B4710 sequence
caacactgataaatttaaaaactaaaaaatcagccccagtgcgccaacaccggagctgatccgatcttaccggggaatcccgtataaaatcaccttgaacaagtgcattttatcattttcccgggcagattgcaatgcaaacatatgtccgggcatttttatgcccatttttccgtacatttacttaggaggaatgtgcaatggcaaagaaagtgatgcgtaaatctgctgagtccacggaccggatccgtaccggtgct

SEQ ID NO: 17710 - DNA, 260 bp, Unknown
  Description of Unknown: LeftRegion for integrase B4711 sequence
cgtgcatttgatgatcgtaaattgaatatgattaacaaacgtcgcgaatttttccatgttacattggatgaaatcaaggaagtagttcgccaaaactatgataaaacagttgagtttgtggatattcctgacgcttcgcaatatcgtgaaagcctaaaaattaaggaagctatgtaaacaccatacgagggagggttagcatgaaagctatctacgtaagacagtcacttgataaaaaggattcgttatccatcgatgcg

SEQ ID NO: 17711 - DNA, 260 bp, Unknown; identical to SEQ ID NO: 17680
  Description of Unknown: LeftRegion for integrase B4712 sequence

SEQ ID NO: 17712 - DNA, 260 bp, Unknown
  Description of Unknown: LeftRegion for integrase B4713 sequence
ttaaataaaaaccgctcctgcgccaacaggaacggtcaactggggaagcacacgccaatgtgctttagtaactccgaagagatactgtcttaccaaagaatattgtatcatcttcggtgcagtcgcacaatcagaacttacgttctatgtatgactgttatttttgtacttttttacataatatatacggaggtgatatcatgtcatattgtatttatttaaggaaatcgagaaaggatcttgaagccgagcagcatggt

SEQ ID NO: 17713 - DNA, 260 bp, Unknown
  Description of Unknown: LeftRegion for integrase B4714 sequence
agcgcaagcaaagacatgctccaatccgcatcacgacctagccgccatttttccagtgacggaaaaatagccatcaaaaaacgccccgcccatgttaccagcatgagcgagacgaagtattcaattcacactctttttctttatgcggctcatcaagggattcattcaactgttatcactatttaagggggtgatccaatttgaaagccgttatatatgcccgcttctccagccacaaccagcgcgaagaatccatcgaa

SEQ ID NO: 17714 - DNA, 260 bp, Unknown
  Description of Unknown: LeftRegion for integrase B4715 sequence
ggcttctttcgttgtgtagctacaaaaaatcagcccctgtgttggcgcaccggagctgatccgatcttaccgggaattcccgtataaaatcaccttgaacaagtgcattttatcattttcccgggcagattgcaatgcaaacatatgtccgggcatttttatgcccatttttccgtacatttacttaggaggaatgtgcaatggccaaaaaagtgatgcgtaaatctgctgagtccacggacccgattcgtaccggtgcc

SEQ ID NO: 17715 - DNA, 260 bp, Unknown
  Description of Unknown: LeftRegion for integrase B4716 sequence
aaaataaaaaaccgctcctgcgccaacaggaacggtcaactggggaagcacacgccaatgtgctttagtaactccgaagagatactgtcttgccaaagaatattgtatcatcttcggtgcagtcgcacaatcagaacttacgttctatgtatgactgttatttttgtacttttttacataatatatacggaggtgatatcatgtcatattgtatttatttaaggaaatcgagaaaggatcttgaagccgagcagcatggt

SEQ ID NO: 17716 - DNA, 260 bp, Unknown
  Description of Unknown: LeftRegion for integrase B4717 sequence
gcccctccagataattaataataataaaatcagccccagtgcgccaacaccggagctgatccgatcttaccgggaattcccgtataaaatcaccttgaacaagtgaattttatcattttcccggacagattgcaatgcaaacatatgtccgggcatttttatgcccatttttccgtacatttacttaggaggaatgtgcaatggcaaaaaaagtgatgcgtaaatctgccgagtccacggaccggatccgtaccggtgct

SEQ ID NO: 17717 - DNA, 260 bp, Unknown
  Description of Unknown: LeftRegion for integrase B4718 sequence
gtaaaagtacatgcaatagtggttgttgcaaattacgcaacaactaaaaaagtcccgtgccctgctggaacaggtacacgggacgcgccgtcggtattggcgtaccgtatcggcaatttgtaaatctactgtgcgaggctgatttactctattattataccataaatcagtctcttatatagggaaggactgatttttttatgccaaaaaacaaaaaatctgataatgtaaacgaaaaatgcaaagcagttatctatgcc

SEQ ID NO: 17718 - DNA, 260 bp, Unknown; identical to SEQ ID NO: 15842
  Description of Unknown: LeftRegion for integrase B4719 sequence

SEQ ID NO: 17719 - DNA, 260 bp, Unknown; identical to SEQ ID NO: 17714
  Description of Unknown: LeftRegion for integrase B4720 sequence

SEQ ID NO: 17720 - DNA, 260 bp, Unknown
  Description of Unknown: LeftRegion for integrase B4721 sequence
tttttttatgcaattatataaatttataaacttgaataacttaaaaaagtataaatgataaagcaaagaaattctagaaattttaaaattaacagagagcctttaaagcaagtgtttacctagtgttcacctaattaaaacttggaatttattgatgaaaatggtataatcactctagaaaataaggaggatggaattgtatgagtcaagaaacaaaagagaaggtttatttatatgctagagtatctactactagtgag

SEQ ID NO: 17721 - DNA, 260 bp, Unknown; identical to SEQ ID NO: 13020
  Description of Unknown: LeftRegion for integrase B4722 sequence

SEQ ID NO: 17722 - DNA, 260 bp, Unknown
  Description of Unknown: LeftRegion for integrase B4723 sequence
gaccccgccgcgcctctcaacgatgcgtaccatggtggggtcgtttttattgcaaaaagaatccccggcagctctgtacgatagagccgccggggccagatggggaatctgtctgtcggagaataatcataggataagaaaacacgcctgctgagcaatttcattgtaccatgatcctgctcagcgcacaaggagcaatcatggcaagaagaaagaaagtatctcccgggaaccgtctggttgcctactaccgttacagc

SEQ ID NO: 17723 - DNA, 260 bp, Unknown
  Description of Unknown: LeftRegion for integrase B4724 sequence
aaataaaaaaaccgctcctgcgccaacaggaacggtcaactggggaagcacacgccaatgtgctttagtaactccgaagagatactgtcttaccaaagaatattgtatcatcttcggtgcagtcgcacaatcagaacttacgttctatgtatggctgttatttttgtacttttttacataatatatacggaggtgatatcatgtcgtattgtatttatttaagaaaatcgagaaaggatcttgaagccgagcagcatggt

SEQ ID NO: 17724 - DNA, 260 bp, Unknown; identical to SEQ ID NO: 17712
  Description of Unknown: LeftRegion for integrase B4725 sequence

SEQ ID NO: 17725 - DNA, 260 bp, Unknown
  Description of Unknown: LeftRegion for integrase B4726 sequence
taagttgcaccagtgcaatttgcaataaaatcagccccagtgttggcgcaccggagctgattcgatcttaccgggtaaaccgaataaaatcaccttgaacaagtgcattttatcattttcccgggcggattgcaacgcaaacatatgtccgggcatttttatgcccatttttccgtacatttacttaggaggaatgtgcaatgtctaagaaagtgatgcgtaagtctacggagtccacggaccggatccgcaccggtgct

SEQ ID NO: 17726 - DNA, 260 bp, Unknown
  Description of Unknown: LeftRegion for integrase B4727 sequence
ttaaataaaaaccgctcctgcgccaacaggaacggtcaactggggaagcacacgccaatgtgctttagtaactccgaagagatactgtcttaccaaagaatattgtatcatcttcggtgcagtcgcacaatcagaacttacgttctgtgtatggctgttatttttgtacttttttacataatatatacggaggtgatatcatgtcatattgtatttatttaaggaaatcaagaaaggatcttgaggccgaacagcatggt

SEQ ID NO: 17727 - DNA, 260 bp, Unknown; identical to SEQ ID NO: 17686
  Description of Unknown: LeftRegion for integrase B4728 sequence

SEQ ID NO: 17728 - DNA, 260 bp, Unknown
  Description of Unknown: LeftRegion for integrase B4729 sequence
cgtgcatttgatgatcgtaaattgaatatgattaacaaacgtcgtgaatttttccatgttacattggatgaaatcaaggaagtagttcgccaaaactatgataaaacagttgaatttgtggatattcctgacgcttcgcaatatcgtgaaagcctaaaaattaaggaagctatgtaaacaccatacgagggagggtaagcatgaaagctatctacgtaagacagtcacttgataaaaaggattcgttatccatcgatgcg

SEQ ID NO: 17729 - DNA, 260 bp, Unknown
  Description of Unknown: LeftRegion for integrase B4730 sequence
tttatcaaattttctttgtcttttcgtcaactcacgctccgcacaatctcttgcataagaatccccggccgctctgtacgatagagccgccggggccagatggggaatctgtctgtcggagaataatcataggataagaaaacacgcctgctgagcaatttcattgtaccatgatcctgctcagcgcacaaggagcaatcatggcaagaagaaagaaagtatctcccgggaaccgtctggttgcctactaccgttacagc

SEQ ID NO: 17730 - DNA, 260 bp, Unknown
  Description of Unknown: LeftRegion for integrase B4731 sequence
agagcaaaagaaaaaattgaaataaaaaatcagccccagtgcgccaacaccggagctgatccgatcttaccgggaattcccgtataaaatcaccttgaacaagtgaattttatcattttcccggacagattgcaatgcaaacatatgtccgggcatttttatgcccatttttccgtacatttacttaggaggaatgtgcaatggccaagaaagtgatacgtaaatctgccgagtccacggaccggattcgtaccggtgct

SEQ ID NO: 17731 - DNA, 260 bp, Unknown
  Description of Unknown: LeftRegion for integrase B4732 sequence
cggttcacgccaaccaataagtaaaaaaatcagccccagtgcgccaacaccggagccgatccgatcttaccgggaaatcccgtataaaatcaccttagacaagtgcattttatcattttcccggacagattgcaatgcaaacatatgtccgggcatttttatgcccatttttccgtatatttacttaggaggaatgtgcaatgtctaagaaagtgatgcgaaaatcttcggaagtcacggagcagatccgcaccggtgcc

SEQ ID NO: 17732 - DNA, 260 bp, Unknown; identical to SEQ ID NO: 17709
  Description of Unknown: LeftRegion for integrase B4733 sequence

SEQ ID NO: 17733 - DNA, 260 bp, Unknown
  Description of Unknown: LeftRegion for integrase B4734 sequence
ctgaacttggttttccctctaactggcatgagcttatcaaataatcatcatctataaagaatccccggcagctctgtacgatagagccgccggggccagatggggaatctgtctgtcggagaataatcataggataagaaaacacgcctgctgagcaatttcattgtaccatgatcctgctcagcgcacaaggagcaatcatggcaagaaaaaagaaagtatctcccgggaaccgtctggttgcctactaccgttacagc

SEQ ID NO: 17734 - DNA, 260 bp, Unknown
  Description of Unknown: LeftRegion for integrase B4735 sequence
gtgaagagaacgaagatgacaagatcactagcgatgagcgcgaaatagtagataactaccgcgacagctcgccagagtggcaacaaaacatttcgatgaccgccagagcggcggcttctgaatcgaaaaggaaataaaaaagccccgcgcaaccgtccaaagtctcgcagggcaataccaaaaggcaaggtgattttaacatgccaaaaggcacacgtgccgcgatttacgcgcggtttagttcgcataaccaacgaagc

SEQ ID NO: 17735 - DNA, 260 bp, Unknown
  Description of Unknown: LeftRegion for integrase B4736 sequence
aaataaaaaaaccgctcctgcgccaacaggaacggtcaactggggaagcacactccaatgtgctttagtaactccgaagagatactgtcttaccaaagaatattgtatcatcttcggtgcagtcgcacaatcagaacttacgttctatgtatgactgttatttttgtacttttttacataatatatacggaggtgatatcatgtcgtattgtatttatttgaggaaatcaagaaaggatcttgaggccgagcagcatggt

SEQ ID NO: 17736 - DNA, 260 bp, Unknown
  Description of Unknown: LeftRegion for integrase B4737 sequence
actggataggcgttagtttcagaaggaggtccgtcattcgtggcgggctttctgagccgatattcgttacatagcgctatgctttaagatgagaatcgttggaaaggttatagaggttcgcagaaaaatgtaactagaagtccgcttagcggacttcttctcatgccaagataaattcacagtgtgctatggagacaaaaatgaaagacgccgttatctatgcccgctactcgtctgaccggcagcgggaagaatccatc

SEQ ID NO: 17737 - DNA, 260 bp, Unknown
  Description of Unknown: LeftRegion for integrase B4738 sequence
tgtaagaaatgttttcggaaataataagcattttgtgtcgatggagcaccagtgtatttatacaggcaatactaaaaatggcagcttgggaagatcgcctgacctaatccaccgaagttcctagccataaaaatgcgatatgcagaacgcttacaaaataagttgcaccggtgcaactcaaattatttggaggtatcgtgatgtctggtaaaaagaaactagctgaagatgctgaaccgctgcgcacaggtgcagcctat

SEQ ID NO: 17738 - DNA, 260 bp, Unknown
  Description of Unknown: LeftRegion for integrase B4739 sequence
ctttaattcattattcaatttgcaattcttttcttcgctgcgttctaaattgtattggcttaaagccaactcttttgtgcattgaattagtttcgtcctaatattatcgtagtcaaacattttagtcaccttaccaactctaattattttattcaattattgtcttgcttaaatactattttatcaaaggagatgactctatgcaaagagcagttatctacgcgcgcttttcctcggacatgcagcgcgaagagtctatt

SEQ ID NO: 17739 - DNA, 260 bp, Unknown
  Description of Unknown: LeftRegion for integrase B4740 sequence
ccacagccgtatcccttgaccaagcaattgcagcgggctatactgcatgtgaaaaatgttgttaaaataaaaaaacgcctcggcgtgggagcaccgaagcgtttatagaacagcttacccttggaggataatccgccccaacaatcggattataccacctccggggtaggcttggcaagtcatactttggaggtattacagtgaatcgagcggtaatctatgcccgatacagcagtgacatgcagcgtgaagaaagcgtg

SEQ ID NO: 17740 - DNA, 260 bp, Unknown
  Description of Unknown: LeftRegion for integrase B4741 sequence
ttaaataaaaaccgctcctgcgccaacaggaacggtcaactggggaagcacacgccaatgtgctttagtaactccgaagagatactgtcttaccaaagaatattgtatcatcttcggtgcagtcgcacaatcagaacttacgttctgtgtatggctgttatttttgtacttttttacataatatatacggaggtgatatcatgtcgtattgtatttatttgaggaaatcaagaaaggatcttgaagccgagcagcatggt

SEQ ID NO: 17741 - DNA, 260 bp, Unknown
  Description of Unknown: LeftRegion for integrase B4742 sequence
aaccaaagatggaattatgctaacagcgtttaatcaagatgtttttccgccaaaatttttttctaacgaggagatagaacaactgcccgtgagaatcgttggaaaggttatagaagttcgcagaaaaatgtagctagaagtccgcttagcggacttcttagcatgtcaagataaatttatagtgtgctatggagacgaaaatgaaagacgccgttatctatgcccgctactcatctgaccgtcagcgggaagaatccatc

SEQ ID NO: 17742 - DNA, 260 bp, Unknown
  Description of Unknown: LeftRegion for integrase B4743 sequence
aaaattgcaccagtgcaactttcaataaaaaaatcagccccagtgcttccaacaccagagctgatccgattaccgggtaaaccgataaatcaccttgaacaagtgcattttatcattttcccggacagattgcaatgcaaacatatgtccgggcatttttatgcccatttttccgtacatttacttaggaggaatgtgcaatggtcaagaaagtgatacgtaaatctgccgagtccacggaccggatccgtaccggtgct

SEQ ID NO: 17743 - DNA, 260 bp, Unknown; identical to SEQ ID NO: 17742
  Description of Unknown: LeftRegion for integrase B4744 sequence

SEQ ID NO: 17744 - DNA, 260 bp, Unknown
  Description of Unknown: LeftRegion for integrase B4745 sequence
gcaaggacaacttcattgtgttcatctgcgaacaggatcatgctgtacggatcatccggcagacgttctttgttgagctgttccaattcttcttcggtcagctcgatgcacacttcctgttccagcatggtttcttcctccgaaaatcaatattttactatattatagcacatcattttccattgtgaaagggtattcccatggcgagaaagaagatcaaaaaaggagacggccagcggctcgttgcctactaccgatac

SEQ ID NO: 17745 - DNA, 260 bp, Unknown
  Description of Unknown: LeftRegion for integrase B4746 sequence
tgtattgaaacgttgtatagctataaaaaatcagccccagtgcgccaacaccggagctgatccgatcttaccgggaaacccgataaaaatcatcctgaacaaatgaattttatcattttcccggacagattgcaatgcaaacatatgtccgggtatttttatgcccatttttccgtacatttacttaggaggaatgtgcaatggcaaagaaagtgatgcgtaaatctgctgagtccacggaccggatccgtaccggtgct

SEQ ID NO: 17746 - DNA, 260 bp, Unknown
  Description of Unknown: LeftRegion for integrase B4747 sequence
gaccccgccgcgcctctcaacgatgcgtaccatggtggggtcgtttttattgcaaaaagaatccccggcagctctgtacgatagagccgccggggccagatggggaatctgtctgtcggagaataatcataggataagaaaacacgcctgctgagcaatttcattgtaccatgatcctgctcagcgcacaaggagcaatcatggcaagaaaaaagaaagtatctcccgggaaccgtcttgttgcctactaccgttacagc

SEQ ID NO: 17747 - DNA, 260 bp, Unknown
  Description of Unknown: LeftRegion for integrase B4748 sequence
gggatgatattatcctacactgcttcgtgcggtgccgccgtgaatttcagcgatgagtggtatataaactccagcgagcaggagcttgcctttcgttgtgagaacatgagaagcactgccgagcagatagcgcaggaattgcagctccgacaactccggggagatctgcagagaagtcgtgaaacgtctgtgtgctagcaatgtacgctgtttacctgcggaaatcccgggcagacctggaagcggaggctatgggtcag

SEQ ID NO: 17748 - DNA, 260 bp, Unknown
  Description of Unknown: LeftRegion for integrase B4749 sequence
aaattgcaccagtgcaactttcaataaaaaaaatcagccccagtgcttccaacaccagagctgatccgattaccgggtaaaccgataaatcaccttgaacaagtgcattttatcattttcccggacagattgcaatgcaaacatatgtccgggcatttttatgcccatttttccgtacatttacttaggaggaatgtgcaatggccaagaaagtgatacgtaaatctgccgagtccacggaccggatccgtaccggtgct

SEQ ID NO: 17749 - DNA, 260 bp, Unknown
  Description of Unknown: LeftRegion for integrase B4750 sequence
aaaataaaaaaccgctcctgcgccaacaggaacggtcaactggggaagcacacgccaatgtgctttagtaactccgaagagatactgtcttgccaaggaatattgtatcatcttcggtgcagtcgcacaatcagaacttacgttctatgtatgactgttatttttgtacttttttacataatatatacggaggtgatatcatgtcatattgtatttatttaaggaaatcgagaaaggatcttgaagccgagcagcatggt

SEQ ID NO: 17750 - DNA, 260 bp, Unknown; identical to SEQ ID NO: 16402
  Description of Unknown: LeftRegion for integrase B4751 sequence

SEQ ID NO: 17751 - DNA, 260 bp, Unknown; identical to SEQ ID NO: 17689
  Description of Unknown: LeftRegion for integrase B4752 sequence

SEQ ID NO: 17752 - DNA, 260 bp, Unknown
  Description of Unknown: LeftRegion for integrase B4753 sequence
cttttacgtttataaaattacataaaaaatcagccccagtgttggcgcaccggagctgattcgatcttaccgggaaatcccgtataaaatcaccttagacaagtgcattttatcattttcccggacggattgcaatgcaaacatatgtccgggcatttttatgcccatttttccgtacatttacttaggaggaatgtgcaatggcaaaaaaagtgatacgtaaatctgccgagtccacggaccggatccgtaccggtgct

SEQ ID NO: 17753 - DNA, 260 bp, Unknown; identical to SEQ ID NO: 17733
  Description of Unknown: LeftRegion for integrase B4754 sequence

SEQ ID NO: 17754 - DNA, 260 bp, Unknown
  Description of Unknown: LeftRegion for integrase B4755 sequence
ataattttaaaggtgtcgaaattgacccctttgataaaaaaaagaattagaaagtgtttgagttttcgcacagcacaaccacttatctaattccacaaaaaaatccttgaaataaggtttctttatgttataaattataacataaaaaagtaccttttttcaagagattaaattaattttagaaagaaggtatttttattatgctagaaaatataaatactaatatggaatattatgcagcttatttaagaaaatcacgt

SEQ ID NO: 17755 - DNA, 260 bp, Unknown
  Description of Unknown: LeftRegion for integrase B4756 sequence
cgtgcatttgatgatcgtaaattgaatatgattaacaaacgtcgtgaatttttccatgttacattggatgaaatcaaggaagtagttcgccaaaactatgataaaacagttgagtttgtggatattcctgacgcttcacaatatcgtgaaagcctaaaaattaaggaagctatgtaaacaccatacgagggagggttagcatgaaagctatctacgtaagacagtcacttgataaaaaggattcgttatccatcgatgcg

SEQ ID NO: 17756 - DNA, 260 bp, Unknown
  Description of Unknown: LeftRegion for integrase B4757 sequence
acccggtctgcatttttattgtagcatgatccccctcagaacacaatccgacaaaaaagaatccccggcagctctgtacgatagagccgccggggccagatggggaatctgtctgtcggagaataatcataggataagaaaacacgcctgctgagcaatttcattgtaccatgatcctgctcagcgcacaaggagcaatcatggcaagaaaaaagaaagtatctcccgggaaccgtctggttgcctactaccgttacagc

SEQ ID NO: 17757 - DNA, 260 bp, Unknown; identical to SEQ ID NO: 17735
  Description of Unknown: LeftRegion for integrase B4758 sequence

SEQ ID NO: 17758 - DNA, 260 bp, Unknown
  Description of Unknown: LeftRegion for integrase B4759 sequence
aaataaaaaaaccgctcctgcgccaacaggaacggtcaactggggaagcacactccaatgtgctttagtaactccgaagagatactgtcttaccaaagaatattgtatcatcttcggtgcagtcgcacaatcagaacttacgttctatgtatgactgttatttttgtacttttttacataatatatacggaggtgatatcatgtcatattgtatttatttaagaaaatcgagaaaggatcttgaagccgagcagcatggc

SEQ ID NO: 17759 - DNA, 260 bp, Unknown
  Description of Unknown: LeftRegion for integrase B4760 sequence
ttaaataaaaaccgctcctgcgccaacaggaacggtcaactggggaagcacacgccaatgtgctttagtaactccgaagagatactgtcttaccaaagaatattgtatcatcttcggtgcagtcgcacaatcagaacttacgttctgtgtatggctgttatttttgtacttttttacataatatatacggaggtgatatcatgtcatattgtatttatttaaggaaatcgagaaaggatcttgaagccgagcagcatggt

SEQ ID NO: 17760 - DNA, 260 bp, Unknown
  Description of Unknown: LeftRegion for integrase B4761 sequence
cgtgcatttgatgatcgtaaattgaatatgattaacaaacgtcgtgaatttttccatgttacattggatgaaatcaaggaagtagttcgccaaaactatgataaaacagttgagtttgtggatattcctgacgcttcgcaatatcgtgaaagcctaaaaattaaggaagctatgtaaacaccatacgagggagggttagcatgaaagctatctacgtaagacagtcacttgataaaaaggattcgttatccatcgatgcg

SEQ ID NO: 17761 - DNA, 260 bp, Unknown
  Description of Unknown: LeftRegion for integrase B4762 sequence
cggttcacgccaaccaataagtaaaaaaatcagccccagtgcgccaacaccggagctgatccgatcttaccggggaatcccgtataaaatcaccttgaacaagtgcattttatcattttcccgggcagattgcaatgcaaacatatgtccgggcatttttatgcccatttttccgtacatttacttaggaggaatgtgcaatggtcaagaaagtgatacgtaaatctgccgagtccacggaccggatccgtaccggtgct

SEQ ID NO: 17762 - DNA, 260 bp, Unknown
  Description of Unknown: LeftRegion for integrase B4763 sequence
caatagaaaaaccgctcctgcgccaacaggaacggtcaactggggaagcacacgccaatgtgctttagtaactccgaagagatactgtcttaccaaagaatattgtatcatcttcggtgcagtcgcacaatcagaacttacgttctatgtatgactgttatttttgtacttttttacataatatatacggaggtgatatcatgtcatattgtatttatttgaggaaatcaagaaaggatcttgaagccgagcagcatggt

SEQ ID NO: 17763 - DNA, 260 bp, Unknown
  Description of Unknown: LeftRegion for integrase B4764 sequence
ttgacggtgaagtagttcaaggaacttatcaataattaaaaccgccccacggcaatggagcggttctgaagagcagcacggcaatgctgcgtaggttagaaaaagatttatccaccacgataatgctttttctatacccaattctatcaaattcacaaacttttctcaagtatgcataaatttgaatggagggtattactatgaaagctgaagaagtactcatctacttaagaaaatccagatcagacagtccagatgaa

SEQ ID NO: 17764 - DNA, 260 bp, Unknown
  Description of Unknown: LeftRegion for integrase B4765 sequence
aagcaaagatggaattatgctaacagcgtttaatcaggatgttttcccaccaaaatttttttctaacgaggagatagaacaactgcccgtgagaatcgttggaaaggttatagaggttcgcagaaaaatgtagctagaagtccgcttagcggacttcttagcatgtcaagataaatttatagtgtgctatggagacgaaaatgaaagacgccgttatctatgcccgctactcgtctgaccggcagcgggaagaatccatc

SEQ ID NO: 17765 - DNA, 260 bp, Unknown
  Description of Unknown: LeftRegion for integrase B4766 sequence
caattaaaaaccgttcctgcgccaacaggaacggtcaactggaagcacacaccaatgtgcttttgaaatacctccgaagagatactctactaccaaggaatattgtatcatcttcggtgcagtcgcacaatcagaacttatgttctatgtatgactgttatttttgtacttttttacataatatatacggaggtgatatcatgtcgtattgcatttatttgaggaaatcaagaaaggatcttgaagccgagcagcatggt

SEQ ID NO: 17766 - DNA, 260 bp, Unknown; identical to SEQ ID NO: 17762
  Description of Unknown: LeftRegion for integrase B4767 sequence

SEQ ID NO: 17767 - DNA, 260 bp, Unknown
  Description of Unknown: LeftRegion for integrase B4768 sequence
aactcttgtaacttggatgatatatgcgtaatccgtagcaacaaaacatccaaagctgttgttcgaaaatttgtaaagatagataatcaaaccgctttatttcaagctttgaacacgagttatcaatcatttgttttcacaaatcccgatcaatacgaaattgtaggtgttgttgtaggattacacagggagttttagctgtgaaagctgtaatatatgctcgatattcgagccacaagcagaatgaagaatccattgaa

SEQ ID NO: 17768 - DNA, 260 bp, Unknown
  Description of Unknown: LeftRegion for integrase B4769 sequence
cgctgccaagacgaagggcttgactattacatgcaagatggtgaggttttgaaaaaagcgcaataaaaaaatcccgccccctgcgccaacaggaaacgggaaaagtagaacagcttatccttggaggataatccgccccaacaattggattataccacctcctgggtaggcttggcaagtcatactttggaggtattacagtgaatcgagcggtaatctatgcccgatacagcagtgacatgcagcgtgaagaaagcgtg

SEQ ID NO: 17769 - DNA, 260 bp, Unknown
  Description of Unknown: LeftRegion for integrase B4770 sequence
actaaaataaaaaccgctcctgcgccaacaggaacggtcaactggaagcacacgccaatgtgctttagtaactccgaagagatactgtcttaccaaagaatattgtatcatcttcggttcagtcgcacaatcagaacttacgttctgtgtatggctgttatttttgtactcttttacataatatatacggaggtgatatcatgtcgtattgtatttatttaagaaaatcaagaaaggatcttgaagccgagcagcatggt

SEQ ID NO: 17770 - DNA, 260 bp, Unknown
  Description of Unknown: LeftRegion for integrase B4771 sequence
ccgtcatcatatgctattgcggtttctgatccgacaatatcttttactaaaatagtcatttcgcacctctcatattttaaatgtcattaagggatatactgtcaactttcttgttgtcagcataacattttataattatataattagaatccactatttgtccatatttttcattgaataacctataaggagttgattttatgcaaagagcagttatctacgcgcgcttttcctcggacatgcagcgcgaagaatctatt

SEQ ID NO: 17771 - DNA, 260 bp, Unknown
  Description of Unknown: LeftRegion for integrase B4772 sequence
aacttctgaatacggagaacagttcaccgctgaagaagctcagtatgctattgataatcttgaataaataaaaaacgccccggcgtgggagcaccgaagcgtttatagaacagcttacccttggaggataatccgccccaacaattggattataccacctccgggttaggcttggcaagtcatactttggaggtattacagtgaatcgagcggtaatctatgcccgatacagcagtgacatgcagcgtgaagaaagcgtg

SEQ ID NO: 17772 - DNA, 260 bp, Unknown
  Description of Unknown: LeftRegion for integrase B4773 sequence
aaaatctttaatggcagcttgctcttgttgattgagctgcttgtacatattgataaattcgttatccatatagcttcccctatatacaatttatggttgtttaacttgcctatactatacaactataaaattggaaagtcaatagatgtactattgaaaattgtaataacatttggaaaaactaaccaagaggttctattatgaaagcctgtctttatctccgatattccagcagctctcaaacggagcagtccattgag

SEQ ID NO: 17773 - DNA, 260 bp, Unknown
  Description of Unknown: LeftRegion for integrase B4774 sequence
gttgcaccgatgcaatttacaataaaaaatcagccccagtgcgccaacaccggagctgatccgatcttaccgggaatccccgtataaaatcaccttgaacaagtgcattttatcattttcccgggcagattgcaatgcaaacatatgtccgggcatttttatgcccatttttccgtacatttacttaggaggaatgtgcaatgtctaagaaagtgatgcgtaagtctacggagtccacggaccggatccgcaccggtgct

SEQ ID NO: 17774 - DNA, 260 bp, Unknown
  Description of Unknown: LeftRegion for integrase B4775 sequence
aagcaaagatggaattatgctaacagcgtttaatcaagatgttttcccgccaaaatttttttctaactcagagatagaacaactgccagtgagaatcattggaaagattatagaggttcgcagaaaaatgtagctagaagtccgattagcggacttcttcgcatgtcaagataaatttatagtgtgctatggagacgaaaatgaaagacgccgttatctatgcccgctactcatctgaccgtcagcgggaagaatccatc

SEQ ID NO: 17775 - DNA, 260 bp, Unknown; identical to SEQ ID NO: 15878
  Description of Unknown: LeftRegion for integrase B4776 sequence

SEQ ID NO: 17776 - DNA, 260 bp, Unknown
  Description of Unknown: LeftRegion for integrase B4777 sequence
attattaaatgctgcgttaaacgacataaattcaaagattgaaaagggctatgtatataagcccagaggaaagagtaggaaataaaaaatccccgcccggcgctggaacaccgaacggggaagaagctgtgatacaatcacaaccttagacaagtttattgtatcatagctccctgaaaatgtcaaggagtgatttaaatttgaaaaccgccgtaatatacgcccgatattcatcggacaagcagacggagcagtccatt

SEQ ID NO: 17777 - DNA, 260 bp, Unknown; identical to SEQ ID NO: 17736
  Description of Unknown: LeftRegion for integrase B4778 sequence

SEQ ID NO: 17778 - DNA, 260 bp, Unknown
  Description of Unknown: LeftRegion for integrase B4779 sequence
agcgcaagcaaagacatgctccaatccgcatcacgacctagccgccatttttccagtgacggaaaaatagccatcaaaaaacgccccgcccatgtttccagcatggacgagacgaagtattcaattcacactctttttctttatgcggctcatcaagggattcattcaactgttatcactatttaagggggtgatccaatttgaaagccgtcatatatgcccgcttctccagccacaaccagcgcgaagaatccatcgaa

SEQ ID NO: 17779 - DNA, 260 bp, Unknown
  Description of Unknown: LeftRegion for integrase B4780 sequence
gttccggtagcaaaggaatacagagatactttagcgatggcataattatattttatttaacaaacaaaaaagccgcccgatgctgcaacatcaggcgacacaccttaaaaggcttatgtaagttattacacaacaagtatatcataagtctatctattttgataggcttatttttatgcatttttgaaaggatgatgattatgaaagctatctatgttagacaatctctcgataaaaaagattctctttctattgctgca

SEQ ID NO: 17780 - DNA, 260 bp, Unknown; identical to SEQ ID NO: 17773
  Description of Unknown: LeftRegion for integrase B4781 sequence

SEQ ID NO: 17781 - DNA, 260 bp, Unknown
  Description of Unknown: LeftRegion for integrase B4782 sequence
attatctattctgtttatctgattcaccttgcccaaaagtagagatttccctaacggaagaagagcaattactgcttgacgcatttcgttccgctaccccacaaggcagattcaacattattaccacctgtatgtgtgagaagcgaaaaggggacaacgaaagtgtcgggtaattgatttcatagaatggaggaagaaccatgtatgaggatataaaaacagcctgcctatacgttagattctcaagccataaccagact

SEQ ID NO: 17782 - DNA, 260 bp, Unknown; identical to SEQ ID NO: 17740
  Description of Unknown: LeftRegion for integrase B4783 sequence

SEQ ID NO: 17783 - DNA, 260 bp, Unknown
  Description of Unknown: LeftRegion for integrase B4784 sequence
ttaccgtatttagatatgttataagtataaaaaatcagccccagtgcgccaacaccggagctgatccgattaccgggtaaaccgataaatcaccttgaacaagtgcattttatcattttcccggacggattgcaatgcaaacatatgtccgggcatttttatgcccatttttccgtacatttacttaggaggaatgtgcaatgtctaagaaagtgatgcgtaagtctacggagtccacggaccggatccgtaccggtgct

SEQ ID NO: 17784 - DNA, 260 bp, Unknown
  Description of Unknown: LeftRegion for integrase B4785 sequence
gtctataccggcatggaaaccgtattagataaatcaggggcagaactgcccgaaagcgtgataaagctgctctacagaatttacgtagaaacagcagaaaaaccggaagaaatggatgaagcatattttgtctgaagggtgcggtaaagcaccttcagcttaatatagataagatgttttttgagaaaggaatgatcgctatgacgatggatcgatctgcacattcccggctcgctgtgacgtaccgcaggatcagttct

SEQ ID NO: 17785 - DNA, 260 bp, Unknown
  Description of Unknown: LeftRegion for integrase B4786 sequence
gaccccgccgcgcctctcaacgatgcgtaccatggtggggtcgtttttattgcaaaaagaatccccggcagctctgtacgatagagccgccggggccagatggggaatctgtctgtcggagaataatcatagaataagaaaacacgcctgctgagcaatttcattgtaccatgatcctgctcagcgcacaaggagcaatcatggcaagaaaaaagaaagtatctcccgggaaccgtctggttgcctactaccgttacagc

SEQ ID NO: 17786 - DNA, 260 bp, Unknown
  Description of Unknown: LeftRegion for integrase B4787 sequence
cgtgcatttgatgatcgtaaattgaatatgattaacaaacgtcgtgaatttttccatgttacattggacgaaatcaaggaagtagttcgccaaaactatgataaaacagttgaatttgtggatattcctgacgcttcgcaatatcgtgaaagcctaaaaattaaggaagctatgtaaacaccatacgagggagggttagcatgaaagctatctacgtaagacagtcacttgataaaaaggattcgttatccatcgatgcg

SEQ ID NO: 17787 - DNA, 260 bp, Unknown
  Description of Unknown: LeftRegion for integrase B4788 sequence
ttgcaccagtgcaactttcaataaaaaaatcagccccagtgcgccaacaccggagctgatccgatcttaccgggaatccccgtataaaatcaccttgaacaagtgaattttatcattttcccgggcagattgcaatgcaaacatatgtccgggcatttttatgcccatttttccgtacatttacttaggaggaatgtgcaatgtctaagaaagtgatgcgtaagtctacggagtccacggaccggatccgcaccggtgct

SEQ ID NO: 17788 - DNA, 260 bp, Unknown
  Description of Unknown: LeftRegion for integrase B4789 sequence
tttgctaatgagtagtattatagtatttttaattttattgtggatctactttacgtacgtgaaagaaaaatagcagcataaaaatcccgctaccgtactgccatacgatagcgggaaaatgtaataacccacctcgggctgattacgcttatagtatagcataatcagcccattttcaaaaaggagctgattttttttttatgcttagagccgctttatacgcacgtttttcttccgaaaaccagcgtgaagaatctatt

SEQ ID NO: 17789 - DNA, 260 bp, Unknown; identical to SEQ ID NO: 13002
  Description of Unknown: LeftRegion for integrase B4790 sequence

SEQ ID NO: 17790 - DNA, 260 bp, Unknown; identical to SEQ ID NO: 17762
  Description of Unknown: LeftRegion for integrase B4791 sequence

SEQ ID NO: 17791 - DNA, 260 bp, Unknown; identical to SEQ ID NO: 17678
  Description of Unknown: LeftRegion for integrase B4792 sequence

SEQ ID NO: 17792 - DNA, 260 bp, Unknown
  Description of Unknown: LeftRegion for integrase B4793 sequence
ttgggatttcccgaggattgggccaatatcttgaagcgtccataattccagtcataaagaatccccggcagctctgtacgatagagccaccggggccagatggggaatctgtctgtcggagaataatcataggataagaaaacacgcctgctgagcaatttcattgtaccatgatcctgctcagcgcacaaggagcaatcatggcaagaaaaaagaaagtatctcccgggaaccgtctggttgcctactaccgttacagc

SEQ ID NO: 17793 - DNA, 260 bp, Unknown; identical to SEQ ID NO: 17679
  Description of Unknown: LeftRegion for integrase B4794 sequence

SEQ ID NO: 17794 - DNA, 260 bp, Unknown; identical to SEQ ID NO: 16037
  Description of Unknown: LeftRegion for integrase B4795 sequence

SEQ ID NO: 17795 - DNA, 260 bp, Unknown
  Description of Unknown: LeftRegion for integrase B4796 sequence
aaataatcagttttgtcaaattacataaaatcagccccagtgttggagcaccggagctgatccgatcttaccgggtaaaccgaataaaatcagcttgaacaagtgcattttatcattttcccgggcagattgcaacgcaaacatatgtccgggcatttttatgcccatttttccgtacatttacttaggagggatgtgcaatgtctaagaaagtgatgcgaaaatcttcagaagtcacggagcagatccgcaccggtgcc

SEQ ID NO: 17796 - DNA, 260 bp, Unknown
  Description of Unknown: LeftRegion for integrase B4797 sequence
acggttcacgccaaccaataagtaaaaaaatcagccccagtgttggcgcaccggagctgatccgatcttaccgggtaaaccgaataaaatcaccttgaacaagtgcattttatcattttcccggacggattgcaatgcaaacatatgtccgggcatttttatgcccatttttccgtacatttacttaggaggaatgtgcaatggcaaagaaagtgatgcgtaaatctgccgagtccacggaccggatccgtaccggggct

SEQ ID NO: 17797 - DNA, 260 bp, Unknown
  Description of Unknown: LeftRegion for integrase B4798 sequence
ggtatccagcgtgaatttcttataagtatcgtctgatttaaagtaaaaaattccccggccatcgtcacgacacgatgccggggatacgcaggacgccattcctgcgcaggtgtaaaacacgcttgaaagggttgtgcttactgtatcattatagcatacacagcccattcgtagccatacgaaaggactgatttttttatatggaagaaagagcaaaagccgtcatctatgcccgtttttcctcggacaaacaacgggaa

SEQ ID NO: 17798 - DNA, 260 bp, Unknown; identical to SEQ ID NO: 17690
  Description of Unknown: LeftRegion for integrase B4799 sequence

SEQ ID NO: 17799 - DNA, 260 bp, Unknown
  Description of Unknown: LeftRegion for integrase B4800 sequence
atgggatttcccgaggattgggccaatattttgaagcgtacataattccagtcataaagaatccccggcagctctgtacgatagagccgccggggccagatggggaatctgtctgtcggagaataatcataggataagaaaacacgcctgctgagcaatttcattgtaccatgatcctgctcagcgcacaaggagcaatcatggcaagaaaaaagaaagtatctcccgggaaccgtctggttgcctactaccgttacagc

SEQ ID NO: 17800 - DNA, 260 bp, Unknown
  Description of Unknown: LeftRegion for integrase B4801 sequence
tgccccaccagataattaataataataaaatcagccccagtgcgccaacaccggagctgatccgatcttaccgggaaacccgaataaaatcaccttgaacaagtgaattttatcattttcccgggcagattgcaatgcaaacatatgtccgggcatttttatgcccatttttccgtacatttacttaggaggaatgtgcaatgtcaaagagaataaggtacaacatccctgattctgaggatcaagtacgtaccggagct

SEQ ID NO: 17801 - DNA, 260 bp, Unknown
  Description of Unknown: LeftRegion for integrase B4802 sequence
ggaaacaaattatataaaacaaaacaatattggattgataaatggaaaataatgcgtgataaagaatgtatggaaaatgaaatagataatttatcggtgaagtctttatagaaattgtaataaaattcatataatattttttaatgaatattagttgcaaaaagttttaatgagcgttacaatgcgggtgaggtgatgatatgaacggtgtaatttatgcaagatattcgagtgaaaatcagcgagaagagtctattgac

SEQ ID NO: 17802 - DNA, 260 bp, Unknown
  Description of Unknown: LeftRegion for integrase B4803 sequence
tgttgcaccgatgcaatttacaataaaaaatcagccccagtgcgccaacaccggagctgatccgatcttaccgggaaatcccgtataaaatcaccttgaacaagtgaattttatcatttcccggacagattgcaatgcaaacatatgtccgggcatttttatgcccatttttccgtacatttacttaggaggaatgtgcaatggccaagaaagtgatgcgtaaatctgccgagtccacggaccggatccgtaccggtgct

SEQ ID NO: 17803 - DNA, 260 bp, Unknown
  Description of Unknown: LeftRegion for integrase B4804 sequence
atcccgaggctatcggcgtatttaccaccaaaggaaagcagctcggaaacgtaaatgcagagttagcaagcgatttgatacataaatatcctaacaacaaaatgaaagttacaatttcagatataacaggcggcggagacaagaattacggttgtaatcttcacgtcgttatctacaaggcataattaaggaggcggacaatggcaagagccgcaaagcaagacaataattcggaaataattgacggcgtgatatatgcc

SEQ ID NO: 17804 - DNA, 260 bp, Unknown
  Description of Unknown: LeftRegion for integrase B4805 sequence
ccccgccgcgcctctcaacgatgcgtaccatggtggggtcgtttttttattgcaaaaagaatccccggcagctctgtacgatagagccgccggggccagatggggaatctgtctgtcggagaataatcataggataagaaaacacgcctgctgagcaatttcattgtaccatgatcctgctcagcgcacaaggagcaatcatggcaagaaaaaagaaagtatctcccgggaaccgtctggttgcctactaccgttacagc

SEQ ID NO: 17805 - DNA, 260 bp, Unknown; identical to SEQ ID NO: 17742
  Description of Unknown: LeftRegion for integrase B4806 sequence

SEQ ID NO: 17806 - DNA, 260 bp, Unknown; identical to SEQ ID NO: 17774
  Description of Unknown: LeftRegion for integrase B4807 sequence

SEQ ID NO: 17807 - DNA, 260 bp, Unknown
  Description of Unknown: LeftRegion for integrase B4808 sequence
taaagtaaaaccgcccctgcgccaacaggaacggtcaactgggagcacacgccaatgtgcttttgaaatacctccgaagagatactcacttaccaaagaatattgtatcatcttcggtgcagtcgcacaatcagaacttacgttctatgtatgactgttatttttgtacttttttacataatatatacggaggtgatatcatgtcatattgtatttatttaaggaaatcgagaaaggatcttgaagccgagcagcatggt

SEQ ID NO: 17808 - DNA, 260 bp, Unknown; identical to SEQ ID NO: 17692
  Description of Unknown: LeftRegion for integrase B4809 sequence

SEQ ID NO: 17809 - DNA, 260 bp, Unknown; identical to SEQ ID NO: 13967
  Description of Unknown: LeftRegion for integrase B4810 sequence

SEQ ID NO: 17810 - DNA, 260 bp, Unknown
  Description of Unknown: LeftRegion for integrase B4811 sequence
actggataggcgttagtttcagaaggaggtccgtcattcgtggcgggctttctgagccgctatgcgttacatagcgctatgctttaagatgagaatcgttggaaatgttatagaggttcgcaaaaaaatgtaactagaagtccgcttagcggacttcttcgcatgtcgagataaattcacagtgtgctatggagacaaaaatgaaagacgccgttatctatgccagatattcatcagacaggcagcgggaagaatccatc

SEQ ID NO: 17811 - DNA, 135 bp, Unknown
  Description of Unknown: LeftRegion for integrase B4812 sequence
ttattcattattatataattagaatccactatttgtccatatttttcattagataaactataaggagttgattttatgcaaagagcagttatctacgcgcgcttttcctcggacatgcagcgcgaagagtctatt

SEQ ID NO: 17812 - DNA, 260 bp, Unknown
  Description of Unknown: LeftRegion for integrase B4813 sequence
tgccccaccagataattaataataataaaatcagccccagtgcgccaacaccagagctgatccgatcttaccgggaaatccgataaaaatcaccttgaacaagtgcattttatcattttcccggacggattgcaatgcaaacatatgtccgggcatttttatgcccatttttccgtacatttacttaggaggaatgtgcaatgtctaagaaagtgatgcgtaagtctacggagtccacggaccggatccgtaccggtgct

SEQ ID NO: 17813 - DNA, 260 bp, Unknown
  Description of Unknown: LeftRegion for integrase B4814 sequence
gtgaggtgcagcgcctgatcgaatccgaaaagcgcccgtgatcttctttgcgccatccttggcaaaatagccattaaaaaacgccccgcccatgttaccagcatggacgagacgaagtattcaattcacactctttttctttatgcggctcatcaagggattcattcaactgttatcactatttaagggggtgatccaatttgaaagccgtcatatatgcccgcttctccagccacaaccagcgcgaagaatccatcgaa

SEQ ID NO: 17814 - DNA, 260 bp, Unknown
  Description of Unknown: LeftRegion for integrase B4815 sequence
aacaaagcgtattggaaatgaaataatgttctacagtaatgcaataaatatgtaaaaaaacaccccgtgctaccaacacggagtgatcgggcggtactaccaataccacccagcatagaaaaatgacctcaccagtcatatctttttctatgcctctattttaccacatcacaacataaaatgtaaatggaggtatcaacatgcaatatttaatttatctaaggaagtcccgcgctgaccaggaagcggagctgcgtggt

SEQ ID NO: 17815 - DNA, 260 bp, Unknown
  Description of Unknown: LeftRegion for integrase B4816 sequence
cgacatatgccttcaaattcgctgttgaaagcggcaagatggcaaaagcaaaattacggaaataaaaaaagaggcccatttagggcctctatttgcatataaaaagaaaaaaccgccatgaattggcagcatggcggaatttctttgatttacatttgataattcttatttaattatatcaccgacaaggaaaccacacaatgaacaatttaaaagctgtaatatatgcgagatactcctcagataagcaacgagatgaa

SEQ ID NO: 17816 - DNA, 260 bp, Unknown
  Description of Unknown: LeftRegion for integrase B4817 sequence
gcagactatttcacgttgggaaagcgggaaacgtgcgcccaatggtgaggaaatcaggttgctagttaacctgcttcattgctccgctgatttcattcttggtctgtcggacacaatcacgattcccgaacaatagaaaaaccccgcgcaggtttgacggctggcgcggggcaataccaaataggcaaggtgattttatcatggtcaaacgtagagcggctatatacgcccgcttttcgtcacacaaccaacggtcggaa

SEQ ID NO: 17817 - DNA, 260 bp, Unknown
  Description of Unknown: LeftRegion for integrase B4818 sequence
ccgtatatgccgctttttcaaaaagaacttgatatatcctccgaatggttggaaaactcatacacatacacgccaaggccgtataagccttcaaagcgcgcactccaaatggaggcggacatcaaagaaaccgctcacaagtacataacaaacgaaaaagcccttctgctgggcgcagaagggcgtaacgggtaacagatatgtcagtagatattaaatggcaggtgccaaaggcacagccggaggccagcgagctggcc

SEQ ID NO: 17818 - DNA, 260 bp, Unknown
  Description of Unknown: LeftRegion for integrase B4819 sequence
aagcatcacaagctgaagaatatcagaaaatttttaatgacattataagcaaataaaaaaacactccctgcgccaacagagagtgtccgatatcagcgccaactgatatcaagcatagaaaaatgacctcaccagtcatatctttttctatgcctctattttaccacatcggaacataaaatgtaaatggaggtatcaacatgcaatatttaatttatctaaggaagtcccgcgctgacagggaagcggagctgcgtggt

SEQ ID NO: 17819 - DNA, 260 bp, Unknown
  Description of Unknown: LeftRegion for integrase B4820 sequence
aaaagctttatagcactctcaaaaacgcaaattaacttgtaaattagcagaaaaaatatataatatgtcaaacattcttgaaaatagcattaaccaaacgatcgggcgttctctttcaacgcaagaaatgtctttggctatttcaagaattagtgaatacgtccaatgcctaattatacttgataaggaacaaaaaaacaatgaaagctgtgattctggccagagtaagctcaaaagaacaagaggacgggtacagtcta

SEQ ID NO: 17820 - DNA, 260 bp, Unknown
  Description of Unknown: LeftRegion for integrase B4821 sequence
cggggtatattcgcaagctcctcgtagatggattgttgaccgaagccgaataccgcacagccgaaaacaggctggcggagcgctataacccgctgcgaaggcttgaataaagccttcgcagtgtgcatgaattgccgtggatattggggtaacgttgtggtatcgtgtgttgctaataagagcgggaaggagtgagatagatgcccgaaatacgctatataccagcggttggcgctccagaaaacgccaagctgcccgtt

SEQ ID NO: 17821 - DNA, 260 bp, Unknown
  Description of Unknown: LeftRegion for integrase B4822 sequence
tattacgccctctccgtacaacagagataggacgatttaactataacacctccggagatgctacagcatttcaccaaatatattgtatcatcttcggacagctatcgcaatcggaacgtatattcgatggctgttatttttgtactcatttttaatataatttacaaagtttaatataatttacaaaggagactgatataatgtcttatttaatttatttacgtaagagtcgtaaggatctagaaaatccacttatgacc

SEQ ID NO: 17822 - DNA, 260 bp, Unknown
  Description of Unknown: LeftRegion for integrase B4823 sequence
tctgcttaccctcgggctttgcggtgtaggaatcatagtagacctgattctgatactactgaagccggatccatattacgtatagaaaaagtccaggtgcttcaacgcctggactttttgcacaccggaattaatcacaatgcacctactacacttgcattgtatcattctggaataaaaatatcaaggaggaatgtacagtgtatcaatcttacgaattcaaaccagaggagatccttgtctatctccgaaaatccaga

SEQ ID NO: 17823 - DNA, 260 bp, Unknown
  Description of Unknown: LeftRegion for integrase B4824 sequence
atcactaaacactacgccaatagtgtttaatcctcgtaatcaatacgaggtcgtatataacgcacacatctcgaagatgcgtacaatactcaccacatatattgtatcatcttcgagcagtcatcgcaatcgaaacatattttcggtggctgttatttttgtactcatttttaatataatttacaaaggagattgatataatgtcttatttaatttatttacgtaagagtcgtaaggatctcgaaaacccttttatgacc

SEQ ID NO: 17824 - DNA, 260 bp, Unknown
  Description of Unknown: LeftRegion for integrase B4825 sequence
gcgatttatgcgactgcatcgtggccttgggcggtgatgatcaggcgatcatcgtatatatcgaccttgaggatgacgctctgctcgacctgcaaggcgagctgcgcgattgcatcgcctccagcatccggtacaccggtcaataacttgctccccagcccgcaggtgcgggcattatcatatacagaggtggtgatcctatggccttttgcatgtatctgcgcaagtcccgcgcagatatggaggcggaggcgcacggc

SEQ ID NO: 17825 - DNA, 260 bp, Unknown
  Description of Unknown: LeftRegion for integrase B4826 sequence
tattttgctgacatcagaaaaatagataaactaaaaaccgtccagttgcagctggacggaataaaaagaaaaactacttgcatctataggttagatgtgtacttttccccgacagttaaagtataccatttttaacctacactttgcaagaagtgtattttttgtacccaaatttacaatatggaaaggaacgatggtatatgaacataggaaaactaaaaaaatcagatcaattctgcatttacttaagaaaaagtcgt

SEQ ID NO: 17826 - DNA, 260 bp, Unknown
  Description of Unknown: LeftRegion for integrase B4827 sequence
tgcaatactagatttattataaaaaacaaaaccgcccctgcgccaacaggaacggttttgaatatacatccgaagatgtacagttatcctaaacaaatatattgtatcatcttcgagcagctatcgcaatcggaacatactttcgatggctgttatttttgtactcatttttaatataatttacaaaggagattgatataatgtcttatttaatttatttacgtaagagtcgtaaggatctcgaaaacccttttatgacc

SEQ ID NO: 17827 - DNA, 260 bp, Unknown
  Description of Unknown: LeftRegion for integrase B4828 sequence
tttgcaaacgcattggccgggctgcccgtgcttacgacctctgcgatccaacgtaactgcaagtgcggaatcgaccgcgcgtactcgatactacgcaatcttcaggtctacgggcttatccatggggccggaaaagacacctatgaatggacagaaaaagcccttctgctgggcgcagaaggacgtaacgggtaacagatatgtcagtagatattaaatggcaggtgccaaaggcacagccggaggccagcgaactggcc

SEQ ID NO: 17828 - DNA, 260 bp, Unknown
  Description of Unknown: LeftRegion for integrase B4829 sequence
cgcttattgcttttttcttaaactaataaaaccgctcctgcgccaacaagaacggttttgattatacatccgaagatgtacagttatcctaaacaaatatattgtatcatcttcgaaacagccttgcaatcggaacatatattcgatggctgttatttttgtactcatttttaatataatttacaaaggagattgatataatgtcttatttaatttatttacgtaagagtcgtaaggatcttgaaaacccttttatgacc

SEQ ID NO: 17829 - DNA, 260 bp, Unknown
  Description of Unknown: LeftRegion for integrase B4830 sequence
atcactaaacactacgccaatagtgtttaatcctcgtaatcaatacgaggtcgtatataacgcacacatctcgaagatgcgtacaatactcaccacatatattgtatcatcttcgagcagtcatcgcaatcgaaacatattttcggtggctgttatttttgtactcatttttaatataatttacaaaggagattgatataatgtcttatttagtttatttacgtaagagtcgtaaggatctcgaaaatccttttatgacc

SEQ ID NO: 17830 - DNA, 260 bp, Unknown
  Description of Unknown: LeftRegion for integrase B4831 sequence
gagcgtgatctgctggatacctggcgaggtgctaccgatgctgcacgagagtcggcgatgatggtgctccgatgcaatccggcgccggttgtgaaaaaagagacggcaatttgatcgtcgtcgatttcacgcgacacaaaagaggcccgcgataaaaagcggactgactttgtgtaaatataacgaaaggaggcgattgcatggatcaagttggtgtgatctatgcgcgtttctccagccacgctcagcgtgaggagtcg

SEQ ID NO: 17831 - DNA, 260 bp, Unknown
  Description of Unknown: LeftRegion for integrase B4832 sequence
atgagatcaactactacaaggcgcaggaaatcacggaactgctctacgccagaggcatgatcacatttgacgagtatgacaaattaacggacttgaaccgccgatctttctctcccttgtatgcggacttattaccgaaaacgcttgaaaaaccagccactcagagttaatattgtatactgacaaaggagggaaaaccaatgaaaatcaagaaaattgaagcacagccgcaagaggtaaaaaagctccgcgtggctgca

SEQ ID NO: 17832 - DNA, 260 bp, Unknown
  Description of Unknown: LeftRegion for integrase B4833 sequence
acataaaattactctagacgaactatttaatttttttaaaaattacaaatagtaaaaaaacaccccgtgctaccaacacggagtgaataggcggtactaccaataccacccagcatagaaaaatgacctcgccagtcatatctttttctatgcctctattttaccacatcggaacataaaatgtaaatggaggtgtcaacatgcaatatttaatttatctgaggaagtcccgtgctgacagagaagcggagctgcgtggt

SEQ ID NO: 17833 - DNA, 260 bp, Unknown
  Description of Unknown: LeftRegion for integrase B4834 sequence
gcgcatcgaggagcgcttccgcgccgccttagacagcagggataagcaattcgccgccgagcgcgccgtctacgcccgctggctccgcgtgctggccatcgcctgcgccgcgctggtactgtttgtcatgcttctgctcgtcatcgatatcatcaaccccaacgcgggctgggtccgaacgccatgaaaggaggaatcacatggcatactgcatctatctgcgcaagtcgcgcaaggacatggaggctgaggcgcgcggc

SEQ ID NO: 17834 - DNA, 260 bp, Unknown; identical to SEQ ID NO: 17829
  Description of Unknown: LeftRegion for integrase B4835 sequence

SEQ ID NO: 17835 - DNA, 260 bp, Unknown
  Description of Unknown: LeftRegion for integrase B4836 sequence
tcgttatgtggctgggcgcaatcggaatgatttttgagggtgctggcagtgagaaactgttctccctctgggtgattttcttactggcctgtttcaacgtacctgacctgatctggctgaaactgggcaagtttcgggataacgtgggcgactatctgcggcaataaaaaaagcccgcacactggcgggcgggtgatggtatgaaaaaagagaacgaaatccgggcagttgtctatgcccggtactcatcccattcgcaa

SEQ ID NO: 17836 - DNA, 260 bp, Unknown
  Description of Unknown: LeftRegion for integrase B4837 sequence
ttattcttaaaaaatattatttcatagttaaaagtaaattattttatttatttctacattttaatttaaatacgccataataacaaaagaacatatatttcacttattgtaggcctattccacataacttcaactaaactactttccttttccccaatattccaatataataaacatataaataccaatgaggtgattttatgactatggatcgtatttgcatgtatcttcgtaagtctagggctgatgaagaagctgaa

SEQ ID NO: 17837 - DNA, 260 bp, Unknown
  Description of Unknown: LeftRegion for integrase B4838 sequence
tcacgcaggaagaattcgaagcaaaaaagaaacagcttttaaacttataaaattaaaaaacaccccgtgctaccaacacggagtgtataggcggtactaccaataccacccagcatagaaaaatgacctacccagtcatatctttttctatgcctctattttaccacaactaagcataaaatgtaaatggaggtatcaacatgcaatatctaatctatctgagaaagtcccgcgccgacagagaagcagagctgcgtggt

SEQ ID NO: 17838 - DNA, 260 bp, Unknown; identical to SEQ ID NO: 17312
  Description of Unknown: LeftRegion for integrase B4839 sequence

SEQ ID NO: 17839 - DNA, 260 bp, Unknown
  Description of Unknown: LeftRegion for integrase B4840 sequence
atcactaaacactacgccaatagtgtttaatcctcgtaatcaatacgaggtcgtatataacgcacacatctcgaagatgcgtacaatactcaccacatatattgtatcatcttcgaacagtcatcgcaatcgaaacatattttcggtggctgttatttttgtactcatttttaatataatttacaaaggagattgatataatgtcttatttaatttatttacgtaagagtcgtaaggatctcgaaaacccttttatgacc

SEQ ID NO: 17840 - DNA, 260 bp, Unknown
  Description of Unknown: LeftRegion for integrase B4841 sequence
ttatccgatttacgccgttttgctgaattttacggtgtagggcttgattatttcggcgtaacaacagaaaatgaaagttttgaattgttaagccgtgcaaaaaatatttttctcaattcagatattccaaaagaggaacgggaacggctataccgtgagattatgaaaatgtatctgcaaatgtagaaaaggggaaaagaatgtataaacgaatagggttatatgcaaggtattccgatacaaaacaagacgacggatat

SEQ ID NO: 17841 - DNA, 260 bp, Unknown; identical to SEQ ID NO: 17822
  Description of Unknown: LeftRegion for integrase B4842 sequence

SEQ ID NO: 17842 - DNA, 260 bp, Unknown
  Description of Unknown: LeftRegion for integrase B4843 sequence
actccgttagagggcatgagtaaagagcaagcctctctttatatgctcacggaatttctaagcctcatagataaagaatatcctaaaataccgccccagcagaaagccgctttaattagcgaattttataagcatgaccctataaaattgttattatctgcacttaataacgaactatccaaacaaggaagtgataaaaaatgatgcagcaggcattgaacgccgtaatatacgcccgttattcttcccacaatcaaaca

SEQ ID NO: 17843 - DNA, 260 bp, Unknown
  Description of Unknown: LeftRegion for integrase B4844 sequence
tcttttccttgcggtgagactctttgtccttcttcatgattgccttactcctttcatagagtttggcaccggtgcagttatgattatatcattttatttacggtttgtcatcaaaaagatatagtataacatgtgagcgatttcgacaaaaatctgttatataattatcttatgttcgaaaaaatcagggttagaaaggtatgcaactgaatatgcgcgacactaaaacgagcaatgaattacaagctgctcgcggcgtc

SEQ ID NO: 17844 - DNA, 260 bp, Unknown
  Description of Unknown: LeftRegion for integrase B4845 sequence
aagatgaatattacaatacagatttaagaactgcacaaaaggatagtcttgcttacctaataggtaattacatattctataaatcttatggaatgtatttttcaaaggaattacaagaccaatatggaaatcgtgatgtactaaagaaataaaaaaagagccacctacacaggtggctttattcatagaaaggattaactatggaattgtcaaaaggagttatatatgcacgttactcgtcagataagcaacgtgatgaa

SEQ ID NO: 17845 - DNA, 260 bp, Unknown
  Description of Unknown: LeftRegion for integrase B4846 sequence
tcacgcaggaagaattcgaagcaaaaaagaaacagcttttaaacttataaaattaaaaaacaccccgtgctaccaacacggagtgaataggcggtactaccaataccacccagcatagaaaaatgacctacccagtcatatctttttctatgcctctattttaccacatcggaacataaaatgtaaatggaggtatcaacatgcaatatttaatttatctgaggaagtcccgtgccgacagagaagcggagctgcgtggt

SEQ ID NO: 17846 - DNA, 260 bp, Unknown
  Description of Unknown: LeftRegion for integrase B4847 sequence
tatcgccattccgacaggcattatttccgccggattcacgtctttgatcggaaaagataaagaagaacccgacaaaaagaactattgtccatattgcggccataagctcgacgaataatagcgcaatctcgcattcaaaatagttgaaatgcgcttattttgcatttgcaatataaagtatttaacgagtaggtgattgcatgaaagcggccatatacgcccgtttttcgagccataatcagcgcgaggaatccattgaa

SEQ ID NO: 17847 - DNA, 260 bp, Unknown
  Description of Unknown: LeftRegion for integrase B4848 sequence
attgttaaacactacgccaatagtgtttaaccctcgtaataaatacaaggtcgtatataacgcacacatctcgaagatgcgtacaatactcaccgcatatattgtatcatcttcggacagctatcgcaatcggaacatactttcgatggctgttatttttgtactcatttttaatataatttacaaaggagattgatataatgtcttatttaatttatttgcgaaagagtcgcaaggatcttgaaaacccttttatgacc

SEQ ID NO: 17848 - DNA, 260 bp, Unknown
  Description of Unknown: LeftRegion for integrase B4849 sequence
aaaagctttatagcactctcaaaaacgcaaattaacttgtaaattagcagaaaaaatatataatatgtcaaacattcttgaaaatagcattaaccaaacaatcgggcgttctctttcaacgcaagaaatgtctttggctatttcaagaattagtgaatacgtccaatgcctaattatacttgataaggaacaaaaaaacaatgaaagctgtgattctggccagagtaagctcaaaagaacaagaggacgggtacagtcta

SEQ ID NO: 17849 - DNA, 260 bp, Unknown
  Description of Unknown: LeftRegion for integrase B4850 sequence
cccggcattcatcatgtcagggagaaccccggaatgtcggctattcataaggaacatagtcgaacaggtaattgtgagcaaggacaatgcggctgtcactctgagagtgacagccgtttcctgtatgcgtaatcgcaaagaccgtaaacatatattatcctctgggatagaccctaaaatatatcaggaggataaacaccatgaacgaaaacaaaaatgccgtgctgtatgcaagattcagctcagatatgcagcatgaa

SEQ ID NO: 17850 - DNA, 260 bp, Unknown; identical to SEQ ID NO: 17156
  Description of Unknown: LeftRegion for integrase B4851 sequence

SEQ ID NO: 17851 - DNA, 260 bp, Unknown
  Description of Unknown: LeftRegion for integrase B4852 sequence
atcactaaacactacgccaatagtgtttaatcctcgtaatcaatacgaggtcgtatataacgcacacatctcgaagatgcgtacaatactcaccacatatattgtatcatcttcgagcagtcatcgcaatcgaaacatattttcggtggctgttatttttgtactcatttttaatatactttacaaaggagattgatataatgtcttatttaatttatttacgtaagagtcgtaaggatctcgaaaacccttttatgacc

SEQ ID NO: 17852 - DNA, 260 bp, Unknown
  Description of Unknown: LeftRegion for integrase B4853 sequence
ttgttgacctcaacaaaatcgtagaaataataaaaccgcccggtgctaccaacaccgaacggcttatatagatgctatacaggctgcagaacagccgatataactatcccgcagatagattatatcacaaactctctgcacctgtatagggtgtattttttatacccttttataatatgattagacaggaggaatgtgatatgaaaatagggatctatccaagaaaatcagtgtaccgggataacagcgactcagttgct

SEQ ID NO: 17853 - DNA, 260 bp, Unknown
  Description of Unknown: LeftRegion for integrase B4854 sequence
tgcaattacacaggaagaatttgaaacaaagaaaaaacaacttttagacttataaaaaaacaccccgtgctaccaacacggagtgaataggcggtactgccaataccacccagcatagaaaaatgacctacccagtcatatctttttctatgcctctattttaccacatcggaacataaaatgtaaatggaggtatcaacatgcaatatttaatttatctgaggaagtcccgtgctgacagagaagcggagctgcgtggt

SEQ ID NO: 17854 - DNA, 260 bp, Unknown
  Description of Unknown: LeftRegion for integrase B4855 sequence
acttgaacgaatagcaaagtattttggggttgggttagattattttggggttcaaacaacggatgatttatttgatattgtcgcaagggcaaaagaaatattcaataatgacaatatctctattgaagtaaaagaagaattatatcttgaaatgatgaaattgtatatggcattaaaagaaaacaactaggggtgcagttatgaatatagaatattcagggcttgtggcagatgcatattgtagatattcatctaaaatg

SEQ ID NO: 17855 - DNA, 260 bp, Unknown; identical to SEQ ID NO: 17826
  Description of Unknown: LeftRegion for integrase B4856 sequence

SEQ ID NO: 17856 - DNA, 260 bp, Unknown; identical to SEQ ID NO: 13967
  Description of Unknown: LeftRegion for integrase B4857 sequence

SEQ ID NO: 17857 - DNA, 260 bp, Unknown
  Description of Unknown: LeftRegion for integrase B4858 sequence
aagcatcacaagctgaagaatatcagaaaatttttaatgacattataagcaaataaaaaaacactccctgcgccaacagagagtgtccgatatcagcgccaactgatatcaagcatagaaaaatgacctcgccagtcatatctttttctatgcctctattttaccacatcggaacataaaatgtaaatggaggtatcaacatgcaatatttaatttatctgaggaagtcccgtgctgaccaagaagcggagctgcgtggt

SEQ ID NO: 17858 - DNA, 260 bp, Unknown; identical to SEQ ID NO: 17847
  Description of Unknown: LeftRegion for integrase B4859 sequence

SEQ ID NO: 17859 - DNA, 260 bp, Unknown
  Description of Unknown: LeftRegion for integrase B4860 sequence
cgaccagttgcagtacgaaggctttacggagcaggaagcggcatacggagcagacaactgcgcagccgattggaacacccaggcggctcttgccgcacagaattatttagacattatgcccttttcgagggatggacttattgatcagctaacgcacgacggatacacaaccgagcaagcggaacacggagctgattccgttggcctgtaataagcgcggatacatatacgcacggtttagcagcgataaccagcgggaa

SEQ ID NO: 17860 - DNA, 260 bp, Unknown; identical to SEQ ID NO: 15966
  Description of Unknown: LeftRegion for integrase B4861 sequence

SEQ ID NO: 17861 - DNA, 260 bp, Unknown
  Description of Unknown: LeftRegion for integrase B4862 sequence
ttagaaccgaagaaatagttaatatgcaaagggaaataaataaatttaaacaataaaaaaacaccccctgcgccaacagagagtgtccgatatcagcgccaactgatatcaagcatagaaaaatgacctcaccagtcgtatctttttctatgcctctattttaccacaactaagcataaaatgtaaatggaggtatcaacatgcaatatctaatctatctgagaaagtcccgcgccgacagagaagcagagctgcgtggt

SEQ ID NO: 17862 - DNA, 260 bp, Unknown
  Description of Unknown: LeftRegion for integrase B4863 sequence
ttatcggatttacgccgttttgctgaattttacggtgtagggcttgattatttcggtgtaacaacagaaaatgaaagttttgaattgttaagccgtgcaaaaaatatttttctcaattcaaatattccaaaagaggaacgggaacggctataccgtgagattatgaaaatgtatctgcaaatgtagaaaaggggaaaagaatgtataaacgaatagggttatatgcaaggtattccgatacaaaacaagacgacggatat

SEQ ID NO: 17863 - DNA, 260 bp, Unknown
  Description of Unknown: LeftRegion for integrase B4864 sequence
ttatcggatttacgccgttttgctgaattttacggtgtagggcttgattatttcggcgtaacaacagaaaatgaaagttttgaattgttaagccgtgcaaaaaatatttttctcaattcagatattccaaaagaggaacgggaacggctataccgtgagattatgaaaatgtatctgcaaatgtagaaaaggggaaaagaatgtataaacgaatagggttatatgcaaggtattccgatacaaaacaagacgacggatat

SEQ ID NO: 17864 - DNA, 260 bp, Unknown
  Description of Unknown: LeftRegion for integrase B4865 sequence
cgcttattgcttttttcttaaactaataaaaccgctcctgcgccaacaagaacggttttgattatacatccgaagatgtacagttatcctaaacaaatatattgtatcatcttcgaaacagccttgcaatcggaacatatattcgatggctgttatttttgtactcatttttaatataatttacaaaggagattgatataatgtcttatttaatttatttgcgaaagagtcgcaaggatcttgaaaacccttttatgacc

SEQ ID NO: 17865 - DNA, 260 bp, Unknown
  Description of Unknown: LeftRegion for integrase B4866 sequence
caattacgcaagaaaaattcgaagcaaagaaaaaacaatttttaatcttataaactaaaaacaccccgtgctaccaacacggagtgaataggcggtactaccaataccacccagcatagaaaaatgacctcgccagtcatatctttttctatgcctctattttaccacatggaacataaaatgtagatggaggtgtcaacatgcaatatttaatttatctaaggaagtcccgtgctgaccaggaagctgagctacgtggt

SEQ ID NO: 17866 - DNA, 260 bp, Unknown
  Description of Unknown: LeftRegion for integrase B4867 sequence
cccggcattcatcatgtcagggagaaccccggaatgtcggctattcataaggaacatagtcgaacaggtaattgtgagcaaggacaatgcggctgtcactctgagagtgacagccgttttctgtatgcgtaatcgcaaagaccgtaaacatatattatcctctgggatagacccaaaaaaatatcaggaggataaaaaccatgagcgaaaacaagaatgccgtactgtatgcaagattcagctcagatatgcagcatgaa

SEQ ID NO: 17867 - DNA, 260 bp, Unknown; identical to SEQ ID NO: 13468
  Description of Unknown: LeftRegion for integrase B4868 sequence

SEQ ID NO: 17868 - DNA, 260 bp, Unknown
  Description of Unknown: LeftRegion for integrase B4869 sequence
caaaaacagaccctcaaaaatgataacagaggatgaaataaatgaaatcctgcgcaaacaccagtaaggagctgattgcatgagtccatttgtcaaggaaaccctcaccggcttgctctgtatcgccttgcttgtagtctgggtgattatccatgtcacccatgacctgaatgactggaataataaatggaagtgatcaaatgtccaccgagtatgccatctatctccgcaaatcccgtgccgacctcgaagccgaggcg

SEQ ID NO: 17869 - DNA, 260 bp, Unknown
  Description of Unknown: LeftRegion for integrase B4870 sequence
gtccgacgacccatccgctcctgataatgatataatcgacagaagtgaagttgcgggcacatcaagctatcctcaaaaaacagaaaagaagtcctggattaactccgataatgttgacttattagtctttcctttggttggtgttatcgccctgtttctgtgtctattggacaaactgattcaaaaaaggaggtgattccatgcccaccgaatacgccctgtacctgcgcaaatcccgcgccgacctcgaagccgaggcg

SEQ ID NO: 17870 - DNA, 260 bp, Unknown
  Description of Unknown: LeftRegion for integrase B4871 sequence
gaagaaaaaaccaaagacaaataaaaccgccccaccattaagcggagcggcaatgcaattgctctgaatgaacaatcgccctaagcaagcatattgtatcattcggagcagccaagtgcaagcggaacacacgttccacgctggctgttatttttatacctatttttacatacactgtacaggagcaaaggagtgatactatgcttagaatcggaatctatccacgaaaatcggtctaccgggacaacagtgactcggtg

SEQ ID NO: 17871 - DNA, 260 bp, Unknown
  Description of Unknown: LeftRegion for integrase B4872 sequence
gcgactgtacgccgcaatggaagcagaacattgcaatgacagcccgtgcggcggcgggcgaatcgaaaaagaaagccgaaaataatttacctgccgccgctgtcaggtcggcataaatagagaagccccgcgctggtcggcaaactcacgcggggcaaacacccaaccattagcaaggttataggcaaggtgattttatcatggtcaaacgtagagcggctatatatgcccgcttttcgtcacacaaccaacggtcggaa

SEQ ID NO: 17872 - DNA, 260 bp, Unknown
  Description of Unknown: LeftRegion for integrase B4873 sequence
cagcggagggcgaaccgtttactaccgtcggttagttctgcaacgcgccgcagacgagtggttgaagcgtcaccgctgaccaccatgcaaaaagaaaaagcccaccggagccgtacccggtaggctttttcttgcgtaaaaaaataatgccccatccttccgtctggaagaacagggcattttgaaaggatatactatatatgagaaagaagaaagtcaagggcggcaaccgccttgttgcctactaccgctactccggc

SEQ ID NO: 17873 - DNA, 260 bp, Unknown; identical to SEQ ID NO: 15832
  Description of Unknown: LeftRegion for integrase B4874 sequence

SEQ ID NO: 17874 - DNA, 260 bp, Unknown
  Description of Unknown: LeftRegion for integrase B4875 sequence
accgcgccggatagcgatatcatcgaccgcagcgaggtgcataccgccgttcacgatcccgatttgtccgctccggagccggaaccgaaaaagcaagccaaaatctcaatcaccgatcatatagaattgctggtgttcggcgcgctcggcatagtggtgctgctcgcactgatcgtcagcagacaaaggaggtaagataattgtcaaccgaatacgccctctatctccgcaaatcccgtgccgacctcgaagccgaggcc

SEQ ID NO: 17875 - DNA, 260 bp, Unknown
  Description of Unknown: LeftRegion for integrase B4876 sequence
atcgttctttgtccagaagatcgaagcatgagttcatgtcgatggtttacacctttgagactcaagaagaattggcaggggatacggagaacactcagtcttctattgggtgagatcaaaaagaaaaaggtcatcccttacaaggcttttgaaacctttcggagattgacccttagaaaacgagtattggagcagaagcgatgacaaaagctgtgatctatgctcggtattcgagccacaatcaaagagaagaatccatc

SEQ ID NO: 17876 - DNA, 260 bp, Unknown
  Description of Unknown: LeftRegion for integrase B4877 sequence
caaaaacagaccctcgaaaacgataacggaggatgaaataaatgaaatcctgcgcaaacaccagtaaggagctgattgcatgagtccatttatgaaagaaaccctcaccggcctgctctgtatcgccttgcttgtagtctgggtgattatccatgtcacccatgacctgaatgactggaataataaatggaagtgatcaaatgtcaaccgagtatgccatctacctccgcaaatcccgtgccgacctcgaagccgaggcg

SEQ ID NO: 17877 - DNA, 260 bp, Unknown
  Description of Unknown: LeftRegion for integrase B4878 sequence
ttttacgttgattatcttttattcttcattttcgtaaaatttgcaaaaagaaaaagctcgccgggccgaagcctgacgggctatagatgaaactgtatttatataattcagcagcgatttatgatttttcgtctcacacgttgcgctttcgtctaatctgcgggttaaatgagacgattacttgaaaggacgctcaaggtatggcaaaaagaaaattcaacaagggcggcgaggttcggctggtcgcctattacagatac

SEQ ID NO: 17878 - DNA, 260 bp, Unknown
  Description of Unknown: LeftRegion for integrase B4879 sequence
gaagacggctcatcagatgactcggcccacattattgagatcataaaagatgtttctaaattaacaaatcgttaaacaaaaaaatcccccgatgtgctgcaacacatcgagggcaatccataatcccctcccaaaagggtcgattacgctataagtatatcacatcggccctttttacaacagaaaggactgatttttttatgtcgaaaattgcagtaatctacgcacgctattcttcggaccgtcaacgagaagagtct

SEQ ID NO: 17879 - DNA, 260 bp, Unknown
  Description of Unknown: LeftRegion for integrase B4880 sequence
tatgctgttgttccgtttatggccgctgtcctctgcttcctgctcaatcatatcggctctggtaactaaggaggcaaatatgagtccatttgtaaaggaaaccctcaccggcctgctttgcatcgccctgcttgttgcctgggtgattatccatgtcacacatgatctgaataactggaataataaatggaagtgataaaatgtccaccgagtatgccatctatttgcgcaaatcccgcgcggacctcgaagccgaggcc

SEQ ID NO: 17880 - DNA, 260 bp, Unknown; identical to SEQ ID NO: 15832
  Description of Unknown: LeftRegion for integrase B4881 sequence

SEQ ID NO: 17881 - DNA, 260 bp, Unknown
  Description of Unknown: LeftRegion for integrase B4882 sequence
tctttacgttattaagcaaaataaaaccgccccaccaataagcggagcggcaatgcaactgttctgaatgaacaatcgccctcaacaagcatattgtatcattcggagcagccaagtgcaagcggaacacacgttccacgctggctgttatttttatacctatttttacatacactgtacaggagcaaaggagtgatactatgcttagaatcggaatctatccacgaaaatcggtctaccgggacaacagtgactcggtg

SEQ ID NO: 17882 - DNA, 260 bp, Unknown
  Description of Unknown: LeftRegion for integrase B4883 sequence
catgtaaacgatgttggaataaataataaaaccgccccactctaaagcaggacggttatgctcccgatgatacggtagccctagacaagcatattgtatcattcggagcagccaagtgcaagcggaacacgcgttccatgctggctgttatttttatacccatttttacatacactgtacaggaacaaaggagtgatactatgcttagaatcggaatctatccacgaaaatcggtctaccgggacaacagtgactcggtg

SEQ ID NO: 17883 - DNA, 260 bp, Unknown
  Description of Unknown: LeftRegion for integrase B4884 sequence
aaatcaattacacaatatgtaaaaaaccgccccaccattaagtggagcggcaatgcaactgttctgaatgaacaatcgccctagacaagcatattgtatcattcggagcagcccggcgcaagcggaacacccgttctttgctggctgttatttttatacctatttttacatacactgtacaggaacaaaggagtgatactatgcttagaatcggaatctatccacgaaaatcggtctaccgggacaacagtgactcggtg

SEQ ID NO: 17884 - DNA, 260 bp, Unknown
  Description of Unknown: LeftRegion for integrase B4885 sequence
aaatcaattacacaatatgtaaaaaaccgccccaccattaagtggagcggcaatgcaactattctgaatgaacaatcgccctagacaagcatattgtatcattcagagcagccaaacgcaagcggaacaccggttccatgctggctgttatttttatacccatttttacatacactgtacaagaacgaaggagtgatactatgcttagaatcggaatctatccgcgaaaatccgtctaccgggacaacagtgactcggtg

SEQ ID NO: 17885 - DNA, 260 bp, Unknown
  Description of Unknown: LeftRegion for integrase B4886 sequence
gcgaatcttcgccgcaatggcagcagaacattgcaatgacagcccgcgcggcggcgggcgaatcgaaaaagaaagccgaacatcatatacctgccgccgctgtcaggtcggcataaatagagaagccccgcgctggtcggcaaactcacgcggggcaaacacccaaccgttggcaaggttaaaggcaaggtgattttatcatggtcaagcgcagggctgctatatatgcccggttttcgtcgcacaatcaacgttcggaa

SEQ ID NO: 17886 - DNA, 260 bp, Unknown
  Description of Unknown: LeftRegion for integrase B4887 sequence
ttgcagaaacaacataataaaaaataaaaaccgccccactctaaagtaggacggtcgcgctctcgaatgatacgaaagccctagacaagcatattgtatcattcggagcagccaagtgcaagcggaacacgcgttccatgctggctgttatttttatacctatttttacatacactgtatgagagcaaaggagtgatactatgcttagaatcggaatctatccacgaaaatcggtctaccgggacaacagtgactcggtg

SEQ ID NO: 17887 - DNA, 260 bp, Unknown
  Description of Unknown: LeftRegion for integrase B4888 sequence
gaccaaggagagacaaatggcaaaaactataattaaaaaatattctaataacactacggtggttattacatacaacaacgaaccttctttagaggctatcaagcagtatgcccaaaaattaaagcagacaattgacagcaaaagtattcagagttaacatatatttataaaatcaatagagaaggtgatattcgttggaaatgcgaaatgaatacaatccaattattataaaatatgttgcagaatatttgagaaaatct

SEQ ID NO: 17888 - DNA, 260 bp, Unknown
  Description of Unknown: LeftRegion for integrase B4889 sequence
caaaaacagaccctcgaaaacgataacagaggatgaaataaacgaaatcctgcgcaaacaccagtaaggagctgattgcatgagtccatttgtcaaggaaaccctcaccggcttgctctgtatcgccttgcttgtagtctgggtgattatccatgtcacccatgacctgaatgactggaataataaatggaagtgatcaaatgtccaccgagtatgccatctatttacgcaaatcccgtgccgacctcgaagcagaggcg

SEQ ID NO: 17889 - DNA, 260 bp, Unknown
  Description of Unknown: LeftRegion for integrase B4890 sequence
gaaacggtttgcggagttttacaaagtcggtctttcttactttggcgtagaaacgcaggatgagggatttgagctgttgagccgagcaaagagtgtatttctgaatgaaggcattccaaaagaagagcgagagaggttatacaaagagataatgcgcttgtatttgcggatggaagagtaaacagcaagggagaaacataatgaacaaaaggacagggatatatggaagatattcagacacgaaacaagacgatggtttc

SEQ ID NO: 17890 - DNA, 260 bp, Unknown
  Description of Unknown: LeftRegion for integrase B4891 sequence
gtgaagataatgaaggtgaccagatcactagtgacgagcgcgaaatagtagacaactatcgcgaaagctcgccagagtggcagcagaacatttcgatgaccgccagggcagcagcatcggaatcaaaaaggaaataaaaaagccccgcgcaaccgtccaaagtctcgcagggcaataccaaaaggcaaggtgattttatcatgccaaagggcacacgtgccgctatctatgcgcgtttcagctcgcataaccagagaagc

SEQ ID NO: 17891 - DNA, 260 bp, Unknown
  Description of Unknown: LeftRegion for integrase B4892 sequence
tcaaaatcaaatcgaacagaaataaaaaaccgccctactctttcaagcaggacggtcacgctcccgatgatacggtagccctagacaagcatattgtatcattcggagcagccaagtgcaagcggaacacacgttccacgctggctgttatttttatacccatttttacatacactgtacaagaacaaaggagtgatactatgcttagaatcggaatctatccacgaaaatcggtctaccgggacaacagtgactcggtg

SEQ ID NO: 17892 - DNA, 260 bp, Unknown
  Description of Unknown: LeftRegion for integrase B4893 sequence
ttattccgttttgcttcatttattctttattttcgtaaaatttgcaaaaagaaaaagcccgccgggccgaagcctgacgggctataaatgaaactgtatttatatgatcctgcagtgatttatgatttttcgtctcacgccttgcgctttcgtctaatccgcaggccaatgagacgattacctgaaaggacgctcaaggtatggcaaaaagaaaattcaacaagggcggcgaggttcggctggtcgcctattacagatac

SEQ ID NO: 17893 - DNA, 260 bp, Unknown; identical to SEQ ID NO: 17882
  Description of Unknown: LeftRegion for integrase B4894 sequence

SEQ ID NO: 17894 - DNA, 260 bp, Unknown
  Description of Unknown: LeftRegion for integrase B4895 sequence
ggagccgccaccttttccgaagtcaatttgcctttttactccacaattttatcttattttctttttatcctttattttcgtaaaatttgccaaaagaaaaagcccgccgggccgaagcctgacgggctgagtaagacgcttatggaaaatcgttctctaaataatataattttttactgttacgcaaaaggtggtatctcatgagaagaaagaaaaactctgacgttatccgcctcgttgcctactaccggtactccggc

SEQ ID NO: 17895 - DNA, 260 bp, Unknown
  Description of Unknown: LeftRegion for integrase B4896 sequence
cgcaggactacttgctttctgtcggagtctgggcggctgtcggtgcaataatctgttttttctctcgtggcatcagtgaagcagaattcaccaggatattgggtgtcgatattgtaaaatccaaatggatcacgcccttgtttattctcgtaggtgctatcctgttcgcgctctcgtaaatccagaatggaagtgatcgtatgcgtaccgagtacgcaatttatctgagaaaatcccgtgcggacctcgaagccgaggca

SEQ ID NO: 17896 - DNA, 260 bp, Unknown
  Description of Unknown: LeftRegion for integrase B4897 sequence
tcaaaatcaaatcgaacagaaataaaaaaccgccctactctttcaagcaggacggtcacgctcccgatgatacggtagccctagacaagcatattgtatcattcggagcagccaagtgcaagcggaacacacgttccacgctggctgttatttttatacctatttttacatacactgtacaggaacaaaggagtgatactatgcttagaatcggaatctatccacgaaaatcggtctaccgggacaacagtgactcggtg

SEQ ID NO: 17897 - DNA, 260 bp, Unknown
  Description of Unknown: LeftRegion for integrase B4898 sequence
ttcaaaatcaaatcgaacagaaataaaaaaccgccccactccaaagcaggacggtcacgctcccgaataatacgaaagccctaagcaagcatattgtatcattcggagcagccaagtgcaagcggaacacccgttcttttctggctgttatttttatacccatttttacatacactgtacaagaacaaaggagtgatactatgcttagaatcggaatctatccgcgaaaatcggtctaccgggacaacagtgactcggtg

SEQ ID NO: 17898 - DNA, 260 bp, Unknown
  Description of Unknown: LeftRegion for integrase B4899 sequence
atatggtcacaaaataaaaaaatcctcctgtattagcagtacagaaggattaaggaatagcggttatgtgaaaccactacaaagaacatatttagtatatcacatgaccgctttaatttctactcttttttgaaattaggtggtcttttttttatgcaataattttgccaataatggcagcatggtcaggaggaggaaaaatgtacaatcaaaatgaactaataatgtatttaagaaaatcaagagcagaccggcccgat

SEQ ID NO: 17899 - DNA, 260 bp, Unknown
  Description of Unknown: LeftRegion for integrase B4900 sequence
caatttattgtcaatataaactttgctatttctcaataacattaagaactagcaatcatgctccagatgataccagaaccctagacaagcatattgtatcattcggagcagcccggcgcaagcggaacacccgttctttgctggctgttatttttatacctatttttacatacactgtatgagagcaaaggagtgatactatgcttagaatcggaatctatccgcgaaaatcggtctaccgggacaacagtgactcggtg

SEQ ID NO: 17900 - DNA, 260 bp, Unknown
  Description of Unknown: LeftRegion for integrase B4901 sequence
caaaaacagaccctcaaaaatgataacagaggatgaaataaatgaaatcctgcgcaaacaccagtaaggagctgattgcatgagtccatttgtcaaggaaaccctcaccggcttgctctgtatcgccttgcttgtagtctgggtgattatccatgtcacccatgacctgaatgactggaataataaatggaagtgatcaaatgtccaccgagtatgccatctatttacgcaaatcccgcgcggacctcgaagccgaggcg

SEQ ID NO: 17901 - DNA, 260 bp, Unknown
  Description of Unknown: LeftRegion for integrase B4902 sequence
gaagaaaaaaccaaagacaaataaaaccgccccaccattaagcggagcggcaatgcaactgttctgaatgaacaatcgccctagacaagcatattgtatcattcggagcagcccggcgcaagcggaacacccgttctttgctggctgttatttttatacctatttttacatacactgtacaggaacaaaggagtgatactatgcttagaatcggaatctatccgcgaaaatcggtctaccgggacaacagtgactcggtg

SEQ ID NO: 17902 - DNA, 260 bp, Unknown
  Description of Unknown: LeftRegion for integrase B4903 sequence
tccgtcgaatatgacttcgataaagaaaagtacgtcgtttcttctactttggaaatcggctacttgcccgctgccgctgctaagattgtcgaagcgcaaggcgaagaaaatgtttctgtctatatcgcaggaatcaattcagacgatgaaggaattgattttgcggatgtgtatattttcccaaaaaagggtgattgattatgtcaatgaacgctgtcatctatgcccgctattcaagtcacaaccaaaccgaacagtcg

SEQ ID NO: 17903 - DNA, 260 bp, Unknown
  Description of Unknown: LeftRegion for integrase B4904 sequence
cagcggagggcgaaccgtttactaccgtcggttagttctgcaacgcgccgcagacgagtggttgaagcgtcaccgctgaccaccatgcaaaaagaaaaagcccaccggagccgtacccggtaggctttttcttgcgtaaaaaaataatgccccatccttccgtctggaagaacagggcattttgaaaggatatactatatatgagaaggaagaaagtcaagggcggcaaccgcctcgttgcctactaccgctactccggc

SEQ ID NO: 17904 - DNA, 260 bp, Unknown
  Description of Unknown: LeftRegion for integrase B4905 sequence
accgcaccggataacgatatcatcgaccgcagcgaggtacataccaccgttcacgatcccgatctgtccgccccggagccagaaccgaaaaagcaaaccaaaatctcaatcaccgatcatatagaattgctggtgttcggcacgctcggcatagtggtgctgctcgcactgatcgtcagcagacaaaggaggtaagataattgtcaaccgaatacgccctctatctccgcaaatcccgcgcagacctcgaagctgaggca

SEQ ID NO: 17905 - DNA, 260 bp, Unknown
  Description of Unknown: LeftRegion for integrase B4906 sequence
cgcaatacccattgcattgcaaatgtctacaatgtttaccggataatgggtaatattattttgttcgcaaatttcatttgctttctgagcaatttttgcttttgtcagcataacaatacctcccctctacaataagaatatacgttaaatttgcacctgtcaaccacctgtccaaataatttgtcaaaggaagtgatcccatgcccaccgactatgccctgtacctccgcaaatcccgtgccgacctcgaagcagaggcg

SEQ ID NO: 17906 - DNA, 260 bp, Unknown
  Description of Unknown: LeftRegion for integrase B4907 sequence
catgtaaacgatgttggaataaataataaaaccgccccactctaaagcaggacggttatgctcccgatgatacggtagccctagacaagcatattgtatcattcggagcagccaaacgcaagcggaacacccgttctttgccggctgttatttttatacccatttttacatacactgtacaggagcaaaggagtgatactatgcttagaatcggaatctatccgcgaaaatcagtctaccgggacaacagtgactcggtg

SEQ ID NO: 17907 - DNA, 260 bp, Unknown
  Description of Unknown: LeftRegion for integrase B4908 sequence
tctttacgttattaagcaaaataaaaccgccccaccaataagcggagcggcaatgcaactgttctgaatgaacaatcgccctcaacaagcatattgtatcattcggagcagcccggcgcaagcggaacacccgttctttgctggctgttatttttatacctatttttacatacactgtacaggaacaaaggagtgatactatgcttagaatcggaatctatccacgaaaatcggtctaccgggacaacagtgactcggtg

SEQ ID NO: 17908 - DNA, 260 bp, Unknown
  Description of Unknown: LeftRegion for integrase B4909 sequence
tatgctgttgttccgtttatggccgctgtcctctgtttcctgctcaatcatatcggctctggtaactaaggaggcaactatgagtccatttatgaaagaaaccctcaccggcctgctctgtatcgccttgcttgtagtctgggtgattatccatgtcacccatgaccttaataactggaataataaatggaagtgataaaatgtccaccgagtatgccatctatttacgcaaatcccgcgcggacctcgaagccgaggcg

SEQ ID NO: 17909 - DNA, 260 bp, Unknown
  Description of Unknown: LeftRegion for integrase B4910 sequence
agccttcgaccgaggccttataactatcactccttccatgaaaatctatgtttctccaataattttggatagccctcaggacgcttttacagcccgctggctgacttctcttgacggaatggttttaccccccccccccgatttccgccgcgtagagagcttctggagtaccataacgacgaaatttttaggagggtcacatgaatacagtaatttatgctcggtattctgccggcccgagacagaccgaccagagtatc

SEQ ID NO: 17910 - DNA, 260 bp, Unknown
  Description of Unknown: LeftRegion for integrase B4911 sequence
ccagcggagggcgaaccgtttactaccgtcggttagttctgcaacgcgccgcagacgagtggttgaggcgtcaccgctgaccgccatgcaaaaagaaaaagcccaccgggggacagccggtaggctttttcttgcgtaaaaaaataatgccccatccttccgtctggaagaacagggcattttgaaaggatatactatatatgagaaggaagaaagtcaagggcggcaaccgccttgttgcctactaccgctactccggc

SEQ ID NO: 17911 - DNA, 260 bp, Unknown
  Description of Unknown: LeftRegion for integrase B4912 sequence
tgcttgcaggcggttttcttggcctgttctgttcgctcattatcagcggaatctgggaagcgctcgttgcacgatccgcaaacaagctgctgtccggccgcctcggaaccattctcagctatgctgttgttccgtttgtggctgctgtcctctgcttcctgctcaatcatatcggctctggtaactaaggaagtgataccatgcaaatagaatacgccatgtatttacgcaaatcccgtgccgacctcgaagcagaggcc

SEQ ID NO: 17912 - DNA, 260 bp, Unknown; identical to SEQ ID NO: 15702
  Description of Unknown: LeftRegion for integrase B4913 sequence

SEQ ID NO: 17913 - DNA, 260 bp, Unknown; identical to SEQ ID NO: 15412
  Description of Unknown: LeftRegion for integrase B4914 sequence

SEQ ID NO: 17914 - DNA, 260 bp, Unknown
  Description of Unknown: LeftRegion for integrase B4915 sequence
tttccctctattcacattgatagatgcaacaatcatctcttcaatgccatcaacgaaagccccaacgcaaccctcaatatcaacggcacagagggattcacagcgcaagaactcgaattgattgacctatatcggaacttcccgctgagaaagcaaatggagctgctgaactatgctttcagcctgaaagaaggtaagtaatgagagtagtcctttacatgagatatagcagcgaccgtcagactgagcaatccatagag

SEQ ID NO: 17915 - DNA, 260 bp, Unknown
  Description of Unknown: LeftRegion for integrase B4916 sequence
agccttcgaccgaggccttataactatcactccttccatgaaaatctatgtttctccaataattttggatagccctcaggacgcttttacagcccgctggctggcttctcttgacggaatggttttaccccccccccccgatttccgccgcgtagagagcttctggagtaccataacgacgaaatttttaggagggtcacatgaatacagtaatttatgctcggtattctgccggcccgagacagaccgaccagagtatc

SEQ ID NO: 17916 - DNA, 260 bp, Unknown
  Description of Unknown: LeftRegion for integrase B4917 sequence
cgtcagataatcctactctctctgacatggaacaattattagtaactacattccgtaatacggatacattaggacaggctaatatcatacacgcttgtttggctgagcgtgatagagttgaaaaaggtaaagtcgaacatactgaaaaagaaaagagcattgctgccgtataataaatttgtcagaatggaggaaacgccatgtatgagaatataaaaacagcctgcctatatgtcagattctcaagccataaccagact

SEQ ID NO: 17917 - DNA, 260 bp, Unknown
  Description of Unknown: LeftRegion for integrase B4918 sequence
attttctcgaaagtttggaacgacgttgttcaagaaatcgaccataagtggaaaaccgcgtaaccatctaacaagccgtctaacaagatatgttaggcggtttccttttatctaaatagtagacttgtttacaaaaactgcgaaggtcggtataatgttatcgaacaagtaaactaattttataagggggcgaaagtgaattgaacgcacttgaaaacgttccttacaacgtttatgaaagtatcaagttcgttgcaatt

SEQ ID NO: 17918 - DNA, 260 bp, Unknown
  Description of Unknown: LeftRegion for integrase B4919 sequence
ttgtcgattttttgctttctgtggtaatctggactgttatgggcagttttatttactttttcactcgtggactaagtgaagccgaatttaccagagcactgggtgttgaaatcgcaaaatccaaactggttgcacctatatgtctcgtcttagccgccattctgttctctcttgctaacttttgaaaagaggtgattcccatgtcaaccgactacgccctgtacctccgcaaatcccgcgcagacctcgaagccgaggcg

SEQ ID NO: 17919 - DNA, 260 bp, Unknown
  Description of Unknown: LeftRegion for integrase B4920 sequence
ggagccgccaccttttccgaagtcaatttgcctttttactccacaattttatcttattttctttttatcctttatttttgtaaaatttgccaaaagaaaaagcccgccgggccgaagcctgacgggctgagtaagacgcttatggaaaatcgttctctaaataatataattttttactgttacgcaaaaggtggtatctcatgagaagaaagaaaaactctgacgttatccgcctcgttgcctactaccggtactccggc

SEQ ID NO: 17920 - DNA, 260 bp, Unknown
  Description of Unknown: LeftRegion for integrase B4921 sequence
gcgactgcacgccgcaatggaagcagaacattgcaatgacagcccgtgcggcggcgggcgaatcgaaaaagaaagccgaaaataatttacctgccgccgctgtcaggtcggcataaatagagaagccccgcgctggtcggcaaactcacgcggggcaaacacccaaccattagcaaggttataggcaaggtgattttatcatggtcaaacgtagagcggctatatatgcccgcttttcgtcacacaaccaacggtcggaa

SEQ ID NO: 17921 - DNA, 260 bp, Unknown; identical to SEQ ID NO: 15839
  Description of Unknown: LeftRegion for integrase B4922 sequence

SEQ ID NO: 17922 - DNA, 260 bp, Unknown; identical to SEQ ID NO: 15830
  Description of Unknown: LeftRegion for integrase B4923 sequence

SEQ ID NO: 17923 - DNA, 260 bp, Unknown
  Description of Unknown: LeftRegion for integrase B4924 sequence
accgcaccggataacgatatcatcgaccgcagcgaggtgcataccgccgttcacgatcccgatttgtccgctccggagccggaaccgaaaaagcaagccaaaatctcaatcaccgatcatatagaattgctggtgttcggcgcgctcggcatagtggtgctgctcgcactgatcgtcagcagacaaaggaggtaagataattgtcaaccgaatacgccctctatctccgcaaatcccgcgccgacctcgaagccgaggcc

SEQ ID NO: 17924 - DNA, 260 bp, Unknown
  Description of Unknown: LeftRegion for integrase B4925 sequence
gaacctatacaaagaagatctttaaaaaaaccgccccactccaaagcaggacggtcacgctcccgaataatacgaaagccctaagcaagcatattgtatcattcggagcagccaagtgcaagcggaacacccgttctttgctggctgttatttttatacccatttttacatacactgtacaggaacaaaggagtgatactatgcttagaatcggaatctatccacgaaaatcggtctaccgggacaacagtgactcggtg

SEQ ID NO: 17925 - DNA, 260 bp, Unknown; identical to SEQ ID NO: 13468
  Description of Unknown: LeftRegion for integrase B4926 sequence

SEQ ID NO: 17926 - DNA, 260 bp, Unknown
  Description of Unknown: LeftRegion for integrase B4927 sequence
accgtgaagaattggaggggaataaagaagttcctgcgaacggagaagatagtccccatagaattgctcatgcgtaaaaaggcgttggaggtgatactacgaaagcggtaatctatgccagatattcgagccatagccaaagggaagaatccatagagggacagcttcgggagtgtcacgactttgcgctgaaaaacggaatgaccatcatcggtgagtactgcgataaggcaatctcaggaaagaccgacaatcgaccg

SEQ ID NO: 17927 - DNA, 260 bp, Unknown
  Description of Unknown: LeftRegion for integrase B4928 sequence
tgaaccaatacaaagaagatctttaaaaaaaccgccccactctaaagcaggacggttttgctccagatgataccagagccctagacaagcatattgtatcattcggagcagccaagtgcaagcggaacacacgttccacgctggctgttatttttatacctatttttacatacactgtatgagagcaaaggagtgatactatgcttagaatcggaatctatccgcgaaaatcggtctaccgggacaacagtgactcggtg

SEQ ID NO: 17928 - DNA, 260 bp, Unknown
  Description of Unknown: LeftRegion for integrase B4929 sequence
tatgctgttgttccgtttgtggctgctgtcctctgcttcctgctcaatcatatcggctctggtaactaaggaggcaactatgagtccatttatgaaagaaaccctcaccggcctgctctgtatcgccttgcttgtagtctgggtgattatccatgtcacccatgacctgaataactggaataataaatggaagtgataaaatgtccaccgagtatgccatctatttacgcaaatcccgtgccgatctcgaagccgaggcg

SEQ ID NO: 17929 - DNA, 260 bp, Unknown
  Description of Unknown: LeftRegion for integrase B4930 sequence
cagcggagggcgaaccgtttactaccgtcggttagttctgcaacacgccgcagacgagtggttgaagcgtcaccgctgaccaccatgcaaaaagaaaaagcccaccggagccgtacccggtaggctttttcttgcgtaaaaaaataatgccccatccttccgtctggaagaacagggcattttgaaaggatatactatatatgagaaagaagaaagtcaaggacggcaaccgccttgttgcctactaccgctactccggc

SEQ ID NO: 17930 - DNA, 260 bp, Unknown
  Description of Unknown: LeftRegion for integrase B4931 sequence
ttaagatatggtaatggagaaattttcattgaaaatgatagtcctttggagcaatgtttaaaagaaaataacgccactgctaatgatattgaattaattaagtgttatttgaatttagatttagaaattagaaataaaatacatgaacattttaaatgttactttagtaatattaaatgataacttaattggaggtttttatgaatcaagaactttttgcaatctatcttagaaaatcaagaaaagatttggagttaaaa

SEQ ID NO: 17931 - DNA, 260 bp, Unknown
  Description of Unknown: LeftRegion for integrase B4932 sequence
aaagccccgtctttctctgtcgaaaaaggcggggctttgatgaacgagttctgctttttaatgcaaccccacttctataaatagttgaaaactatgatatttttggaatgagtttaactttttcatctcaaatggttgctttcgtctcaaatccgtgactgattagacgaaagtttttaccgcttgaaaggtggtatagtatgccaaagaaaaatccatccggcggcaagcggcttgttgcctactaccgctacagcggc

SEQ ID NO: 17932 - DNA, 260 bp, Unknown
  Description of Unknown: LeftRegion for integrase B4933 sequence
cggagccgccaccttttccgaagtcaatttgcctttttactccacaattttatcttattttctttttatcctttattttcgtaaaatttgccaaaagaaaaagcccgccgggccgaagcctgacgggctgagtaagacgcttatagaaaatcgttctctgtataatataatttttactgttacgcaaaaggtggtatctcatgagaagaaagaaaaactctgacgttatccgcctcgttgcctactaccggtactccggc

SEQ ID NO: 17933 - DNA, 260 bp, Unknown
  Description of Unknown: LeftRegion for integrase B4934 sequence
gaggaggtattgatatgttaggatttgtaatcggactacttgtaggcggtcttgcaggcgtaatcataatgtgtctctgtactgcggcaaagcaggaaaatgaaaatatgtcaaattcggacaagtaattttgtccggtttggtgataccattctgaaaagatttatggtatccttgttggttgaaaggagagtgagaaaatgccgacagtaacggtgatacagccgacaatagcagaagaaaaagcagtcaagatacgt

SEQ ID NO: 17934 - DNA, 260 bp, Unknown; identical to SEQ ID NO: 15483
  Description of Unknown: LeftRegion for integrase B4935 sequence

SEQ ID NO: 17935 - DNA, 260 bp, Unknown; identical to SEQ ID NO: 14669
  Description of Unknown: LeftRegion for integrase B4936 sequence

SEQ ID NO: 17936 - DNA, 260 bp, Unknown
  Description of Unknown: LeftRegion for integrase B4937 sequence
cgaatcagctcttcacgaggccacgaaagaagccgcaaatacaccagacattgattggcgcgatgttgagctgatcgagaacggcgcgatgattattccgaaagacgcaccaaaatagcaattaagccccgcgcatcacagggttgccgccctagcgcgaggctcgagagaattaaccgatccatggaaggagcggtcgcatgtatgatagcatgcccgccgagtggttgtgttgcgcctacttgcgaaaatcacgcgag

SEQ ID NO: 17937 - DNA, 260 bp, Unknown; identical to SEQ ID NO: 15412
  Description of Unknown: LeftRegion for integrase B4938 sequence

SEQ ID NO: 17938 - DNA, 260 bp, Unknown
  Description of Unknown: LeftRegion for integrase B4939 sequence
cagcggagggcgaaccgtttactaccgtcggttagttctgcaacgcgccgcagacgagtggttgaagcgtcaccgctgaccaccatgcaaaaagaaaaagcccaccggagccgtacccggtaggctttttcttgcgtaaaaaaataatgccccatccttccgtctggaagaacagggcattttgaaaggatatactatatatgagaaagaagaaagtcaaggacggcaaccgccttgttgcctactaccgctactccggc

SEQ ID NO: 17939 - DNA, 260 bp, Unknown
  Description of Unknown: LeftRegion for integrase B4940 sequence
tgcttgcaggcggttttcttggcctgttctgttcgctcattatcagcggaatctgggaagcgctcgttgcacgatcctcaaacaagctgctgtccggccgcctcggaaccattctcagctatgctgttgttccgtttgtggctgctgtcctctgcttcctgctcaatcatatcggctctggtaactaaggaagtgatacaatgcaaatggaatacgccatgtatttacgcaaatcccgtgccgacctcgaagcagaggcg

SEQ ID NO: 17940 - DNA, 260 bp, Unknown
  Description of Unknown: LeftRegion for integrase B4941 sequence
acgaagattcttagaactcacttcatcgttagaaccgccgtgcaaagacgaaccggcgtatgcgcgtcttatgcaagacataagcaacggaacagttgacgcggtagtttgcggataacaagaagccccgcgctggtcggcaaactcacgcggggcaaacacccaaccattagcaaggttataggcaaggtgattttatcatggtcaaacgtagagcggccatatatgcccgcttttcgtcacacaaccaacggtcggaa

SEQ ID NO: 17941 - DNA, 260 bp, Unknown; identical to SEQ ID NO: 15832
  Description of Unknown: LeftRegion for integrase B4942 sequence

SEQ ID NO: 17942 - DNA, 260 bp, Unknown
  Description of Unknown: LeftRegion for integrase B4943 sequence
gtccgccgacccatccgctcctgataatgatataatcgacagaagtgaagttgcgggcacatcaagctatcctcaaaaaacagaaaagaagtcctggattaactccgataatgttgacttattagtctttcctttggttggtgttatcgccctgtttctgtgtctattggacaaactgattcaaaaaaggaggtgatcccatgcccaccgaatacgccctgtacctccgcaaatcccgcgcggacctcgaagccgaggcg

SEQ ID NO: 17943 - DNA, 260 bp, Unknown
  Description of Unknown: LeftRegion for integrase B4944 sequence
cgcaatacccattgcattgcaaatgtctacaatgtttaccggataatgggtaatattattttgttcgcaaatttcatttgctttctgagcaatttttgcttttgtcagcataacaatacctcccctctacaataagaatatacgttaaatttgcacctgtcaaccacctgtccaaataatttgtcaaaggaagtgatcccatgcccaccgactatgccctgtacctccgcaaatcccgtgcggacctcgaagccgaggca

SEQ ID NO: 17944 - DNA, 260 bp, Unknown
  Description of Unknown: LeftRegion for integrase B4945 sequence
ttgttgtcaatatttttttcattatgtaaaaccgccccactctaaagcaggacggttatgctcccgatgatacggtagccctagacaagcatattgtatcattcggagcagccgagtgcaagcggaacacccgttctttgctggctgttatttttatacctatttttacatacactgtatgagagcaaaggagtgatactatgcttagaatcggaatctatccacgaaaatcggtctaccgggacaacagtgactcggtg

SEQ ID NO: 17945 - DNA, 260 bp, Unknown
  Description of Unknown: LeftRegion for integrase B4946 sequence
aaaacgacgaagacgaataataaaaaccgccccaccattaagtggagcggcaatgcaactgttctgaatgaacaatcaccctcaacaagcatattgtatcattcggagcagccaagcgcaagcggaacacacgttccacgctggctgttatttttatacctatttttacatacactgtacaggaacaaaggagtgatactatgcttagaatcggaatctatccgcgaaaatcagtctaccgggacaacagtgactcggtg

SEQ ID NO: 17946 - DNA, 260 bp, Unknown
  Description of Unknown: LeftRegion for integrase B4947 sequence
tgacaatactgaaaatcagtaaataaaaaaccgccccactccaaagcaggacggtcacgctctcgaatgatacgaaagccctagacaagcatattgtatcattcggagcagccaagtgcaagcggaacacacgttccacgctggctgttatttttatacctatttttacatacactgtacaggaacaaaggagtgatactatgcttagaatcggaatctatccgcgaaaatcggtctaccgggacaacagtgactcggtg

SEQ ID NO: 17947 - DNA, 260 bp, Unknown
  Description of Unknown: LeftRegion for integrase B4948 sequence
cgtcgttttgcggaattttatggtgtgggacttgattattttggagtgtcaacagttgatgaaggatttgaactgttgagccgcgcaaaaagcgtatttttgaatgaggatattccaaaagaagaacgagagcgtttgtacaaagagataatgcgcttgtatttggaaatgcaagattaaaacaacaagggagcaacacaatgaacagaagaacggggatttacggaagatactcagatacaaaacaagacgatggtttc

SEQ ID NO: 17948 - DNA, 260 bp, Unknown
  Description of Unknown: LeftRegion for integrase B4949 sequence
gccgctttgcaggccgcgtcaagtcgctggcggctgtcctgccctactgtgacgaagcgacctttttcgataatgataacggctttgttgcggtcgctgagtaccgcaacggcgtgatcgtctgctacgagaacgcgccgcgttgggtgacattccttgccgacgccatcaatcagccgtaaccgaaaggagttcccctcatgcccaccgaatacgccctctatctccgcaaatcccgcgcggacctcgaagccgaggca

SEQ ID NO: 17949 - DNA, 260 bp, Unknown; identical to SEQ ID NO: 17905
  Description of Unknown: LeftRegion for integrase B4950 sequence

SEQ ID NO: 17950 - DNA, 260 bp, Unknown
  Description of Unknown: LeftRegion for integrase B4951 sequence
aaagccccgtctttctctgtcgaaaaaggcggggctttgatgaacgagttctgctttttaatgcaactccacttctataaatagttgaaaactatgatatttttggaatgagtttaactttttcatctcaaatggttgctttcgtctcaaatccgtgactgattagacgaaagtttttaccgcttgaaaggtggtatagtatgccaaagaaaaatccatccggcggcaagcggcttgttgcctactaccgctacagcggc

SEQ ID NO: 17951 - DNA, 260 bp, Unknown
  Description of Unknown: LeftRegion for integrase B4952 sequence
cgcatctctgcacaggcggaaatgctctcccagatgcgcgtcgatcatgaaaaagagctgcatcgcctgagaatggagcgtttctttttgtttggcacgctgcttgtctttatggccgtcatcgtctatctggtcattgacgcttcccacggcggctgggggttctttcgttattcctccgatatgctcaggacgcggtaatggaacagtatgctatctatctgcgcaagtcccgcgccgacgcggaggccgaagcgcac

SEQ ID NO: 17952 - DNA, 260 bp, Unknown
  Description of Unknown: LeftRegion for integrase B4953 sequence
acgaagattcttagaactcacttcatcgttagaaccgccgtgcaaagacgaaccggcgtatgcgcgtcttatgcaagacataagcaacggaacagttgacgcggtagtttgcggataacaagaagccccgcgctggtcggcaaactcacgcggggcaaacacccaaccattagcaaggttataggcaaggtgattttatcatggtcaagcgtagggctgctatatacgcccgcttttcgtcacacaaccaacggtcggaa

SEQ ID NO: 17953 - DNA, 260 bp, Unknown
  Description of Unknown: LeftRegion for integrase B4954 sequence
gtatcgagatgttaggatttgttattggaatatttatcggcgaaattattggagtattcacaatgtgtctgtgcagagcaacctcagaagcagacaaatgtatggattccacagattctgaggaataaatttgttgggtatggtgataccattcagtaaaaatttgtggtatccttgttagtaaaacagaggtgaataatatgcctacagtaacggtgatacagccgatcatagcagcagaacaaaacacaaagatccgt

SEQ ID NO: 17954 - DNA, 260 bp, Unknown; identical to SEQ ID NO: 17887
  Description of Unknown: LeftRegion for integrase B4955 sequence

SEQ ID NO: 17955 - DNA, 260 bp, Unknown
  Description of Unknown: LeftRegion for integrase B4956 sequence
aaagccccgtctttctctgtcgaaaaaggcggggctttgatgaacgagttctgctttttaatgcaactccacttctataaatagttgaaaactatgatatttttggaatgagtttaactttttcatctcaaatggttgcttttgtctcaaatccgtgactgattagacgaaagtttttaccgcttgaaaggtggtatagtatgccaaagaaaaatccatccggcggcaagcggcttgttgcctactaccgctacagcggc

SEQ ID NO: 17956 - DNA, 260 bp, Unknown
  Description of Unknown: LeftRegion for integrase B4957 sequence
aaatcaattacacaatatgtaaaaaaccgccccaccattaagtggagcggcaatgcaattgctctgaatgaacaatcgccctagacaagcatattgtatcattcggagcagccgagtgcaagcggaacacccgttctttgctggctgttatttttatacccatttttacatacactgtacaagaacaaaggagtgatactatgcttagaatcggaatctatccgcgaaaatcagtctaccgggacaacagtgactcggtg

SEQ ID NO: 17957 - DNA, 260 bp, Unknown
  Description of Unknown: LeftRegion for integrase B4958 sequence
aaagccccgtctttctctgtcgaaaaaggcggggctttgatgaacgagttctgctttttaatgcaactccacttctataaatagttgaaaactatgatatttttggaatgagtttaactttttcatctcaaatagttgctttcgtctcaaatccgtgactgattagacgaaagtttttaccgcttgaaaggtggtatagtatgccaaagaaaaatccatccggcggcaagcggcttgttgcctactaccgctacagcggc

SEQ ID NO: 17958 - DNA, 260 bp, Unknown
  Description of Unknown: LeftRegion for integrase B4959 sequence
acaccctttcaaatcttgtaatagcgatatgtatatatttatattatatcatatattttattacatatcaagagataaataaaaaaaacgccccaaaagatgctggaacatctctcggagcgcaggagaatgtggtacattcaccattcatacaatgtgaattataccatatcctccaagaaaagtcaaggaggaattaaatgaaaaccgccgtaatatacgcccgatactcttccgacaagcagacagagcagtccatc

SEQ ID NO: 17959 - DNA, 260 bp, Unknown; identical to SEQ ID NO: 17907
  Description of Unknown: LeftRegion for integrase B4960 sequence

SEQ ID NO: 17960 - DNA, 260 bp, Unknown; identical to SEQ ID NO: 15830
  Description of Unknown: LeftRegion for integrase B4961 sequence

SEQ ID NO: 17961 - DNA, 260 bp, Unknown
  Description of Unknown: LeftRegion for integrase B4962 sequence
tcatagttgcgctggtcggtatatgtatcttatcctttgccctcgttcatgtagaactaaagaattatcgcaccgccgataatagatgcagtcagtattattccgttttgcgcgaaattgcactgatcgcaaaaacacgccctgtaactgcggaagaaatagataatattctgaaaaagtaccaataaggatgtgatcccatgcgtaccgagtacgcaatttatctgagaaaatcccgtgccgacctcgaagcagaggcg

SEQ ID NO: 17962 - DNA, 260 bp, Unknown; identical to SEQ ID NO: 14669
  Description of Unknown: LeftRegion for integrase B4963 sequence

SEQ ID NO: 17963 - DNA, 260 bp, Unknown
  Description of Unknown: LeftRegion for integrase B4964 sequence
agcggagaaagaatcgtgtactaccgcaggttagttcttgaacgcgctgccgacgagtggttgaagcgtcaccgctgaccaccatgcaaaaaaggaaaagcccaccggagccgtacccggtaggctttttcttgcgtaaaaaaacaatgccccattcttccgtctggaagaacagggcattttgaaaggatatactatatatgagaagaaagaaagtcgagggcggcaaccgccttgttgcctactaccgctactccggc

SEQ ID NO: 17964 - DNA, 260 bp, Unknown
  Description of Unknown: LeftRegion for integrase B4965 sequence
aaagccccgtctttctctgtcgaaaaaggcggggctttgatgaatgagttctgcttttttaatgcaactccacttctataaatagttgaaaactatgatattttggaatgagtttaactttttcatctcaaatagttactttcgtctcaaatccgtgactgattagacgaaagtttttaccgcttgaaaggtggtatagtatgccaaagaaaaatccatccggcggcaagcggcttgttgcctactaccgctacagcggc

SEQ ID NO: 17965 - DNA, 260 bp, Unknown
  Description of Unknown: LeftRegion for integrase B4966 sequence
accgggcttttaatcgtgtgcagtgacccgatgcaaaagaaaatcgacagagctgccgccctaaacattccaatcatttcagaacagcaatggtttgaacttatgccggaactagaagccctcggaatgtggaatggaaagccaattccgtttgcggatgacaatggcatctaccgttttgatgtgggtggtgttggataatggcaaaaaagaagaagcccgccgggggcaatgccatcatctatgcccgctactcgtcc

SEQ ID NO: 17966 - DNA, 260 bp, Unknown
  Description of Unknown: LeftRegion for integrase B4967 sequence
cagcggagggcgaaccgtttactaccgtcggttagttctgcaacgcgccgcagacgagtggttgaagcgtcaccgctgaccaccatgcaaaaagaaaaagcccaccggagccgtacccggtaggctttttcttgtgtaaaaaaataatgccccatccttccgtctggaagaacagggcattttgaaaggatatactatatatgagaaagaagaaagtcaagggcggcaaccgccttgttgcctactaccgctactccggc

SEQ ID NO: 17967 - DNA, 260 bp, Unknown
  Description of Unknown: LeftRegion for integrase B4968 sequence
tacttgcaggcggtttcctcggcctgttctgttcgctcattatcagcggtatctgggaagcgctcgttgcacgatccgcaaacaagctgctgtccggccgcctcggaaccattctcagctatgctgttgttccgtttgtggctgctgtcctctgcttcctgctcaatcatatcggctctggtaactaaggaagtgataccatgcaaatggaatacgccatgtatttacgcaaatcccgtgccgacctcgaagccgaggcc

SEQ ID NO: 17968 - DNA, 260 bp, Unknown; identical to SEQ ID NO: 15737
  Description of Unknown: LeftRegion for integrase B4969 sequence

SEQ ID NO: 17969 - DNA, 260 bp, Unknown
  Description of Unknown: LeftRegion for integrase B4970 sequence
caaaaacagaccctcgaaaacgataacagaggatgaaataaacgaaatcctgcgcaaacaccagtaaggagctgattgcatgagtccatttgtcaaggaaaccctcaccggcttgctctgtatcgccttgcttgtagtctgggtgattatccatgtcacccatgacctgaatgactggaataataaatggaagtgatcaaatgtcaaccgagtatgccatctatttacgcaaatcccgcgccgacctcgaagccgaggcg

SEQ ID NO: 17970 - DNA, 260 bp, Unknown
  Description of Unknown: LeftRegion for integrase B4971 sequence
gaccaaggagagacaaatggcaaaaactataattaaaaaatattctaataacactacagtggttattacatacaacaacgaaccttctttagaggctatcaagcagtatgcccaaaaattaaagcagacaattgacagcaaaagtattcagagttaacatatatttataaaatcaatagagaaggtgatattcgttggaaatgcgaaatgaatacaatccaattattataaaatatgttgcagaatatttgagaaaatct

SEQ ID NO: 17971 - DNA, 260 bp, Unknown
  Description of Unknown: LeftRegion for integrase B4972 sequence
atatgaattttgataaataaaaaaccgccccggcgctaccaacaccagagcggcaaatatagctccgaaaagcatatgccctcaacaagcatattgtatcattcaaagcagcacggcgcaagcggaacaccagttccatgctggctgttatttttatacccatttttacatacactgtacaagaacaaaggagtgatactatgcttagaatcggaatctatccacgaaaatcggtctaccgggacaacagtgactcggtg

SEQ ID NO: 17972 - DNA, 260 bp, Unknown
  Description of Unknown: LeftRegion for integrase B4973 sequence
tacttgcaggcggtttcctcggcctgttttgttcgctcattatcagcggtatctgggaagcgctcgttgcacgatccgcaaacaagctgctgtccggccgcctcggaaccattctcagctatgctgttgttccgtttgtggctgctgtcctctgcttcctgcttaatcatatcggctctggtaactaaggaagtgataccatgcaaatggaatacgccatctatctccgcaaatcccgcgccgacctcgaagccgaggcg

SEQ ID NO: 17973 - DNA, 260 bp, Unknown
  Description of Unknown: LeftRegion for integrase B4974 sequence
accgcgccggatagcgatatcatcgaccgcagcgaggtgcataccgccgttcacgatcccgatttgtccgctccggatccggaaccgaaaaagcaagccaaaatctcaatcaccgatcatatagaattgctggtgttcggcgcgctcggcatagtggtgctgctcgcactgatcgtcagcagacaaaggaggtaagataattgtcaaccgaatacgccctctatctccgcaaatcccgcgccgacctcgaagccgaggcg

SEQ ID NO: 17974 - DNA, 260 bp, Unknown
  Description of Unknown: LeftRegion for integrase B4975 sequence
caaaaacagaccctcaaaaatgataacagaggatgaaataaatgaaatcctgcgcaaacaccagtaaggagctgattgcatgagtccatttgtcaaggaaaccctcaccggcttgctctgtatcgccttgcttgtagtctgggtgattatccatgtcacccatgatctgaatgactggaataataaatggaagtgatcaaatgtccaccgagtatgccatctatttacgcaaatcccgcgcggacctcgaagccgaggcc

SEQ ID NO: 17975 - DNA, 260 bp, Unknown
  Description of Unknown: LeftRegion for integrase B4976 sequence
caagtggataacacccttgtttatcattgtaggcgctatcctgttcgctctctcgtaaactcgaaacggaggaataattatgacgccatttgtcaaagaaaccctcaccggcttgctctgtatcgccttgcttgtagtctgggtgattatccatgtcacccatgatcggaataactggaataataaatggaagtgataaaatgtccaccgagtatgccatctatttacgcaaatcccgtgccgacctcgaagccgaggcc

SEQ ID NO: 17976 - DNA, 260 bp, Unknown; identical to SEQ ID NO: 17887
  Description of Unknown: LeftRegion for integrase B4977 sequence

SEQ ID NO: 17977 - DNA, 260 bp, Unknown
  Description of Unknown: LeftRegion for integrase B4978 sequence
gggcgaaccgtttactaccgtcggttagttctgcaacgcgccgcagacgagtggttgaggcgtcaccgctgaccgccatgcaaaaagaaaaagcccaccgggggacagccggtaggctttttcgtgtatgtaaaaataaaaaaatgccccatccttccgtctggaagaacagggcattttgaaaggatatactataatatatgagaagaaagaaagtcgagggcggcaaccgccttgttgcctactaccgctactccggc

SEQ ID NO: 17978 - DNA, 260 bp, Unknown
  Description of Unknown: LeftRegion for integrase B4979 sequence
gccttcgaccgaggccttataactatcactccttccatgaaaatctatgtttctccgataattttggatagccctcaggacgcttttacagcccgctggctggcttctcttgacggaatggttttacccccccccccccgatttccgccgcgtagagagcttctggagtaccataacgacgaaatttttaggagggtcacatgaatacagtaatttatgctcggtattctgccggcccgagacagaccgaccagagtatc

SEQ ID NO: 17979 - DNA, 260 bp, Unknown
  Description of Unknown: LeftRegion for integrase B4980 sequence
tgcatactgcctgcaatgcgcactgctcaacgcgactggtacggcagcggcgtaaatcacgacaatctgtcccgctcctctgctggcttgatcatagcagacagccgggcgggatgtaaagttacagttatgttaacctttgcgctgacccacagatacaaaaggatgtgcccaatttggacacacgagaggtgacagctatggcaaaacgcctgcatggggcgctcatctgcgcccgatactccaccgataaccaaaat

SEQ ID NO: 17980 - DNA, 260 bp, Unknown; identical to SEQ ID NO: 16123
  Description of Unknown: LeftRegion for integrase B4981 sequence

SEQ ID NO: 17981 - DNA, 260 bp, Unknown
  Description of Unknown: LeftRegion for integrase B4982 sequence
taacgacaaggaatatgccagggcaaagaaatactatcgcaagctcacaggcgccgatattgtgatcgcggattaaaaagatatttcttccgattttcgctggacttgtcaagttccgtagatataatctgtgttgccgacaaaaagaggtttgccccaaaatgtagggcaaacctccctaaaggaaaggaggaagacacatggctcaagcaaagctgatttcgccggtatccaggcaagcatatgagcggacgaaggtc

SEQ ID NO: 17982 - DNA, 260 bp, Unknown
  Description of Unknown: LeftRegion for integrase B4983 sequence
actccgttagagggcatgagtaaagagcaagcctctctttatatgctcacggaatttctaagcctcatagataaagaatatcctaaaataccgccccagcagaaagccgctttaattagcgaattttataagcatgaccctataaaattgttattatctgcacttaataacgaactatccaaacaaggaagtgatgaaaaatgatgcagcaggcattaaacgccgtaatatacgcccgttattcttcccacaatcaaaca

SEQ ID NO: 17983 - DNA, 260 bp, Unknown; identical to SEQ ID NO: 15838
  Description of Unknown: LeftRegion for integrase B4984 sequence

SEQ ID NO: 17984 - DNA, 260 bp, Unknown
  Description of Unknown: LeftRegion for integrase B4985 sequence
atacttttgatccgtcgtccgacgcttatctgactgccgaaaaggacggcaccgttatcatggaaggctttggctcatttcctgcttatgctcacaaaggcatggttcttatgcagaccgacaaccttccccaggaagtgattgacctgttcgatgccatgtaaagctccacattgtctttctgcaaaggtggtgtccctatgaagaaacaaccaaccggcggcaagcggcttgttgcctactaccgctacagcggcggc

SEQ ID NO: 17985 - DNA, 260 bp, Unknown
  Description of Unknown: LeftRegion for integrase B4986 sequence
tttccctctattcacattgatagatgcaacaatcatctcttcaatgccatcaacgaaagccccaatgcaaccctcaacatcaacggcacagagggattcacggcgcaggaactcgaattgattgacctgtatcggaacttcccgctgagaaagcaaatggagctgctgaactatgctttcagcctgaaagaaggtaagtaatgagagtagtcctttacatgagatatagcagcgaccgtcagactgagcaatccatagag

SEQ ID NO: 17986 - DNA, 260 bp, Unknown
  Description of Unknown: LeftRegion for integrase B4987 sequence
acaactacatcctggcagagaatctgaccaagaagctacttgaaaaagggctgatttctgtggatgaattcaacaagatcatggagaaaaatcggcgaactttctccccgttattctcccgtatctaaacagatacaacttgctattatgaccatttagagtgatatatagactaccctgaaagaaaggagaccgagactatgaaacggataacaaagattgaggcagccgataccggagcggtgcgaaaactgcgtgtg

SEQ ID NO: 17987 - DNA, 260 bp, Unknown
  Description of Unknown: LeftRegion for integrase B4988 sequence
cgcgattatgtggacgacaataagtattccagccttgaggcagtgcaaaagaacttgaaggtaattccaacggcagagcagcagtttttagactccagaaccgcgtacctgaaagaggccggttttaccgatgacgaaatcgcccagaggccgacccttgacagcggagaaaacaaataacaccaagaggtgcagcagctatgaaaccatctggcgactatgctatatatctgcgaaaatcgcgcaaggacctggaacta

SEQ ID NO: 17988 - DNA, 260 bp, Unknown
  Description of Unknown: LeftRegion for integrase B4989 sequence
atacttttgatccgtcgtccgacgcttatctgactgccgaaaaggacggcgccgttatcatggaaggctttggttcattctccgcttatgctcacaacggcatggttctcatgcagaccgacagccttccccaggaagtgattgacctgttcaacgctatgtaaaactccgcattgtctttctgcaaaggtggtatctctatgaaaaaacagccaaccggcggcaaccggcttgttgcctactaccgctacagcggcggt

SEQ ID NO: 17989 - DNA, 260 bp, Unknown; identical to SEQ ID NO: 17986
  Description of Unknown: LeftRegion for integrase B4990 sequence

SEQ ID NO: 17990 - DNA, 260 bp, Unknown
  Description of Unknown: LeftRegion for integrase B4991 sequence
cttgacggctttcttctgcattgtaacaccttctccaaaatattcctgtttaattatatcaccgaactgcaaaaaaatcaacaggaatatgtacaaaccgcatatgaataatttatgccgaggtgattttatgacaataacaaaagaggaagagaaaacaatagaacagacgatatgccgtatcataatcgagcaactgtatgacgagggtcatattgatacgttgccgcagtgctgtgaagaagcttagagcggcggct

SEQ ID NO: 17991 - DNA, 260 bp, Unknown; identical to SEQ ID NO: 17982
  Description of Unknown: LeftRegion for integrase B4992 sequence

SEQ ID NO: 17992 - DNA, 260 bp, Unknown
  Description of Unknown: LeftRegion for integrase B4993 sequence
cgcgattatgtggacgacaataagtattccagccttgaggcagtgcaaaagaacttgaaggtaattccgacggcagagcagcagtttttagactccagaacagcgtacctgaaagacgccggttttacagatgaagaaattgcccagaggccaaccctcgacagcggagaaaacaaataacaccaagaggtgcaacagctatgaaacggcctgacgactatgctatttaccttcggaaatcgcgcaaggaccttgacctt

SEQ ID NO: 17993 - DNA, 260 bp, Unknown
  Description of Unknown: LeftRegion for integrase B4994 sequence
aaggaggttcagaaatggtaggatttattattggattgcttgcaggcggtacagcgggagtattcacaatgtgtctctgtactgcggcaaagcaggcagatgaaaatatgtcaaattcggacaagtaattttgtcaggtttggtgataccattctgaaaagatttgtggtattcttgttggttgaaaggagagtgagaaaatgccgacagtaacggtgatacagcctacaatatcagaagaacaaaatacaaaaattcgt

SEQ ID NO: 17994 - DNA, 260 bp, Unknown
  Description of Unknown: LeftRegion for integrase B4995 sequence
acgcacacttttagagcaatattctgagttttgaaaattcttttgatttttttacttatttagggtgacaaaccgcaaattttgcggaatatatttaagaggataaaatcctcacgaagtcttgacttgatttttttagatgttattatggaggtaatcaattgttgcctgcgtaaaaagtgccgtaaggagatccacatatgcaggaaaacaagcaaaacatacgatttactgccctgtactgtcgcttatcgtctgat

SEQ ID NO: 17995 - DNA, 260 bp, Unknown
  Description of Unknown: LeftRegion for integrase B4996 sequence
ctctgtgtgcccttgtcaagcgatgtttaccggtgcagatatcgtattagcccgctgaaaattgtgtataaggtcaattttgcgctgttccaattgttttggtagctattcagaatagttatcagtataatgtggtttgccaaaagtggttggtatcatattatgataccaaccaaaaaacgagagaggaggacaccgaaatgcctgaagtacggctcatcaccccgatcacaagacagaacacgaagaagatgcaggtt

SEQ ID NO: 17996 - DNA, 260 bp, Unknown
  Description of Unknown: LeftRegion for integrase B4997 sequence
tgcaaaaatgaagaaatattgaaaatggcattttaacaaaaaactgcccaggtgctgttaacacctaggcggcctgatttgataacctatcaatgcataatgtatgataagcatatctcgcacatatatattatcatacatccaccaatttgaatagggtgtattttataccttaaatttcttttatatgaggtgatcgtatgataataggaatttatccccgaaaatctgtatatcgggataacagtgaatcaattaaa

SEQ ID NO: 17997 - DNA, 260 bp, Unknown; identical to SEQ ID NO: 17992
  Description of Unknown: LeftRegion for integrase B4998 sequence

SEQ ID NO: 17998 - DNA, 260 bp, Unknown
  Description of Unknown: LeftRegion for integrase B4999 sequence
tttttacaactactaattctaaaaatattttaaccaaagaactaatggataataatttagaagattataagaaaaatctatctgctacaatattaagtaatttaagagccgctactatcaattcattgtcaaacgataacaaagcgcagaatttttcaactaaaattttaatgttagagtataactaaaggggtttcaatatgttaagagcagcactatatgcacgctattccagcgataaccagcgatacgaaagcatt

SEQ ID NO: 17999 - DNA, 260 bp, Unknown
  Description of Unknown: LeftRegion for integrase B5000 sequence
cagggcgaaaaagtattatatgaagcttaccggtgcagatatcgtattagcccgctgaaaattgtgcataaggtcaattctgcgctgttccaattgttttggtagctattcagaatagttatcagtataatgtggtttgccaaaagtggttggtatcatattatgataccaaccaaaaaacgagagaggaggacaccgaaatgcctgaagtacggctcatcaccccgatcacaagacagagcacgaagaagatgcaggtt

SEQ ID NO: 18000 - DNA, 260 bp, Unknown
  Description of Unknown: LeftRegion for integrase B5001 sequence
taaaagtacatgcaatagtggttgttgcaaattacgcaacaactaaaaaaagccccgtgccctgctggaacaggtacacgggacgcgccgtcggtattggcgtaccgtatcggcaatttgtaaatctactgtgcgaggctgatttactctattattataccataaatcagtctcctatatagggaaggactgatttttttatgttaaaaaccgacatgacaaacgaaaaaagtacagcagttatctacgctcgcttttca

SEQ ID NO: 18001 - DNA, 260 bp, Unknown; identical to SEQ ID NO: 17647
  Description of Unknown: LeftRegion for integrase B5002 sequence

SEQ ID NO: 18002 - DNA, 260 bp, Unknown
  Description of Unknown: LeftRegion for integrase B5003 sequence
atacttatagagcaagatatcacagagtattaagaaaattaaaaattttttaaatttttttggattttaggggtgcgaaaacccgttttttacggaatatatatagaggaaaaaatcctcacgaagtcttgacttgattttgcaaggtggtattatggaggtaaatcaattgttgcctgcgtaaaaggagaataacagatatgcaggaaaacaaacaaaatttacgatttacagccctgtattgccgcctatcgtctgat

SEQ ID NO: 18003 - DNA, 260 bp, Unknown; identical to SEQ ID NO: 17647
  Description of Unknown: LeftRegion for integrase B5004 sequence

SEQ ID NO: 18004 - DNA, 260 bp, Unknown
  Description of Unknown: LeftRegion for integrase B5005 sequence
atactttcgatccttcgtccgacgcttatctgactaccgaaaaggacggcaccgttatcatggaaggctttggttcgttcaccgcttatgctcacaacggcatggttcttgtgcagaccgataaccttcctcaggaagtaatcgacctgttcaatgccatgtaaacctccgcattctctttctgcaaaggtggtatctctatgaaaaaacagccgaccggtggaaaccggcttgttgcctactaccgctactccggcggt

SEQ ID NO: 18005 - DNA, 260 bp, Unknown; identical to SEQ ID NO: 16123
  Description of Unknown: LeftRegion for integrase B5006 sequence

SEQ ID NO: 18006 - DNA, 260 bp, Unknown
  Description of Unknown: LeftRegion for integrase B5007 sequence
gctactcgcaggaggttgccgaggacgttgcgatgacggccaggaacaggctcttggagctttgcggggcgtagccgctccatcatcgccgaatagcaaagcgccccggtgcgtccgccaagacacatcaccggggcgagcaagatggagcgcgtggccgtagccggtcgcgctcattcccctatcagggaggtttcattatgacacagagaacggccgtgctgtatgcacgctactctagcgacaagcagcgcgaggcg

SEQ ID NO: 18007 - DNA, 260 bp, Unknown
  Description of Unknown: LeftRegion for integrase B5008 sequence
gaaacggtttgcggagttttacaaagtcggtctttcttactttggcgtagaaacgcaggatgagggatttgagctgttgagccgtgcaaagagtgtatttctgaatgaaggcattccaaaagaagagcgagagaggttatacaaagagataatgcgcttgtatttgcggatggaagagtaaacagcaagggagaaacataatgaacaaaaggacagggatatatggaagatattcagacacgaaacaagacgatggtttc

SEQ ID NO: 18008 - DNA, 260 bp, Unknown
  Description of Unknown: LeftRegion for integrase B5009 sequence
agatgtaagtgcttggaaaaatttcttaccttacacaaaagtaaaagagcttttaaataatggtgtttctacaataacggaattagcagatttctttaatgtagaagctccatatatggctagatgtatccattactatgcaaatgaaagtaatagatttactaaagaaaatatagcataaaaaaattaggaggtaaaatatgtatttagtagcttatgctagatactctagcgataaccaaagagaagagtctataact

SEQ ID NO: 18009 - DNA, 260 bp, Unknown
  Description of Unknown: LeftRegion for integrase B5010 sequence
ttcccctctgttcacattgataggtgcaacaatcatcttttcaacgccatcaatgaaagccccaacgcaaccctcaatatcaatggtacggagggatttacggctcaggagcttgaattgattgacctgtatcggaacttcccgctgagaaaacaaatggagctgctgaactatgctttcagcctgaaagaaggcaagcagtgagagtagttctttacatgaggtatagcagcgaccgtcagaccgaacagtccatagaa

SEQ ID NO: 18010 - DNA, 260 bp, Unknown; identical to SEQ ID NO: 17982
  Description of Unknown: LeftRegion for integrase B5011 sequence

SEQ ID NO: 18011 - DNA, 260 bp, Unknown
  Description of Unknown: LeftRegion for integrase B5012 sequence
cagggcgaaaaaatactatatgaagcttaccggcgcggatatcgtattagcccactgaaaattgtgcataaggtcaattctgcgctgttccaattgttttggtagctattcagaagagttatcagtataatgtggtttgccaaaagtggttggtatcataatatgataccaaccaaaaaatgagagaggaggacaccgaaatgcctgaagtacgactcatcacccctatcacaagacagaacacgaagaagatgcaggtt

SEQ ID NO: 18012 - DNA, 260 bp, Unknown
  Description of Unknown: LeftRegion for integrase B5013 sequence
cagggcgaagaagtattacatgaagctcaccggcgcagatatcgtattagcacactgaaaattgtgcataaggtcaattctgcgctgttccaattattttggtagctattcagaatagttatcagtataatgtggtttgccaaaagtggttggtatcataatatgataccaaccaaaatacgagagaggaggacaccgaaatgcctgaagtacggctcatcacccctatcacaaggcagagcacgaagaagatgcaggtt

SEQ ID NO: 18013 - DNA, 260 bp, Unknown
  Description of Unknown: LeftRegion for integrase B5014 sequence
tttccctctgttcacattgatagatgcaacaaccatctcttcaatgccatcaatgaaagccccaatgcaaccctcaacatcaacggtacagagggatttactgctcaggagcttgaattgattgacctgtatcgaaacttcccgctgagaaaacaaatggagctgctgaattatgctttcaacctgaaagaaggtaagcaatgagagtagttctttacatgaggtatagcagcgaccgtcagaccgagcaatccatagag

SEQ ID NO: 18014 - DNA, 260 bp, Unknown; identical to SEQ ID NO: 15396
  Description of Unknown: LeftRegion for integrase B5015 sequence

SEQ ID NO: 18015 - DNA, 260 bp, Unknown
  Description of Unknown: LeftRegion for integrase B5016 sequence
gaaattctaaaacagataactgaaaaaatggtctcggcaggtattattacagacgagcagaaaaaacgtctcgataagcttaatactgaagattgctatagttgtttctgcacagtattggcggcttgaatttgtcaggtttgatgataccattttgaaaaaatttgtagtatccttatgagtaaaacggaggtgatataatgccaacagtaacggtaatacagccaacattgacagaagaaaaaacagcaaaaatacgc

SEQ ID NO: 18016 - DNA, 260 bp, Unknown
  Description of Unknown: LeftRegion for integrase B5017 sequence
cagggcgaaaaagtattatatgaagcttaccggtgcagatatcgtattagcccgctgaaaattgtgtataaggtcaattttgcgctgttccaattgttttggtagctattcagaatagttatcagtataatgtggtttgccaaaagtggttggtatcatattatgataccaaccaaaaaacgagagaggaggacaccgaaatgcctgaagtacggctcatcaccccgatcacaagacagagcacgaagaagatgcaggtt

SEQ ID NO: 18017 - DNA, 260 bp, Unknown; identical to SEQ ID NO: 17647
  Description of Unknown: LeftRegion for integrase B5018 sequence

SEQ ID NO: 18018 - DNA, 260 bp, Unknown; identical to SEQ ID NO: 17982
  Description of Unknown: LeftRegion for integrase B5019 sequence

SEQ ID NO: 18019 - DNA, 260 bp, Unknown
  Description of Unknown: LeftRegion for integrase B5020 sequence
gcttcgcaatttggaaaacatctgcaagctaaaatccaagagcaagtgaacagcgaaagcaattcttctcttttacttgaacagatgaacgaattgtttaacaatgtttctaaattgtccgaaactgaacaaaaggctttttataccggacttgtaaaagggatagagcgttgggaaaatgaacagaagggggaataataatgccggaagcattaaacgcggtcatatacgcccgctattcctccgatcggcaaacagaa

SEQ ID NO: 18020 - DNA, 260 bp, Unknown; identical to SEQ ID NO: 14792
  Description of Unknown: LeftRegion for integrase B5021 sequence

SEQ ID NO: 18021 - DNA, 260 bp, Unknown
  Description of Unknown: LeftRegion for integrase B5022 sequence
actccgttagagggcatgagtaaagagcaagcctctctttatatgctcacggaatttctaagcctcatagataaagaatatcctaaaataccgccccagcagaaagccgctttaattagcgaattttataagcatgaccctataaaattgttattatctgcacttaataacgaactatccaaacaaggaagtgataaaaaatgattcagcaggcattaaacgccgtaatatacgcccgttattcttcccacaatcaaaca

SEQ ID NO: 18022 - DNA, 260 bp, Unknown
  Description of Unknown: LeftRegion for integrase B5023 sequence
gaataaaagtagagggaataattcaaggtctacttttacaagataaataccaaacaaaacaaaagttagggtaattagagaaggaaaaattatacgtataaagtttaagaaggaatagatacggcagattgtgtatgccagaactgcgtatacacctggaaagcctgagtgtgtagccgtatacagagaggaggcactgcatggcaaaagcaaaacaaaaagcagctacaaatgatataagcaaactcgctgttatatat

SEQ ID NO: 18023 - DNA, 260 bp, Unknown; identical to SEQ ID NO: 15838
  Description of Unknown: LeftRegion for integrase B5024 sequence

SEQ ID NO: 18024 - DNA, 260 bp, Unknown; identical to SEQ ID NO: 15702
  Description of Unknown: LeftRegion for integrase B5025 sequence

SEQ ID NO: 18025 - DNA, 260 bp, Unknown
  Description of Unknown: LeftRegion for integrase B5026 sequence
ccttgcggtctgcgtcgtgtcgctcccggtcggcttgatcattgtggccattggagcgtaccgggtggcaaaggccggggatatttatgacgctgcggttgctcggtacgagcagcaaatctcggactatgttgactggctggatgaagtcaacgcaaaataaaaagccgccctcggtaggcggcgggaggttgctctgaatgtgtgcaaaaaagaaaccggccatgcttgagccggatatgcaggatgccgtgatctac

SEQ ID NO: 18026 - DNA, 260 bp, Unknown
  Description of Unknown: LeftRegion for integrase B5027 sequence
ggttctagtttttctgtacttattattctatgcgaaacctatctatattgctatcgggtacggtgttattcgctgtccggctgtttattcctgtattgaaattgtcaacaaccagaaggcacgcaccgaaaaatagtccttcgggaggacatacatcttcgtgtccagcattattatctttctgcaaaggtggtatctctatgaaaaaacagccaaccggcggcaagcggcttgttgcctactaccgttacagcggcggc

SEQ ID NO: 18027 - DNA, 260 bp, Unknown; identical to SEQ ID NO: 17647
  Description of Unknown: LeftRegion for integrase B5028 sequence

SEQ ID NO: 18028 - DNA, 260 bp, Unknown; identical to SEQ ID NO: 17647
  Description of Unknown: LeftRegion for integrase B5029 sequence

SEQ ID NO: 18029 - DNA, 260 bp, Unknown
  Description of Unknown: LeftRegion for integrase B5030 sequence
ttcccctctgttcacattgatagatgcaacaaccatctcttcaatgccatcaatgaaagcccaaacgcaaccctcaatatcaacggtacagaggggtttacggctcaggagcttgaattgattgacttgtatcgaaacttcccgctgagaaagcaaatggaactgctaaactatgctttcagcctgaaagaaggtaagtaatgagagtagttctttacatgaggtatagcagcgaccgtcaaaccgagcaatccatagag

SEQ ID NO: 18030 - DNA, 260 bp, Unknown
  Description of Unknown: LeftRegion for integrase B5031 sequence
gagcgcgtgaaggtctatattgaaaagccggatgccaaggacggctttcatcacgcaacctgctatcttccctcttatgaatgggtgaatgtgttcggcttctccgatgaggagattgcacgctatcagcaggtgattgaatccaccgcacacctcatcatgaactccgctatttctgctaaacccaaaggagtgatcccatgcccaccgactacgccctgtacctccgcaaatcccgcgcggacctcgaggccgaggcg

SEQ ID NO: 18031 - DNA, 260 bp, Unknown; identical to SEQ ID NO: 15483
  Description of Unknown: LeftRegion for integrase B5032 sequence

SEQ ID NO: 18032 - DNA, 260 bp, Unknown
  Description of Unknown: LeftRegion for integrase B5033 sequence
atacttttgatccgtcgtccgacgcttatctgactgccgaaaaggacggcaccgttatcatggaaggctttggctcattccctgcttatgctcacaaaggcatggttcttatgcagaccgacaaccttccccaggaagtgattgacctgttcgatgccatgtaaagctccacattgtctttctgcaaaggtggtgtccctatgaagaaacaaccaaccgtcggcaagcggcttgttgcctactaccgctacagcggcggc

SEQ ID NO: 18033 - DNA, 260 bp, Unknown
  Description of Unknown: LeftRegion for integrase B5034 sequence
tttcgatcaagggcttatgacggtcttgcctgatcttacaattcaggtctcggactatgtgaaagacagctacgacgaccaaaatacgaaagactggctactcggcgtagagggtacaaaaatcatcaggccgaagaggttcgcgccaaatcgcgacatgctggcctatcacaatgagttcgtcttcctgaggtgattccatgcagcgagcagtgatatacgccaggtacagccctggaccaaatcagacggagcagtcg

SEQ ID NO: 18034 - DNA, 260 bp, Unknown; identical to SEQ ID NO: 15240
  Description of Unknown: LeftRegion for integrase B5035 sequence

SEQ ID NO: 18035 - DNA, 260 bp, Unknown
  Description of Unknown: LeftRegion for integrase B5036 sequence
ccgccgagacgaccgagttcgcgaggctctacatagggacggcaatagcactgaacgtccccaggcgattcatagaccggtcagtgaatacttgggagggaacagcctcgaagctggactgatacgaaagcgccccggtgagtccgccaagaccaggcaccggggcaacaagactctccataaaaggagacggatagattatggcacataagacggcggtgctctacgcccgctattcctcggacaagcagcgcgaggcg

SEQ ID NO: 18036 - DNA, 260 bp, Unknown
  Description of Unknown: LeftRegion for integrase B5037 sequence
atactttcgatccttcgtccgacgcttatctgactgccgaaaaggacggcaccgttatcatggaaggctttggctcattccctgcttatgctcacaacggcatggttcttgtgcagaccgacaatcttccccaggaagtgattgacctgtttgatgccatgtaaagctccacattgtctttctgcaaaggtggtgtccctatgaagaaacaaccaaccggcggcaagcggcttgttgcctactaccgctacagcggcggc

SEQ ID NO: 18037 - DNA, 260 bp, Unknown
  Description of Unknown: LeftRegion for integrase B5038 sequence
gcgaccaccgagatctacacgtccggcgaatcgcagccgatcaacggaaaaatcgaaacaaagaagaaattcaccctgccggaatggaaaataggcgaaacggatgcagtcgtatttccgttcgtctgcgttatcgccggcatttccattattgcacttatcattgccatcataaaaggaaaataaaaggaggtaactccatgcaaaccgaatacgccctctatctccgcaaatcccgcgcggaccttgaagccgaggcg

SEQ ID NO: 18038 - DNA, 260 bp, Unknown
  Description of Unknown: LeftRegion for integrase B5039 sequence
cttacgacctctgtgatccaacgtaactgcaagtgcggaatcaaccgcgcgtactcgatactacgcaatcttcaggtctacgggcttgttcatgaggccggaaaagacacctatgaatggacagaaaaagccctcctgctgggcgcagaagggcgtaacgggtaacagatatgtcgatagatattaaatggcaagtgccaatggcaaagccggaggtcagcgaactggccgtcgtatatgcccggtattcaagccacagt

SEQ ID NO: 18039 - DNA, 260 bp, Unknown; identical to SEQ ID NO: 17993
  Description of Unknown: LeftRegion for integrase B5040 sequence

SEQ ID NO: 18040 - DNA, 260 bp, Unknown
  Description of Unknown: LeftRegion for integrase B5041 sequence
taaaagtacatgcaatagtggttgttgcaaattacgcaacaactaaaaaaagtcccgtgccctgctggaacaggtacacgggacgcgccgtcggtattggcgtaccgtatcggcaatttgtaaatctactgtgcgaggctgatttactctattattataccataaatcagtctcctatatagggaaggactgatttttttatgttaaaaaccgatatgacaaacgaaaaaagtacagcagttatctacgctcgcttttca

SEQ ID NO: 18041 - DNA, 260 bp, Unknown
  Description of Unknown: LeftRegion for integrase B5042 sequence
atacttttgatccgtcgtccgacgcttatctgactgccgaaaaggacggcaccgttatcatggaaggctttggctcattccctgcttatgctcacaaaggcatggttcttatgcagaccgacaaccttccccaggaagtgattgacctgttcgatgccatgtaaagctccacattgtctttctgcaaaggtggtgtccctatgaagaaacaaccatccggcggcaagcggcttgttgcctactaccgctacagcggcggc

SEQ ID NO: 18042 - DNA, 260 bp, Unknown; identical to SEQ ID NO: 16483
  Description of Unknown: LeftRegion for integrase B5043 sequence

SEQ ID NO: 18043 - DNA, 260 bp, Unknown
  Description of Unknown: LeftRegion for integrase B5044 sequence
ggcggtcagatttccgatttaggggacagaatgacagcttatgcgaatagcggcggcggaatgagcgcagaggggttggaactctatcaagagttcaaaacgcttattcttcgtgctaatggccttcccgaaaatgagcgtaaagccttctttgacggccttcgcaaaggctatgagcaatacgaagaggaacacaagaaatgggaataataatgccggaagcattaaacgcggtcatatatgcccgctattcctccgat

SEQ ID NO: 18044 - DNA, 260 bp, Unknown
  Description of Unknown: LeftRegion for integrase B5045 sequence
atacttttgatccgtcgtctgacgcttatctgactgccgaaaaggacggcaccgttatcatggaaggctttggctcattccctgcttatgctcacaacggcatggttcttgtgcagaccgacaaccttccccaggaagtaatcgacctgttcaatgccatgtaaacctccgcattctctttctgcaaaggtggtatctctatgaaaaaacagccgaccggtggaaaccggcttgttgcctactaccgctactccggcggt

SEQ ID NO: 18045 - DNA, 260 bp, Unknown
  Description of Unknown: LeftRegion for integrase B5046 sequence
ggacggcagcttaaaacattcctttgaagtaaaaaatagagtaactgctatgatcggaaaatggactgcgtaccaagccgaaaaacgcctgccgctgctggaactctgtcaagacttgtccgaagatgaattaaccgaagttataaactatatcaaatacgttcaatcaaagcgcgattgaacaggaagggggaataataatgccggaagcattaaacgcggtcatatacgcccgctattcctccgatcgtcagacagaa

SEQ ID NO: 18046 - DNA, 260 bp, Unknown
  Description of Unknown: LeftRegion for integrase B5047 sequence
cgcgattatgtggacgacaataagtattccagcattgaggcagtgcaaaagaacttgaaggtaattccgacggcagagcagcagtttttagactccagaaccgcgtacctgaaagacgccggttttacagatgaagaaattgcccagaggccaaccctcgacagcggagaaaacaaataacaccaagaggtgcagcagctatgaaaagacctgacgactatgctatatacctccgaaaatcacgcaaggaccttgatctt

SEQ ID NO: 18047 - DNA, 260 bp, Unknown; identical to SEQ ID NO: 15702
  Description of Unknown: LeftRegion for integrase B5048 sequence

SEQ ID NO: 18048 - DNA, 260 bp, Unknown
  Description of Unknown: LeftRegion for integrase B5049 sequence
actccgttagatggcatgagtaaagagcaagcctctctttatatgctcacggaatttctaagcctcatagataaagaatatcctaaaataccgccccagcagaaagccgctttaattagcgaattttataagcatgaccctataaaattgttattatctgcacttaataacgaactatccaaacaaggaagtgatgaaaaatgatgcagcaggcattaaacgccgtaatatacgcccgttattcttcccacaatcaaaca

SEQ ID NO: 18049 - DNA, 260 bp, Unknown
  Description of Unknown: LeftRegion for integrase B5050 sequence
tttcgatcaagggcttatgacggtcttgcctgatcttacaattcaggtctcgaattacgtgaaggacggctacgacgaccaaaatacgagagactggctactcggcgtagagggtacaaaaatcatcaggccgaagaggttcgcaccaaattgcgacatgctggcctaccacaatgagtttgtattcctgaggtgattccatgcagcaagcagtgatatacgccaggtacagccctggaccaaatcagacagaacagtcg

SEQ ID NO: 18050 - DNA, 260 bp, Unknown; identical to SEQ ID NO: 18036
  Description of Unknown: LeftRegion for integrase B5051 sequence

SEQ ID NO: 18051 - DNA, 260 bp, Unknown; identical to SEQ ID NO: 17171
  Description of Unknown: LeftRegion for integrase B5052 sequence

SEQ ID NO: 18052 - DNA, 260 bp, Unknown
  Description of Unknown: LeftRegion for integrase B5053 sequence
gctggataagctggccagtctctttgagagcgccatgacggaggtcgccgttgtaaactacccgcgcaagagcgcgtaaagatctcgaaccaaaaaagatgcccccggcgctaccaacaccgagggcgatcaaagggcagctgactatcgacaggtcttactgcccttctatcttacaacagaataggaggtttcgcaacatgaaaatgatgcagaacgacaaccggacggccatcacctactaccgctattccagccac

SEQ ID NO: 18053 - DNA, 260 bp, Unknown
  Description of Unknown: LeftRegion for integrase B5054 sequence
cgcgattatgtggacgacaataagcattccagccttgaggcagtgcaaaagaacttgaaggtaattccaacggcagagcagcagtttttagactccagaaccgcgtacctgaaagacgccggttttacagatgaagaaatcgcccagaggccaaccctcgacagcggagaaaacaaataacaccaagaggtgcagcagctatgaaacggcctgacgactatgctatttaccttcggaaatcgcgcaaggaccttgacctt

SEQ ID NO: 18054 - DNA, 260 bp, Unknown
  Description of Unknown: LeftRegion for integrase B5055 sequence
acagggcaaaaaagtattacatgaagctcactggggcagacatcgttttagccagatgatttttgtgtaataggtcaattcttctattttgtaaatgttgtgttggctatttcactaggttcacagtataatgtggtttgccaaaagtggttggtatcataatatgataccaaccaaaatcgaggaaggaggactcggcaatgcctgatgtaagactcatcacccccattacaaagcaaaacgcacaaaagacccaggtc

SEQ ID NO: 18055 - DNA, 260 bp, Unknown; identical to SEQ ID NO: 18004
  Description of Unknown: LeftRegion for integrase B5056 sequence

SEQ ID NO: 18056 - DNA, 260 bp, Unknown; identical to SEQ ID NO: 18004
  Description of Unknown: LeftRegion for integrase B5057 sequence

SEQ ID NO: 18057 - DNA, 260 bp, Unknown
  Description of Unknown: LeftRegion for integrase B5058 sequence
actccgttagatggcatgagtaaagagcaagcctctctttatatgctcacggaatttctaagcctcatagataaagaatatcctaaaataccgccccagcagaaagccgctttaattagcgaattttataagcatgaccctataaaattgttattatctgcacttaataacgaactatccaaacaaggaagtgataaaaaatgatgcagcaggcattaaacgccgtaatatacgcccgttattcttcccacaatcaaaca

SEQ ID NO: 18058 - DNA, 260 bp, Unknown
  Description of Unknown: LeftRegion for integrase B5059 sequence
gatttgacatttagacaattatatatcaaaatatataaaacagctcccacgctaccaacgtgagagctgtcaaaaggctatacaagctattgcttatacaatatgccccaaccaagcatattgtaccataaagcacctagtttgtataggtgttatttttatactcttttacacatatttttaacaggaaggtgatttttatggaattatatgcacaatatttaaggaaatctagggctgatatggaagccgaacaacat

SEQ ID NO: 18059 - DNA, 260 bp, Unknown
  Description of Unknown: LeftRegion for integrase B5060 sequence
gtgcgctttaataacggcgaagcaaagatgtttgattttaagccgctcctgaaaacgcccgcttttgcaccgcttgcagatctggatgtctttaaaggcgtgtatatagattatggcgttccagtatggaatgacggagccattgatattgcgccggaagcgttgtatgaagagggggaagcaacgggaggtgctatgtcatgaaagaatattgtatttatttgagaaaatcccgtgcggatgcggaagcggaggcgcgc

SEQ ID NO: 18060 - DNA, 260 bp, Unknown
  Description of Unknown: LeftRegion for integrase B5061 sequence
atacttttgatccgtcgtccgacgcttatctgactgccgaaaaggacggcgccgttaccatggaagactttggctcattccctgcttatgctcacaatggcatggttcttgtgcagaccgacggccttccccaggaagtaattgacctattcgatgccatgtaaagtttcacatcgtctttctgcaaaggtggtgtccctatgaagaaacaaccaaccggcggcaagcggcttgttgcctactaccgctacagcggcggc

SEQ ID NO: 18061 - DNA, 260 bp, Unknown; identical to SEQ ID NO: 15779
  Description of Unknown: LeftRegion for integrase B5062 sequence

SEQ ID NO: 18062 - DNA, 260 bp, Unknown
  Description of Unknown: LeftRegion for integrase B5063 sequence
cgcgattatgtggacgacaataagtattccagccttgaggcagtgcaaaagaacttgaaggtaattccgacggcagagcagcagtttttagactccagaaccgcgtacctgaaagacgccggttttaccgatgacgaaatcgcccagaggccgacccttgacagcggagaaaacaaataacaccaagaggtgcagcagccatgaaaagacctgacgactatgctatatacctccgaaaatcacgcaaggaccttgatctt

SEQ ID NO: 18063 - DNA, 260 bp, Unknown
  Description of Unknown: LeftRegion for integrase B5064 sequence
actccgttagagggcatgagtaaagagcaagcctctctttatatgctcacggaatttctaagcctcatagataaagaatatcctaaaataccgccccagcagaaagccgctttaattagcgaattttataagcatgaccctataaaattgttattatctgcacttaataacgaactatccaaacaaggaagtgatgaaaaatgatgcagcaggcattaaacgccgtaatatacgcccgctattcttcacataaccagaca

SEQ ID NO: 18064 - DNA, 260 bp, Unknown
  Description of Unknown: LeftRegion for integrase B5065 sequence
cttctgaatacggagaacagttcaccgctgaagaagctcagtatgctattgataatcttgaataaataaaaaacgccccggcgtgggagcaccgaagcgtttatatagaacagcttatccttggaggataatccgccccaacaattggattataccacctcctgggtaggcttggcaagtcatactttggaggtattacagtgaatcgagcggtaatctatgcccgatacagcagtgacatgcagcgtgaagaaagcgtg

SEQ ID NO: 18065 - DNA, 260 bp, Unknown
  Description of Unknown: LeftRegion for integrase B5066 sequence
atacttatagagcaagatatcacagaatattaaaaaaattaaaaattttttaaatttttttggattttaggggtgcgaaaacccgttttttacggaatatatatagaggaaaaaatcctcacgaagtcttgacttgattttgcaaggtggtattatggagataaatcaattgttgcctgcgtaaaaggagaataacagatatgcaggaaaacaaacaaaatttacgatttacagccctgtattgccgcctgtcgtctgat

SEQ ID NO: 18066 - DNA, 260 bp, Unknown
  Description of Unknown: LeftRegion for integrase B5067 sequence
atactttcgatccttcgtccgacgcttatctgactaccgaaaaggacggcaccgttatcatggaaggctttggctcattccctgcttatgctcacaacggcatggttcttgtgcagaccgacaaccttccccaggaagtaatcgacctgttcaatgccatgtaaacctccgcattctctttctgcaaaggtggtatctctatgaaaaaacagccgaccggtggaaaccggcttgttgcctactaccgttactccggcggt

SEQ ID NO: 18067 - DNA, 260 bp, Unknown; identical to SEQ ID NO: 17813
  Description of Unknown: LeftRegion for integrase B5068 sequence

SEQ ID NO: 18068 - DNA, 260 bp, Unknown
  Description of Unknown: LeftRegion for integrase B5069 sequence
gacaaataaataaattattgtataatgaggttgcaaaaaacataaactatattgaatgaaagcagaggacggaacaggcggccgtcgccctagttggagatgtgggattgtccccccacctatttcattcaaatactaaaagaacctcgtagaaatgcgaggttcttttctgtaataaaaatgattggagtgtgattatcttgtcggaactctatttgatgtatctaagaaaatcccgcgccgacggcgaagatgaaacg

SEQ ID NO: 18069 - DNA, 260 bp, Unknown
  Description of Unknown: LeftRegion for integrase B5070 sequence
atatctattcaagaagaaaaaatgaataaggagtaggaaattaatgagggggcaaattgcttttcgataggaattattgttatataattggaatttatcttgacaaaattagtaaaatatgatataataataaagcaatcaagggataaaaacagaacattttttatttgccctctgtacacgaaaaggaggaaaataaaatgttggctgattaccttgaaaaaataagaacaaaaacaaatgtgcttgtattaaaagct

SEQ ID NO: 18070 - DNA, 260 bp, Unknown
  Description of Unknown: LeftRegion for integrase B5071 sequence
attttggaacaagcatttataatggagatagggagtgctggtacttctacgggagccagtacggataccttctccattcggaggaggtatttttttatgcccaaaccattcaaatgctcccgaaatcaatgtcgggagcatcggcaatcgcacttcattgacattaagatccttttccttttgggagagtaggagccgccatgagaaacgccgttatttatgcgagatattcgtcagataggcagagagaggaatctatc

SEQ ID NO: 18071 - DNA, 260 bp, Unknown
  Description of Unknown: LeftRegion for integrase B5072 sequence
attattttgatgaaacccttgtcaggcgcaagcctgaattgtatttggtttaacaagtcttgttttttgcgcgcggcacttccttcccgtgcgccatccgcacacctgattccagcgggcttccaccgctgtacctgcatccgccgcaagactttctccacaggctatccgtatatgatgctcctgaaaggagaatgcacatgaacgctgtcatttacgcgcgctattcaagccacaatcagacagaacagtccatcgag

SEQ ID NO: 18072 - DNA, 260 bp, Unknown
  Description of Unknown: LeftRegion for integrase B5073 sequence
aagtgtttcagaataaattaacgtattagatagtgtatcaaaatcctttattaagtctttgattacaagtgccaattttataattaaatatatgatttagtcttgactttctttaagctttatggtataattatattataatcaaatatagtaacagtagaacattttatttgccctctatacgaaggaggaaaattaaaatgttggctgagtaccttgaaaaaatcaaatcacgaaataatgtgacaatattgaaagct

SEQ ID NO: 18073 - DNA, 260 bp, Unknown
  Description of Unknown: LeftRegion for integrase B5074 sequence
cgcctacattgctgccggacagatcacgcagaaactgctcgacaagggacttatcacacccggcgaattcgacaagatcatggcgaaaaaccgcgaaaaattctcgccggcaatcgcaaagattatgccctgaatgacttgctattccgggctttcagagtgatatatactatacccctttaaggacaggaggcgagacaatgaaacggataacaaagatcgacgcggcggcgaaggaaacgaaaaaactccgcgtggca

SEQ ID NO: 18074 - DNA, 260 bp, Unknown
  Description of Unknown: LeftRegion for integrase B5075 sequence
cagcaaaggtaaaagaatatgcaaaatctcagtatggaatggagctagatatagtcgttttgcctgatagtaaaattaaaaaatcaaataaggaagaggagacctctgcataagaggtctccatttttagttaatgatacattgaaaaaaatagtgggtgttgttaaaattaactaaaaatctctagggggaatattggcttggaaacaacgaataagatcccatgtggaatttatgccagagtaagtacggacaagcaa

SEQ ID NO: 18075 - DNA, 260 bp, Unknown
  Description of Unknown: LeftRegion for integrase B5076 sequence
attatgttacttatcctgtcatatattgaagaggtcggcagaagaaaataaatcagaagtctcttctatgcacatttttctacaataaaattgcagtttcggcacaaaatgttacgaatcggtggttttaatgccgaaaaattgcgttaaatataaactacgccgccgagttgcggcgttttttagtgaggtgatacacagtgagaaacgcggttatttatgcgagatattcgtcggataggcagagagaggaatctatc

SEQ ID NO: 18076 - DNA, 260 bp, Unknown
  Description of Unknown: LeftRegion for integrase B5077 sequence
tgcggcacggcgtgtcaaccagattaccaccgccgcgtttttttgtaaaccaaaagtcttgtctttgcgctcggcactttcttcccgcgcgccatccacacatctgattccagcgggcttcaaccgctgtacctgcatcatagccgcaagactttctccacaggttatccgtatatgatgctcctgaaaggagaatgcacatgaacgctgtcatttacgcgcgctattcaagccacaatcagacagagcagtccatcgag

SEQ ID NO: 18077 - DNA, 260 bp, Unknown
  Description of Unknown: LeftRegion for integrase B5078 sequence
cattttttataacaaacattagttcgcatgtgttttataaatatattatactacaagtacaatatatttaaaaataactaaaaaatatttttttactttttactacacctatatatattcttcagtttacaaaaatattcttattttcagtctaaaaaaataattctttttataaaaagaggtaaaaaggaggaatttacatgaaagtagtcgcaatatactcacgtaaatctaaagaaagcgatacaggagaatctata

SEQ ID NO: 18078 - DNA, 260 bp, Unknown
  Description of Unknown: LeftRegion for integrase B5079 sequence
tgcagaaaaagcagaaacgtcaacaggaaatgcgtggaattaacagattattaacaaaagtcttgcctttgcgcccggcattcttgccgcgcgccatccgcacacctgattccagcgggcttccaccgctgtacctgcatccgccgcaagactttctccacaggctatccgtatatgatgctcctgaaaggagaatgcacatgaacgctgtcatttacgcgcgctattcaagccataaccagacagaacagtccattgaa

SEQ ID NO: 18079 - DNA, 260 bp, Unknown
  Description of Unknown: LeftRegion for integrase B5080 sequence
cgtgactacattgataacgaaaagcattccagccttgaggctgtacaaaagaacttgcaaatcatccccaccgcagagacccaattcctggacgcgagaacagcatacctgaaagacgcaggctttaccgatgacgagatagccaacagaccaactctcgacagcggagaagacaaataacatccagaggtgcagcagctatgaaacgacctgacgactatgctatatacctcagaaaatcgcgcaaggacttggaccta

SEQ ID NO: 18080 - DNA, 260 bp, Unknown
  Description of Unknown: LeftRegion for integrase B5081 sequence
atctcggttatcgcggcgacgcgtttgccgcggaggacgtctccatcagcgacgacctcggccccgatgaccgcatcgcctggccgaatacgcactatgtctgcatccgccggatgggcgacgacgactttgtggcaaggttcggatcgccgcaggccatcgggttctgtgcgtttttcgagggaaaggaggaataacccatgatctgcgccatgtatctgcgcaagtcccgcgcggactatgaggccgaggcccgcggc

SEQ ID NO: 18081 - DNA, 260 bp, Unknown
  Description of Unknown: LeftRegion for integrase B5082 sequence
ctgggtaacgtctcttcaaaatgcaaagatgaattttgggatttctggaacattgctaatgatctgacgagcaaataaaaaaagcccgtcccgagagttgctaagaatagccgctacattttggacgtgtgggcggctatttctttttgctctgaaacagagtaatgcaataaatcaacgagcaacgaggtgaataatttatgtattgcttatatctcagaaaatccagagcagatatagaactcgaagcgaaaggcgag

SEQ ID NO: 18082 - DNA, 260 bp, Unknown
  Description of Unknown: LeftRegion for integrase B5083 sequence
attgggctggccctctacggtatgattgtggtgagcattctggacgcggagttacacgccgccattcttcccggcatcttcatgctgctggcgttcaacgcacctgacctgatccggctgaaactgggcaagttccgggataacgtgggcgattatctgcggcaataaaaaagcccgcgcaatggcgggcgggtgatggcatgaaaaaagagaacgaaatccgggcagttgtctacgcccggtactcatcccattcgcaa

SEQ ID NO: 18083 - DNA, 260 bp, Unknown
  Description of Unknown: LeftRegion for integrase B5084 sequence
aaaaaaccctcgttgaattattccgaggaacaaccgaagaggggcgatttgagattataacagccgttatgaacatcattaaagagaaagaaaaaaaggttacggcagaaaatacagagtgtgtgggttaaacaacgcgacagaaaagtcatcccgtgggaactcgttcacctctacaagaagttgaggaaactggaaaaatgaatgtggttttatacttgaggtacagcagtgacaaacagtccgaacaatccatagaa

SEQ ID NO: 18084 - DNA, 260 bp, Unknown
  Description of Unknown: LeftRegion for integrase B5085 sequence
attatttattctgtttatctgattctccatatccaaaagtagagatttccctaacagaagaagagcaattactgcttgacgcatttcgttccgctaccccacaaggtagattcaacattattactacctgtatgtgtgagaagcgaaaaggggacaacgaaagtgccgggtaattgatttcatagaatggaggaagaaccatgtatgaggatataaaaacagcctgcctatacgttagattctcaagccataaccagact

SEQ ID NO: 18085 - DNA, 260 bp, Unknown
  Description of Unknown: LeftRegion for integrase B5086 sequence
gcttcgcaatttggaaagcatctgcaagctaaaatccaagagcaagtgaacagcgaaagcaattcttctcttttacttgaacagatgaacgaattgtttaacaatgtttctaaattgtccgaagctgaacaaaaggctttttataccggacttgtgcaagggataaagcgttgggaagatgggcagaagggggaataataatgccggaagcattaaacgcggtcatatacgcccgctattcctccgatcgtcagacagaa

SEQ ID NO: 18086 - DNA, 260 bp, Unknown
  Description of Unknown: LeftRegion for integrase B5087 sequence
catgattatgttacttatcctgtcatatattgaagaggtaggcagaagataaatcaggggtctcttctgtgcacatttttctacaataaaattgcagtttcggcacaaaatgttacgaatcggtggttttaatgccgaaaaattgcgttaatataaactacgccgccgaggtgcggcgttttttagtgaggtgatacacagtgagaaacgcggttatttatgcgagatattcgtcggacaggcagcgagaggaatctatc

SEQ ID NO: 18087 - DNA, 260 bp, Unknown
  Description of Unknown: LeftRegion for integrase B5088 sequence
attatgttacttatcctgtcatatattgaagaggtcggcagaagaaaataaatcagaggtctcttctatgcacatttttctacaataaaattgcagtttcggcacaaaatgttacgaatcggtggttttaatgccgaaaaattgcgttaaatataaactacgccgccgagttgcggcgttttttagtgaggtgatacacagtgaaaaacgcggttatttatgcgagatattcgtcggataggcagagggaggaatctatc

SEQ ID NO: 18088 - DNA, 260 bp, Unknown
  Description of Unknown: LeftRegion for integrase B5089 sequence
ttatgttacttatcctgtcatatattgaagaggtcggcagaagaagataaatcaggagtcctcttctatgcacatttttctacaataaaattgcagtttcggcacaaaatgttacgaatcggtggttttaatgccgaaaaattgagttaaatataaactacgccgccgaggtgcggcgttttttagtgaggtgatacacagtgagaaacgcggttatttatgccaggtattcgtcagataggcagcgagaggaatctatc

SEQ ID NO: 18089 - DNA, 260 bp, Unknown; identical to SEQ ID NO: 13516
  Description of Unknown: LeftRegion for integrase B5090 sequence

SEQ ID NO: 18090 - DNA, 260 bp, Unknown
  Description of Unknown: LeftRegion for integrase B5091 sequence
aaacaaagagagttttgccgtcaattagtcgtggaaatggcacatgggtaaaacgcctgtgtgccattttttttgactttaatctgtatagtaaccaaatgaaagaaacgcaaaataaagtctgttaattgggcattttgacttgactttcctgcgcctttgagtgattaatgtcatgataaaaatcaaggaggttttttatgcaaacaccacgcttaaaaaagagagcagcgagttatgttcgcgtgagtacctatcag

SEQ ID NO: 18091 - DNA, 260 bp, Unknown
  Description of Unknown: LeftRegion for integrase B5092 sequence
acactacaatagaatattttctaacaggaaaacgccctatatctaatctgactgatatggaaaatcttctattagaagcatacagatcggcagacgtaaaaggacaagctgcaatcatccaagtctgtatgaatgaaaaagatgcaaaaggggaaactatcattgcaggataataagcattgaagaatggaggaagaaccatgtacgaagagattaagactgcttgtctatatctacgatattcaagcagcaaccaaact

SEQ ID NO: 18092 - DNA, 260 bp, Unknown
  Description of Unknown: LeftRegion for integrase B5093 sequence
aagccttcgaccgaggccttataactatcactccttccatgaaaatctatgtttctccaataattttggatagccctcaggacgcttttacagcccgctggctggcttctcttgacggaatggttttacccccccccccgatttccgccgcgtagagagcttctggagtaccataacgacgaaatttttaggagggtcacatgaatacagtaatttatgctcggtattctgccggcccgagacagaccgaccagagtatc

SEQ ID NO: 18093 - DNA, 260 bp, Unknown
  Description of Unknown: LeftRegion for integrase B5094 sequence
attatgttacttatcctgtcatatattgaagaggtcggcaggagaaaataaatcagaggtctcttctatgcacatttttctacaataaaattgcagtttcggcacaaaatgttacgaatcggtggttttaatgccgaaaaattgcgttaaatataaactacgccgccgagttgcggcgttttttagtgaggtgatacacagtgagaaacgcggttatttatgcgagatattcgtcggataggcagagagaggaatctatc

SEQ ID NO: 18094 - DNA, 260 bp, Unknown
  Description of Unknown: LeftRegion for integrase B5095 sequence
aaaatcagtcaggcagagtttgaacgcatcgatgctttgaacaaggaaagtttcggtgtggggtgatatttttttatattttatctggacggcggccaatcaagttttgagtgggaaaatgtctgatatttgcggcatagtgcttgactaattcgggacgatatttaatatatgagtaccctcgaaaaaaggagatttttatggaaattcaattaaaacgggcgggttcttatgttagggttagcacctaccaagaatcg

SEQ ID NO: 18095 - DNA, 260 bp, Unknown; identical to SEQ ID NO: 13967
  Description of Unknown: LeftRegion for integrase B5096 sequence

SEQ ID NO: 18096 - DNA, 260 bp, Unknown
  Description of Unknown: LeftRegion for integrase B5097 sequence
aaaaaatgaccgccggcgcgccaacgccgaacggtcgtgtaatttgccaacctcacaagttaaggcccattacgttattattatatcataacgtaaatggccttgctatcccctgcctattttcaggagatacaaggtcaaattttttaccttttttgcctatttttgtcaaataaaatcacaccaagaggagagaaaccatggagagagccgttatttatgcccgttattcaagtgatcaacaacgcgaggaaagtatc

SEQ ID NO: 18097 - DNA, 260 bp, Unknown
  Description of Unknown: LeftRegion for integrase B5098 sequence
atgttagtaggctttttaattggcttgcttgtaggcggtacaggtggagtaatcacaatgtgtctctgcacagcagccggacaagcggataagcatgaaaactgcacaggttcggacgaataatttcgttgggtttggtgataccattctaaaaagatttgtggtatccttgttggtaaaaagtaaaggagtgtgaggaaatgcctacagtaacggtgatacagccgacaataacagaagaacaaaatataaaaatccgt

SEQ ID NO: 18098 - DNA, 260 bp, Unknown; identical to SEQ ID NO: 13096
  Description of Unknown: LeftRegion for integrase B5099 sequence

SEQ ID NO: 18099 - DNA, 260 bp, Unknown
  Description of Unknown: LeftRegion for integrase B5100 sequence
cgcattaggactcgccgcagcactgatagtgttgctcatatgcggttggcttcacgcggtcaaaaacgtccgcagaagcatcaacattttctttcgcgacatgcgtaccctcgcacgcatgagccaggacgggacgatccgaattgatgatattaacaagattttacgttctataaacgaagaacaaatgaggtgatcccatgcaaaccgaatacgccctctatctccgcaaatcccgcgcggacctcgaagccgaggca

SEQ ID NO: 18100 - DNA, 260 bp, Unknown
  Description of Unknown: LeftRegion for integrase B5101 sequence
tcgcgaaaatggtcaacaaaaaacgccccgcccatgttactagcatgaacgaggcgatggctgaccgcgttaccagcacggcaggccgctgcaaaaacaaacacctacgatagcgcgttttttgcatacccattttaacagattcgaacatgggacgcaaggcacgcgcgtaaaatccgacacatgaatggaggaaaaccatgccttacgccatccatttaagaaaatcccgcgccgatctggaagctgaagctcgcggc

SEQ ID NO: 18101 - DNA, 260 bp, Unknown
  Description of Unknown: LeftRegion for integrase B5102 sequence
ccgcgttgccgtttcggccacagcaaccgaagaacagctcttgagcgtgttcgaggaagtagtcgcgggcgacggatacccgatgcacaccgtttggttctacagcaacgtcgataaggctcaaggtggcgaccaatacgacgttgccatggtcgaggaggaaagcgccggcggcgatcccgtcgtgacgatggcgtagcatggcgaagcgggcgaaacgttctgctccaaagaagggcgctcgtgccgcgatatacgcg

SEQ ID NO: 18102 - DNA, 260 bp, Unknown
  Description of Unknown: LeftRegion for integrase B5103 sequence
attatctattctgtttatctgattcaccttgcccgaaagtagagatttccctaacagaagaagagcaattactgcttgacgcatttcgttccgctaccccgcaaggcagattcaacattattaccacctgtatgtgtgagaagcgaaaaggggacaacgaaagtgtcggataattgatttcatagaatggaggaagaaccatgtatgaggatataaaaacagcctgcctatacgttagattctcaagccataaccagact

SEQ ID NO: 18103 - DNA, 260 bp, Unknown
  Description of Unknown: LeftRegion for integrase B5104 sequence
tatattagcattgtcagttggacacagaagagaaatatacgaattttgacaatccagaacgctcgtggtaagatatttttgacaaaagaaagagctgtggaacatacttcccacgcaaaaaaagaaaaccccgagctggcactcggggtttttcaagtttcaggtgcacaaaataaattaataaatgagaggtgagaggcatgagagctgtattatatgcacgctattcatcagataatcagcgctatgaatccatatcc

SEQ ID NO: 18104 - DNA, 260 bp, Unknown
  Description of Unknown: LeftRegion for integrase B5105 sequence
gaccgaggcctcataacgatcaccccgtccatgaaaatccatgtttcgccgtcaattctcaatgcccctcaggacgcctttacagcccgctggctgacttctctcgacgggaatgttttaccccccccccgatttccgccgcgtagagagctcctggagtaccataacgacgtaatttttaagagggaggcagaaagtacatgaatacagtaatctacgcacgctattctgccggcccgagacagaccgatcagagtatc

SEQ ID NO: 18105 - DNA, 260 bp, Unknown; identical to SEQ ID NO: 16402
  Description of Unknown: LeftRegion for integrase B5106 sequence

SEQ ID NO: 18106 - DNA, 260 bp, Unknown
  Description of Unknown: LeftRegion for integrase B5107 sequence
taaagaccgtatcaaagaggccacttaaagtgacgttatctgaagagtcggaaacgtcattggggatctcaaattttcacaacaaggaaggcaactaatctagccaacaatcgacactttaacaaacaaaaagggtttcgctctcatcttggcggatcggcgaaaccccggaaggaaccgaccttgggaggtcgatctatatgcatgataccatgcatgaattaaggtgctgcgcatacctgcgcaaatcgcgcgaagac

SEQ ID NO: 18107 - DNA, 260 bp, Unknown
  Description of Unknown: LeftRegion for integrase B5108 sequence
aataaagaccgtatcgaagagaccgcttaaggtgacgctgtccgaagagtcagaaacatcgttgggcatctcaaattttcacaacaaggaaagcagcatttagccagcaatcgacactttaacaagcaaaaagggtttcgctctcatcttggcggatcggcgaaaccccggaaggaaccgaccttgggaggtcgatctatatgcatgataccatgcttgatttaacgtgctgcgcatacctgcgcaaatcgcgcgaagac

SEQ ID NO: 18108 - DNA, 260 bp, Unknown
  Description of Unknown: LeftRegion for integrase B5109 sequence
ttatttccgttccgtcaatcccgatggtcaatctcgaatcctcgattatgcccagattatttcttccaacaaagaaatgcaaaaagaccacagcgcggcaatgtgattcgctttcctgagaaaaattaaggttgctcatatattcggaatccccgccatcccgtccacatccataaatccccttgatcggaggtatccccatgccctacgccatccacctgcgcaaatcccgcgccgatctggaagccgaagcccgcggc

SEQ ID NO: 18109 - DNA, 260 bp, Unknown
  Description of Unknown: LeftRegion for integrase B5110 sequence
tcgcgaaaatggtcaacaaaaaacgccccgcccatgttaccagcatgagcgaggcgatggccgaccgcgttaccagcacggcaggccgctgcaaaaacaaacacctacgatagcgcgttttttgcatacccattttaacagattcgaacatgggacgcaaggcacgcgcgtaaaatccgacacatgaatggaggaaaaccatgccttacgccatccatttaagaaaatcccgcgccgatctggaagccgaagcccgcggc

SEQ ID NO: 18110 - DNA, 260 bp, Unknown
  Description of Unknown: LeftRegion for integrase B5111 sequence
cttcttggcatggaacttatcacgaaagaagaatacaacaagatcgtggcgatcagcgaggatcattacggcacaaagattttttccgtttgatcaaaaaacttccgattttcgctggatgtttctgaactcttgtggtatctgtttgtgttgccgaaaggcaaaaccgcgggcaagcccgcagaaaggagtagagcgcaatgaacgtaattgagatcacagccgagaaagaaacggtgcaagaaacgatccggctggca

SEQ ID NO: 18111 - DNA, 260 bp, Unknown
  Description of Unknown: LeftRegion for integrase B5112 sequence
ttcttggcatggagctgatcaccgaagatgaatacaacaagatcgtagcaatcagcgaggatcattacggcgcaaagatttattgcgtctgatcaaaaaagcttccgattttcgctggatgtttccgaactcttgtggtatctgtttgtgttgccgaaaggcaaatcagcgggcattcccgcagaaaggagtaaagctcaatgaacgttatcgagataacagccgagaaaaaaccggcacaagataccatccggctggca

SEQ ID NO: 18112 - DNA, 260 bp, Unknown
  Description of Unknown: LeftRegion for integrase B5113 sequence
tcttggcatggagctgatcaccgaagatgaatacaacaagatcgtagcaatcagcgaggatcattacggcgcaaagatttattgcgtctgatcaaaaaaacttccgattttcgctggatgtttccgaactcttgtggtatctgtttgtgttgccgaaaggcaaatcagcgggcagcccccgcagaaaggagtaaagctcaatgaacgttattgagataacagccgagaaaaaaccggcacaagaaaccatccggctggca

SEQ ID NO: 18113 - DNA, 260 bp, Unknown
  Description of Unknown: LeftRegion for integrase B5114 sequence
tgatcgaggtcgcggtgattatgtatgacgccgacggaaaagtcctcggcgtgatgaagacatataccgatgagatcgtggcgggcgcgaaggggacgtttaagacgtcaaatatcggcgacgcgaacaaggtcgcacttgcggatatcgaccactatgatgttattgcgtatcccggcatgcagatgcagttttgagcaatgagcagagccgtaatatatgcccgtttttcatcgcacaatcagcgcgaggagtcgata

SEQ ID NO: 18114 - DNA, 260 bp, Unknown
  Description of Unknown: LeftRegion for integrase B5115 sequence
cagaccttatcgctttttatgagagcgaaaacgggcaaaaagaatttgagcaatggaaaatacaacttgacgataaagaagaaaaataactttaatggcacaagggcgaaagttctcccttgtgcctatatcgccgcacaatcggcttatttacaaagcaatgctataatcagtatatatcaaaaaaggaagtgtaatttatgaatgcggtaatatacgcaagatattcatcagataatcagcgtgaagaatctatcgaa

SEQ ID NO: 18115 - DNA, 260 bp, Unknown
  Description of Unknown: LeftRegion for integrase B5116 sequence
ctacgatgaggcaatatccaaagggtacatcccctgtaaacgttgcacaaaagacaaataaaaacaaaagccctcgccgaagcaagggcatgggctgcatgatacaacctcaaattgcaatgaaattgtatcatgccagccctgaaaaatcaagcttcagggtctttttgtacccaaaaatcaggaaagaaggaacagaaatggacaaatatgcaatgtatttgagaaaaagccgcgccgacatggaggcggagaagctg

SEQ ID NO: 18116 - DNA, 260 bp, Unknown
  Description of Unknown: LeftRegion for integrase B5117 sequence
gtcgaaggcgtcatgcgagatgctgccaacggagatagctttacaacggttcagatggacaacggcaaggttgttatcataagcgaagatgaatggaacatcttgcgcgaagggtttgcccatttggtaggcgggaaaattctgaaataacgtatttaagctactgtgtctgaaacgcgcagattggaaggagtgacgggatgcccaagaaggagactgccgtatcacagggcttggttgcggcgatatacgcccgttat

SEQ ID NO: 18117 - DNA, 260 bp, Unknown
  Description of Unknown: LeftRegion for integrase B5118 sequence
tggaagcccctggagtggtttttccgctggcttcttatgatctgtacttttggtatcttaggaagaaaaagaaataaaggaatacaaggaaaaaccatctccgcaagtaagagcatcaatcgtactatggctgtatgccagaactgcggacacacctggaaagcctgagtgtgtagccgtatgcagagaggaggcactgcatggcaaaagcaaaagcagctacaaatgatataagcaaactcgctgttatatatgccagg

SEQ ID NO: 18118 - DNA, 260 bp, Unknown
  Description of Unknown: LeftRegion for integrase B5119 sequence
tgagcatggttgtataaatagatatgaaatcgctgactatttgaatgttacagtagaatacctaaatgaagcaattaattattattcaagtaaatatggagtaatgcatagaatagatgattatataatttatttttcacccactctttacatcggaaaaacatttaattaaaagttcttatattgaggtgatatagaaaatggttgataatgatatatttgcaatatatctaagaaaatctagaaaagatctagaaaac

SEQ ID NO: 18119 - DNA, 260 bp, Unknown; identical to SEQ ID NO: 18116
  Description of Unknown: LeftRegion for integrase B5120 sequence

SEQ ID NO: 18120 - DNA, 260 bp, Unknown; identical to SEQ ID NO: 16547
  Description of Unknown: LeftRegion for integrase B5121 sequence

SEQ ID NO: 18121 - DNA, 260 bp, Unknown; identical to SEQ ID NO: 16123
  Description of Unknown: LeftRegion for integrase B5122 sequence

SEQ ID NO: 18122 - DNA, 260 bp, Unknown
  Description of Unknown: LeftRegion for integrase B5123 sequence
tgattgaggttgtggtgattatgtacgacgccgacggaaaagtcctcggcgtgatgacgacatataccgacgagatcgcagcgggagcgaagggaacgtttaagatgtcaaatatcggcgacgcgaacaaagtcgcgctcgcggacatcgaccactatgacgtgatggcatatcccggaatgcagatgcagttctgaggaatgagcagagcggttatatacgccaggttctcatcgcacaatcagcgcgaggagtcgata

SEQ ID NO: 18123 - DNA, 260 bp, Unknown
  Description of Unknown: LeftRegion for integrase B5124 sequence
tcatagttgcgctggtcggtatatgtatcttgtcctttggtctcgtgcatgtagaactaaagaattatcacaatgctgataatagatgcagtcagtattattccgttttgcgtgaaattgcgctaatcgcaaaaaagcaccctgtaacagcggaggaaatagataatattctgaaaaagcaccagtaagggagtgataccatgcaaatggaatacgccatgtacctccgcaaatcccgcgcggacctcgaagccgaggca

SEQ ID NO: 18124 - DNA, 260 bp, Unknown
  Description of Unknown: LeftRegion for integrase B5125 sequence
aatgcaatcaactttaaagaaaaagaaaaaatagataacaagtagttaattaaacaaattacatatttataaaaaaaagacctgtgctggaacacaaggtcgaaaatggaaaaaatttatcaccacgataataactctttcctatgtaattatatcataggaaatcatttttatcaataaaatttaaggagatgatacctatgaatgttaatgaaattataatgtatttaagaaaatcaagaaaggattatgaattttct

SEQ ID NO: 18125 - DNA, 260 bp, Unknown
  Description of Unknown: LeftRegion for integrase B5126 sequence
tggaagcccctggagtggtttttccgctggcttcttatgatctgtacttttggtatcttaggaagaaaaagaaataaaggaatacaaggaaaaaccatctccgcaagtaagagcatcaatcgtactatggctgtatgccagaattgcggacacacctggaaagcctgagtgtgtagccgtatgcagagaggaggcactgcatggcaaaagcaaaagcagctacaaatgatataagtaaactcgctgttatatatgccagg

SEQ ID NO: 18126 - DNA, 260 bp, Unknown
  Description of Unknown: LeftRegion for integrase B5127 sequence
tggaagcccctggagtggtttttccgctggcttcttatgatctgtacttttggtatcttaggaagaaaaagaaataaaggaatacaaggaagaaccatctccgcaagtaagagcatcaatcgtactatggctgtatgccaaaactgcggacacacctggaaggcctgagtgtgtagccgtatgcagagaggaggcactgcatggcaaaagcaaaagcagctacaaatgatataagcaaactcgctgttatatatgccagg

SEQ ID NO: 18127 - DNA, 260 bp, Unknown
  Description of Unknown: LeftRegion for integrase B5128 sequence
gtcgctgaacatcctgccggaacgctgtgcgctggtggaaagcgagccggaacgcacccaagggctgcggcagatgctggtggacaactactcggtgttctacatcgtgggcgagggtgccgtgtcggtggctcgtgtgctgtacagtgcatccgaccttgtgcgccgcctgcggagaatgaagtgaaaggggtgtttgcatgaccgccgtgatttacgcccgctattccagcgataaccagcgcgaggaatccatcgaa

SEQ ID NO: 18128 - DNA, 260 bp, Unknown
  Description of Unknown: LeftRegion for integrase B5129 sequence
gcgtcaacaggagcggtcaacacgccctctccgcacagcagagataggacggcttaactataacatctccggagatgctacagcattccaaccaaaaaatattgtatcatcttcggtcagctatcgcaatcagaacatctgtttttgatagctgttatttttatacctttttacatataattacataggagtgtgatgcaatgtcttattttatttatgctcgtaaatcaaggaaggatgctgatctcgaagcgttggga

SEQ ID NO: 18129 - DNA, 260 bp, Unknown
  Description of Unknown: LeftRegion for integrase B5130 sequence
cccggttgggtaatgtttaatttcaaaataaaaaccgcccctgcgccaacagagacggtctacatatccgaagatatgcaatctgaagccaagaatattgtatcatcttcggagcagtcgcgcaagcggaacgtaagttcgcacgttgactgttatttttgtacctttttttcaatacaattacataggagtgtgatacaatgtcttattttatctacgcacgaaagtcaagaaaagacgccgaactggaagcgctaggg

SEQ ID NO: 18130 - DNA, 260 bp, Unknown
  Description of Unknown: LeftRegion for integrase B5131 sequence
ggattgcaccgtttttatgttggaaaatggggcacaggattcttgtacctcatcacttttggattctttttcattggcgccattatagactttattcatattttgcggggcactttcaaggataaaaatgggatgccgctgattgaatggtagtatattttaacagaatcagcctattttgataaatagggggtgatattttgagttcggttgataaaatcgcggtggtctatgcccggtattcctcccacggccagact

SEQ ID NO: 18131 - DNA, 260 bp, Unknown
  Description of Unknown: LeftRegion for integrase B5132 sequence
cagaaaatcgccgtgcaataaaataaaaaaccgccccagtgctaccaacactgagacggtctacatatccgaagatatgcgattaaaatccaagaatattgtatcatcttcggaaacagcttgcaagcggaacatatgttttacgctggctgttatttttgtacccaaatttaaatacaattacataggagtgtgatacaatgtcttattttatctacgcacgaaagtcaagaaaagacgccgaactggaagcgctaggg

SEQ ID NO: 18132 - DNA, 260 bp, Unknown; identical to SEQ ID NO: 18128
  Description of Unknown: LeftRegion for integrase B5133 sequence

SEQ ID NO: 18133 - DNA, 260 bp, Unknown
  Description of Unknown: LeftRegion for integrase B5134 sequence
aaaatgctgaagaaatagaggcttatgaagaaaaaatcattaaacttttagcagaaatattgatggaaatacaagaataaataaaaaacttggaatttgtacttgacaaatccaatagttttgcgatatactccataatgtaacaacgtagggtctatagaaagtatcagatgtacacacacaaaaaaggagcgtgtattatgatagaaaactatttagacaaaattaagcaaaggttgaatgttgtagttcttcacgct

SEQ ID NO: 18134 - DNA, 260 bp, Unknown
  Description of Unknown: LeftRegion for integrase B5135 sequence
caaagcagcataggcgtaaaaaaataccgccccagtgctaccaacactgagacggtctacacatccgaagatatgcacatattttgaccaagaatattgtatcatcttcggaacagctatacaatccagaacattcgttcttgtgttggctgttatttttgtaccttttttttaatacaattatataggagtgtgatacaatgtcttattttatctatgccagaaaatccagaaaagacgctgaactggaagcactcggt

SEQ ID NO: 18135 - DNA, 260 bp, Unknown
  Description of Unknown: LeftRegion for integrase B5136 sequence
aacgaagacaataatttttcataataaaaccgccccagtgctaccaacactgagacggtaatacatatccgaagatatgcgattaaaatccatgaatattgtatcatcttcggaaacagcttgcaagcggaacatatgttttgcgctggctgttatttttgtacccaaatttaaatacaataacataggagtgtgatacaatgtcttattttatctacgccagaaaatccagaaaagacgccgaactggaagcgctaggg

SEQ ID NO: 18136 - DNA, 260 bp, Unknown
  Description of Unknown: LeftRegion for integrase B5137 sequence
tctattcggaagcggcttaatgcacaaaccgcaaggctcctcagcagacactttccgaacaagtcccatgcgtcaacggaatagcagacggcgcattggcggacttctgctacaataataatatatgctatttgtttctttgtcaacactataatttataaacatagtgtaaaatcgcactctaatatcgaggtgatcccatgtcaaccaactatgccctgtacctccgcaaatcccgcgcggacctcgaagccgaggcg

SEQ ID NO: 18137 - DNA, 260 bp, Unknown
  Description of Unknown: LeftRegion for integrase B5138 sequence
ccataggaattgacggcaggcagcttatcgattgggaaaagcacactaatgtttacaatcaccttgaatcactcacaccagctgaagcagaaatactatctaaataccgcaatctcaatattgaaggtcagaaacgaattactgagtacgcagacgaccttgttgcaggtggaaggttcgcaaaatagtaaggaggcattatggaaaaaagagctgtaatatatgctcgctactcatgcgacaaacagtctgaacaatcc

SEQ ID NO: 18138 - DNA, 260 bp, Unknown
  Description of Unknown: LeftRegion for integrase B5139 sequence
ggtgtcttttgctatatacacaaataaaccgccccagtgctaccaacactgagacggtctacatatccgaagatatgctattgaaatccacgaatattgtatcatcttcggaaacagcttgcaatccagaacattcgttcatgtgctggctgttatttttgtacccaaatttaaatacaataacataggagtgtgatacaatgtcttattttatctacgccagaaaatccagaaaagacgccgaactggaagcgctaggg

SEQ ID NO: 18139 - DNA, 260 bp, Unknown
  Description of Unknown: LeftRegion for integrase B5140 sequence
ataattcaagttctaatttcacaataaaaaccgcccctgcgccaacagagacggtctacatatccgaagatatgctcttaaattaactcgggaatattgtatcatcttcggagcagtcacgcaatccagaacattcgttcatgtgctggctgttatttttgtacccaaatttaaatacaataacataggagtgtgatacaatgtcttattttatctacgccagaaaatccagaaaagacgccgaactggaagcgctaggg

SEQ ID NO: 18140 - DNA, 260 bp, Unknown
  Description of Unknown: LeftRegion for integrase B5141 sequence
ctgtagcgattgcggatttagctttgactttacaacgcaaaaagatatcgatgacaagtgtaaatcattgttaaatggcggaataggctctattgtagttgcggtcattttggggattgctatgtttgttataaatggatatctgcattgaaaacgaataaaagtgttatgtgttgattaaaaggttagggggtgatagtttgagttcagttgataaaatcgccgtcgtttacgcgcggtattcgtcccacggtcagacc

SEQ ID NO: 18141 - DNA, 260 bp, Unknown; identical to SEQ ID NO: 18133
  Description of Unknown: LeftRegion for integrase B5142 sequence

SEQ ID NO: 18142 - DNA, 260 bp, Unknown
  Description of Unknown: LeftRegion for integrase B5143 sequence
actctctcgattctttaggacaataaaataaaaaaccgcccctgcgccaacagagacggtatacatatccgaagatatgctattgaaatccacgaatattgtatcatcttcggaaacagcttgcaagcggaacatatgttttgcgctggctgttatttttatactcaaatttaaatacaattacataggagtgtgatacaatgtcttattttatctatgccagaaaatcaagaaaagacgctgaactggaagcacttggg

SEQ ID NO: 18143 - DNA, 260 bp, Unknown
  Description of Unknown: LeftRegion for integrase B5144 sequence
tacattatagcaaatgtaccataaatgtcaagaaccgcccctgcgccaacaggaacggctctggaatatatccgaagatatacacctaatcaacgaaaatattgtatcatcttcggtcagctatcgcaatcagaacatttgtttttgatagctgttatttttatacctttttacatataattacataggagtgtgatgcaatgtcttattttatttatgctcgtaaatcaaggaaggatgctgatctcgaagcgttggga

SEQ ID NO: 18144 - DNA, 260 bp, Unknown
  Description of Unknown: LeftRegion for integrase B5145 sequence
gccgctttgcaggccgtgtcaagtcgctggctgctgtcctgccctactgtgacgaagcgacctttttcgataatgataacggctttgtcgctgttgccgagtaccgcaacggcgtgatcgtctgctacgaggacgcgccgcgctgggtaatgtcccttgccgacgccatcaatcagccgtaacccaaaggagtgaccgctatgcccaccgactacgccctgtacctccgcaaatctcgtgccgacctcgaagccgaggcg

SEQ ID NO: 18145 - DNA, 260 bp, Unknown
  Description of Unknown: LeftRegion for integrase B5146 sequence
tcttgtaaaccatcactcataattcatccctcattttaacagcatgtactaattcctttttaggtaattatatcatctaaaatattttttaacaataataactagatcttacaattgtacaacaaaaaaatattttatataataagactgtatgaaatattttttataatgattaaatactttagaaaggagtcaccctattgctcaaaatagccatatacagccgtaaatcagtagaaacagacacaggagaaagcata

SEQ ID NO: 18146 - DNA, 260 bp, Unknown
  Description of Unknown: LeftRegion for integrase B5147 sequence
aagctcgtaaccggcagaacaaaaagcccgacctgggaaaaggctgtccatattgccgagaatcttggcatgactccgtcagaattcagagcagttgagattgaatatgacagtcaagagtccgaaagaaaagctcgctgagtggtcaagactccgcgagctttagtccaattccaaacggcagaacggacaatcacattatggcagaaaaagcggtaatttacgcgagatttagctcagacaagcagcgcgaggaatcg

SEQ ID NO: 18147 - DNA, 260 bp, Unknown
  Description of Unknown: LeftRegion for integrase B5148 sequence
cgggttcactccaagaaatttacatataataattgcttcatccatagataataacggtctacatatccgaagatatgctattgaaatccacgaatattgtatcatcttcggaaacagcttgcaatccagaacattcgttcatgtgctggctgttatttttgtacccaaatttaaatacaataacataggagtgtgatacaatgtcttattttatctacgccagaaaatccagaaaagacgccgaactggaagcgctaggg

SEQ ID NO: 18148 - DNA, 260 bp, Unknown
  Description of Unknown: LeftRegion for integrase B5149 sequence
gatggacgaggtgtttgatgcgaggatccgccgcattgaggaaagatactcgcgtatgctcaaaatgcaaaacaggtggcttcggtttacggttatcttgtgtctttgccttaccgtgtttatcatcgtcatgctgttgtatgatgttacgcatccgggcatcggatggatgcgagatcatcttaattagggagaaaaaaatggatacgcttgcagatgttgtcgtttatgccagatatagctccgccgggcagaacgat

SEQ ID NO: 18149 - DNA, 260 bp, Unknown
  Description of Unknown: LeftRegion for integrase B5150 sequence
aactctctcgattctttaggacaataaaacaaaaaccgcccctgcgccaacagagacggtctacatatccgaagatatgctattgaaatccatgaatattgtatcatcttcggaaacagcttgcaagtggaacatttgttttgcgctggctgttatttttgtacccaaatttaaatacaataacataggagtgtgatacaatgtcttattttatctacgccagaaaatccagaaaagacgccgaactggaagcgctaggg

SEQ ID NO: 18150 - DNA, 260 bp, Unknown
  Description of Unknown: LeftRegion for integrase B5151 sequence
gtataaaataatatataaatatatataaatataaggggcatcttgaacttgaaccgaaacgccgaaaaagcccgaaattgcgtcattttcaccggttcaagatgatttttcatcttgaaccatcttgaaccgctttcacgcatttgcgtgcttttttccactttgtatttctgaattattaacagaagggagtttttcgtatgaaacgagccgttttttacggcagatactcaagcgaccggcaaaccgaacaatcgatc

SEQ ID NO: 18151 - DNA, 260 bp, Unknown
  Description of Unknown: LeftRegion for integrase B5152 sequence
atgaggcagatagccagtaaataaaaaaagcgccgaccctctggaaagggtcagcgctggggccagtgctacaacataaaaagctgaggcggctacttcctgctggaacaggggctgcgccacaaagcacaggcagttgacatggaaaccaactgcctttattgtagcacgtcgccctgaatttgaaaaggggtgattttatgcgcgatatggattccgcccgcctgtgggtggtgtgctatgtccgcgtcagcacgaga

SEQ ID NO: 18152 - DNA, 260 bp, Unknown; identical to SEQ ID NO: 18128
  Description of Unknown: LeftRegion for integrase B5153 sequence

SEQ ID NO: 18153 - DNA, 260 bp, Unknown
  Description of Unknown: LeftRegion for integrase B5154 sequence
taccattatcgagaaaaggcgcaaggccatgtccaccacggcgctttttgaaacggaagacggcaataggatactgctggaaatacccagagcggcggcggagtatatgaccgttggcgacgttgggatgctggattattacaaaaaaatattcagatcgtttgtcaggttgagggattaagggcgtgaaggagcctgccatgcaaaagagaagaacgaaatacgcaaacagccaaggggataacgccgtcatatacgca

SEQ ID NO: 18154 - DNA, 260 bp, Unknown; identical to SEQ ID NO: 18128
  Description of Unknown: LeftRegion for integrase B5155 sequence

SEQ ID NO: 18155 - DNA, 260 bp, Unknown
  Description of Unknown: LeftRegion for integrase B5156 sequence
acgagccatttgtatatataggtgatgagctgtccgaagtacgcgtactgggcagggcgattgccttccaaagcttgataagataacttcgcccataagggcgtgaattgaaattcccactgcgagatggctgtttgatggtcgcccctcgcgcaggggcgtgaattgaaatgcaacaatcaaagttacaaacggagcggatgaaaataaaaacaccagaatacagggatggcgtaatatacgccaggtacagccccggt

SEQ ID NO: 18156 - DNA, 260 bp, Unknown
  Description of Unknown: LeftRegion for integrase B5157 sequence
caaagcagcataggcgtaaaaaaataccgccccagtgctaccaacactgagacggtctacacatccgaagatatgcacatattttgaccaagaatattgtatcatcttcggaacagctatacaatccagaacattcgttcttgtgttggctgttatttttgtacctttttttaaatacaattatataggagtgtgatacaatgtcttattttatctatgccagaaaatccagaaaagacgccgaactggaagcgctgggg

SEQ ID NO: 18157 - DNA, 260 bp, Unknown; identical to SEQ ID NO: 18128
  Description of Unknown: LeftRegion for integrase B5158 sequence

SEQ ID NO: 18158 - DNA, 260 bp, Unknown
  Description of Unknown: LeftRegion for integrase B5159 sequence
taatggataatggaattataacaccagaagaatttgaagcaaaaaagaaacagcttcttaacttatagaaaaaatataattaaaaaataaaagcccctgtgctaccaacacaagagcttttaatgcgacttacaccatgcagtacccagatgatataatcgccctgaacaagctatattatatcacctttaacactgcttatgcaagtagtgttatttttgtaccccaaaatcgcatatattgatagaaaggatgacaat

SEQ ID NO: 18159 - DNA, 260 bp, Unknown
  Description of Unknown: LeftRegion for integrase B5160 sequence
tctctcgattctttaggacaataaaataccgccccagtgctaccaacactgagacggtctacatatctgaagatatgcaatctgaagccaagaatattgtatcatcttcggaaacagcttgcaatccagaacattcgttcatgtgctggctgttatttttgtacccaaatttaaatacaataacataggagtgtgatacaatgtcttattttatctacgccagaaaatccagaaaagacgccgaactggaagcgctaggg

SEQ ID NO: 18160 - DNA, 260 bp, Unknown
  Description of Unknown: LeftRegion for integrase B5161 sequence
agaaatacggggtcttttacgttatataaagaaaaccgctcctgcgccaacaggaacggttcaagtaacattccgaagaatgataccccaattcaaaaatattgtatcatcttcggtcagctatcgcaatcagaacatttgtttttgatagctgttatttttatacttttttacatataattacataggagtgtgatgcaatgtcttattttatttatgctcgtaaatcaagaaaggacgccgatcttgaagcgttgggg

SEQ ID NO: 18161 - DNA, 260 bp, Unknown; identical to SEQ ID NO: 16395
  Description of Unknown: LeftRegion for integrase B5162 sequence

SEQ ID NO: 18162 - DNA, 260 bp, Unknown; identical to SEQ ID NO: 18128
  Description of Unknown: LeftRegion for integrase B5163 sequence

SEQ ID NO: 18163 - DNA, 260 bp, Unknown
  Description of Unknown: LeftRegion for integrase B5164 sequence
cattcatccgattatacacagagagttgatagcatttactctagtgaggatttaaatatggaaaatcctattggtcaaggttttgctacgaatgatgacgaagataatctcctatttgtctatgatcaatacaaaagctacacctacacatacggctttgactccgaaatacaattcaatattattcaggaggtatccaaatgattcctgctgttggctactgccgtttctcttctgagaaccaagcggatggattttct

SEQ ID NO: 18164 - DNA, 260 bp, Unknown
  Description of Unknown: LeftRegion for integrase B5165 sequence
gatataatatctgctatattatcaggagctaataatatctatgatctagctgaaaaattaaatgttacagaagattttttgattaaatctattaaacattataaaaataaatatggagtttattatgttggtaaaacacatttgctaacatttgattcactaaatgttataggcttttaaaatattgaggtgataaaattatggatactgatatttttgcaatatatcttagaaaatctagaaaagacttagaaaacaag

SEQ ID NO: 18165 - DNA, 260 bp, Unknown
  Description of Unknown: LeftRegion for integrase B5166 sequence
aggagtatcggcagtcgatttcaggcggcgcgaactatgaggacgtgaccgagtcggacgacgatgaggaagaggacgactcgaccgtcgcgtaaccatcatgcccgacgtccgcaaaatggtcacctacttagaaattctctaataactgaaaaagtggtcgttgcaaaaaatgcaaccaccacagaaaggagtcccacatgccaaaagccgtgatctacgcccgcttctcctcccacaaccagcgcgaggagtcgatc

SEQ ID NO: 18166 - DNA, 260 bp, Unknown
  Description of Unknown: LeftRegion for integrase B5167 sequence
gattcacttttgatttcaccacgcaaaaagacctcgacaacgagtataaaaagctcaataacggggagattggttctgtagtagcgacagttatattcggtgccttatttattgcagttttaggtttcctaaaatagtaatcgtttttcagctattaaacgcaaatttaggctcattttcgttagataggaggtgatactttgagttcagttgataaaatcgccgttgtttacgcacggtattcttcccacggtcagacc

SEQ ID NO: 18167 - DNA, 260 bp, Unknown
  Description of Unknown: LeftRegion for integrase B5168 sequence
tacaatgtttacaggataatgggtgatgtcattttgtgcacaaatttcgtttgctttctgagcgatttttgcttttgtcagcataatgatacctcccctctgttataagaatatacgctaaatttacacctgtcaactatctgttccaaaataatttctgaaacttttggaaccattctttttgaaaggagctgacccccatgcccaccgactacgccctgtacctccgcaaatcccgcgccgacctcgaagccgaggcc

SEQ ID NO: 18168 - DNA, 260 bp, Unknown
  Description of Unknown: LeftRegion for integrase B5169 sequence
caaagcagcataggcgtaaaaaaataccgccccagtgctaccaacactgagacggtctacacatccgaagatatgcacatattttgaccaagaatattgtatcatcttcggaacagctatacaatccagaacattcgttcttgtgttggctgttatttttgtacctttttttaaatacaattatataggagtgtgatacaatgtcttattttatctatgccagaaaatccagaaaagacgctgaactggaagcactcggt

SEQ ID NO: 18169 - DNA, 260 bp, Unknown; identical to SEQ ID NO: 18128
  Description of Unknown: LeftRegion for integrase B5170 sequence

SEQ ID NO: 18170 - DNA, 260 bp, Unknown; identical to SEQ ID NO: 15742
  Description of Unknown: LeftRegion for integrase B5171 sequence

SEQ ID NO: 18171 - DNA, 260 bp, Unknown
  Description of Unknown: LeftRegion for integrase B5172 sequence
aatgaaacgaagacaataatttttcgtaataaaaaccgcccctgcgccaacagagacggtctgcatacccgaagatatgcgattgaaatccaagaatattgtatcatcttcggaaacagcttgcaagcggaacgtttgttttgcgctggctgttatttttatactcaaatttaaatacaattacataggagtgtgatacaatgtcttattttatctatgctagaaaatccagaaaagatgccgaactggaagcactaggg

SEQ ID NO: 18172 - DNA, 260 bp, Unknown
  Description of Unknown: LeftRegion for integrase B5173 sequence
ttcatgcacaaatccttttataaaataaattaatatttttataactaaaaaatatattaatatataaatataaaaatatatagtatataggaaatgaacgtgaacaccacgaacaaatataaaaaacgctcattttatcagtgtttttcgtgttcacgctatgttcaaggtgttcgcataggcaaaagggagcgaagaaaatgaacatcacagatgaatacgcaatttatttgcgaaaatcccgtgcggatttggaagcc

SEQ ID NO: 18173 - DNA, 260 bp, Unknown
  Description of Unknown: LeftRegion for integrase B5174 sequence
gatataatatctgctatattatcaggtgctaataacatctatgatctagctgaaaaattaaatgttacggaagactttttaattaaatctattaagcattataaaaataaatatggagtttattatgttggtaaaacacatttacttacatttgattcactaaatgttataggcttttaaaatattgaggtgataaaattatggatactgatatttttgcaatatatcttagaaaatctaggaaagacttagaaaacaag

SEQ ID NO: 18174 - DNA, 260 bp, Unknown
  Description of Unknown: LeftRegion for integrase B5175 sequence
gccaacgggtccatcgccgtggtggagaccgaggactaccgcgcggtcatgcgccgctggtacaagggcagcaccaagctgatgctgtcggcggatagcttcgaggactacgaggacatgattttcggcatggacgacggccccgtgcgcgtgatcggcacggtggtgtggttccaggccgccgacgagatggagtagccgtgggcgggcgcgcggcgatatacgcccgcttctcgagccacaaccagcgcggcgagtcc

SEQ ID NO: 18175 - DNA, 260 bp, Unknown
  Description of Unknown: LeftRegion for integrase B5176 sequence
ctgtagcgattgcgggtttagctttgactttacaacgcaaaaagatatcgatgacaagtgtaaatcattgttaaatggcggaataggctctattgtagttgcggttattttggggattgctatgtttgctataaatggatatctgcattgaaagcgaataaaagtgttatgtgttgattaaaaggttagggggtgacagtttgagttcagttgacaaaatcgccgttgtttacgcgcggtattcgtcccacggtcagacc

SEQ ID NO: 18176 - DNA, 260 bp, Unknown
  Description of Unknown: LeftRegion for integrase B5177 sequence
cgcgtactgcgagaattgcggatacagctttgactttaccacgcaggatgacctcaatgcccaatataataaactgaacacaaacgagggatgcgccattttggtggctgtcattctcggcgttattcttataacaatttggttttacagccattaaacgcaaatttgaggccgttttcgttaaataagggggtgatagtttgagttcagttgataaaatcgccgtcgtttacgcgcggtattcgtcccacggtcagacc

SEQ ID NO: 18177 - DNA, 260 bp, Unknown
  Description of Unknown: LeftRegion for integrase B5178 sequence
taccattatcgagaaaaggcgcaaggccatgtccaccacggcgctttttgaaacggaagacggcaataggatactgctggaaataccaagagcggcggcggagtatatgaccgttggcgacgttgggatgctggattattacaaaaaaatattcagatcgtttgtcaggttgagggattaagggcgtgaaggagcctgccatgcaaaagagaagaacgaaatacgcaagcagccaaggggataacgccgtcatatacgca

SEQ ID NO: 18178 - DNA, 260 bp, Unknown; identical to SEQ ID NO: 16395
  Description of Unknown: LeftRegion for integrase B5179 sequence

SEQ ID NO: 18179 - DNA, 260 bp, Unknown
  Description of Unknown: LeftRegion for integrase B5180 sequence
gcgtggtctttggtggtaaaaacaaaagagcgctgaccctctggaaagggtcagcgctggggccagtgctacaacacaaaaaagtgaggtggccgcttcctgctggaacagggggctgcgccacaaagcacaggcagttggcatggaaccgactgcctttattgtagcacgtcgccctgaatttgaaaaggggtgattttatgcgcgatatggattccgcccgcctgcgggtggcgtgctatgtccgcgtcagcacgaga

SEQ ID NO: 18180 - DNA, 260 bp, Unknown
  Description of Unknown: LeftRegion for integrase B5181 sequence
aactcggttatcgcggcgacgcgtttgctgcggaggacgtctccatcagcgacgacctcggccccgatgaccgcatcggctggccgaatacgcactatgtctgcatccgccgtatgggcgacgacgactttgtggcaaggttcggatcgccgcaggccatcggtttctgcgcgttttttgagggaaaggaggaataacccatgatctgcgccatgtacctgcgcaagtcccgcgcggactacgaggccgaagcccgcggc

SEQ ID NO: 18181 - DNA, 260 bp, Unknown
  Description of Unknown: LeftRegion for integrase B5182 sequence
cagtacgacaaactgaacgcaaacgagggatgctccattctggtggctgtcgttctcggcattatcctcgcagtgatttggtttttcggtcattaaatgcaaattttgatgatttttgtatctgatttggctttttaagcacaaaatcaaagccttaattgcaaatccgatgccgttttcgttaaatagggggtgacagtttgagttcagttgataaaatcgccgtcgtttacgcgcggtattcgtcccacggtcagacc

SEQ ID NO: 18182 - DNA, 260 bp, Unknown; identical to SEQ ID NO: 15742
  Description of Unknown: LeftRegion for integrase B5183 sequence

SEQ ID NO: 18183 - DNA, 260 bp, Unknown
  Description of Unknown: LeftRegion for integrase B5184 sequence
cgcgtactgcgagaattgcggatacagctttgactttaccacgcaggatgacctcaatgcccaatataataaactgaacacaaacgagggatgcgccattttggtgacggtcattctcggcgttattcttataacaatttggttttacagccattaaacgcaaatttgaggccgttttcgttaaataagggggtgatagtttgagttcagttgataaaatcgccgtcgtttacgcgcggtattcgtcccacggtcagacc

SEQ ID NO: 18184 - DNA, 260 bp, Unknown
  Description of Unknown: LeftRegion for integrase B5185 sequence
ccgcgaaggaattgattttatactcgacccgatgggaaatcacatccatagcgatctaaacgagcacatagacggcattcagcagcttttgaaatttaatccggacagaattaaggacgaaaacagaacacgacggtcaagaagagagagccatgattgacccgtttcagtagcgggttttgtaaaaggaggaataacccatgatctgcgccatgtacctgcgcaagtcccgcgcggactacgaggccgaagcccgcggc

SEQ ID NO: 18185 - DNA, 260 bp, Unknown
  Description of Unknown: LeftRegion for integrase B5186 sequence
agaaaaaattatccgaaaaataataaaaccgccccagtgctaccaacaccgagacggtatacatatccgaagatatgctattgaaatccacgaatattgtatcatcttcggagcagctacacaatccagaacatttgttcatgtgctggctgttatttttgtgcccaaatttaaatacaattacataggagtgtgatacaatgtcttattttatctatgccagaaaatccagaaaagacgccgaactggaagcactgggg

SEQ ID NO: 18186 - DNA, 260 bp, Unknown
  Description of Unknown: LeftRegion for integrase B5187 sequence
aggtatcagctggtggaaagataacaatgacttaataagtagagttgcaagatttataattgcttatctaaatgagggttataattgtgatgatattattaatgctagaaatgttttagctaataaattaaatcgtaaagaaagagatagaatatattattctatacctgttatttgattaatatagaaaggatatttctatgaacgctgtaatatatgctaggttctctagccataaccaacaggaacagagcattgaa

SEQ ID NO: 18187 - DNA, 260 bp, Unknown; identical to SEQ ID NO: 16395
  Description of Unknown: LeftRegion for integrase B5188 sequence

SEQ ID NO: 18188 - DNA, 260 bp, Unknown
  Description of Unknown: LeftRegion for integrase B5189 sequence
agcagattgatttgtgctgctaatctgtaatttaacttaataacgcaaaaaccgccccggtattggcgtaccgaagcggatcagcgaatctatacaggtctgaggaccagtataatccatcattgaacaagatgattataccacaatcctccagcacctgtacaggtgtattttttatactcatttttaaggaggtacctatgaaaatcgaaaattatgcattatatctgcgaaaaagccgtgcggacatggaagcggaa

SEQ ID NO: 18189 - DNA, 260 bp, Unknown; identical to SEQ ID NO: 18128
  Description of Unknown: LeftRegion for integrase B5190 sequence

SEQ ID NO: 18190 - DNA, 260 bp, Unknown; identical to SEQ ID NO: 18175
  Description of Unknown: LeftRegion for integrase B5191 sequence

SEQ ID NO: 18191 - DNA, 260 bp, Unknown
  Description of Unknown: LeftRegion for integrase B5192 sequence
tgcggcatttgccatccaccacaataaaataaaaaccgcccctgcgccaacagagacggtctacatacccgaagatatgcgattaaaatccaagaatattgtatcatcttcggaaacagcttgcaagcggaacatatgttttgcgctggctgttatttttgtacccaaatttaaatacaataacataggagtgtgatacaatgtcttattttatctacgccagaaaatccagaaaagacgccgaactggaagcgctaggg

SEQ ID NO: 18192 - DNA, 260 bp, Unknown; identical to SEQ ID NO: 17943
  Description of Unknown: LeftRegion for integrase B5193 sequence

SEQ ID NO: 18193 - DNA, 260 bp, Unknown
  Description of Unknown: LeftRegion for integrase B5194 sequence
aaaaaccgctcctgcgccaacaggaacggtcttgcaatatctccgaagagatacattggtagacaaaaacatctactaaaaccatatctttcaaaatatattgtatcatcttcggtcagctatcgcaatcagaacatttgtttcttgatagctgttatttttatacctttttacatataattacataggagtgtgatgcaatgtcttattttatttatgctcgtaaatcgagaaaggatgccgatcttgaagcattggga

SEQ ID NO: 18194 - DNA, 260 bp, Unknown
  Description of Unknown: LeftRegion for integrase B5195 sequence
aattcgttgaattctttagggcaataaaataaaaaccgcccctgcgccaacagagacggtctacatatccgaagatatgcaatctgaagccaagaatattgtatcatcttcggaaacagcttgcaagcggaacgtttgttttgcgctggctgttatttttgtacccaaatttaaatacaataacataggagtgtgatacaatgtcttattttatctacgccagaaaatccagaaaagacgccgaactggaagcgctaggg

SEQ ID NO: 18195 - DNA, 260 bp, Unknown
  Description of Unknown: LeftRegion for integrase B5196 sequence
gtgtcttttgctatatacacaaataaaccgccccagtgctaccaacactgagacggtctacatatccgaagatatgccatatcttaccagtgaatattgtatcatcttcggaacagctacacaatccagaacattcgttcatgtgctggctgttatttttgtacccaaatttaaatacaataacataggagtgtgatacaatgtcttattttatctacgcacgaaagtcaagaaaagacgccgaactggaagcgctaggg

SEQ ID NO: 18196 - DNA, 260 bp, Unknown
  Description of Unknown: LeftRegion for integrase B5197 sequence
gatatggaggcagttgtataactaaccttgtaatttaattaaataacaaaaccgccccggtattggcgtaccgaagcggatcagcgaatctatacaggtctgaggaccagtataatccatccttgaacaagatgattataccacaatcctccagcacctgtacaggtgtattttttatactcatttttaaggaggtacctatgaaaatcgaaaattatgcattatatctgcgaaaaagccgtgcggacatggaagcagaa

SEQ ID NO: 18197 - DNA, 260 bp, Unknown; identical to SEQ ID NO: 18138
  Description of Unknown: LeftRegion for integrase B5198 sequence

SEQ ID NO: 18198 - DNA, 260 bp, Unknown
  Description of Unknown: LeftRegion for integrase B5199 sequence
cagtacgacaaactgaacgcaaacgaggggtgctccattctggtggctgtcgttctcggcgttatcctcgcagtgatttggtttttcggtcattaaatgcaaattttgatgatttttgtatctgatttggctttttaagcgcaaaatcaaagccttaattgcaaatttgaggctattttcgttaaatagggggtgatagtttgagttcagttgaaacaaccgccgttgtttacgcacggtattcatcccacggccagacc

SEQ ID NO: 18199 - DNA, 260 bp, Unknown
  Description of Unknown: LeftRegion for integrase B5200 sequence
gaagcgaaaacaataatttttcagaacacaaaaaccgcccctgcgccaacagagacggtctacatatccgaagatatgctattgaaatccacgaatattgtatcatcttcggagcagtcacgcaagcggaacatttgttcatgtgctggctgttatttttgtacccaaatttaaatacaattacataggagtgtgatacaatgtcttattttatctacgcacgaaagtcaagaaaagacgccgaactggaagcgctaggg

SEQ ID NO: 18200 - DNA, 260 bp, Unknown
  Description of Unknown: LeftRegion for integrase B5201 sequence
ggtaatttcaacaaatcttctaataaaacaatatcttgtaatgtatgctcagtatctgccatattttctcctttattaatatgctctatatcatattaattctaatttgtcaataatatatttgtataatttattataaactatttcctctatttagtaaacaataatatttataccttaaatacgaaaggatttttattatgcttaagacagttatatatgctcgttattctagtgacaaacaaaatgaacaatctatt

SEQ ID NO: 18201 - DNA, 260 bp, Unknown
  Description of Unknown: LeftRegion for integrase B5202 sequence
attatttattctgtttatctgattcaccatacccaaaagtagagatttccctaacagaagaagagcaattactgcttgacgcattccgttccgctaccccacaaggtagattcaacattattactacctgtatgtgtgagaagcgaaaaggggacaacgaaagtgccgggtgattgattttgtagagtggaggaagaaccatgtatgaggatataaaaacagcctgcctatacgttagattctcaagccataaccagact

SEQ ID NO: 18202 - DNA, 260 bp, Unknown
  Description of Unknown: LeftRegion for integrase B5203 sequence
gacatggaggcagttgtataactaaccttgtaatttaattaaatagcaaaaccgccccggtattggcgtaccgaagcggatcagcgaatctatacaggtctgaggaccagtataatccatccttgaacaagatgattataccacaatcctccagcacctgtacaggtgtattttttatactcatttttaaggaggtacctatgaaaatcgaaaattatgcattatatctgcgaaaaagccgtgcggacatggaagcagaa

SEQ ID NO: 18203 - DNA, 260 bp, Unknown
  Description of Unknown: LeftRegion for integrase B5204 sequence
actctctcgattctttaggacaataaaataaaaaaccgcccctgcgccaacagagacggtatacatatccgaagatatgctattgaaatccacgaatattgtatcatcttcggaaacagcttgcaagcggaacatatgttttgcgctggctgttatttttatactcaaatttaaatacaattacataggagtgtgatacaatgtcttattttatctatgctagaaaatccagaaaagacgccgaactggaagcactgggg

SEQ ID NO: 18204 - DNA, 260 bp, Unknown
  Description of Unknown: LeftRegion for integrase B5205 sequence
ctgtagcgattgcggatttagctttgactttacaacgcaaaaagatatcgatgacaagtgtaaatcattgttaaatggcggaataggctctattgtagttgcggttattttggggattgctatgtttgctataaatggatatctgcattgaaaacgaataaaagtgttatgtgttgattaaaaggttagggggtgacagtttgagttcagttgacaaaatcgccgttgtttacgcgcggtattcgtcccacggtcagacc

SEQ ID NO: 18205 - DNA, 260 bp, Unknown
  Description of Unknown: LeftRegion for integrase B5206 sequence
catactgcgaggattgcggatacagctttgactttaccacacaggatgacctcaatgcccaatataataaactgaacacaaacgagggatgcgccattttggtggcgatcattctcggcgttattcttataacaatttggttttacagccattaaatgcaaatttgaggccgttttcgttaaataagggggggtgacagtttgagttcagttgacaaaatcgccgttgtttacgcacggtattcttcccacgggcagacc

SEQ ID NO: 18206 - DNA, 260 bp, Unknown
  Description of Unknown: LeftRegion for integrase B5207 sequence
aagaaatagcacatgcggcaataaagcaagagaaaagccattacgacgatgggtttttctatcaagtaacagtagtgttgaaatagaagaagtccctccaccctgccgcctcgcaagcaagacagggtggaggggaccaaggggatgcggggccgtagccgaccgcgcccattccgaccgcgaagggcggtaatgacattatgccacgtaagcctaagaaaaccgaaacccgaaaaggcgtcatctacgcccgcttcagc

SEQ ID NO: 18207 - DNA, 260 bp, Unknown
  Description of Unknown: LeftRegion for integrase B5208 sequence
cagtacgacaaactgaacgcaaacgaggggtgctccattctggtggctgtcgttctcggcgttatcctcgcagtgatttggtttttcggtcattaaatgcaaattttgatgatttttgtatctgatttggctttttaagcgcaaaatcaaagccttaattgcaaatttgaggctattttcgttaaataaggggtgatagtttgagttcagttgaaacaaccgccgttgtttacgcacggtattcatcccacggccagacc

SEQ ID NO: 18208 - DNA, 260 bp, Unknown
  Description of Unknown: LeftRegion for integrase B5209 sequence
aacaaagcagcataggcgtaaaaaaataccgccccagtgctaccaacactgagacggtctacatatccgaagatatgctattgaaatccaagagtattgtatcatcttcggagcagtcacgcaatccagaacattagttcatgtgctggctgttatttttgtacccaaatttaaatacaataacataggagtgtgatacaatgtcttattttatctacgccagaaagtcaagaaaagacgccgaactggaagcgctaggg

SEQ ID NO: 18209 - DNA, 260 bp, Unknown
  Description of Unknown: LeftRegion for integrase B5210 sequence
gcttctaaacaagccgattgatttgtaatttaactgaataacgtaaaaaaccgccccggtgctggtaacaccgaagcggatctgtgaatctatacaggtctgaggaccagtataatccatccttgaacaagatgattataccacaatcctccagcacctgtacaggtgtattttttatactcatttttaaggaggtacctatgaaaatcgaaaattatgcattatatctgcgaaaaagccgtgcggacatggaagcagaa

SEQ ID NO: 18210 - DNA, 260 bp, Unknown
  Description of Unknown: LeftRegion for integrase B5211 sequence
acttactgggtcttagtgaagtcagaaaaccagaagtcttagttttgtcagaaaaagagaaaatcctcattgacgcataccgtactgctaatgacatgggacaattaaacataatctatgtctgcatggatgaaatgaaaaaagcaaaaggggaaggcgtacttgtagggtaattgatttcatagaatggaggaagaaccatgtatgaggatataaaaacagcctgcctatatgttagattctcaagccataaccagact

SEQ ID NO: 18211 - DNA, 260 bp, Unknown; identical to SEQ ID NO: 18193
  Description of Unknown: LeftRegion for integrase B5212 sequence

SEQ ID NO: 18212 - DNA, 260 bp, Unknown; identical to SEQ ID NO: 18128
  Description of Unknown: LeftRegion for integrase B5213 sequence

SEQ ID NO: 18213 - DNA, 260 bp, Unknown
  Description of Unknown: LeftRegion for integrase B5214 sequence
cagtacgacaaactgaacgcaaacgagggatgctccattctggtggctgtcgttctcggcgttatcctcgcagtgatttggtttttcggtcattaaatgcaaattttgatgatttttgtatctgatttggctttttaagcacaaaatcaaagccttaattgcaaatttgaggctattttcgttaaatagggggtgatagtttgagtacagttgaaacaaccgccgttgtttacgcacggtattcatcccacggccagacc

SEQ ID NO: 18214 - DNA, 260 bp, Unknown
  Description of Unknown: LeftRegion for integrase B5215 sequence
gatataatatctgctatattatcaggagctaataatatctatgatctagctgaaaaattaaatgttacagaagattttttgatcaaatctattaaacattataaaaataaatatggagtttattatgttggtaaaacacatttgctaacatttgattcactaaatgttataggcttttaaaatattgaggtgataaaattatggatactgatatttttgcaatatatcttagaaaatctaggaaagacttagaaaacaag

SEQ ID NO: 18215 - DNA, 260 bp, Unknown; identical to SEQ ID NO: 18137
  Description of Unknown: LeftRegion for integrase B5216 sequence

SEQ ID NO: 18216 - DNA, 260 bp, Unknown
  Description of Unknown: LeftRegion for integrase B5217 sequence
tttaattataaccgaacttatcgatatattttaatactatttatgaaagattgctatcagcttaatatattctaactagtattttttcataaatgtattaatagattttttataatcgcatacctttaattaataaactctatacaaaattaatataatttaatatcttaattaaaataaatttataaaggtgaatgactatgataaaaacctgtatttacttaagaaaatcacgttctgatgaagaatgtgaaaaacaa

SEQ ID NO: 18217 - DNA, 260 bp, Unknown
  Description of Unknown: LeftRegion for integrase B5218 sequence
gaattctttagagcgataaaataaaaaccgccccggtgctaccaacaccgagacggtaatacatatccgaagatatgcaatctgaagccaagaatattgtatcatcttcggaaacagcttgcaatccagaacattcgttcatgcgctggctgttatttttgtacccaaatttaaatacaataacataggagtgtgatacaatgtcttattttatctacgccagaaaatccagaaaagacgccgaactggaagcgctaggg

SEQ ID NO: 18218 - DNA, 260 bp, Unknown
  Description of Unknown: LeftRegion for integrase B5219 sequence
aacagcaagatttaactattcaataaaaataaaaaccgcccctgcgccaacagagacggtatacatatccgaagatatgctattgaaatccaagaatattgtatcatcttcggagcagctacgcaagcggaacatttgttttgcgctggctgttatttttgtacccaaatttaaatacaattacataggagtgtgatacaatgtcttattttatctacgcacgaaagtcaagaaaagacgccgaactggaagcgctaggg

SEQ ID NO: 18219 - DNA, 260 bp, Unknown
  Description of Unknown: LeftRegion for integrase B5220 sequence
tatttaagaataaaattgaataataaaaaaaccgcccctgcgccaacaggaacggctttgaatatatccgaagatataccataaataaaacaaatatattgtatcatcttcgggcaactatcgcaatcagaacattcgtttcttgatagctgttatttttgtactctttttttcatacatttttaaaggagtgtgatacaatgtcttattttatttatgcacgaaaatcaagaaaagatgcagaactggaagcattgggg

SEQ ID NO: 18220 - DNA, 260 bp, Unknown
  Description of Unknown: LeftRegion for integrase B5221 sequence
tgcggcatttgccatccaccacaataaaataaaaaccgcccctgcgccaacagagacggtctacatacccgaagatatgcgattaaaatccaagaatattgtatcatcttcggaaacagcttgcaagcggaacatatgttttgcgctggctgttatttttgtacccaaatttaaatacaattacataggagtgtgatacaatgtcttattttatctacgcacgaaagtcaagaaaagacgccgaactggaagcgctaggg

SEQ ID NO: 18221 - DNA, 260 bp, Unknown
  Description of Unknown: LeftRegion for integrase B5222 sequence
attaaattctttaggagaataaaataaaaaccgccccagtgctaccaacacagagacggtctacatacccgaagatatgcgattaaaatccaagaatattgtatcatcttcggaaacagcttgcaagcggaacatatgttttgcgctggctgttatttttgtacccaaatttaaatacaataacataggagtgtgatacaatgtcttattttatctacgccagaaaatccagaaaagacgccgaactggaagcgctaggg

SEQ ID NO: 18222 - DNA, 260 bp, Unknown
  Description of Unknown: LeftRegion for integrase B5223 sequence
aaattctttaggagaataaaataaaaaccgccccggtgctaccaacaccgagacggtaatacatatccgaagatatgcaatctgaagccaagaatattgtatcatcttcgggacagctacacaatccagaacatttgttcatgtgctggctgttatttttgtacccaaatttaaatacaataacataggagtgtgatacaatgtcttattttatctacgccagaaaatccagaaaagacgccgaactggaagcgctaggg

SEQ ID NO: 18223 - DNA, 260 bp, Unknown
  Description of Unknown: LeftRegion for integrase B5224 sequence
taagaaatgcacaaagtagttattcattaaaaaccgcccctgcgccaacagagacggtctacatatccgaagatatgctattgaaatccacgaatattgtatcatcttcggaaacagcttgcaatccagaacattcgttcatgtgctggctgttatttttgtacccaaatttaaatacaataacataggagtgtgatacaatgtcttattttatctacgccagaaaatccagaaaagacgccgaactggaagcgctaggg

SEQ ID NO: 18224 - DNA, 260 bp, Unknown
  Description of Unknown: LeftRegion for integrase B5225 sequence
gaggatgaattcgtggagactctccccggattgcgtgcgttaattaagaaatgtaaataaaaaaatcgcccagtgctgcgaacaccaggcgacctgttcttccttgcggaagctgtaaactctacgaataaattttacagcgtttccgataaatccgcaagggtttattttttatactcttttttttgggaggtgggacgatgaggttcttttcctacggacgaaaatccgtattttctgataaatcagattcaatcgat

SEQ ID NO: 18225 - DNA, 260 bp, Unknown
  Description of Unknown: LeftRegion for integrase B5226 sequence
atcccgcatcctgttgcagcaggatgcgggacgcgccggcggtattaccagtaccgtatcagcaatttgtaaataaccaagtagaggactgatttaaagccaattaatttaggcttgtttaaaatcaattaaatttggctgatttacggtattattatatcatgaatcagcctgttcgcctacgaaaggactgattttttatgtcatcaactactactgccaaagccgtcatttatgcccgcttcagcagtgataagcaa

SEQ ID NO: 18226 - DNA, 260 bp, Unknown
  Description of Unknown: LeftRegion for integrase B5227 sequence
agaaatacgaggtcttttacgttatataaagaaaaccgctcctgcgccaacaggaacggttcaagtaacattccgaagaatgataccccaattcaaaaatattgtatcatcttcggtcagctatcgcaatcagaacatttgtttttgatagctgttatttttatacttttttacatataattacataggagtgtgatgcaatgtcttattttatttatgctcgtaaatcaagaaaggacgccgatcttgaagcgttgggg

SEQ ID NO: 18227 - DNA, 260 bp, Unknown; identical to SEQ ID NO: 16395
  Description of Unknown: LeftRegion for integrase B5228 sequence

SEQ ID NO: 18228 - DNA, 260 bp, Unknown
  Description of Unknown: LeftRegion for integrase B5229 sequence
aaattctttaggagaataaaataaaaaccgccccggtgctaccaacaccgagacggtaatacatatccgaagatatgcaatctgaagccaagaatattgtatcatcttcgggacagctacacaatccagaacatttgttcatgtgctggctgttatttttgtacccaaatttaaatacaattacataggagtgtgatacaatgtcttattttatctacgccagaaaatccagaaaagacgccgaactggaagcgctaggg

SEQ ID NO: 18229 - DNA, 256 bp, Unknown
  Description of Unknown: LeftRegion for integrase B5230 sequence
gccccttgcccgggcggtgggcgtgccggtggtcacagacgcgctgacccgtgcccgctccactcggcggaaattgcgtcattttcaccggttcaagatgacttttcatcttgaaccatcttgaaccgctttcacgcatttgcgtgcttttttccactttgtatttccgaattgttaacagaagggagtttttcgtatgaaacgagccgttttttacggcagatactcgagtgaccggcaaacggagcaatcaatc

SEQ ID NO: 18230 - DNA, 241 bp, Unknown
  Description of Unknown: LeftRegion for integrase B5231 sequence
tatatataaatataaggggcatcttgaacttgaaccgaaacgccgaaaaagcccgaaattgcgtcattttcaccggttcaagatgacttttcatcttgaaccatcttgaaccgtttttacgcatttgcgtgcttttttccactttgtatttctgaattattaacagaagggagtttttcgtatgaaacgtgctgttttttacggcagatactcgagcgaccggcaaaccgagcaatcgatc

SEQ ID NO: 18231 - DNA, 260 bp, Unknown
  Description of Unknown: LeftRegion for integrase B5232 sequence
aatttaaaacaaatgtaataacaaagcttagtgaattaaaagaagttgaagaagtaactaaagttaattgctatgatatagcaaaattaaaagctataaaataaatataaaggtgttcgttatcgtatttatatactattttactaaagagttatgatattcatagctctttaataatatttaaatgaggtgtttaaattatggatacagatatttttgcaatatatcttagaaaatcaagaaaagatttagaaaatcag

SEQ ID NO: 18232 - DNA, 260 bp, Unknown; identical to SEQ ID NO: 18143
  Description of Unknown: LeftRegion for integrase B5233 sequence

SEQ ID NO: 18233 - DNA, 260 bp, Unknown
  Description of Unknown: LeftRegion for integrase B5234 sequence
gatataatatctgctatattatcaggagctaataatatctatgatctagctgaaaaattaaatgttacagaagattttttgattaaatctattaaacattataaaaataaatatggagtttattatgttggtaaaacacatttgctaacatttgattcactaaatgttataggcttttaaaatattgaggtgataaaattatggatactgatatttttgcaatatatcttagaaaatctaggaaagacttagaaaacaag

SEQ ID NO: 18234 - DNA, 260 bp, Unknown
  Description of Unknown: LeftRegion for integrase B5235 sequence
atgaccgccagcttgttgccggacgggaatccgggaaggattgaaagcgagtacgcgcttttcgaaaacggtgccgcgttcggccactattggaaagtgacttcaaaggtcgttaacggagaactcgtcgtctcccgaatcagcgaaatgagtccgacaggcgatactccgccaactctttacacattaggcaggtagccatgggcggacgtgcggcgatatatgcccgcttctccagccacaaccagcgtagcgagtcc

SEQ ID NO: 18235 - DNA, 260 bp, Unknown; identical to SEQ ID NO: 15742
  Description of Unknown: LeftRegion for integrase B5236 sequence

SEQ ID NO: 18236 - DNA, 260 bp, Unknown; identical to SEQ ID NO: 13096
  Description of Unknown: LeftRegion for integrase B5237 sequence

SEQ ID NO: 18237 - DNA, 260 bp, Unknown; identical to SEQ ID NO: 16611
  Description of Unknown: LeftRegion for integrase B5238 sequence

SEQ ID NO: 18238 - DNA, 260 bp, Unknown; identical to SEQ ID NO: 17524
  Description of Unknown: LeftRegion for integrase B5239 sequence

SEQ ID NO: 18239 - DNA, 260 bp, Unknown
  Description of Unknown: LeftRegion for integrase B5240 sequence
ttgggctggcactgtagaaatacccgaatcaggagattctttcacatggaattccaaaaatgataaagaaaaaacttctacagctatacttgcttcatctgatgatacaaaagcctttgcttttgatgggaaacaaatcagctttgatgtcagcgcgatggggcagactactactgtaaagatggaaaagcagggctaaaatgaatgccgtcctctacctccgctatagcagcgataagcaaaacgagcaatctatagag

SEQ ID NO: 18240 - DNA, 260 bp, Unknown
  Description of Unknown: LeftRegion for integrase B5241 sequence
ataaaaaccgctcctgcgccaacaggaacggtcgagcgatgaaacatacgccaatatgtttctcattaagttctccgaagagatacccaaatgcaaataatattgtatcatctccggagcagccacgcaagagaacaaaagttctcaggctgttatttttgtaccctttttttcataaaatacaaaggagctgatacattatgtatgtaatttatttaagaaaatccagaaaagattccgacctcgaagcactcggaatt

SEQ ID NO: 18241 - DNA, 260 bp, Unknown
  Description of Unknown: LeftRegion for integrase B5242 sequence
aaaaaccgctcctgcgccaacaggaacggtcgagcgatgaaacatacgccaatatgtttctctattaagtactccgaagagatacccaatttccaaataatattgtatcatctccggagcagccacgcaagagaacaaaagttctcaggctgttatttttgtaccctttttttcataaaatacaaaggagctgatacattatgtatgtaatttatttaagaaaatccagaaaagattccgacctcgaagcactcggaatt

SEQ ID NO: 18242 - DNA, 260 bp, Unknown
  Description of Unknown: LeftRegion for integrase B5243 sequence
aattaaaaccgcccctactccaatagggacggtcgagcgatgaaacatacgccaatatgtttctcattaagttctccgaagagatacccaaatgcaataatattgtatcatctccggagcagccacgcaagagaacaaaagttctcaggctgttatttttgtaccctttttttcataaaatacaaaggagctgatacattatgtatgtaatttatttaagaaaatccagaaaagattccgaccttgaagcactcggaatt

SEQ ID NO: 18243 - DNA, 260 bp, Unknown
  Description of Unknown: LeftRegion for integrase B5244 sequence
cctttctttataaccattaacttttctaatggttaccattagaatttatcatggttttttgtcacctgtgtactggtaatttattctaggttaaaaaattcctaatctagaatagaattcacaatttgttaacataaaacttgtaagaatatagtataatgtaaagcgttatcatttttggcatgaaggagagtgatcaaatggataaatatgccatatacttaagaaaaagtagagctgatctagaggctgagaaatta

SEQ ID NO: 18244 - DNA, 260 bp, Unknown; identical to SEQ ID NO: 13096
  Description of Unknown: LeftRegion for integrase B5245 sequence

SEQ ID NO: 18245 - DNA, 260 bp, Unknown
  Description of Unknown: LeftRegion for integrase B5246 sequence
atgactataatatattataattatatataaagaaataggtcatcttgaacttgaaccgaaaagcgaaaaacgcccgaaactacgtgctttttagcggttcaagatgctttttcatcttgaacccatcttgaaccgtttaccgaaattacgtgttttttcacgcattgtgtttctattgtgttaacaggaggacgaaaaccatgaaacgtgcagtgttctacgggcgctattccagcgaccgccagacagaacaatcaatc

SEQ ID NO: 18246 - DNA, 260 bp, Unknown
  Description of Unknown: LeftRegion for integrase B5247 sequence
gcactgagttccggctgcaaacggttttcgcgggagctttccatagcaggtcctcctttccgggcggccgctttcacagcccgccagcgtgtggtttgcttttcatgctcattatatcgcagtccgttccgttttgcctagacccaacgtttcgacaaatttcgacaatcggctgcgccgacagaaagggggcgatccgcatggcacggaaaaagaagtaccatctgcgcgaggtgcacagcgtctgtatctacgcccgc

SEQ ID NO: 18247 - DNA, 260 bp, Unknown
  Description of Unknown: LeftRegion for integrase B5248 sequence
aattaaaaccgctcctgcgccaacaggaacggtcgagcgatgaaacatacgccaatatgtttctcattaagttctccgaagagatacccaaatgcaataatattgtatcatctccggagcagccacgcaagagaacaaaagttctcaggctgttatttttgtaccctttttttcataaaatacaaaggagctgatacattatgtatgtaatttatttaagaaaatccagaaaagattccgaccttgaagcactcggaatt

SEQ ID NO: 18248 - DNA, 260 bp, Unknown
  Description of Unknown: LeftRegion for integrase B5249 sequence
aattaaaaccgctcctgcgccaacaggaacggtcgagcgatgaaacatacgccaatatgtttctcattaagttctccgaagagatacccaaatgcaataatattgtatcatctccggagcagccacgcaagagaacaaaagttctcaggctgttatttttgtaccctttttttcataaaatacaaaggagctgatacattatgtatgtaatttatttaagaaaatccagaaaagattccgacctcgaagcactcggaatt

SEQ ID NO: 18249 - DNA, 260 bp, Unknown; identical to SEQ ID NO: 18241
  Description of Unknown: LeftRegion for integrase B5250 sequence

SEQ ID NO: 18250 - DNA, 260 bp, Unknown
  Description of Unknown: LeftRegion for integrase B5251 sequence
agagtagcaaacagaaaaaagctgaacagttgattttatccggtcaagatttgcaaattataccggaagacgttttctatgaattagtattggaaaatgtttcagagcattaatataaaccgaagtcagaaaacccaacgtcagaaaacccgatattggggaatctaacatcggttgattttacaaaaggagtgataacaatgccatttgatgattacaaggagagcgttgcgatatatttgcgtaaatcacgaatggat

SEQ ID NO: 18251 - DNA, 260 bp, Unknown
  Description of Unknown: LeftRegion for integrase B5252 sequence
taaaaaccgttcctgcgccaacaggaacggtcgagcgatgaaacatacgccaatatgtttctcattaagttctccgaagagatactcaaactgcaaataatattgtatcatctccggagcagccacgcaagagaacaaaagttctcgggctgttatttttgtacccttttttacataaaatacaaaggagctgatacattatgtatgtaatttatttaagaaaatccagaaaagattccgaccttgaagcactcggaatt

SEQ ID NO: 18252 - DNA, 260 bp, Unknown
  Description of Unknown: LeftRegion for integrase B5253 sequence
gcttcgcaatttggaaaacatctgcaagctaaaatccaagagcaagtgaacagcgaaagcaattcttctcttttacttgaacagatgaacgaattgtttaacaatgtttccaaattgtccgaaactgaacaaaaggctttttataccggacttgtaaaagggatagagcgttgggaaaatgaacagaggggggaataataatgccggaagcattaaacgcggtcatatacgcccgctattcctccgatcgtcagacagaa

SEQ ID NO: 18253 - DNA, 260 bp, Unknown
  Description of Unknown: LeftRegion for integrase B5254 sequence
taatgcgaaccacttacatcaaccagcctccagccatcatcaaggagaatcttttccagctctcggaacttcttcggcatttgttcgccctccttgcctctttattttactacgtattttacgtgttgtcaacatcgaatcgtattatttcatgaaaaaccgttatatgttctctcatgaaggaaatcggaggtgctcccatgtcctacgccatccacctgcgcaagtcccgcgccgatctggaagccgaagcccgcggc

SEQ ID NO: 18254 - DNA, 260 bp, Unknown
  Description of Unknown: LeftRegion for integrase B5255 sequence
acgtgtcaactgcattgtggtgcagtcaacgacacagcttgcccgccgtacagcagacctgctgacaatcctgcaagaattgcagagccttggtataacaactgattttgaaaaagagcgtttctccaccaattctcctacagggaaaaagatgttggacacacttcgcgcaatgagtgcaagcatttaggagaactctcatgccacaagtccaagttatccagccaatccagcaacaaccgaagcgtctgcgcgtggcg

SEQ ID NO: 18255 - DNA, 260 bp, Unknown
  Description of Unknown: LeftRegion for integrase B5256 sequence
taaaaccgctcctgcgccaacaggaacggtcgagcgatgaaacatacgccaatatgtttctctattaagtactccgaagagatacccaatttccaaataatattgtatcatctccggagcagccacgcaagagaacaaaagttctcaggctgttatttttgtaccctttttttcataaaatacaaaggagctgatacattatgtatgtaatttatttaagaaaatccagaaaagattccgaccttgaagcactcggaatt

SEQ ID NO: 18256 - DNA, 260 bp, Unknown
  Description of Unknown: LeftRegion for integrase B5257 sequence
atctgttaggtctgagtgacagcaaaaccccacaaggggataatctcacggaagaagaacgccttttgctggaagcctaccgttcagccagcacccagggacgcttccacatcattcaggtttgcatgaatgaaaaaacagccgcacccaaaggggaggtagttgccgggtgattgacttagcggaatggaggaagaaccatgtatgaggatataaaaacagcctgcctttacgtcagattttccagccataatcagacg

SEQ ID NO: 18257 - DNA, 260 bp, Unknown; identical to SEQ ID NO: 18240
  Description of Unknown: LeftRegion for integrase B5258 sequence

SEQ ID NO: 18258 - DNA, 260 bp, Unknown
  Description of Unknown: LeftRegion for integrase B5259 sequence
atcaaaactgaacaccatcagagagataagtgatgtaacccaactggaatacgctataaaacgtatcatctgactgaaaagtcagcttttattaaggttggtaagaataagatattttacatcgtaaaattctggaaaatttcatcagaaattaaaagttaatggtcttatagagtgtgtacattgaaaatgaggtatatatgaaaaaggccattgcttacatgcgtttctcgtcagtaaatcaggacaagggggattca

SEQ ID NO: 18259 - DNA, 260 bp, Unknown; identical to SEQ ID NO: 18085
  Description of Unknown: LeftRegion for integrase B5260 sequence

SEQ ID NO: 18260 - DNA, 260 bp, Unknown; identical to SEQ ID NO: 17281
  Description of Unknown: LeftRegion for integrase B5261 sequence

SEQ ID NO: 18261 - DNA, 260 bp, Unknown; identical to SEQ ID NO: 18241
  Description of Unknown: LeftRegion for integrase B5262 sequence

SEQ ID NO: 18262 - DNA, 260 bp, Unknown
  Description of Unknown: LeftRegion for integrase B5263 sequence
gcgcaaatcctcgataatatattgacagagcaagcggaaaacgatacttctattgatcccgaacgtgcggaaagtttaagaaatgaactacgtgggataatgtccggttataactctcttaccgacgaagggaaagaatttgtaaaacagtccttaaaaactgcgcttgccgcttattctaaaggcgtggaggaacagtaatgccggaagcattaaacgcggtcatatacgcccgctattcctccgatcgtcagacagaa

SEQ ID NO: 18263 - DNA, 109 bp, Unknown
  Description of Unknown: LeftRegion for integrase B5264 sequence
atactggacacacttcgcgcaatgagtgcaagcatttaggagaactctcatgccacaagtccaagttatccagccaatccagcaacaaccgaagcgtctgcgcgtggcg

SEQ ID NO: 18264 - DNA, 260 bp, Unknown
  Description of Unknown: LeftRegion for integrase B5265 sequence
aagatttgctctgttttgcaaatcaaagaatttgacgttggaattgttaaaagcaaagttgaaaacattctggtttcgccgaatcgtctgacttttcttttcaaagataatacagagaaaaccatttcttgggagaaccattccagaagcgaaagctggacaccggaaatgcgacaggctgccgcagaaaggagcagaaaatgccaaaagtaaccgtcattccgccgagtatcaatcgggcaactcgacaggatatttca

SEQ ID NO: 18265 - DNA, 260 bp, Unknown; identical to SEQ ID NO: 17493
  Description of Unknown: LeftRegion for integrase B5266 sequence

SEQ ID NO: 18266 - DNA, 260 bp, Unknown
  Description of Unknown: LeftRegion for integrase B5267 sequence
atgactataatatattataattatatataaagaaataggttatcttgaacttgaaccgaaaagcgaaaaacgcccgaaactacgtgctttttagcggttcaagatgctttttcatcttgaacccatcttgaaccgtttaccgaaattgcgtgctttttcacgcattgtgtttctattgtgttaacaggaggacaaaaaccatgaaacgtgcagtgttctacggacgctattccagcgaccgccagacagaacaatcaatc

SEQ ID NO: 18267 - DNA, 260 bp, Unknown
  Description of Unknown: LeftRegion for integrase B5268 sequence
atgactataatatattataattatatataaagaaataggtcatcttgaacttgaaccgaaaagcgaaaaacgcccgaaattacgtgctttttagcggttcaagatgctttttcatcttgaacccatcttgaaccgtttaccgaaattgcgtgctttttcacgcattgtgtttctattgtattaacaggaggacaaaaaccatgaaacgtgcagtgttctacgggcgctattccagcgaccgccagacagaacaatcaatc

SEQ ID NO: 18268 - DNA, 260 bp, Unknown; identical to SEQ ID NO: 17260
  Description of Unknown: LeftRegion for integrase B5269 sequence

SEQ ID NO: 18269 - DNA, 260 bp, Unknown; identical to SEQ ID NO: 18250
  Description of Unknown: LeftRegion for integrase B5270 sequence

SEQ ID NO: 18270 - DNA, 260 bp, Unknown
  Description of Unknown: LeftRegion for integrase B5271 sequence
gccaacgggtccatcgccgtggtggagaccgaggactaccgcgcggtcatgcgccgctggtacaagggaagcaccaagctgatgctgtcggcggacagcttcgaggactacgaggacatgattttcggcatggacgacggacccgtgcgcgtgatcggcacggtggtgtggtttcaggccgccgacgagatggagtagccgtgggcgggcgcgcggcgatatacgcccgcttctcgagccacaaccagcgcggcgagtcc

SEQ ID NO: 18271 - DNA, 260 bp, Unknown
  Description of Unknown: LeftRegion for integrase B5272 sequence
gaagataattcattaaaagaaatcaaaaacggagttacaattgaagttgccagaatttttgtattattcgacgattctgacgtaactgttgaaatttctccccttgtttcctttgataaatccgataaaattgaaacggtatactctgtaaaataaagttttccctcttcggaggggatttttctatttacttaaagattatgaatgcagttttatacctccgctatagcagcgataagcaaaatgagcaatctatagag

SEQ ID NO: 18272 - DNA, 260 bp, Unknown; identical to SEQ ID NO: 15606
  Description of Unknown: LeftRegion for integrase B5273 sequence

SEQ ID NO: 18273 - DNA, 260 bp, Unknown
  Description of Unknown: LeftRegion for integrase B5274 sequence
ggacggcagcttaaaacattcctttgaagtaaaaaatagagtaactgctatgatcggaaaatggactgcataccaagccgaaaaacgcctgccgctgctggaactctgtcaagacttgtccgaagatgaattaaccgaagttataaactatatcaaatacgttcaatcaaagcgcgattgaacaggaagggggaataataatgccggaagcattaaacgcggtcatatacgcccgctattcctccgatcgtcagacagaa

SEQ ID NO: 18274 - DNA, 260 bp, Unknown; identical to SEQ ID NO: 17493
  Description of Unknown: LeftRegion for integrase B5275 sequence

SEQ ID NO: 18275 - DNA, 260 bp, Unknown
  Description of Unknown: LeftRegion for integrase B5276 sequence
gcttcgcaatttggaaagcatctgcaagctaaaatccaagagcaagtgaacagcgaaagcaattcttctcttttacttgaacagatgaacgaattgtttaacaatgtttctaaattgtccgaagctgaacaaaaggctttttataccggacttgtgcaagggataaagcgtttggaagatgggcagaagggggaataataatgccggaagcattaaacgcggtcatatacgcccgctattcctccgatcgtcagacagaa

SEQ ID NO: 18276 - DNA, 260 bp, Unknown
  Description of Unknown: LeftRegion for integrase B5277 sequence
attatctattctgtttatctgattcaccatacccgaaagtagagatttccctaacagaagaagagcaattactgcttgacgcattccgttccgctaccccacaaggtagattcaacattattactacctgtatgtgtgagaagcgaaaaggggacaacgaaagtgccgggtgattgattttgtagagtggaggaagaaccatgtatgaggatataaaaacagcctgcctatatgtcagattctcaagccataaccagact

SEQ ID NO: 18277 - DNA, 260 bp, Unknown; identical to SEQ ID NO: 15597
  Description of Unknown: LeftRegion for integrase B5278 sequence

SEQ ID NO: 18278 - DNA, 260 bp, Unknown
  Description of Unknown: LeftRegion for integrase B5279 sequence
gttggcatattatagtctgttcctttcctccggaagcgatgaaacatactccaatatgtttctgttaagttctccgaagagataccttaactccaaacaacattgtatcatcttcggacagccatcgcaagagaacaaaagttctcaggctgttatttttgtaccctttttttcataaaatacaaaggagttgatacattatgtatgtaatttatttaagaaaatccagaaaagattccgacctcgaagcactcggaatt

SEQ ID NO: 18279 - DNA, 260 bp, Unknown
  Description of Unknown: LeftRegion for integrase B5280 sequence
taagaaccgctcctgcgccaacaggaacggtcataggacgaaacatacgccaatatgtttctctcagtactccgaagagatacatcatttttccaatcaatattgtatcatctccggagcagccacgcaagagaacaaaagttctcaggctgttatttttgtaccctttttttcataaaatacaaaggagctgatacattatgtatgtaatttatttaagaaaatccagaaaagattccgaccttgaagcactcggaatt

SEQ ID NO: 18280 - DNA, 260 bp, Unknown
  Description of Unknown: LeftRegion for integrase B5281 sequence
tatgactataatatattataattatatataaagaaataggtcatcttgaacttgaaccgaaaagctaaaaacgcccgaaattacgtgctttttagcggttcaagatgagttttcatcttgaaccatcttgaaccgtttaccgaaattgcgtactttttcacgcattgtgtttctattatgttaacaggaggacgaaaaccatgaaacgtgcagtgttctacgggcgctattccagcgaccgccagacagaacaatcaatc

SEQ ID NO: 18281 - DNA, 260 bp, Unknown
  Description of Unknown: LeftRegion for integrase B5282 sequence
ctttcttaatagccattaactttttctaatagttaccattagaatttatcatgtttttttgtcacctgcgtactggtaatttattctaggttaaaaaattcctaatctagaatagaattcacaatttgttaacataaaacttgtcagaatatagtataatgtaaagcgttatcatttttggcatgaaggagagtgagcaaatggataaatatgccatatacttaagaaaaagtagagctgatctagaggctgagaaatta

SEQ ID NO: 18282 - DNA, 260 bp, Unknown; identical to SEQ ID NO: 17281
  Description of Unknown: LeftRegion for integrase B5283 sequence

SEQ ID NO: 18283 - DNA, 260 bp, Unknown
  Description of Unknown: LeftRegion for integrase B5284 sequence
gcgcattgaggagcgcttccgcgccgcgctggacagcagggacaagcaattcgccgccgagcgcgccgtatacgcccgctggctccgtgtgctggccatcgcctgcgccgcgctggtgctgtttgttatgtccctgctcgtcatcgatatcatcaaccccaacgcgggctgggtccgcacaccctgaagggagggatcacatggcatactgcatctacctgcgcaagtcgcgcgccgacatggaggctgaggcgcgcggc

SEQ ID NO: 18284 - DNA, 260 bp, Unknown
  Description of Unknown: LeftRegion for integrase B5285 sequence
acgtgtcaactgcattgtggtgcagtcaacgacacatcttgcctgccgtacagcagacctgctgacaatcctgcaagaattgcagagccttggtataacaactgattttgaaaaagagcgcttctccaccaattctcctacagggaaaaagatactggacacacttcgcgcaatgagtgcaagcatttaggagaactctcatgccacaagtccaagttatccagccaatccagcaacaaccgaagcgtctgcgcgtggcg

SEQ ID NO: 18285 - DNA, 260 bp, Unknown
  Description of Unknown: LeftRegion for integrase B5286 sequence
tcctttcttaatagccattaactttctaatagttaccattagaatttatcattgttttttgtcacctgtgtactggtaatttattctaggttaaaaaattcctaatctagaatagaattcacaatttgttaacataaaacttgtcagaatatagtataatgtaaagcgttatcatttttggcatgaaggagagtgagcaaatggataaatatgccatatacttaagaaaaagtagagctgatctagaggctgagaaatta

SEQ ID NO: 18286 - DNA, 260 bp, Unknown
  Description of Unknown: LeftRegion for integrase B5287 sequence
ggatatacacaagttacggaaaaattctataccacaaaatcagggaaactgtttgtgcgtctcagaaatagcaatgatgttgaatcgattctcgacactttgaataaagctaataatattgttttcgctgtttctttcgcgctgaccattatttcaattatagcaagtataatttattcttttatgcattgaggggttttatgaaagcagtcatctacgcccggtactcgccgggccccaaccagaaggataagagcgtt

SEQ ID NO: 18287 - DNA, 260 bp, Unknown
  Description of Unknown: LeftRegion for integrase B5288 sequence
taaaaaccgttcctgcgccaacaggaacggtcgagcgatgaaacatacgtcaatatgtttctcattaagttctccgaagagatactcaaactgcaaataatattgtatcatcttcggacagccatcgcaagagaacaaaagttctcaggctgttatttttgtaccctttttttcataaaatacaaaggagctgatacatcatgtatgtaatttatttaagaaaatccagaaaagattccgacctcgaagcactcggaatt

SEQ ID NO: 18288 - DNA, 260 bp, Unknown; identical to SEQ ID NO: 15606
  Description of Unknown: LeftRegion for integrase B5289 sequence

SEQ ID NO: 18289 - DNA, 260 bp, Unknown; identical to SEQ ID NO: 18085
  Description of Unknown: LeftRegion for integrase B5290 sequence

SEQ ID NO: 18290 - DNA, 260 bp, Unknown
  Description of Unknown: LeftRegion for integrase B5291 sequence
tcctttcttaataaccattaactttctaatagttaccattagaatttatcattgttttttgtcacctgtgtactggtaatttattctaggttaaaaaattcctaatctagaatagaattcacaatttgttaacataaaacttgtaagaatatagtataatgtaaagcgttatcatttttggcatgaaggagagtgatcaaatggataaatatgccatatacttaagaaaaagtagagctgatctagaggctgagaaatta

SEQ ID NO: 18291 - DNA, 260 bp, Unknown
  Description of Unknown: LeftRegion for integrase B5292 sequence
atgccgcgctggtatccgctgccgcaaacggaagattgcctagggacatctgccagcgcacgaatgttggttatgcccggaaatgcggcgttttgcgccgagaagtttagtggttctcgtgaatagcttttgacctgcctttcgggtatgttgtatgtgacaaaaagagtgtcacagcgtcaaatccagaggtgaacatcatgccgcaagtccaagtcatccagccgatacagcaacagccgaagcgccttcgcgtggcg

SEQ ID NO: 18292 - DNA, 260 bp, Unknown
  Description of Unknown: LeftRegion for integrase B5293 sequence
gcttcgcaatttggaaaacatctgcaagctaaaatccaagagcaagtgaacagcgaaagcaattcttctcttttgcttgaacagatgaacgaattgtttaacaatgtttctaaattgtccgaaactgaacaaaaggccttttataccggacttgtgaaaggaataaagcgttgggaagatgagcagaagggggagtaacaatgccggaagcattaaacgcggtcatatacgcccgctattcctccgatcgtcagacagaa

SEQ ID NO: 18293 - DNA, 260 bp, Unknown; identical to SEQ ID NO: 18247
  Description of Unknown: LeftRegion for integrase B5294 sequence

SEQ ID NO: 18294 - DNA, 260 bp, Unknown
  Description of Unknown: LeftRegion for integrase B5295 sequence
aatgaagacccgatccttcgatgatctggattctttcgcctccgagttcacctaccaagtatccgggcaggcatatcgtatcatcgacctcatggcacagcggggctatctctccttctctgacgccgggaaactctcggatgagattgaccgaaacttgagcaacgagcatttcttcgtgttctgcgctggagatcggggtgattcggttgagtaaacagagcaatgctgttctgtacggcaggggcgccacgaaagaa

SEQ ID NO: 18295 - DNA, 260 bp, Unknown
  Description of Unknown: LeftRegion for integrase B5296 sequence
aattaaaaccgctcctgcgccaacaggaacggtcgagcgatgaaacatacgccaatatgtttctcattaagttctccgaagagatacccaaatgcaataatattgtatcatctccggagcagccacgcaagagaacaaaagttctcaggctgttatttttgtacccttttttgcataaaatacaaaggagctgatacattatgtatgtaatttatttaagaaaatccagaaaagattccgacctcgaagcactcggaatt

SEQ ID NO: 18296 - DNA, 260 bp, Unknown
  Description of Unknown: LeftRegion for integrase B5297 sequence
aagaactttgctacatcctgcacttttgccatatcaaacacctcctcttcatcgtctccacttgtatcatattctaaaacagcctcaaggtcaagagcagtgaagaaaatgttctcaaaaaatgcaaacttttgttctctttatcttcatggaacttgtaacgccaacgtaatatccgataaaagattggaggaagccccatgtcctacgccatccacctgcgcaagtcccgcgccgatctggaagccgaagcccgcggc

SEQ ID NO: 18297 - DNA, 260 bp, Unknown
  Description of Unknown: LeftRegion for integrase B5298 sequence
gtgcaacttctaatgcattgtacgccataaatgattccccctctctctttagtaaattatagcatatataaactttttagtaaatttatgtaattattttctttaaataaaaagaacatactttcgattttatattgtcaattacttccatatattttaatatagtattatatttacttaattaaaggcggcgataaaatatgaaaacttgtatttacttaagaaaatctcgctcagatgaagaagctgaaaaacaaggt

SEQ ID NO: 18298 - DNA, 260 bp, Unknown
  Description of Unknown: LeftRegion for integrase B5299 sequence
gagaatacgcacgtggctttcgttccgtgcgagggacagaatatcgagattgaaaacgaccggattcggctggtgattacggacgctcgccagattgacttccagagttaccagccccacccggagggcgaatttaccgaggagcagcgcacctgccgtaactggatcttcgccaactacctgttagacgggatgccgctgtgagacgggcagccctctatatccgcgtttccacgctggaacaggcacaagagggctac

SEQ ID NO: 18299 - DNA, 260 bp, Unknown
  Description of Unknown: LeftRegion for integrase B5300 sequence
ttactgggtcttagtgaagtcagaaaaccagaagtcttagttttgtcagaaaaagagaaaatcctcattgacgcataccgtactgctaatgacatgggacagttgaacataatctatgtctgcatggatgaaatgaaaaaaaagcaaaaggagaaggcgtacttgtagggtaattgatttcatagaatggaggaagaaccatgtatgaggatataaaaacagcctgcctatacgttagattctcaagccataaccagact

SEQ ID NO: 18300 - DNA, 260 bp, Unknown; identical to SEQ ID NO: 13412
  Description of Unknown: LeftRegion for integrase B5301 sequence

SEQ ID NO: 18301 - DNA, 260 bp, Unknown; identical to SEQ ID NO: 15606
  Description of Unknown: LeftRegion for integrase B5302 sequence

SEQ ID NO: 18302 - DNA, 260 bp, Unknown; identical to SEQ ID NO: 18252
  Description of Unknown: LeftRegion for integrase B5303 sequence

SEQ ID NO: 18303 - DNA, 260 bp, Unknown
  Description of Unknown: LeftRegion for integrase B5304 sequence
tgcctgttgtcgggttcctgtactttctgtgcgaaccgttggaacttaccagttcaaacccgttggcttccaacagcttcacaatttctcgtggtgtcatcggcatttttgtttcctccgttctgtatttattatacacgtattttacgtatttgtcaatagtaaattacgtatttcacgtataaaaaggggcgttatatatgcgtgcttttatttactgccggttttccagctacaaacagcaggaacttagcattgaa

SEQ ID NO: 18304 - DNA, 260 bp, Unknown; identical to SEQ ID NO: 16395
  Description of Unknown: LeftRegion for integrase B5305 sequence

SEQ ID NO: 18305 - DNA, 260 bp, Unknown
  Description of Unknown: LeftRegion for integrase B5306 sequence
aattaaaaccgctcctgcgtcaacaggaacggtcgagcgatgaaacatacgccaatatgtttctattaagttctccgaagagatacccaattccaaataatattgtatcatctccggagcagccacgcaagagaacaaaagttctcaggctgttatttttgtacccttttttacataaaatacaaaggagctgatgcattatgtatgtaatttatttaagaaaatccagaaaagattccgaccttgaagcactcggaatt

SEQ ID NO: 18306 - DNA, 260 bp, Unknown
  Description of Unknown: LeftRegion for integrase B5307 sequence
tgctataagatagataattatattatttattttcagcctaactttggtatattaaaaatgctttaaatctattacttaataataaaaacttacaaaattgaatatacttataatattactctatccagttgatttttagttgcaactggcttattttaaaaactaaaaaaaacatacattctttaaagggaggttattttatgaaaatagcaatatatagcagaaaatcaaaagaaactgatacaggtgaatctattaaa

SEQ ID NO: 18307 - DNA, 260 bp, Unknown
  Description of Unknown: LeftRegion for integrase B5308 sequence
ggacggcagcttaaaacattcctttgaagtaaaaaatagagtaactgctattatcggaaaatggacggcgtaccaagctgaaaaacgcctgccgctgctggaactctgtcaagacttgtccgaagatgaattaaccgaagttataaactatatcaaatacgttcaatcaaagcgcgattgaacaggaagggggaataataatgccggaagcattaaatgcggtcatatacgcccgctattcctccgatcgtcagacagaa

SEQ ID NO: 18308 - DNA, 260 bp, Unknown
  Description of Unknown: LeftRegion for integrase B5309 sequence
cgactacacgcaggtcgcactgccggaggaactgcttacctcctttgccaaggccatgctcccggagctgcgtaagttttacgccagcgacgagggcaggacctattttgcaaagtggcttctgaagcacccggaatatgcggcacattcgacaccggagagtggatgactataataaaaatcggagaggaggattctgtatgaatgtagtcatttacgcccgcttttccagccacagccagacggagcagtccattgaa

SEQ ID NO: 18309 - DNA, 154 bp, Unknown
  Description of Unknown: LeftRegion for integrase B5310 sequence
agcttggcgttaccggccactccgccctgaatatgtggtccggtattgtcttcagtataatgggttcctaaacacatcattttaggtattgaatatgagacgggcaatcagctacatcagattttcaagtgaacgacaactaaaaggggactct

SEQ ID NO: 18310 - DNA, 260 bp, Unknown
  Description of Unknown: LeftRegion for integrase B5311 sequence
taatacattttcatttatattataacaaatttatttgtcataatttgtaaaaacttgccatttaagttttttattatttaatatatattacctagtaaaatttaataatgtaagaacatattttcgattcagtattgtaagtaattaccatatattttaatatagtattatatttacttagttaaaggcggcgataaaatatgaaaacttgtatttacttaagaaagtcacgttcagatgaagaagctgaaaaacaaggc

SEQ ID NO: 18311 - DNA, 260 bp, Unknown
  Description of Unknown: LeftRegion for integrase B5312 sequence
tatgccgcgctggtatccgctgccgcaaacggaagattgcctagggacatctgccagcgcacaaatgttggttatgcccggaaatgcggcgttttgcgccgagaagtttagtggttctcgtgaatagcttttgacctgcctttcgggtatgttgtatgtgataaaaagaatgtcacagcgtcaaactcggaggaaatagtatgccgcaagtccaagttatccagccgatacagcaacagccgaagcgtctgcgtgtggca

SEQ ID NO: 18312 - DNA, 260 bp, Unknown
  Description of Unknown: LeftRegion for integrase B5313 sequence
ggtaaagaagaaaaagtcgtatcatttacattagataataaaactatccaaggcataaaagatggtaacatagttgctaatgagatagtaaatacatatgcaaatgatgtatatatacaccaaagtttaaaataataaataatatagataaacatcagggcagttttaccagctgctctttttaattaggaggaaataagatgtatgcaatgtatttaaggaaaagccgtgctgatgataaggatattccattagaaaag

SEQ ID NO: 18313 - DNA, 260 bp, Unknown
  Description of Unknown: LeftRegion for integrase B5314 sequence
atggtctggtggcgctggttcgcgctggcggaagcggcgtttatcctcggcatcctgatctgggatattttccacccgaccgccggttatatccggtataccacttcaatgattccggatctttatgggctgatcaggcaccttcagttataatcgacgacttcccccgcttcggcggggtttttgataggagggctatcatgatctgtgcaatgtatctgcgcaaatcgcgcgccgatctgaccgcggaagcgcgcggc

SEQ ID NO: 18314 - DNA, 260 bp, Unknown
  Description of Unknown: LeftRegion for integrase B5315 sequence
tcgttttatgctttttgttaatgtctttagtttttattcattcttttgtgctttcaaggttatggtgtaagaaaattgcaatacgattattgttgtatattcaagataatgtgaccttaattgtctttttaaataaaaattaaacaaaaatcatatctcaccactaaggtttataaaagcatactttagcaggtgtcaccatgaaaaaagccatagcatatatgcgattttcatcaccaggtcagatgtctggtgattca

SEQ ID NO: 18315 - DNA, 260 bp, Unknown
  Description of Unknown: LeftRegion for integrase B5316 sequence
tcgttttatgctttttgttaatgtctttattttttatgtattcttttgtgctttcaagattatggcgtaagaaaattgcaatacgattattgttgtatattcaagataatgtgaccttaattgtctttttaaataaaaattaaacaaaaattatatcccaccactaaggtttataaaagcatacgttagcaggtgtcaccatgaaaaaagccatagcatatatgcgattttcatcaccaggtcagatgtctggcgactca

SEQ ID NO: 18316 - DNA, 260 bp, Unknown
  Description of Unknown: LeftRegion for integrase B5317 sequence
tcgttttatgctttttgttaatgtctttatttttttatgtattcttttgtgctttcaagattatggcgtaagaaaattgcaatacgattattgttgtatattcaagataatgtgaccttaattgtctttttaaataaaaattaaacaaaattatatcccaccactaaggtttataaaagcatacgttagcaggtgtcaccatgaaaaaagccatagcatatatgcgattttcatcaccaggtcagatgtctggcgactca

SEQ ID NO: 18317 - DNA, 260 bp, Unknown
  Description of Unknown: LeftRegion for integrase B5318 sequence
tcgttttatgctttttgttaatgtctttattttttatgtattcttttgtgctttcaagattatggcgtaagaaaattgcaatacgattattgttgtatattcaagataatgtgaccttaattgtctttttaaataaaaattaaacaaaaattatatcccaccactaaggtttataaaagcatacgttagcaggtgtcaccatgaaaaaagccatagcatatatgcgattttcatcaccaggtcagatgtctggtgactca

SEQ ID NO: 18318 - DNA, 260 bp, Unknown
  Description of Unknown: LeftRegion for integrase B5319 sequence
tcgttttatgcttcttgttaatgtctttattttttatgtattcttttgtgctttcaagattatggcgtaagaaaattgcaatacgattattgttgtatattcaagataatgtgaccttaattgtctttttaaataaaaaataaacaaaaattatatcccaccactaaggtttataaaagcatacgttagcaggtgtcaccatgaaaaaagccatagcatatatgcgattttcatcaccaggtcagatgtctggcgactca

SEQ ID NO: 18319 - DNA, 260 bp, Unknown
  Description of Unknown: LeftRegion for integrase B5320 sequence
cgttttatgctttttgttaatgtctttatttttttatgtgttcttttgtgctttcaagattatggcgtaagaaaattgcaatacgattattgttgtatattcaagataatgtgaccttaattgtctttttaaataaaaattaaacaaaaattatatcccaccactaaggtttataaaagcatacgttagcaggtgtcaccatgaaaaaagccatagcatatatgcgattttcatcaccaggtcagatgtctggtgactca

SEQ ID NO: 18320 - DNA, 260 bp, Unknown
  Description of Unknown: LeftRegion for integrase B5321 sequence
aatgctggatataattattcagaaattcaggccagagtaaacaaacttttatcatagtatatgggctcagagggacattcccttctgggcctttatatttttaccttgtgattgattttagcaaatacaagggtagattggactggctaatatgcagattgtatggtaacatgtgacactaccaggaaaggagaaaagccatgagtgtacaggttattaagagcaaaaatacaagaaaaggacgcatccgagttgcagct

SEQ ID NO: 18321 - DNA, 260 bp, Unknown
  Description of Unknown: LeftRegion for integrase B5322 sequence
cgttttatgctttttgttaatgtctttatttttttatgtattcttttgtgctttcaagattatggcgtaagaaaattgcaatacgattattgttgtatattcaagataatgtgaccttaattgtctttttaaataaaaattaaacaaaaattatatcccaccactaaggtttataaaagcatacgttagcaggtgtcaccatgaaaaaagccatagcatatatgcgattttcatcaccaggtcagatgtctggcgactca

SEQ ID NO: 18322 - DNA, 260 bp, Unknown
  Description of Unknown: LeftRegion for integrase B5323 sequence
gaagaacataaatagtaaaagaccgctcagtgttaccagcactgaacggcctcttacatagattttctcctgccagtcttctggccagatataatccaacttatgcacctgaattatatcatctccaggacgtctgcgcaaggggcgtcttttttgtacccatttttcataaaataaagcaaataccaggagatgataacatgaaaaaagaagaagacactgtaaaaacagctgcgctctacatccgcgtcagcaccgat

SEQ ID NO: 18323 - DNA, 260 bp, Unknown
  Description of Unknown: LeftRegion for integrase B5324 sequence
tcgttttatgctttttgttaatgtctttagtttttattcattcttttgtgctttcaagattatggtgtaagaaaattgcaatacgattattgttgtatattcaagataatgtgaccttaattgtctttttaaataaaaattaaacaaaaatcatatctcaccactaaggtttataaaagcatactttagcaggtgtcaccatgaaaaaagccatagcatatatgcgattttcatcaccaggtcagatgtctggtgattca

SEQ ID NO: 18324 - DNA, 260 bp, Unknown; identical to SEQ ID NO: 18318
  Description of Unknown: LeftRegion for integrase B5325 sequence

SEQ ID NO: 18325 - DNA, 260 bp, Unknown
  Description of Unknown: LeftRegion for integrase B5326 sequence
catatataaaggttcaaaaaaagaaataaaagaattagaagtaaatgatgaattaaccaataatgaattagaagaaatcgcaaaggatgaatttctaagtgaatgtagttatgaatggaaaatttataaaaaataatggttaatttctagaaaaaggtaatagattaaatgctattaccttttttagtggaggaaaatatatgaataatgtaatagtttatgctagagtatccacattaatccaagcagaacaaggatat

SEQ ID NO: 18326 - DNA, 260 bp, Unknown
  Description of Unknown: LeftRegion for integrase B5327 sequence
gaactatatagaaaataaaaataactatagaagtcaaaacacatcaagtgatgcagatgaattaatgaaattcaaaaaacttctagatatgggtgctataactgaagaagaatatgaaaataaaaaagaacaaatattaaaattatagataaacatcagggcagttttaccagctgctctttttttaaggaggaaataagatgtatgcaatgtatttgagaaaatcaagggctgatgataaggatattccattagaaaag

SEQ ID NO: 18327 - DNA, 260 bp, Unknown; identical to SEQ ID NO: 18312
  Description of Unknown: LeftRegion for integrase B5328 sequence

SEQ ID NO: 18328 - DNA, 260 bp, Unknown
  Description of Unknown: LeftRegion for integrase B5329 sequence
aaaaatgtattaaaccttgaacaatttggtagagatatcactattaaatcttttgataattttgccaacaaaatagataaaactatttattaataaaaaagaaatcgaagtaaatgatgaattaaccaataaatggttaatttctacaaaacaaaggtaataggttaaatactattaccttttttagtggaggaaaatatatgtataatgtaataatttatgctagagtatccacattaattcaggcagaacaaggatat

SEQ ID NO: 18329 - DNA, 260 bp, Unknown
  Description of Unknown: LeftRegion for integrase B5330 sequence
atataataatttaggggatggctataagaatgctccagatttacaaacagctgactatttttcaggaagtaaattaataacattaaaagaagggcaatatttgaaattagatagtaatacaaaagttataaaatagaaataatatagataaacatcagggcagttttaccagctgctctttttaattaggaggaaataagatgtatgcaatgtatttaaggaaaagccgtgctgatgataaggatattccattagaaaag

SEQ ID NO: 18330 - DNA, 260 bp, Unknown
  Description of Unknown: LeftRegion for integrase B5331 sequence
cgttttatgctttttgttaatgtctttatttttttatgtgttcttttgtgctttcaagattatggcgtaagaaaattgcaatacgattattgttgtatattcaagataatgtgaccttaattgtttttttaaataaaaattaaacaaaaattatatcccaccactaaggtttataaaagcatacgttagcaggtgtcaccatgaaaaaagccatagcatatatgcgattttcatcaccaggtcagatgtctggtgactca

SEQ ID NO: 18331 - DNA, 260 bp, Unknown; identical to SEQ ID NO: 18329
  Description of Unknown: LeftRegion for integrase B5332 sequence

SEQ ID NO: 18332 - DNA, 260 bp, Unknown
  Description of Unknown: LeftRegion for integrase B5333 sequence
gaagaacataaatagtaaaagaccgctcagtgttaccagcactgaacggcctcttacatagattttctcctgccagtcttctggccagatataatccaacttatgcacctgaattatatcatctccagggcgtctgcgcaaggggcgtcttttttgtacccatttttcataaaataaagcaaataccaggagatgataacatgaaaaaagaagaagacactgtaaaaacagctgcgctctacatccgcgtcagcaccgat

SEQ ID NO: 18333 - DNA, 260 bp, Unknown; identical to SEQ ID NO: 18321
  Description of Unknown: LeftRegion for integrase B5334 sequence

SEQ ID NO: 18334 - DNA, 260 bp, Unknown; identical to SEQ ID NO: 18329
  Description of Unknown: LeftRegion for integrase B5335 sequence

SEQ ID NO: 18335 - DNA, 260 bp, Unknown; identical to SEQ ID NO: 18323
  Description of Unknown: LeftRegion for integrase B5336 sequence

SEQ ID NO: 18336 - DNA, 260 bp, Unknown
  Description of Unknown: LeftRegion for integrase B5337 sequence
gaactatatagaaaataaaaataactatagaagtcaaaatacatcaagtgatgcagatgaattaatgaaattcaaaaaacttctagatatgggtgctataactgaagaagaatatgaaaataaaaaagaacaaatattaaaattatagataaacatcagggcagttttaccagctgctctttttttaaggaggaaataagatgtatgcaatgtatttgagaaaatcaagggctgatgataaggatattccactggaaaag

SEQ ID NO: 18337 - DNA, 260 bp, Unknown
  Description of Unknown: LeftRegion for integrase B5338 sequence
tacatgggccgcttttgttaatgtttttagtttttgtgtattcttttgtgccttcaagattattgcgtaagcaaattgcaatacgattattgttgtatattcaaaagaatgtgatcgtaattgtctttttaaataaaaattaaacaaaaattatatctcaccactaaggtttataaaagcatacgttagcaggtgtcaccatgaaaaaagccatagcatatatgcgattttcatcaccaggtcagatgtctggcgactca

SEQ ID NO: 18338 - DNA, 260 bp, Unknown
  Description of Unknown: LeftRegion for integrase B5339 sequence
catggtctggtggcgctggttcgcgctggcggaagcggcgtttatcctcggtatcctgatctgggatattttccacccgaccgccggttatatccggtacaccacttcaatggttccagatctttatgggctgatcaggcaccttcagttataatcgacgacttccccgcttcggcggggtttttgataggagggctatcatgatttgtgcaatgtatctgcgcaaatcgcgcgccgatctgaccgcagaagcgcgcggc

SEQ ID NO: 18339 - DNA, 260 bp, Unknown
  Description of Unknown: LeftRegion for integrase B5340 sequence
cgttttatgctttttgttaatgtctttatttttttatgtattcttttgtgctttcaagattatggcgtaagaaaattgcaatacgattattgttgtatattcaagataatgtgaccttaattgtctttttaaataaaaattaaacaaaaattatatctcaccactaaggtttataaaagcatacgttagcaggtgtcaccatgaaaaaagccatagcatatatgcgattttcatcaccaggtcagatgtctggcgactca

SEQ ID NO: 18340 - DNA, 260 bp, Unknown
  Description of Unknown: LeftRegion for integrase B5341 sequence
tcagaaatttttattgatacaactaaaattaaattttaaataaaaaaccgtctcctgagaattaagacggtttaccctttcctttaaagaaaggaaaaaaatgacttgtaaaaggaaaatatattcaaaaaccttttacgtgcttaattttatcataaatggcacgtttaaggcaatatcatagaaaggatgtgctatttatgtatggaatgtatttaagaaaatcaagagctgatgatccaaatgaaacaatggatgaa

SEQ ID NO: 18341 - DNA, 260 bp, Unknown
  Description of Unknown: LeftRegion for integrase B5342 sequence
agaaattgccgtgctttgcaatgtgtccatgcaggcggcagaaattcgctccagaaggatgcaaatcttgcttgcaagaaataaatttttaacgcatccgctggaacggcaggtgtttgaacagtttcaacagtttatcaacaatcagtgaaaaagccgccctgcaaggaattgtggggcggtacaattaaggagcgattatgaaaagagcagtgttttatggtcgttattccagcgaccgacagaccgagcagagcatt

SEQ ID NO: 18342 - DNA, 260 bp, Unknown
  Description of Unknown: LeftRegion for integrase B5343 sequence
aaaattgatcacaaaatgcaaaaccgcccggtgctaccaacaccgaacggctttacatagattttctcttgccagtctcccggccagatataaatcagacttgaacacctgaattatatcatctccagaacttctgcgcaaggggcgtcttttttgtacccatttttcataaaataaagcaaataccaggagatgataacatgaaaaaagaagaagacactgtaaaaacagctgcgctctacatccgcgtcagcaccgat

SEQ ID NO: 18343 - DNA, 260 bp, Unknown
  Description of Unknown: LeftRegion for integrase B5344 sequence
aatagataaaactatttattaataaaaaagaaatcgaagtaaatgataaattaaccaataacaagttagaagaagttgcacgagatgaatttttaagtgaatataattatgcatgggaattttataaaaataatggttaatttctgcaaaacaaaggtaataggttaaatactattaccttttttagtggaggaaaatatatgaataatgtaataatttatgctagagtatccacattaattcaggcagaacaaggatat

SEQ ID NO: 18344 - DNA, 260 bp, Unknown
  Description of Unknown: LeftRegion for integrase B5345 sequence
atcgtaacgagttagatggggataaagataaaactgcggcagtctaaggtcattccgatagaattgctcagacgtaagaagctattggaggtgagattacgaaagcagtaatttatgctcgatattcgagccacagtcaaagagaggagtctatagagggtcagcttcgtgagtgtcatgagttcgctcttaaaaacggaatgacggtcataaatgaatactgtgaccgagcaatttccggcaagacagataatcgtccg

SEQ ID NO: 18345 - DNA, 260 bp, Unknown
  Description of Unknown: LeftRegion for integrase B5346 sequence
gggatagaattgttatgatttattatcgggttaatcataggcggtacagtcggcgtatttgcaatggctttgtgcatagccgcaggacaagccgacaaacgtgaaaactgcacagattcggataagtaattttatcaagtatagtgataccattccataaagatttgtggtatcattgttggtaaaacggaggtgagaatatgccaactgtaactgtgatacagccgaccatagcagcagaacaaaacacaaagatccgt

SEQ ID NO: 18346 - DNA, 260 bp, Unknown
  Description of Unknown: LeftRegion for integrase B5347 sequence
tacatgggccgcttttgttaatgtttttagtttttgtgtattcttttgtgccttcaagattattgcgtaagcaaattgcaatacgattattgttgtatattcaagatagtgtgatcgtaattgtctttttaaataaaaattaaacaaaaattatatctcaccactaaggtttataaaagcatacgttagcaggtgtcaccatgaaaaaagccatagcatatatgcgattttcatcaccaggtcagatgtctggcgactca

SEQ ID NO: 18347 - DNA, 260 bp, Unknown
  Description of Unknown: LeftRegion for integrase B5348 sequence
gaggatcgcaagctgaatatggtcaaccagcgccgcgaattcttcaacgtcaccctcgacgagatcaaagaggtcgtgcgcagccattacgacaaatcggttgaatttatcgatgttccgcaagccgaacagtatagaaccagtttgaagatgaaagaggcgacgacctgaaccgtttttattatgtgtgaggaaagaatatgaaaccgttatcgagaccgtccggtttacccccaaaagcggttatatatgcgcgcttt

SEQ ID NO: 18348 - DNA, 260 bp, Unknown
  Description of Unknown: LeftRegion for integrase B5349 sequence
gcaaagaagaaaaagttgtatcatttacattgaatagcaaaactatacaaggaataaaaaatggaaatatagttgctaatgaaatagtaaatacatatgcagatgatgtatatatacatcagagtttaaaaaaataataaataatatagataaacatcagggcagttttaccagctgctcttttttaaggaggaaataagatgtatgcaatgtatttaaggaaaagccgtgctgatgataaggatattccattagaaaag

SEQ ID NO: 18349 - DNA, 260 bp, Unknown
  Description of Unknown: LeftRegion for integrase B5350 sequence
tcattaaaatttcaaactatttcggtataactcttgaagaacttgtcaacggtacggcttcagagggtttcgtctttgatactaacgaattcaaaaactatgagctttacgcaatatataactttgcacagtttttgaaatacaacagaggtgatctggctaaggtgtttacggttccagacactaaatggagataaaaaatgagagtagctatgtatcttagaaagtccagacaagacgaagaattgataaacgcaacg

SEQ ID NO: 18350 - DNA, 260 bp, Unknown; identical to SEQ ID NO: 18315
  Description of Unknown: LeftRegion for integrase B5351 sequence

SEQ ID NO: 18351 - DNA, 260 bp, Unknown
  Description of Unknown: LeftRegion for integrase B5352 sequence
gaactatatagaaaataaaaataactatagaagtcaaaatacatcaagtgatgcagatgaattaatgaaattcaaaaaacttctagatatgggtgctataactgaagaagaatatgaaaataaaaaagaacaaatattaaaattatagataaacatcagggcagttttaccagctgctctttttttaaggaggaaataagatgtatgcaatgtatttgagaaaatcaagggctgatgacaaggatattccattagaaaag

SEQ ID NO: 18352 - DNA, 260 bp, Unknown
  Description of Unknown: LeftRegion for integrase B5353 sequence
tcgttttatgctttttgttaatgtctttagtttttattcattcttttgtgctttcaagattatggtgtaagaaaattgcaatgcgattattgttgtatattcaagataatgtgaccttaattgtctttttaaataaaaattaaacaaaaatcatatctcaccactaaggtttataaaagcatactttagcaggtgtcaccatgaaaaaagccatagcatatatgcgattttcatcaccaggtcagatgtctggtgattca

SEQ ID NO: 18353 - DNA, 260 bp, Unknown; identical to SEQ ID NO: 16741
  Description of Unknown: LeftRegion for integrase B5354 sequence

SEQ ID NO: 18354 - DNA, 260 bp, Unknown
  Description of Unknown: LeftRegion for integrase B5355 sequence
atcgtcatgtggttaggagctgttggtatgataattgagggcgcgggcagcgagaagttattttctctctggataatttttctactggcctgcttcaacgtacctgacctgatccggctgaaactgggcaagttccgggataacgtgggcgattatctgcggcaataaaaaagcccgcacactggcgggcgggtgatggtatgaaaaaagagaacgaaattcgggcagttgtctacgcccggtactcatcccattcgcaa

SEQ ID NO: 18355 - DNA, 260 bp, Unknown
  Description of Unknown: LeftRegion for integrase B5356 sequence
agaactatatagaaaataaaaataactatagaagtcaaaatatatcaagtgatgcagatgaattaatgaaattcaaaaaacttctagatatgggcgctataactgaagaagaatatgaaaataaaaaagaacaaatattaaaattatagataaacatcagggcagttttaccagctgctcttttttaaggaggaaataagatgtatgcaatgtatttaaggaaaagccgtgctgatgataaggatattccattagaaaag

SEQ ID NO: 18356 - DNA, 260 bp, Unknown
  Description of Unknown: LeftRegion for integrase B5357 sequence
acttactgggtcttagtgaagtcagaaagccagaagtcttagttttgtcagaaaaagagaaaatcctcattgacgcataccgtactgctaatgacatgggacagttgaacataatttatgtctgcatggacgaaatgaaaaaagcaaaaggagaaggcgtacttgtagggtaattgatttcatagaatggaggaagaaccatgtatgaggatataaaaacagcctgcctatacgttagattctcaagccataaccagact

SEQ ID NO: 18357 - DNA, 260 bp, Unknown
  Description of Unknown: LeftRegion for integrase B5358 sequence
tggaattatattcctattgttcaccttgcatagattgtgaatttttagataataatggaaattgtttgtatggcaaaaaatgttttacaaacaaataaagcaaaagtataatgttattaaatactttataaatttgaatttaaagaagatgttttacacaaatacatcttctttaaacatatatgaaaggggtaatttagttgaaaaatatagctatatactctagaaaatctagggaaaccgataagggagaatctata

SEQ ID NO: 18358 - DNA, 260 bp, Unknown; identical to SEQ ID NO: 18323
  Description of Unknown: LeftRegion for integrase B5359 sequence

SEQ ID NO: 18359 - DNA, 260 bp, Unknown
  Description of Unknown: LeftRegion for integrase B5360 sequence
ttatataataatttaggtggaggttataaaggtggtccagacttacaggattcagattatttttcaggaagtaaattaataacattaaaagaagggcaatatttgaaattagatagtaatacaaaagttataaaatagaaataatatagataaacatcagggcagttttaccagctgctcttttttaaggaggaaataagatgtatgcaatgtatttaaggaaaagccgtgctgatgataaggatattccattagaaaag

SEQ ID NO: 18360 - DNA, 260 bp, Unknown
  Description of Unknown: LeftRegion for integrase B5361 sequence
tatataataatttaggtgaaggttacaaaggtggtccagatttgcatgattcagattatttttcaggaagtaaattaataacattaaaagaaggtcaatatttgaaattagacagtaatacaaaaattataaaatagaaataataatagataaacatcagggcagttttactagctgctctttttttaggaggaaataagatgtatgcaatgtatttaagaaaatccagggctgatgacaaggatattccactagaaaaa

SEQ ID NO: 18361 - DNA, 260 bp, Unknown
  Description of Unknown: LeftRegion for integrase B5362 sequence
tcgttttatgctttttgttaatgtctttagtttttattcattcttttgtgctttcaagattatggtgtaagaaaattgcaatacgattattgttgtatattcaagataatgtgaccttaattgtctttttaaataaaaattaaacaaaaatcatatctcaccactaaggtttataaaagcatactttagcaggtgtcaccatgaaaaaagccatagcatatatgcgattttcatcaccaagtcagatgtctggtgattca

SEQ ID NO: 18362 - DNA, 260 bp, Unknown
  Description of Unknown: LeftRegion for integrase B5363 sequence
gatttactgaattaaatagtaaaagaccgctcctgcgccaacaggaacggcctcttacatagattttctcctgccagtctcccggcacgatataatcagcttagacacctgaattatatcatctccaggacgtctgcgcaaggggcgtcttttttgtacccatttttcataaaataaagcaaataccaggagatgatagcatgaaaaaagaagaagacactgtaaaaacagctgcgctctacatccgcgtcagcactgat

SEQ ID NO: 18363 - DNA, 260 bp, Unknown; identical to SEQ ID NO: 18317
  Description of Unknown: LeftRegion for integrase B5364 sequence

SEQ ID NO: 18364 - DNA, 260 bp, Unknown
  Description of Unknown: LeftRegion for integrase B5365 sequence
gaagaacataaatagtaaaagaccgctcagtgttaccagcactgaacggcctcttacatagattttctcctgccagtcttctggccagatataatccaacttatgcacctgaattatatcatctccaggacgtctgcgcaaggggcgtcttttttgtacccatttttcataaaataaagcaaataccaggagatgataacatgaaaaaagaagaagacactgtaaaaacagctgcactctacatccgcgtcagcaccgat

SEQ ID NO: 18365 - DNA, 260 bp, Unknown; identical to SEQ ID NO: 16611
  Description of Unknown: LeftRegion for integrase B5366 sequence

SEQ ID NO: 18366 - DNA, 260 bp, Unknown
  Description of Unknown: LeftRegion for integrase B5367 sequence
catggtctggtggcgctggttcgcactggcggaagcggcgtttatcctcggcatcctgatctgggatattttccaccctaccgccggttatatccggtataccacttcaatgattccggatctttatgggctgatcaggcaccttcagttataatcgacgacttccccgcttcggcggggtttttgataggaggtctatcatgatctgtgcaatgtatctgcgcaaatcgcgtgccgatctgaccgcggaagcgcgcggc

SEQ ID NO: 18367 - DNA, 260 bp, Unknown; identical to SEQ ID NO: 16673
  Description of Unknown: LeftRegion for integrase B5368 sequence

SEQ ID NO: 18368 - DNA, 260 bp, Unknown
  Description of Unknown: LeftRegion for integrase B5369 sequence
atataataatttagggggtggctataagaatgctccagatttacaaacagctgactatttttcaggaagcaaactaataacattaaaagaagggcaatatttaaaattagatagcaatacaaaagttataaaatagaaataataatagataaacatcagggcagttttaccagctgctctttttttaaggaggaaataagatgtatgcaatgtatttgagaaaatcaagggctgatgacaaggatattccagtagaaaag

SEQ ID NO: 18369 - DNA, 260 bp, Unknown; identical to SEQ ID NO: 18315
  Description of Unknown: LeftRegion for integrase B5370 sequence

SEQ ID NO: 18370 - DNA, 260 bp, Unknown; identical to SEQ ID NO: 18317
  Description of Unknown: LeftRegion for integrase B5371 sequence

SEQ ID NO: 18371 - DNA, 260 bp, Unknown
  Description of Unknown: LeftRegion for integrase B5372 sequence
catagtctggtggcgctggtttgcgctggcggaagcggcgtttatcctcggcatcctgatctgggatattttccaccctaccgccggttatatccggtataccacttcaatggttccagatctttatgggctgatcaggcaccttcagttataattgacgacttccccgcttcggcggggtttttgatgggaggtctatcatgatctgtgcaatgtatctgcgcaaatcgcgtgccgatctgaccgcggaagcgcgcggc

SEQ ID NO: 18372 - DNA, 260 bp, Unknown; identical to SEQ ID NO: 18317
  Description of Unknown: LeftRegion for integrase B5373 sequence

SEQ ID NO: 18373 - DNA, 260 bp, Unknown
  Description of Unknown: LeftRegion for integrase B5374 sequence
taatatcagtgtaaatatgttaattggcatgaattttaaagcacgtgaaaacgaatctcactttgttagcatgatgcgcattttaaaacgaactaagcaatggaatgaagttgtaggtgaaacacaattcagtgatgcagaaatgaacgaattaatgaactacgctaaatatttaatcagtaaaagaaaggtagaataacatggaagaaatattgatataccttagaaaatcaagacaagatgaaccaagcgaaacaata

SEQ ID NO: 18374 - DNA, 260 bp, Unknown
  Description of Unknown: LeftRegion for integrase B5375 sequence
aatagataaaactatttattaataaaaaagaaatcgaagtaaatgataaattaaccaataacaagttagaaaaagttgcacgagatgaatttttaagtgaatataattatgcatgggaattttataaaaataatggttaatttctgcaaaacaaaggtaataggttaaatactattaccttttttagtggaggaaaatatatgaataatgtaataatttatgctagagtatccacattaattcaggcagaacaaggatat

SEQ ID NO: 18375 - DNA, 260 bp, Unknown
  Description of Unknown: LeftRegion for integrase B5376 sequence
tataacaatttaggcaaaggctacaaaggtggtccagacttacaagattcagatttcttttctggaagcaaattaataacattaaaagaaggtcaatatttgaaattagacagtaatacaaaaattataaaatagaaataataatagataaacatcagggcagttttaccagctgctcttttttttaaggaggaaataagatgtatgcaatgtatttgagaaaatcaagggctgatgacaaggatattccactggaaaag

SEQ ID NO: 18376 - DNA, 260 bp, Unknown
  Description of Unknown: LeftRegion for integrase B5377 sequence
ttaggaggttttgatatgataggatttgtaattggactgcttgtaggcggtacagcaggagtattcacaatgtgtctctgcacaacggcaaagcaggcagatgaaaatatgtcaaattcggacaagtaattttgtccggtttggtaataccattctgaaaagatttgtggtattcttgttggtaaaacggaggtgagaaaatgccgacagtaacggttatacagccgacaatagcagaagaaaaagcagtcaagaaacgt

SEQ ID NO: 18377 - DNA, 260 bp, Unknown
  Description of Unknown: LeftRegion for integrase B5378 sequence
gattgcaccgtttttatgttggaaaatggggcacaggattcttgtacctcatcacttttggattctttttcattggcgccattatagactttattcatattttgcggggcactttcaaggataaaaatgggataccgctgattgaatggtagtatattttaacagaatcagcctattttcgttaaatagggggtgatagtttgagttcagttgaaacaaccgccgttgtttacgcacggtattcatctcacggccagacc

SEQ ID NO: 18378 - DNA, 260 bp, Unknown
  Description of Unknown: LeftRegion for integrase B5379 sequence
taattacattaattaaaaaaattcttaataataattaaaaaagacctcatgctggaacatgaggccgaaatgcaaaaaacaaataaagtccactacgacacgaatgtagaatacctacaaacgaaatgtttttttgctatttaattatagcatgaaaaatatctcgtatcaataatatttagagaggaagtgctataattatgagaaaaaaagtagcctatttaagaaaatcccgtgctgatatagaattggaaaataca

SEQ ID NO: 18379 - DNA, 260 bp, Unknown
  Description of Unknown: LeftRegion for integrase B5380 sequence
tatatattaatatatatttatattaattgacttatagattttaaatttcataagtaaattaataaagaagttaaaattacatatgtaacctatgtaacctatgataactaattgatttttatagcgttttttagcgtttttggtgacgtaggttaaaaaataacctgtgtcacctatgtaacgtagaaaggaatgaggaaatgaaagaatgtattgagtatttgagaaagtcacagtttgaccgtgattttgccgatttg

SEQ ID NO: 18380 - DNA, 260 bp, Unknown
  Description of Unknown: LeftRegion for integrase B5381 sequence
accgaaaatattaaataatacaaaaataaaattataaaaaaagacctcatgctggaacatgaggccaaaatgcaaaaaacaaataaagtccactacgacacgaatgtagaatgcctacaaacgaaatgtttttttgctatttaattatagcatgaaaaatatctcgtatcaataatatttagagaggaagtgctataattatgagaaaaaaagtagcctatttaagaaaatcccgtgctgatatagaattggaaaataca

SEQ ID NO: 18381 - DNA, 260 bp, Unknown
  Description of Unknown: LeftRegion for integrase B5382 sequence
gaatctgtgtagaattgcttagatatttgaagaaataccgttaaattgcatagtcattcacctgtttatgtcctgtaattaacaggtatgttctaggaatcatcctcatagtgcatttagaccttgatgatttttattagacacgtttaaatacaccatcttaagcgatacaatctaggggttattaggtgaggtgaacaatgaaacgtgtaatcagctacatcagattcagttctgagcgacaagccaaaggcgactca

SEQ ID NO: 18382 - DNA, 260 bp, Unknown
  Description of Unknown: LeftRegion for integrase B5383 sequence
tgaggcaataaaaagtggtgctaatgatagatatgaaattgctgaatatcttactataacagacaaattctttgatgaagcaataaactaccatagacaaaaaaatggattagtctgtaaatatgaaggggtatggatatactttgaacctagtttcggtatactaagggataatattttttaattttgggaggttacttatgagtagaattgcaatatattctcgtaaaagtaaagatactgatactggagaatctata

SEQ ID NO: 18383 - DNA, 260 bp, Unknown
  Description of Unknown: LeftRegion for integrase B5384 sequence
cattttctcgattctcttcccggtgaatttaattatggggtggaagtccgccatccacagtttttcgccaaaggggaagaggaacaaacgcttaatcgcggtttacatcagcgcggcgttaatcgggtgatttttattagacacgtttaaatacaccatctaaaacgatacaatctagggcatcagttttgaggtgaacaatgaaacgtgccatttcttacatcaggttttcatctgagaagcaatcccgaggtgattca

SEQ ID NO: 18384 - DNA, 260 bp, Unknown
  Description of Unknown: LeftRegion for integrase B5385 sequence
ccaactgcggcaataccaagcatgcttcccccatcgaccgggacaaagccatctccatgggatacgaagcctgcaagaagtgctattaagcaactcccctttccggccccactcgggccggaatttttttcgggaggggtacagaaacgcccttcctgtggtatactgtctatcaagagaatcagaaaggagccgaaacaatgccctattgtatgtatctgcgcaaatcccgaaaggacagcgatcaccccggacaggcg

SEQ ID NO: 18385 - DNA, 260 bp, Unknown
  Description of Unknown: LeftRegion for integrase B5386 sequence
cggtattatatcagcgtaatatgtttttagcacatccattagaacgacaagtgtatcagcagtttcaagattttatctatggatatacgaacggctagtagatgctaaaattgtgacagttttgcattgatttttacagattgcatagatttaaaatagtgtttgtttaaatttatgaaattttacagatcatacttcacatgaatactaaacaatcaatgggagtgtattgcgtaaggaagggagtgtatcgcatggag

SEQ ID NO: 18386 - DNA, 260 bp, Unknown
  Description of Unknown: LeftRegion for integrase B5387 sequence
tgaggcaataaaaaatggtgctaatgatagatatgaaattgctgaatatcttactgtaacagacaaattctttgatgaagcaataaactaccatagacaaaaaaatggattagtctgtaaatgtgaagggttatggatatactttgaacctagtttcggtatactaagagataatattttttaattttgggaggttacttatgagtagaattgcaatatattctcgtaaaagtaaagagactgatactggagaatctata

SEQ ID NO: 18387 - DNA, 260 bp, Unknown
  Description of Unknown: LeftRegion for integrase B5388 sequence
tttctcgattctcttcctggcgaatttaattatggcgtggaagtccgccatccacagtttttcgccaaaggagaagaggaacaaacgcttaatcgcggtttacatcagcgcggcgttaatcgggtgattttcatcagacacgtttaaatacaccacctaaagcgatacaatcgcgctattagtttttatggtggtaaagaatgaaacgtgtaatcagctacatcagattcagttctgagcgacaggccaaaggcgactca

SEQ ID NO: 18388 - DNA, 260 bp, Unknown
  Description of Unknown: LeftRegion for integrase B5389 sequence
ggcaagggcaattatataccacaagcaaacacgccgtatacagccacacagaagtgttgaaaagggtcggaactttgttcctcacctatcaaaatatatccgaacagacgtgattttaaatcgcacctgtgaaaaccctaatttaagatattatacttatattttctgatcgtaatttcgaaaacaggagatgaaaataaatgtcatactgtatatacttgcgtaaatcaagagcagatttagagcttgaagcaatggga

SEQ ID NO: 18389 - DNA, 260 bp, Unknown; identical to SEQ ID NO: 17312
  Description of Unknown: LeftRegion for integrase B5390 sequence

SEQ ID NO: 18390 - DNA, 260 bp, Unknown; identical to SEQ ID NO: 18085
  Description of Unknown: LeftRegion for integrase B5391 sequence

SEQ ID NO: 18391 - DNA, 260 bp, Unknown; identical to SEQ ID NO: 16075
  Description of Unknown: LeftRegion for integrase B5392 sequence

SEQ ID NO: 18392 - DNA, 260 bp, Unknown
  Description of Unknown: LeftRegion for integrase B5393 sequence
tatgataagaaaagcggaaatcatttacattcagtagttggttgtgaaattaaataaaataaaaatagccgcccaggctcctacccctgaacggctgatgtaaccttcactttacccctgttaaaagtaatgctggattacgctattattatagcatataccggccttagtattctataccctttttagggtaatattttatgaaaggctggtatttttttatggcaaacggagtaatttacgcgcgctattcttccaac

SEQ ID NO: 18393 - DNA, 260 bp, Unknown; identical to SEQ ID NO: 15606
  Description of Unknown: LeftRegion for integrase B5394 sequence

SEQ ID NO: 18394 - DNA, 260 bp, Unknown
  Description of Unknown: LeftRegion for integrase B5395 sequence
tcctggcgaatttacctatggtgtggaagtccgccatccgcagtttttcaccaaaggcgaagaagaacaaacgcttaatcgaggtttgcatcaacgcagcgttaatcgggtgatttttattagacacgtttaaatacaccatctaaagcgatacaatctaggggttggtacaagcccaactgctattggtgaggtgaacaatgaaacgtgcaatcagttacatccggttttcatctgagaagcaatccagaggcgactca

SEQ ID NO: 18395 - DNA, 260 bp, Unknown
  Description of Unknown: LeftRegion for integrase B5396 sequence
ctctacctgaaggatctaggcatttctaccggctcgaagaaacagaataaaagaatcccccaccgtgcgggaacacgatgagggacgcgcagcaggtattaccagtaccgtactgcagtataatctacccactctggaggtcgactatgtattatattataacatttcggccccctttcgcatagaaggaggctattcttatgcaaaaaaatacaactgttgaaaccacaacaaaggctgtcatttatgctcggtactcg

SEQ ID NO: 18396 - DNA, 260 bp, Unknown
  Description of Unknown: LeftRegion for integrase B5397 sequence
taattacattaattaaaaaaattcttaataataattaaaaaagacctcatgctggaacatgaggccgaaatgcaaaaaacaaataaagtccactacgacacaaatgtagaatacctacaaacgaaatgtttttttgctatttaattatagcatgaaaaatatctcgtatcaataatatttagagaggaagtgctataattatgagaaaaaaagtagcctatttaagaaaatcccgtgctgatatagaattggaaaataca

SEQ ID NO: 18397 - DNA, 260 bp, Unknown; identical to SEQ ID NO: 16700
  Description of Unknown: LeftRegion for integrase B5398 sequence

SEQ ID NO: 18398 - DNA, 260 bp, Unknown
  Description of Unknown: LeftRegion for integrase B5399 sequence
ttggcctttgtgatgacaaacgcgggaggatcgttaccgtttcaccagagggcgcggaagaatatgtacggcgcaaaccggattggagcgagttcgtggaagcttgtttcgagccaggaagtgaactgaaccgcaaactcaagcagatggtgctgaacatggcggaagaacattcgcatggcgtcaaggagggatagacaatgaatgcagtaatctacgccagatacagcagtgataaccagcgggaagaatcgattgag

SEQ ID NO: 18399 - DNA, 183 bp, Unknown
  Description of Unknown: LeftRegion for integrase B5400 sequence
ggaacaaacgcttaatcgcggtttacatcagcgcggcgttaatcgggtgattttcatcagacacgtttaaatacaccacctaaagcgatacaatcgcgctattagtttttatggtggtaaagaatgaaacgtgtaatcagctacatcagattcagttctgagcgacaagccaaaggcgactca

SEQ ID NO: 18400 - DNA, 260 bp, Unknown
  Description of Unknown: LeftRegion for integrase B5401 sequence
tggtttagaacaaccattctgacattagacagatattaaaatataccgtattttctatatgagaaaatacggtatatttttttgcacaggcattttcactcccccttgttcaaaaattacttttttgaaaagtttttaatgaacaatatattattacaagtttttttgtaataatatttcaaagaatggagggctataaaatgcctaatattttaaataataatgttgtctatgatgacaatactaaacagctgttatat

SEQ ID NO: 18401 - DNA, 260 bp, Unknown
  Description of Unknown: LeftRegion for integrase B5402 sequence
accttatgggtctaagtgaacttagaacccccggtatggtattgacagaggaagaacttctactgctcaacacctatcgcaattccagcacccagggacgcttccgtattattcaggtctgtatgaatgaaatggataccactggaaaaggggcaaccgtaaatgccggataattgacttgaatgagtggaggaagaaccatgtatgaagaaatcaaagaagtagctctgtatgtacgctattccagtgccaaccagaca

SEQ ID NO: 18402 - DNA, 180 bp, Unknown
  Description of Unknown: LeftRegion for integrase B5403 sequence
ggaacaaacgcttaatcgcggtttacatcagcgcggcgttaatcgggtgatttttattagacacgtttaaatacaccatctaaaacgatacaatctagggcatcagttttgaggtgaacaatgaaacgtgccatttcttacatcaggttttcatctgagaagcaatcccgaggtgattca

SEQ ID NO: 18403 - DNA, 260 bp, Unknown
  Description of Unknown: LeftRegion for integrase B5404 sequence
actcaaaagcaattggctgagatgataggagtttctcaagcctatatttcaaaaatagaaagtgatgaatttgttaatgttactttgattgaaataataaaattaagtaaagcactatcgattaatgaactggaggttgctaaatattttctaaataaatacaataattataaatatgaatttgggggagaaatagcataatgaaagtatgtatgtacttgcgcaaaagccgtcaagacgaagaattagaaaaaagagaa

SEQ ID NO: 18404 - DNA, 260 bp, Unknown
  Description of Unknown: LeftRegion for integrase B5405 sequence
tagactactttcaagataattatcccgaattattggatgattacatagatttttatgaaaacggtgtaacattaagcgacggagaaattacaccggaagatatggttgatattgtaagaataacatcaaattttaacaaagataattattttaaattaaattaaacatacaatttatagaaagagaaagttggtgaaaaaatgtatgggatgtatttaagaaaatctcgtagcgatgatccaaacgaagatataaatgat

SEQ ID NO: 18405 - DNA, 260 bp, Unknown
  Description of Unknown: LeftRegion for integrase B5406 sequence
atgggactataataaatgtcgtgccgtttcccatgctgcaggagtttaatttggttcttgctgaacaatttcaacagctcgcttagcttcacgcgctctcccctcactttctgtatttattataacacgtattcgtacgtatgtcaaggggtttcgaaaatattattattttttttgcttataaaaggagacatacatcagtgaacgcagtcatctatgcaagatattcctccgacaagcagacggagcaatctatcgaa

SEQ ID NO: 18406 - DNA, 260 bp, Unknown
  Description of Unknown: LeftRegion for integrase B5407 sequence
agactactttcaagataattatcccgaattattggatgattacatagatttttatgaaaacggtgtaacattaagcgacggggaaattacaccggaagatatggttgatattgtaagaataacatcaaattttaacaaagataattattttaaattaaattaaacatacaatttatagaaagagaaagttggtgaaaaaaatgtatgggatgtatttaagaaaatctcgtagcgatgatccaaacgaagatataaatgat

SEQ ID NO: 18407 - DNA, 260 bp, Unknown
  Description of Unknown: LeftRegion for integrase B5408 sequence
gaacaacaataacggttgtcgttaaaacattgaaatttcaagtgctgtacatattatgcaacaaatgcaacaacaaatatataaaactaaacaatcacatgtataaggcacacaggcgtatagcacacccgcataaatgcgcgtattaggcacttatacgcgcgaagcgttgccactgttgcagaaaggaatagaccaagatgaaagcagttatttacgcaagatactccgcaggctctgggcagaccgagctgtccatc

SEQ ID NO: 18408 - DNA, 260 bp, Unknown
  Description of Unknown: LeftRegion for integrase B5409 sequence
tttagaggctatgatagcgctaggcaatgcccaacgcacaggcaagtttacacctccagcagcccaataaaaaagagcccctatcaaggggctttatttatacctaaaaaccaaaaaccgccgagtgtatacatcggcggttatggttatcacatctttacttcttgataagattataccattgaaaggaacatcacacaatgacaaatacaaaagatttacaaacaggcgttatatacgctagatattcaagcgataaa

SEQ ID NO: 18409 - DNA, 260 bp, Unknown
  Description of Unknown: LeftRegion for integrase B5410 sequence
caagcaaaagaattgtaaaaaaatcaaccaaaactgtatcaaagaccgttagtcaaacagtgtacgtcacaagaacaggttcaaaatatcaccgatatggttgccagtatttaaggaaaagttgctattctatgagcaagtcaaacgcacgagcgcaaggatatactgcctgttcaaggtgttggtaagaggaaaataacatggtactgatgtatttacggaagtctcggtcagataacccatacgagactgtggaagaa

SEQ ID NO: 18410 - DNA, 260 bp, Unknown
  Description of Unknown: LeftRegion for integrase B5411 sequence
cctagaatataaatgtatgattaggttttttggaataaaaaataaaaccgccataatgctaccaacattatagcggctcgtaatacgatactaccaatatcgtattttaataggtcttttactatatacctactaccaaccttattatatagtaattgacctctttttgcaatttaatattgaatatggaggtcttttaaatgactaaaattataacagcaggtatttatgtccgtgtatcaacttctgaacaagcagaa

SEQ ID NO: 18411 - DNA, 260 bp, Unknown; identical to SEQ ID NO: 16741
  Description of Unknown: LeftRegion for integrase B5412 sequence

SEQ ID NO: 18412 - DNA, 260 bp, Unknown
  Description of Unknown: LeftRegion for integrase B5413 sequence
agactactttcaagataattatcccgaattattggatgattacatagatttttatgaaaatggtgtaacattaagtgacggggaaattacaccggaagatatggttgatattgtaagaataacatcaaattttaacaaagataattattttaaattgaattaaacatacaatttatagaaagagaaagttggtgaaaaaaatgtatgggatgtatttaagaaaatctcgtagcgatgatccaaacgaagatataaatgat

SEQ ID NO: 18413 - DNA, 260 bp, Unknown; identical to SEQ ID NO: 16959
  Description of Unknown: LeftRegion for integrase B5414 sequence

SEQ ID NO: 18414 - DNA, 260 bp, Unknown
  Description of Unknown: LeftRegion for integrase B5415 sequence
tgttttgctcctgatgatgtgacaacgttcacgcaatatcactacggaaaagcattggaaaaattctgggttaaatatattatttaaataaaacaaaatcgcccctagatggagcgacttcggtggttggattgaaaaacaatacaataatgatcaaatgtattgtaccatatccagccactttttgcaaggagacaattatggtactaatgtatttacgaaaatcccgtgctgacaatccgtatgagactgtagaagag

SEQ ID NO: 18415 - DNA, 202 bp, Unknown
  Description of Unknown: LeftRegion for integrase B5416 sequence
agaccgaaagtaacgtcggccaggggaagcggcgaggtaaatcaagggtcattgtattgtagctattcggcattgtagcattagccataacgtttataagttcatctttaaatgataatcaattgcatgggagtttatcaccgtgagaaccgtaataacatacttgagattctcatcagccatacaaggcgctgaaggtgca

SEQ ID NO: 18416 - DNA, 260 bp, Unknown
  Description of Unknown: LeftRegion for integrase B5417 sequence
gatgggactataataaatgtcgtgccgtttcccatgctgcaggagtttaatttggttcttgctgaacaatttcaacagctcgcttagcttcacgcgctctcccctcactttctgtatttattataacacgtatttgtacgtatgtcaaggggtttcgaaaatattattatttttttgcttataaaaggagacatacatcagtgaacgcagtcatctatgcaagatattcctccgacaagcagacggagcaatctatcgaa

SEQ ID NO: 18417 - DNA, 260 bp, Unknown; identical to SEQ ID NO: 18410
  Description of Unknown: LeftRegion for integrase B5418 sequence

SEQ ID NO: 18418 - DNA, 260 bp, Unknown; identical to SEQ ID NO: 18406
  Description of Unknown: LeftRegion for integrase B5419 sequence

SEQ ID NO: 18419 - DNA, 260 bp, Unknown
  Description of Unknown: LeftRegion for integrase B5420 sequence
tacactcattattatgagcgattagttgagaaagatgtttgggagaagtgccaaattcgcctgaaacattaccgaaaaaataagggataaaggcaaccgctccgtcaaatgaaggctggattaaattccggccttcattgactttaagaaaccagcaatccattaataaaaaaacagacaaaaaaataaggaaaaacaatatgccaagacagacaaaaaaatttcaagcaacagcaacaaaaggtatcatttgggctaga

SEQ ID NO: 18420 - DNA, 260 bp, Unknown
  Description of Unknown: LeftRegion for integrase B5421 sequence
caagcaaaagaattgtaaaaaaatcaaccaaaactgtatcaaagcccgttagtcaaacagtgtacgtcacaagaacaggttcaaaatatcaccgatatggttgccagtatttaaggaaaagctgctattctataagcaaatctgatgcaaaagcaagaggatatacagcttgttcaaggtgttggtaagaggaaaataacatggtactgatgtatttacggaagtctcggtcagataacccctacgagactgtggaagaa

SEQ ID NO: 18421 - DNA, 260 bp, Unknown
  Description of Unknown: LeftRegion for integrase B5422 sequence
acagctgcagggaaagtaatcgagtgtgccggtggtcttttggggctgccggtatttttgtgctatggaaaccgcataggggaaggtggattttggggcagtttttttggtcgttctgcgagttggcgcagacgggtgattccgatatattttatgtacggcaaccgtatgacgatgggcaaccgaaatgaggtgaagatttgagaaagaaatgttacatatatacccgtgtttctacggcggctcagacagagggatac

SEQ ID NO: 18422 - DNA, 260 bp, Unknown
  Description of Unknown: LeftRegion for integrase B5423 sequence
ttacaacgtccgcaattcagcgcaaatgtaaatgcggaaacaactgtgcgtatgcagttcttcaaaacctacaggtctacggaatgattcgagagattcggcaattcacatacgaatggacagaaaaagccctcctgctgggcgcagaagggcgtaacgggtaaacagatatgtcgatagatattaaatggcaggtgccaatggcaaaaccggaggttagcgaactggccgtcgtatatgcccggtattcaagccacagt

SEQ ID NO: 18423 - DNA, 260 bp, Unknown; identical to SEQ ID NO: 18410
  Description of Unknown: LeftRegion for integrase B5424 sequence

SEQ ID NO: 18424 - DNA, 202 bp, Unknown
  Description of Unknown: LeftRegion for integrase B5425 sequence
agaccgaaagtaacgtcggccaggggaagcggcgaggtaaatcaagggtcattgtattgtagctattcggcattgtagcattagccataacgtttataagttcatctttaaatgataatcaattgcatgggagtttatcaccgtgagaaccgtaataacatacttgagattctcatcagccacacaaggtgctgaaggtgct

SEQ ID NO: 18425 - DNA, 260 bp, Unknown; identical to SEQ ID NO: 18410
  Description of Unknown: LeftRegion for integrase B5426 sequence

SEQ ID NO: 18426 - DNA, 260 bp, Unknown; identical to SEQ ID NO: 18406
  Description of Unknown: LeftRegion for integrase B5427 sequence

SEQ ID NO: 18427 - DNA, 202 bp, Unknown
  Description of Unknown: LeftRegion for integrase B5428 sequence
agaccgaaagtaacgtcggccaggggaagcggcgaggtaaatcaagggtcattgtattgtagctattcggcattgtagcattagccataacgtttataagttcatctttaaatgataatcaattgcatgggagtttatcaccatgagaagtgtaataacatacttgagattctcatcagccacacaaggtgctgaaggtgct

SEQ ID NO: 18428 - DNA, 260 bp, Unknown
  Description of Unknown: LeftRegion for integrase B5429 sequence
tcaataacctgatgtaccgaggtatagagcagacccgccacaacagcaccatgaatgcagaccgaaagtaacgtcggccaggggaagcggcgaggtaaatcaagggtcattgtattgtagctattcggcattgtagcattagccataacggttataagcttatctttaaatgagaatcaattgcatgggagtttatcaccatgagaaccgcaataacataccttcggtacagttcagctatacaaggcgctgaaggtgca

SEQ ID NO: 18429 - DNA, 260 bp, Unknown
  Description of Unknown: LeftRegion for integrase B5430 sequence
gacaggtatttgaacagtttaaacagtttattaacaatcagtgaaaaagcaatcattctcgtgaggtcacgaaaatgaaaaaaagccgccccacggcggcaaccgtgaagcggcaagagggaactattgctataatagtccaaaccagaacggtactattatagcacattctctcaaaaaatgcaaggaggaagtgcaaaatgcaagcagcagcatatgcaagatacagcacagagcatcagacagagagcagtattgct

SEQ ID NO: 18430 - DNA, 260 bp, Unknown
  Description of Unknown: LeftRegion for integrase B5431 sequence
acacagaaagaattagcgaatatgataggggttagtcaagcttatataagcaaactagaaaatgataagtttgtaaatataactcttattgagattataaaaattagtaaagcgttacaattaaaagagttagaagtatgtaaatattttttagagaaacatcatgatattcatatagagtttgagggggaattagcataatgaaaacagcgatatatcttagaaaatcaagacaagatgaggaattagaaaaaagagaa

SEQ ID NO: 18431 - DNA, 109 bp, Unknown
  Description of Unknown: LeftRegion for integrase B5432 sequence
ttataagttcatctttaaatgataatcaattgcatgggagtttatcaccatgaggagcgtaattacatacttgagattctcatcagccatacaaggcgctgaaggtgca

SEQ ID NO: 18432 - DNA, 260 bp, Unknown
  Description of Unknown: LeftRegion for integrase B5433 sequence
cttggaaaattgcatagtcataggggttggaacaagcccaactacacctgatattgtcctgtttttaacaggtctcttagaaaaccgaatagacttcattcaagggtcattgtattgtagctattcggcattgtagcattagccataacggttataagcttatctttaaatgataatcaattgcatgagagtttatcaccatgagaagcgtaattacataccttcggtacagttcagccatacaaggcgctgaaggtgca

SEQ ID NO: 18433 - DNA, 260 bp, Unknown
  Description of Unknown: LeftRegion for integrase B5434 sequence
agactactttcaagataattatcccgaattattggatgattacatagatttttatgaaaacggtgtaacattaagcgacggggaaattacaccggaagatatggttgatattgtaagaataacatcaaattttaacaaagataattattttaaattaaattaaacatacaatttatagaaagagaaagttggtgaaaaaaatgtatgggatgtatttaagaaaatctcgtagcgatgatccgaacgaagatataaatgat

SEQ ID NO: 18434 - DNA, 260 bp, Unknown
  Description of Unknown: LeftRegion for integrase B5435 sequence
ttagcttaaaacttgcaagttggttgcaaccaattttttgcacaataaaaagccccatccataccgtcatatggatgaggctagtggtcacgaagctttgcggagcttgtggccggttgtaatctattaccctgtgaggctgattactattctattataccaaatcagcctccattttacccagttaggaggcttttcttatgcctaaaaaagaaaccacagcaccagtcaaggccgttttatatgcccgctattcttcg

SEQ ID NO: 18435 - DNA, 260 bp, Unknown
  Description of Unknown: LeftRegion for integrase B5436 sequence
tgcaatcgttccaaatgacttgaattcatttacagaatatcaatacaataacaaattcgaaaaagtctggattaaatataacatctaaataaaacaaaatcgcccctaatggagcgacttcggtggttggattgaaaaacaatacaataatggtcaaatgtattgtaccatatccagccactttttgcaaggagacaattatggtactaatgtatttacgaaaatcaaggtctgataatccgtacgaaacagtggaagag

SEQ ID NO: 18436 - DNA, 202 bp, Unknown
  Description of Unknown: LeftRegion for integrase B5437 sequence
agaccgaaagtaacgtcggccaggggaagcggcgaggtaaatcaagggtcattgtattgtagctattcggcattgtagcattagccataacgtttataagttcatctttaaatgataatcaattgcatgagagtttatcaccatgagaagtgtaataacatacttgagattctcatcagccatacaaggcgctgaaggtgca

SEQ ID NO: 18437 - DNA, 203 bp, Unknown
  Description of Unknown: LeftRegion for integrase B5438 sequence
cagaccgaaagtaacgtcggccaggggaagcggcgaggtaaatcaagggtcattgtattgtagctattcggcattgtagcattagccataacgtttataagttcatctttaaatgataatcaattgcatgagagtttatcaccatgagaagtgtaataacatacttgagattctcatcagccatacaaggcgctgaaggtgca

SEQ ID NO: 18438 - DNA, 218 bp, Unknown
  Description of Unknown: LeftRegion for integrase B5439 sequence
gtatatataaacactttaaacactttatatatataactaaataaacatacatataagcgcgtatacacctatacacaagttaaaaaacgcgcatataacacatatacgcgtacgtgtgtttatttcgtttaaagtgttgcagaaaggaatagaccaagatgagagcagttatttacgcaagatactccgcaggctccgggcagaccgagctgtccatc

SEQ ID NO: 18439 - DNA, 260 bp, Unknown; identical to SEQ ID NO: 18409
  Description of Unknown: LeftRegion for integrase B5440 sequence

SEQ ID NO: 18440 - DNA, 260 bp, Unknown; identical to SEQ ID NO: 18410
  Description of Unknown: LeftRegion for integrase B5441 sequence

SEQ ID NO: 18441 - DNA, 225 bp, Unknown
  Description of Unknown: LeftRegion for integrase B5442 sequence
cgccacaacagcaccatgaatgcagaccgaaagtaacgtcggccaggggaagcggcgaggtaaatcaagggtcattgtattgtagctattcggcattgtagcattagccataacggttataagcttatctttaaatgagaatcaattgcatgggagtttatcaccatgaggagcgtaattacataccttcggtacagttcagccatacaaggcgctgaaggtgca

SEQ ID NO: 18442 - DNA, 260 bp, Unknown
  Description of Unknown: LeftRegion for integrase B5443 sequence
cctatttttacgaattgggtatcaaaatataataaaaaatcgcccttcggtgttggtagcaccaaaggacgataatcattacacagggtgcaatgatactaacacttagcaagtaatattgtatcatacccttgtaaatttttcaatataatttacaagggatttttgcacccttttttagataagagaggagcaagaagatgaaaaatgcaatgtatttgagaaagtcaaggcaagatgaaggtggacttgaagaaaca

SEQ ID NO: 18443 - DNA, 260 bp, Unknown
  Description of Unknown: LeftRegion for integrase B5444 sequence
acttactgggtcttagtgaagtcagaaaaccagaagtcttagttttgtcagaaaaagagaaaatcctaattgacgcataccgtactgctaatgacatgggacaattaaacataatctatgtctgcatggatgaaatgaaaaaagcaaaaggggaaggcgtacttgtagggtaattgatttcatagaatggaggaagaaccatgtatgaggatataaaaacagcctgcctatacgttagattctcaagccataaccagact

SEQ ID NO: 18444 - DNA, 260 bp, Unknown
  Description of Unknown: LeftRegion for integrase B5445 sequence
ttcatttttcatctgcttgaaatcgttcgaatctgcttgaaacaataaaaagcctcatccatattggcgtatggatgaggctagtggtcacgaagctttgcagagcttgtggccggttgtaatctattaccctgtgaggctgattactattctattataccaaatcagcctccattttacccagttaggaggcttttcttatgcctaaaaaagaaaccacagcaccagtcaaggccgttttatatgcccgctattcttcg

SEQ ID NO: 18445 - DNA, 260 bp, Unknown
  Description of Unknown: LeftRegion for integrase B5446 sequence
taccacaatataatgtttggaacgaagaagatagctacagcgactatgccgaagaaactgtgtatgtaacaaatactggttctaagtatcataggtacgggtgtcaatatttaagccaaagctgcattgcaatagatctaagtgacgcagaagcgcaaggatatactgcctgttcaaggtgttggtaagaggaaaataacatggtactgatgtatttacggaagtctcgttcagataacccatacgagactgtggaagaa

SEQ ID NO: 18446 - DNA, 260 bp, Unknown
  Description of Unknown: LeftRegion for integrase B5447 sequence
gcgctaggcaatgcccaacgcataggcaagtttacaccgccagcagcccaataaaaaagagcccctatcaaggggctctatttctacctaaaattaaataaccgccgatgtatacgttcggcggttatttaactgactatgtcaaattttctgtaaagaatatactataaatattatactacaaaaaggaatattacacaatgacaaatacaaaagacttacaaacaggcgtgatatacgccagatattcaagcgataaa

SEQ ID NO: 18447 - DNA, 260 bp, Unknown
  Description of Unknown: LeftRegion for integrase B5448 sequence
tgtttcgcacctgatgatgtgacaacgttcacgcaatatcactacggcaaagcattagaaaagttctggattaaatataacatctaaataaaacaaaatcgcccctaacggagcgattttgagtggttggattgaaaaacaatacaataatggtcaaatgtattgtaccatatccagccactttttgcaaggagacaattatggtactaatgtatttacgaaaatcccgtgctgacaatccgtatgagactgtagaagag

SEQ ID NO: 18448 - DNA, 260 bp, Unknown
  Description of Unknown: LeftRegion for integrase B5449 sequence
ctgcaagttatcggcaagtgagatctcaccattttcgtggagccacgaaaaatggtgcaaacgtggttatcaaaaacaaaagagcaatcatattatgggtaaaaatggcacaaaaaaagacccgaagttcagccccgtccagaacgggcctatcctgagtctcttacccatagttattacaccagaaaggaatacgaaaaatggaaaaacaaacggccgtaatatatgccaggtactcttctgatcggcagcgtgaggag

SEQ ID NO: 18449 - DNA, 260 bp, Unknown; identical to SEQ ID NO: 13549
  Description of Unknown: LeftRegion for integrase B5450 sequence

SEQ ID NO: 18450 - DNA, 260 bp, Unknown
  Description of Unknown: LeftRegion for integrase B5451 sequence
aaaagtaaataattaaaatatatatttttttatattattaacatattatacaaattatagtgtattatatataatataagaaaatacaatctatttgtattaaaatggagtttcctaaaagttcagattttaatttttatccgaatcactctgattgccgtcagggtgattctttaatttaaaataaaggagagatttacatgaatacagtaatatacttaagaaaaagtagagctgacgaagaagcagaaaagcaaggg

SEQ ID NO: 18451 - DNA, 260 bp, Unknown; identical to SEQ ID NO: 18406
  Description of Unknown: LeftRegion for integrase B5452 sequence

SEQ ID NO: 18452 - DNA, 260 bp, Unknown; identical to SEQ ID NO: 16092
  Description of Unknown: LeftRegion for integrase B5453 sequence

SEQ ID NO: 18453 - DNA, 260 bp, Unknown
  Description of Unknown: LeftRegion for integrase B5454 sequence
ccctatttttacgaattgggtatcaaaatataataaaaaaaatcgccctctagtattggcgtactagagagcgacaccattacacagggtgcaatgatacatagaaatgcaagtaatattgtatcatacccttgtaaatttttcaatataatttacaagggatttttgcacccttttttagataagagaggagcaagaagatgaaaaatgcaatgtatttgagaaagtcaaggcaagatgaaggtggacttgaagaaaca

SEQ ID NO: 18454 - DNA, 260 bp, Unknown
  Description of Unknown: LeftRegion for integrase B5455 sequence
caaaggcattagcgccagagattaggaagttctatgatagtgacgagggcaaagcgtactttgaaaaatggcttaccaaacaccctgaatatgatgaacggacacctgatgcaactgcatcgggcgtctgagttttcgcacattcgacagcaaataaaggaggattataattatgtatagaaagaattggaggctcacagatgaatgttgtaatatacgcccgcttttccagtcacagccagacggagcagtccattgag

SEQ ID NO: 18455 - DNA, 260 bp, Unknown
  Description of Unknown: LeftRegion for integrase B5456 sequence
cacagcataaaataaactaaaaacggaggtaatcataatgtcggaatacacggatataagaaacaatacatatcaaatacatcagcgttcgcttgtgaatacttctcaagcggagcaacaaaagcaagaaattatagaagaattgtatcgtatctttgataagaaataattttattaaaatctgaaaggaggaagcaaagatggcgattgcgttatacgcaagaaaatcaatagaacgtgaaaacagtatttcatgcgaa

SEQ ID NO: 18456 - DNA, 260 bp, Unknown
  Description of Unknown: LeftRegion for integrase B5457 sequence
tatacacaaagcaggcaactatttcttaatagttatgcaaaatatactaacaaaacaaaaagctccggcgcaaaccggagcaaagatatactataccgcaaggtgcaatataatataaccgtaagcaagtcatattatatcacaatgcaccttacaatgtatagggtgtattttttatactcataaaggagcgtgatattatgtactgtatctatcttagaaaatctcgtgcggatatggaagcagaacgacaagggatt

SEQ ID NO: 18457 - DNA, 260 bp, Unknown
  Description of Unknown: LeftRegion for integrase B5458 sequence
attacagtaacttataatagtggcgagagtactgcaggtggattatattctaaagaaacagatagtgacggatatgtttcttggtcttggaaagttggaacaaaaactgaatcaggtacatatgacattgaaatctctaattattaccaaacaaaatattttgaatttactgtaaattaaggaataaaaaaggtgatattatgaacgctgtaatatatgctaggttctctagccataaccaacaagagcaaagcattgaa

SEQ ID NO: 18458 - DNA, 260 bp, Unknown
  Description of Unknown: LeftRegion for integrase B5459 sequence
ttactgggtcttagtgaagtcagaaaaccagaagtcttagttttgtcagaaaaagagaaaatcctcattgacgcataccgtactgctaatgacatgggacaattaaacataatctatgtctgcatggatgaaatgaaaaaaaagcaaaaggggaaggcgtacttgtagggtaattgatttcatagaatggaggaagaaccatgtatgaggatataaaaacagcctgcctatacgttagattctcaagccataaccaaact

SEQ ID NO: 18459 - DNA, 260 bp, Unknown
  Description of Unknown: LeftRegion for integrase B5460 sequence
gggcaacggtaattgttgtcgctaaaacgttgaaatttaaaggtttatgcgtattatgcaacaaatacaacaataaatatataaaactaaacaaccacatgtataaggcgtacaggcgtatagcaaacccgcataaatgcacgtattaggcgcttatacgcgcgaagcgttgccactgttgcagaaaggaatagaccaagatgaaagcagttatttacgcaagatactccgcaggctctgggcagaccgagctgtccatc

SEQ ID NO: 18460 - DNA, 260 bp, Unknown; identical to SEQ ID NO: 15792
  Description of Unknown: LeftRegion for integrase B5461 sequence

SEQ ID NO: 18461 - DNA, 260 bp, Unknown
  Description of Unknown: LeftRegion for integrase B5462 sequence
cttacaacgtccgcaattcagcgcaaatgtaaatgcggaaacaactgtgcgtatgcagttcttcaaagcctacaggtctacggaatgattcgagagattcggcaattcacatacgaatggacagaaaaagccctcctgctgggcgcagaagggcgtaacgggtaacagatatgtcgatagatattaaatggcaagtgccaatggcaaagccggaagtcagcgaactggccgtcgtatatgcccggtattcaagccacagt

SEQ ID NO: 18462 - DNA, 260 bp, Unknown
  Description of Unknown: LeftRegion for integrase B5463 sequence
tttatgacgaaacgcagcaatatataagatccgacaatagcagagatagatatgattatgaaaatctaaaactcacgattgagcagaatgtagattcagaagaagcttaaacgaaaagatccccacgttaacaagcaccaccaagaacgtgaggatcaggagaaaaaccttccgcaaacgaaaggcagtgttattctatcatgacgcactctaacgatgggttatttgccctatatcttcgtagatcacgcgctgatatt

SEQ ID NO: 18463 - DNA, 260 bp, Unknown; identical to SEQ ID NO: 15631
  Description of Unknown: LeftRegion for integrase B5464 sequence

SEQ ID NO: 18464 - DNA, 260 bp, Unknown; identical to SEQ ID NO: 15325
  Description of Unknown: LeftRegion for integrase B5465 sequence

SEQ ID NO: 18465 - DNA, 260 bp, Unknown
  Description of Unknown: LeftRegion for integrase B5466 sequence
caatagcatattcatccataaaatgcaagagccgcccggtgttaccagcaccgaacggcctcacacagattatctcttaccagaacataccggaaagatacaatcagatcaatcacctgcattatatcattttcggtacgtcctggcaaggggcgtattttttgtacctaaaaatcatatagattgacacaggagatgatatgatgaatgaaaatgttttgaaaactgctgccctctacatccgggtatccacggacaag

SEQ ID NO: 18466 - DNA, 260 bp, Unknown
  Description of Unknown: LeftRegion for integrase B5467 sequence
tggggagattgattctgtagtagcgacaattatattcggcgtcttattcattgcggttttaggttttctaaaatagtaaccgtttttcagccattaaacgcaattttgagagtttttgtatctaatttagccttttaagcataaaattggagccttaattacaaatttaggctcattttcgttagataagaggtgatactttgagttcggttgataaaatcgccgttatttacgcgcgttattcgtctcacggccagacc

SEQ ID NO: 18467 - DNA, 260 bp, Unknown
  Description of Unknown: LeftRegion for integrase B5468 sequence
atgaacaaaagcctttttataagaaattaaaaattaaagtaaaaaataacattatataaataaaaaatatataaatatagaaaaaaaggtgaacaacttgaacaagttgaacaaaatgtcaaatgagcctataaacaaagggtttttaagtgttcaacttatgttctacttgttcatacttgggaaagaagggataaaatatggcatacgcaatatatttgcgaaaatcacgagccgacgccgaaatggaagcattaggc

SEQ ID NO: 18468 - DNA, 260 bp, Unknown
  Description of Unknown: LeftRegion for integrase B5469 sequence
tgaaaaaatgcattttcgtgtaatcagtagacatccgcagtattccatagacaccgcaaaccgcatatttgaagagcaaagaaaagatctgtacaatatctttaaaaaatatgcatgatttttaaaccggaaagcggtattcatggtataatcaatgtaatggagagtgactgtttacacatagtaaggaggtatgtgctatgtgtccaatcgatgctttatacgcaagacagtcactggataaaaaagacagtatctcc

SEQ ID NO: 18469 - DNA, 260 bp, Unknown
  Description of Unknown: LeftRegion for integrase B5470 sequence
caatagcatattcagccataaaatgcaagagccgcccggtgttaccagcaccgaacggcctcactcagattatctcttaccagaatataccggaaagatacaatcaatcaaatcacctgcattatatcattttcggtacgttctggcaaggggcgtattttttgtacctaaaaatcatatagattgacacaggagatgatatgatgcatgaaaatgttttgaaaactgctgccctctacatccgggtatccacggacaag

SEQ ID NO: 18470 - DNA, 260 bp, Unknown
  Description of Unknown: LeftRegion for integrase B5471 sequence
tctcgcagatgcaggacgccggccgcgagatagtggacgtgaagttcgactgcgagtacggcatcggcgtgacgaagacgggcatcgcctaccgcgtgatggtcatctacaagtaacggatgaagccccgcgcatacgggcggcaaccctgcgcgaggctctgcaaaacaccgaccccgaagggagggtgagcccattatatggcaagcgcggttatctacgcacggtattcctcgtcaggacagcgcgaggagtcgata

SEQ ID NO: 18471 - DNA, 260 bp, Unknown
  Description of Unknown: LeftRegion for integrase B5472 sequence
ccgatgaccggggaactgtaacaatccctattcaggaatctattcaactttctgaggaagaacgtattctgatttccgcatttaggagtgcttctatagaaggacgcatgagaattatccaagtctgcatgaatgaaaaggattcaaaaggggaaaatatcattgcaggataataagcatcgaagaatggaggaagaaccatgtacgaagagattaagactgcttgtctatatctacgatattcaagtagcaaccaaact

SEQ ID NO: 18472 - DNA, 260 bp, Unknown
  Description of Unknown: LeftRegion for integrase B5473 sequence
ccaagccacagccaccaaagacgccgccagctccacctaaaccccaacaaaaataatgtatatacaagaaatcccgcatcatgcaccaccatgctgcgggatggccggcagttaccggctgtgtaaacctgtaaagggctgatttacaatattattatatcacaatcagtcctgttttataagaaaggaatgatgatataatgaccaaaaatgcagtaatttatgcccgcttcagcagtgacaaacaaagagaagaatca

SEQ ID NO: 18473 - DNA, 260 bp, Unknown
  Description of Unknown: LeftRegion for integrase B5474 sequence
aggcatcctaagaaagctactgggtgtcaaggcaaagtgaaagcaaaataaaagcccctgccatatcgcgaaatatgacaggggaatgcagctaggcattaccagtaccgggctgcggttataatccactcttgtaggaggcagattatgtgtatattatatcataaagcctcccaatgccaaagaaggaggctctttttatgcctaaaacagaagaaaaacaggccgtaaaggccgtcatatatgccagatattcatcc

SEQ ID NO: 18474 - DNA, 260 bp, Unknown
  Description of Unknown: LeftRegion for integrase B5475 sequence
tgaaaaaatgcattttcgtgtaatcagcagacatccgcagtattccatagacaccgcaaatcgcatatttgaagaacaaagaaaagatctgtacaatatctttaaaaaatatgcatgatttttaaaccggaaagcggtattcatggtataatcaatgtaatggagagtgactgtttacacatagtaaggaggtatgtgctatgtgtccaatcgatgctttatacgcaagacagtcactggataaaaaagatagtatctcc

SEQ ID NO: 18475 - DNA, 260 bp, Unknown; identical to SEQ ID NO: 17370
  Description of Unknown: LeftRegion for integrase B5476 sequence

SEQ ID NO: 18476 - DNA, 260 bp, Unknown
  Description of Unknown: LeftRegion for integrase B5477 sequence
cttacgacctctgtgatccaacgtaactgcaagtgcggaatcgaccgcgcgtactcgatactacgcaatcttcaggtctacgggcttattcatgaggctggaaaagacacctatgaatggacagaaaaagccctcctgctgggcgcagaagggcgtaacgggtaacagatatgtcgatagatattaaatggcaagtgccaatggcaaagccggaggtcagcgaactggccgtcgtatatgcccggtattcaagccacagt

SEQ ID NO: 18477 - DNA, 260 bp, Unknown
  Description of Unknown: LeftRegion for integrase B5478 sequence
tttctcatatctacgatatgatttttggttctatttaatttttttataaaaaatcccgcatcctgcaaaccaggatacgggacgcgccggcggtatcaccagtaccgtatcggcatttgtaaataaccaagtaataggctgatttacggtatcattatatcatgaatcggccccatttgcctacgaaaggactgatttttatgtcaacaaatgctgttatctacgcacgtttttcctctgacaaacaaagagaagaatcc

SEQ ID NO: 18478 - DNA, 260 bp, Unknown
  Description of Unknown: LeftRegion for integrase B5479 sequence
ttacaacgtccgcaattcagcgcaaatgtaaatgcggaaacaactgtgcgtatgcagttcttcaaaacctacaggtctacggaatgattcgagagattcggcaattcacatacgaatggacagaaaaagccctcctgctgggcgcagaagggcgtaacgggtaaacagatatgtcgatagatattaaatggcaagtgccaatggcaaagccagaggtcagcgaactggccgtcgtatatgcccggtattcaagccacagt

SEQ ID NO: 18479 - DNA, 260 bp, Unknown; identical to SEQ ID NO: 15106
  Description of Unknown: LeftRegion for integrase B5480 sequence

SEQ ID NO: 18480 - DNA, 260 bp, Unknown
  Description of Unknown: LeftRegion for integrase B5481 sequence
tgttctgtttatccgattcaccttaccccaaagtagagatttccctaacggaaaaagagaaaatccttattgacgcataccgtgctgctaatgacatggggcagttgaacataatctatgtctgcctggatgaaatgaaaaaagcaaaaggggacaacgaaagtgccgtgtgattgattttgtagagtggaggaagaaccatgtatgaggatataaaaacagcctgcctatacgttagattctcaagccataaccagact

SEQ ID NO: 18481 - DNA, 260 bp, Unknown
  Description of Unknown: LeftRegion for integrase B5482 sequence
gaatgggcgcactcggaatatgaacaagcaaccagaacttacaaccttatgcagcaagaaaagttcaagttcattatcaatgtgaacgcctaccgccaagcgcaggcaaataatagctttccgaattttgaaaccgaatctgctgaagaatttggagaacggttaaaatcaaaatggaaagaactgaaaagaggtgtaaaatgacaatggaatccaaacgcgccgttatttacgcccggtattcgagtagccgccagcga

SEQ ID NO: 18482 - DNA, 260 bp, Unknown
  Description of Unknown: LeftRegion for integrase B5483 sequence
tgcttttctccggcaatcttgactcccacatatacgagagcagcgaatcggtatgcagcaaaacgaagcctatttgaaagaccataacgacgacaaagaataagccaacccagccgcatccgtttaagactgcggctggtttgctgcgtgcgtaggacactttgcattaactgcaaaattgaaatttcggaggtatcggcatgaacggtgaaatcaaaaatgtggtgctctatctccgctattccagcgccgctcagaac

SEQ ID NO: 18483 - DNA, 260 bp, Unknown
  Description of Unknown: LeftRegion for integrase B5484 sequence
aaactttgataaatctgttgagtttgtcgattcaccatacgcggagcagtataggcagtctcttttaatccagaaacagctctcaaaatcgggataaaaaatgcctcccacggtactcgcaataccgtgggaggcgggaaggtgtagaccacagagcggcggctacccttctattttatcggaataggaggattttgtcaatgcgcagggctgcaatatatgcacggtactcaagcgacctccaacgcagcgaatccatc

SEQ ID NO: 18484 - DNA, 260 bp, Unknown; identical to SEQ ID NO: 16053
  Description of Unknown: LeftRegion for integrase B5485 sequence

SEQ ID NO: 18485 - DNA, 260 bp, Unknown; identical to SEQ ID NO: 18472
  Description of Unknown: LeftRegion for integrase B5486 sequence

SEQ ID NO: 18486 - DNA, 260 bp, Unknown; identical to SEQ ID NO: 16118
  Description of Unknown: LeftRegion for integrase B5487 sequence

SEQ ID NO: 18487 - DNA, 260 bp, Unknown
  Description of Unknown: LeftRegion for integrase B5488 sequence
attaaatgctgcgttaaacgacataaattcaaagattgaaaagggctatgtatataagcccagaggaaagagtagaaaataaaaaatccccgcccggcgctggaacaccgaacggggaagaagctgtgatacaatcacaaccttagacaagtttattgtatcatagctccctgaaaatgtcaaggagtgataacaaatatatgaaaaccgccgtaatatacgcccgatattcatcggacaagcagacagagcagtccatt

SEQ ID NO: 18488 - DNA, 260 bp, Unknown
  Description of Unknown: LeftRegion for integrase B5489 sequence
tacgccagccctccctctgccgtggtcatcattcgcccttctcctgtaataacaatgtttccgcattgttgcatttgtgtcgcctcaggcaagggcgcgatggcgggtatatgaaagaactattacccgggtaatagtatcattttacaaaagaaataaccttgttataatcaaccacttagcagtatcaggaggttgaaatgacactggcattcagttacgtaaggttcagtaccaagcaccaagcgtcaggtacttcg

SEQ ID NO: 18489 - DNA, 260 bp, Unknown
  Description of Unknown: LeftRegion for integrase B5490 sequence
gcctatatcggatcaaaagcaattacagtcattggattgacgcctgttttctccgacgaactggaaaagcaaaaaagcagagaaaagattgaatacggactattcaacatttttgagaagtattcgcacatttgagcatacggagccgccgcagtataatcatgctgttggtggctctttctacatagaggggagagcttatgttaaaatatgatgcgatatacgcgcgacagtctgttgatcgcatggacagcatttcc

SEQ ID NO: 18490 - DNA, 260 bp, Unknown; identical to SEQ ID NO: 16187
  Description of Unknown: LeftRegion for integrase B5491 sequence

SEQ ID NO: 18491 - DNA, 260 bp, Unknown; identical to SEQ ID NO: 15411
  Description of Unknown: LeftRegion for integrase B5492 sequence

SEQ ID NO: 18492 - DNA, 260 bp, Unknown
  Description of Unknown: LeftRegion for integrase B5493 sequence
tacacttaagttaaataagcaatatagataaaaaacagcaaaaccgcccggtatccgcacaccgaacggcttcacatagatttcctgtataagccgaagctttgtgatacagtacatcacggcagatatattgtatcacaaaaaaccggcaccgtacaggtgtattttttatacccttttttaagattggagtgatacatatggataaatacgcaatataccttcgaaaatcaagagctgatttggaagctgaaaagcta

SEQ ID NO: 18493 - DNA, 260 bp, Unknown
  Description of Unknown: LeftRegion for integrase B5494 sequence
tgttactaagtaagcttaagtttttatctttagaaactaaatctttacacttaggtaatgataggtttatttccttaactaatcttcctaatatgtttatctatgatatgtctatcatttaaatatatttgatatattctatagttttaaaaactaaaatatagtattagttattttatatcataaaggaggtatacataatgcgttgtgctatatatttgagaaaatctagagctgatgaagaagccgaaaataaaggc

SEQ ID NO: 18494 - DNA, 260 bp, Unknown
  Description of Unknown: LeftRegion for integrase B5495 sequence
aacatatgtgttaaataaaagcacgatgaaattccacttgccgagctgctcgtcctgctccaaaatcaaggccgagaataaaggcagctacaccggcagccgtgacgatctcatcggtcagggttattcgccctgcggcaactgccatccgtaataaattcgccccggataagctccggggcttgtcataggtgataatcatggacaatgtcgtcatatatgcccgctactcctccgacaagcagacggagcagagcata

SEQ ID NO: 18495 - DNA, 260 bp, Unknown; identical to SEQ ID NO: 16089
  Description of Unknown: LeftRegion for integrase B5496 sequence

SEQ ID NO: 18496 - DNA, 260 bp, Unknown; identical to SEQ ID NO: 13129
  Description of Unknown: LeftRegion for integrase B5497 sequence

SEQ ID NO: 18497 - DNA, 260 bp, Unknown
  Description of Unknown: LeftRegion for integrase B5498 sequence
taaattcgaaaaacaagctgattattttgcactcaagctaagtaatatagaatttgatgaaatagaaatgtatcaaatgacttataaacaaatagctagttgtattgaagttcccgcaagagctttaaaacaactagttaatttataatatattttttaaattataatcaaacatatattcggttttcaataaggaggttttgaaaatagaaaaaatagcaatatatgctcgtagaagcgaggaaaaagaaactggtgaa

SEQ ID NO: 18498 - DNA, 260 bp, Unknown
  Description of Unknown: LeftRegion for integrase B5499 sequence
cacacaatattattcttgaattcgatccagaagttgctccacatattgtatctttctacgataaatatggcaactaaataaaacaaaaaaaccgctctgggctcctacccccaaagcggcgtgcaaatcccatactgccaaatataagaacttgcacggatattataccacaatatccgtctgtcgaaaagaggaacattatgaataattctgtcctgtccgccatgtacttgcgcaaatcccgtgcggatgacccacat

SEQ ID NO: 18499 - DNA, 260 bp, Unknown
  Description of Unknown: LeftRegion for integrase B5500 sequence
taatgctgttgctaacgcattgaacgctaaagaaggagagaaagtatgcagttttcaacaacgccaaccctggaaggacaaccgattaccgagtactgcggcgtggtgaccggcgaagcgattctgggcgccaatatcttccgggatatgtttccattattgacataatgatataattgttctctgaccaaggaggacatatggaactcgcttttagttacgcccgattcagtacaaaatctcagtccacagggaccagt

SEQ ID NO: 18500 - DNA, 260 bp, Unknown
  Description of Unknown: LeftRegion for integrase B5501 sequence
tgaaaaaatgcattttcgtgtaatcagcagacatccgcagtattccatagacaccgcaaatcgcatatttgaagaacaaagaaaagatctgtacaatatctttaaaaaatatgcatgatttttaaaccggaaagcggtattcatggtataatcaatgtaatggagagtgactgtttacacatagtaaggaggtatgtgctatgtgtccaattgatgctttatacgcaagacagtcactggataaaaaagatagtatctcc

SEQ ID NO: 18501 - DNA, 260 bp, Unknown
  Description of Unknown: LeftRegion for integrase B5502 sequence
tgaaaaaatgcattttcgtgtaatcagcagacatccgcagtattccatagacaccgcaaaccgcatatttgaagaacaaagaaaagatctgtacaatatctttaaaaaatatgcatgatttttaaaccggaaagcggtattcatggtataatcaatgtaatggagagtgactgtttacacatagtaaggaggtatgtgctatgtgtccaatcgatgctttatacgcaagacagtcactggataaaaaagacagtatctcc

SEQ ID NO: 18502 - DNA, 260 bp, Unknown; identical to SEQ ID NO: 15792
  Description of Unknown: LeftRegion for integrase B5503 sequence

SEQ ID NO: 18503 - DNA, 260 bp, Unknown
  Description of Unknown: LeftRegion for integrase B5504 sequence
atctatgtctgaacctgtctctgaattatcttctttatctgatattgaggaagatgattcggaagacgaataaaatcaaaataaaaagccgccctttgtgctaccaacacagagagcggcgtgcaaatcccatactgccaaatataagaacttgcacggatattataccacaatatccgtctgtcgaaaagaggaacattatgaataattctgtcctgtccgccatgtacttgcgcaaatcccgtgcggatgacccacat

SEQ ID NO: 18504 - DNA, 260 bp, Unknown
  Description of Unknown: LeftRegion for integrase B5505 sequence
ggcgtaggcaaaaagcagaaaacggtctggaaagatttctttgtgataaactacacggcagcaggtagcagcgagccctccgttctgtcgtttgaaatggtcgggcctccggtcggtttcgctccgttcctctcggagttgaagcagcgggctgggatcccggacgccccgaagtcagagacggggccgatcgttctgtaatggctcagaaaaaagcgagggccccggaggttctgatcccggcggtgatatatgcccgg

SEQ ID NO: 18505 - DNA, 260 bp, Unknown
  Description of Unknown: LeftRegion for integrase B5506 sequence
atgtttgaaatggtgatggcttccgaccgttgccgtcaaataccatccatttgcttttaagattttgatgacttcccgtgacgaataacttttcatctcctccctccttatgtatatattataacacatattattatatttgtcaagggctttggcaaatatttttctatttgttgtttggtgaaagaaggtatatgcggatgaatgcggtcatctatgcgagatactcgtcggataagcaaacggagcagtccattgaa

SEQ ID NO: 18506 - DNA, 260 bp, Unknown
  Description of Unknown: LeftRegion for integrase B5507 sequence
tggggagattggttctgtagtagcgacaattatattcggcgtcttattcattgcggttttaggttttctaaaatagtaaccgtttttcagccattaaacgcaattttgagagtttttgtatctaatttagccttttaagcataaaattggagccttaattacaaatttaggctcattttcgttagataagaggtgatactttgagttcggttgataaaatcgccgttatttacgcgcgttattcgtctcacggccagacc

SEQ ID NO: 18507 - DNA, 260 bp, Unknown
  Description of Unknown: LeftRegion for integrase B5508 sequence
atactgcgagaattgcggatacagctttgactttaccacacaggatgacctcaacgcccaatataataaactgaacacaaacgagggatgcgccattttggtggcggtcattctcggcgttattcttataacaatttggttttacagccattaaatgcaaatttgaggatgttttcgttaaataaggagggggtgacagtttgaatccagttgacaaaatcgccgttgtttacgcacgatattcttctcacgggcagacc

SEQ ID NO: 18508 - DNA, 260 bp, Unknown; identical to SEQ ID NO: 15702
  Description of Unknown: LeftRegion for integrase B5509 sequence

SEQ ID NO: 18509 - DNA, 260 bp, Unknown; identical to SEQ ID NO: 16187
  Description of Unknown: LeftRegion for integrase B5510 sequence

SEQ ID NO: 18510 - DNA, 260 bp, Unknown
  Description of Unknown: LeftRegion for integrase B5511 sequence
ccaagtcacagccaccaaagacgccgccagctccacctaaaccccaacaaaaataatgtatatacaagaaatcccgcatcatgcaccaccatgctgcgggatggccggcagttaccggctgtgtaaacctgtaaagggctgatttacaatattattatatcacaatcagccttgttttagaaagaaggactgattatattatgacaaaaaatgcagttatttacgcccgcttcagcagtgacaaacagcgggaagaatcc

SEQ ID NO: 18511 - DNA, 260 bp, Unknown
  Description of Unknown: LeftRegion for integrase B5512 sequence
aggttggttatcatagctgcaaaaaaatataccgaagaaaaagtcaacgccgtatatgacggcgatatttataccatcatcaacctcacgccagttatacataaagacgaccgacaggaacagaaaaatgaaattgaaaaaaccctgtacaccgtctttagcaaatacacaccgaaaaagaaataagacggaggataccgatggaagattttatttacgcaagacagtctgttgataaagaagacagtatctctattgaa

SEQ ID NO: 18512 - DNA, 260 bp, Unknown
  Description of Unknown: LeftRegion for integrase B5513 sequence
tgattcgcatttttatattgcacatatgttctgtacgctgtataataatcctataaataaaaaaatccggtactggcaataccggattcgtaacttatcaatcataggatgactgatatataaactcaaataaattatatcatacatcctgctgtttgcatagggtgtattttttatacccttttttagggaggtaatcaatgaactataatgattcaaaaggcatttatttaatgtatctcagaaaatcgcgtgctgac

SEQ ID NO: 18513 - DNA, 260 bp, Unknown; identical to SEQ ID NO: 18511
  Description of Unknown: LeftRegion for integrase B5514 sequence

SEQ ID NO: 18514 - DNA, 260 bp, Unknown; identical to SEQ ID NO: 18511
  Description of Unknown: LeftRegion for integrase B5515 sequence

SEQ ID NO: 18515 - DNA, 260 bp, Unknown
  Description of Unknown: LeftRegion for integrase B5516 sequence
tgattcgcatttttatattgcacatatgttctgtaggctgtataataatcctataaataaaaaaatccggtactggcaataccggattcgtaacttatcaatcataggatgactgatatataaactcaaataaattatatcatacatcctgctgtttgcatagggtgtattttttatacccttttttagggaggtaatcaatgaactataatgattcaaaaggcatttatttaatgtatctcagaaaatcgcgtgctgac

SEQ ID NO: 18516 - DNA, 260 bp, Unknown; identical to SEQ ID NO: 16256
  Description of Unknown: LeftRegion for integrase B5517 sequence

SEQ ID NO: 18517 - DNA, 260 bp, Unknown
  Description of Unknown: LeftRegion for integrase B5518 sequence
catttttcaacatttccttgcacatatgttctgtacgctgtataataatcctataaataaaaaaatccggtactggcaataccggattcgtaacttatcaatcatcggatgactgatatataaactcaaataaattatatcatacatcctgctgtttgcatagggtgtattttttatacccttttttagggaggtaagcaatgaactataatgattcaaaaggcatttatttaatgtatctcagaaaatcgcgtgctgac

SEQ ID NO: 18518 - DNA, 260 bp, Unknown
  Description of Unknown: LeftRegion for integrase B5519 sequence
aggttggttatcatagccgcaaaaaaatataccgaagaaaaagtcaacgccgtatatgacggcgatatttataccatcatcaacctcacgccagttatacataaagacgaccgacaggaacagaaaaatgaaattgaaaaaaccctgtacaccgtctttagcaaatacacaccgaaaaagaaataagacggaggataccgatggaagattttatttacgcaagacagtctgttgataaagaagacagtatctctattgaa

SEQ ID NO: 18519 - DNA, 260 bp, Unknown; identical to SEQ ID NO: 18511
  Description of Unknown: LeftRegion for integrase B5520 sequence

SEQ ID NO: 18520 - DNA, 260 bp, Unknown
  Description of Unknown: LeftRegion for integrase B5521 sequence
aggttggtcatcatagccgcaaagaaatataccgaagaaaaagtcaacgccgtatatgacggcgatatttataccatcatcaacctcacgccagttatacataaagacgaccgacaggaacagaaaaatgaaattgaaaaaaccctgtacaccgtctttagcaaatacacaccgaaaaagaaataagacggaggataccgatggaagattttatttacgcaagacagtctgttgataaagaagacagtatctctattgaa

SEQ ID NO: 18521 - DNA, 260 bp, Unknown
  Description of Unknown: LeftRegion for integrase B5522 sequence
gagaaagctgggagttagctgttaggatgattgaaaaattagctcaagccgaaaaaaataacactgaaaaataatatttattataaaaagttatgttataagcataactttttatgttatgtggaatttcattcttactctaaaaataataaaaaataattttatatgcagtagcataaaattaactaaaggtggtttttatgaaaagaattgcaatttattcaaggaaatctaaagaaactgatactggagaatctatt

SEQ ID NO: 18522 - DNA, 260 bp, Unknown
  Description of Unknown: LeftRegion for integrase B5523 sequence
aaatgaatttatcgatgacaataatgctgtaaaaaaagatattcttaactctctattaaaagtacatgatgaaaatacattaaaattaatttctgatatgatacataaatttgctgaatgcgaaaacttataaaaataaatttaattagatgtatccattaatatatttaggagcataagattaaataaaggagaatggtatgaaaagaattgcaatctattcaagaaaatctaaagaaactgatacaggtgaatcaatt

SEQ ID NO: 18523 - DNA, 260 bp, Unknown
  Description of Unknown: LeftRegion for integrase B5524 sequence
aggcaaatgtgtcacagatttgccaaatgatttcagaaaaagttctctagaatgaaacagccgcccgcttctgttggcgcagaaacgagcggcaaaaatagaacagcttacccaaagtggataattccgtccaagcaatgaaattataccactttcggggtaggcttggcaagtcatactttgaaggtggtttttgtattatgtacaaagcaagcaacggaagtggtgaactcatggaaaataaagtaatccgcgtcggc

SEQ ID NO: 18524 - DNA, 260 bp, Unknown
  Description of Unknown: LeftRegion for integrase B5525 sequence
ttacaagtgagtacaagggccgggtaactcaatattgggagcaagatcattaccaattaaccgagttttaactgtatataatgtattttattaatatttagaggtgaaaagatggaagaaaaatacgaaataatagcaaaatatttactaaagcttcttttagagtctgaaccccccatcaacgatgaggaggctgcgtaatggatcgggctgtaatatacgcgcgttacagtagcgataatcagcgcgaggaatccatt

SEQ ID NO: 18525 - DNA, 260 bp, Unknown
  Description of Unknown: LeftRegion for integrase B5526 sequence
aggttggtcatcatagccgcaaagaaatataccgaagaaaaagtcaacgccgtatatgacggcgatatttataccatcatcaacctcacgccagttatacataaagacgaccgacaggaacagaaaaatgaaattgaaaaaaccctgtacaccgtctttagcaaatacacaccgaaaaagaaataagacggaggatacagatggaagattttatttacgcaagacagtctgttgataaagaagacagtatctctattgaa

SEQ ID NO: 18526 - DNA, 260 bp, Unknown
  Description of Unknown: LeftRegion for integrase B5527 sequence
aggttggttatcatagccgcaaaaaaatataccgaagaaaaagtcaacgccgtatatgacggcgatatttataccatcatcaacctcacgccagttatacataaagacgaccgacaggaacagaaaaatgaaattgaaaaaaccctgtacaccgtctttagcaaatacacaccgaaaaagaaataagacggaggatatcgatggaagattttatttacgcaagacagtctgttgataaagaagacagtatctctattgaa

SEQ ID NO: 18527 - DNA, 260 bp, Unknown; identical to SEQ ID NO: 18511
  Description of Unknown: LeftRegion for integrase B5528 sequence

SEQ ID NO: 18528 - DNA, 260 bp, Unknown; identical to SEQ ID NO: 18511
  Description of Unknown: LeftRegion for integrase B5529 sequence

SEQ ID NO: 18529 - DNA, 260 bp, Unknown
  Description of Unknown: LeftRegion for integrase B5530 sequence
accgcagcgccgagaacatcagccttccgacgctcaagaagctgtcggaatacttcggagtaagcatcgaagaacttgtctacggaaacgaaacaaggcgcgagataacgttctccacgccgaactacaccaacgaggaattggagcagatagcgcagtacgcgatgttcctgaagcagcagagaaaggattgattatgaatggcatacgcaatgtacttgagaaaatcgagaaaggacgatgacactggcatcgaggac

SEQ ID NO: 18530 - DNA, 260 bp, Unknown
  Description of Unknown: LeftRegion for integrase B5531 sequence
attctggacaaatgcaaggcagccatgactgaagtcgccattgtggaatatcaaccggcggcataacacaaaaaaaccgccccacggcggcaaccgtgaagcggcaagaggaaaaactattgctataatagacttcccaaagcaaggtctattatagcatatttcctctgaaaaatcaagtcttaggaggaaatttacacatgaatgcagtgatctacgcccgttacagctgcgaccggcagaccgagcagtccattgag

SEQ ID NO: 18531 - DNA, 260 bp, Unknown
  Description of Unknown: LeftRegion for integrase B5532 sequence
tgattcacatttttatattgcacatatgttctgtaggctgtataataatcctataaataaaaaaatccggtactggcaataccggattcgtaacttatcaatcataggatgactgatatataaactcaaataaattatatcatacatcctgctgtttgcatagggtgtattttttatacccttttttagggaggtaatcaatgaactataatgattcaaaaggcatttatttaatgtatctcagaaaatcgcgtgctgac

SEQ ID NO: 18532 - DNA, 260 bp, Unknown
  Description of Unknown: LeftRegion for integrase B5533 sequence
gtgatttttatagcaacaaaatatgagcaggaaaaatttaatgccgtgtattacggagatgtctataccattatcaacctcactcccgacatacataaagacgacagacaggaacgaaaaaacgaaattgaaaaagcgttgtatgccgtctttagcaaatacacatccaatccaaaacaagatgggagaaggtaaatacattggaggatttgatttacgcaagacagtcggtagacaaagaggacagtatttcaattgaa

SEQ ID NO: 18533 - DNA, 260 bp, Unknown; identical to SEQ ID NO: 18511
  Description of Unknown: LeftRegion for integrase B5534 sequence

SEQ ID NO: 18534 - DNA, 260 bp, Unknown; identical to SEQ ID NO: 16187
  Description of Unknown: LeftRegion for integrase B5535 sequence

SEQ ID NO: 18535 - DNA, 260 bp, Unknown; identical to SEQ ID NO: 18515
  Description of Unknown: LeftRegion for integrase B5536 sequence

SEQ ID NO: 18536 - DNA, 260 bp, Unknown
  Description of Unknown: LeftRegion for integrase B5537 sequence
tgtccagtaaacatgatggattttaattgcaccggattcgaggcaattaaacagggcaataaaaaatcccccaccggttgcagccgatgggggataaaatagaacagcttacccaaagtggataattccgtccgaacaacgaaattataccactttcgggtaggcttggcaagtcatacttagagggtggtttttgtattatgtacaaagcaagcaacggaagtggtgaactcatggaaaataaagtaatccgcgtcggc

SEQ ID NO: 18537 - DNA, 260 bp, Unknown; identical to SEQ ID NO: 18520
  Description of Unknown: LeftRegion for integrase B5538 sequence

SEQ ID NO: 18538 - DNA, 260 bp, Unknown; identical to SEQ ID NO: 18518
  Description of Unknown: LeftRegion for integrase B5539 sequence

SEQ ID NO: 18539 - DNA, 260 bp, Unknown; identical to SEQ ID NO: 18518
  Description of Unknown: LeftRegion for integrase B5540 sequence

SEQ ID NO: 18540 - DNA, 260 bp, Unknown
  Description of Unknown: LeftRegion for integrase B5541 sequence
cgaattattaaaggtatgttacaactaaaagatagagaaagctgggaactggctgttaatatggttgaaaaattagcccaagctgaaaaaaacagtactgaagaataatttctaatttaaaaagttatgtcataatcataactttttattctattaataaatagtatattagagaattaatatttaaatacggaggatatatgaaaagaattgcaatctattcaagaaaatctaaagaaactgatacaggtgaatcaatt

SEQ ID NO: 18541 - DNA, 260 bp, Unknown
  Description of Unknown: LeftRegion for integrase B5542 sequence
aggttggtcatcatagccacaaagaaatataccgaagaaaaagtcaacgccgtatatgacggcgatatttataccatcattaacctcacgccagttatacataaagacgacagacaggaacagaaaaatgaaattgaaaaaaccctgtacaccgtctttagcaagtacacaccgaaaaagaaataagacggaggataccgatggaagattttatttacgcaagacagtctgttgataaagaagacagtatctctattgaa

SEQ ID NO: 18542 - DNA, 260 bp, Unknown; identical to SEQ ID NO: 18511
  Description of Unknown: LeftRegion for integrase B5543 sequence

SEQ ID NO: 18543 - DNA, 260 bp, Unknown
  Description of Unknown: LeftRegion for integrase B5544 sequence
gcagtgcagaaaacatcagtctgaaaactttaaaaaagctatctgagtacttcggcgtgagcatggaagagctggtgcatggcaaaacaccgaagcacgatcttgtgttctcaagcgacacatatacggaggaagaactcgcgcagattaagcaattcgcgcactttttaatagggcaacgacgaaaggacagatgatgaatgacatacgcaatttatttacgaaaatcacgaaaagatgacgaaacgggatatgctgat

SEQ ID NO: 18544 - DNA, 260 bp, Unknown
  Description of Unknown: LeftRegion for integrase B5545 sequence
gcagtgcagaaaacataagtctgaaaactttaaaaaagctatctgagtacttcggcgtgagcatggaagagctggtgcatggcaaaacaccgaagcacgatctcgtgttctcaagcgacacatacacggaggaagaactcgcgcagattaagcaattcgcgcactttttaatagggcaacgacgaaaggacagatgatgaatgacatacgcaatttatttacgaaaatcacgaaaagatgacgaaacgggatatgctgat

SEQ ID NO: 18545 - DNA, 260 bp, Unknown
  Description of Unknown: LeftRegion for integrase B5546 sequence
aggttggtcatcatagccgcaaagaaatataccgaagaaaaagtcaacgccgtatatgacggcgatatttataccatcatcaacctcacgccagttatacataaagacgaccgacaggagcagaaggacgagattgaaaagaccctgtacgccgtctttagcaaatacacaccgaaaaagaaataagacggaggataccgatggaagatttaatttacgcaagacagtctgttgataaagaggacagtatctctattgaa

SEQ ID NO: 18546 - DNA, 260 bp, Unknown
  Description of Unknown: LeftRegion for integrase B5547 sequence
gggagatatttttatattgcacatatgttttacacattgtataatcatattaacaaaaaatccggtactgacaataccggatttccagttacctatcaactaaggatgttgataatctaactgcttcaattagattataacatgcatcctgtgatttgcatagggtgtattttttatacccttttttagggaggtaatcaatgaactataatgattcaaaaggcatttatttaatgtatctcagaaaatcgcgtgctgac

SEQ ID NO: 18547 - DNA, 260 bp, Unknown; identical to SEQ ID NO: 18511
  Description of Unknown: LeftRegion for integrase B5548 sequence

SEQ ID NO: 18548 - DNA, 260 bp, Unknown
  Description of Unknown: LeftRegion for integrase B5549 sequence
ccaagctggttgaacgtaaaagcagaggaagccggaattaatttttctgctgttcttcgtgaagcccttgaaaatcgtcttaatatcaggtgaaaataagattcctcggtcaataccggggaattcttataaaaataacgccctgcaaatatacagagcgttataaaaaacacaatcaataataaaataaggaggaatttatgcaaaaatatctaatgtacctaagaaaatcaagagccgacggagaacatgaaaccatt

SEQ ID NO: 18549 - DNA, 260 bp, Unknown
  Description of Unknown: LeftRegion for integrase B5550 sequence
atgtgtggattgaaaaaatagtacatagaaaaagccctaccaaaaccggcagggcaacatcaaacacaaaaaaaaaccgccccacggcggcaaccgtgaagcggcaagaggaaaaactattgcgataatagccattccacaacaaggtctattatagcatatttcctcgtaaaaatcaagtcttaggaggaaatttacacatgaatgcagtgatctacgcccgttacagctgcgaccggcagaccgagcaatccattgag

SEQ ID NO: 18550 - DNA, 260 bp, Unknown; identical to SEQ ID NO: 16948
  Description of Unknown: LeftRegion for integrase B5551 sequence

SEQ ID NO: 18551 - DNA, 260 bp, Unknown; identical to SEQ ID NO: 18515
  Description of Unknown: LeftRegion for integrase B5552 sequence

SEQ ID NO: 18552 - DNA, 260 bp, Unknown; identical to SEQ ID NO: 18511
  Description of Unknown: LeftRegion for integrase B5553 sequence

SEQ ID NO: 18553 - DNA, 260 bp, Unknown
  Description of Unknown: LeftRegion for integrase B5554 sequence
accgcagcgccgagaacataagccttccgacgctcaagaagctgtcggaatacttcggagtaagcatcaaggaacttgtctacggaaacgaaacaaggcgcgagataacgttctccacgccgaactacaccaacgaggaattggagcagatagcgcagtacgcgatgttcctgaagcagcagagaaaggattgattatgaatggcatacgcaatgtatttgagaaaatctagaaaggacgatgacactggcatcgaggac

SEQ ID NO: 18554 - DNA, 260 bp, Unknown
  Description of Unknown: LeftRegion for integrase B5555 sequence
aggttggttatcatagccgcaaagaaatataccgaagaaaaagtcaacgccgtgtatgacggcgatatttataccatcatcaacctcacgccagttatacataaagacgaccgacaggagcagaagaacgaaattgaaaagaccctgtacaccgtctttagcaaatacacaccgaaaaagaaataagacggaggataccgatggaagatttaatttacgcaagacagtctgttgacaaagaagacagtatctctattgaa

SEQ ID NO: 18555 - DNA, 260 bp, Unknown
  Description of Unknown: LeftRegion for integrase B5556 sequence
aagaaagttgggagttagttgctaaaataattgaaaaactagctcaagctgaagaaaatagcactaaagaataatatctattataaaaagttatgttataaacataactttttatgttatgtagaatttccttcttactctgaaaataattaaaaataattttatatgcagtagcataaaattaaataaaggtggtttttatgaaaagaattgcaatttattcaagaaaatctaaagaaaccgatactggggaatctatt

SEQ ID NO: 18556 - DNA, 260 bp, Unknown
  Description of Unknown: LeftRegion for integrase B5557 sequence
gctttttatcaattagctaatatgttatacttaccagaggaacaaatagcgatatgtccgatatgccatagattttttatacggaaaaatgccaatcaaaaatattgtcataatactaaagttgttaatggaatagaaaggcgaacttgttatgctcaaaaaatgtataagagaaatcaaagcagaaaggaatcagaataatgaatgttgtaatatatgctcgtttcagttcaagtggacagagagaagaaagtattgaa

SEQ ID NO: 18557 - DNA, 260 bp, Unknown; identical to SEQ ID NO: 18518
  Description of Unknown: LeftRegion for integrase B5558 sequence

SEQ ID NO: 18558 - DNA, 260 bp, Unknown
  Description of Unknown: LeftRegion for integrase B5559 sequence
actcaaaagcaattggctgagatgataggagtttctcaagcctatatttcaaaaatagaaagtgatgaatttgttaatgtcactttaattgaaataataaaattaagtaaagcactatcaattaatgaactggaagttgctaaatattttctaaataaatacaataattataaatatgaatttggaggagaaatagcataatgaaagtatgtatgtatcttaggaaatcaaggcaagatgaagaattagagaaaaaagaa

SEQ ID NO: 18559 - DNA, 260 bp, Unknown
  Description of Unknown: LeftRegion for integrase B5560 sequence
accgaagcgctgagaacataagccttccgacgctcaagaagctgtcggaatacttcggagtaagcatcgaggaacttgtctacggaaacgaaacaaggcgcgagataacgttctccacgccgaactacaccaacgaggaattggagcaaatagcgcagtacgcgatgttcctgaagcagcagagaaaggattgattatgaatggcatacgcaatgtatttgagaaaatctagaaaggacgatgacactggcatcgaggac

SEQ ID NO: 18560 - DNA, 260 bp, Unknown
  Description of Unknown: LeftRegion for integrase B5561 sequence
taaatgaatttatcgatgacaataatgccgtaaaaaaagatattctcaattctctattaaaagtacatgatgaaaatacattaaaattaatttctgatatgatacataaatttgctgaatacgaaacttataaaaataaatttaattagatgtatttattgatatatttagtggcataagattaaataaaggaggctattatgaaaaaaattgcaatctattcaaggaaatctaaagaaactgatacaggagaatctatt

SEQ ID NO: 18561 - DNA, 260 bp, Unknown
  Description of Unknown: LeftRegion for integrase B5562 sequence
taaatgaatttatcgatgacaataatgccgtaaaaaaagatattctcaattctctattaaaagtacatgatgaaaatacattaaaattaatttctgatatgatacataaatttgctgaacacgaaacttataaaaataaatttaattagatgtatttattgatatatttagcggcataagattaaataaaggagactattatgaaaaaaattgcaatctattcaagaaaatctaaagaaactgatactggagaatctatt

SEQ ID NO: 18562 - DNA, 260 bp, Unknown; identical to SEQ ID NO: 18518
  Description of Unknown: LeftRegion for integrase B5563 sequence

SEQ ID NO: 18563 - DNA, 260 bp, Unknown
  Description of Unknown: LeftRegion for integrase B5564 sequence
tttcgatcaagggcttatgacggtcttgcctgatcttacaattcaggtctcggactatgtgaaagacagctacgatgaccaaaatacgaaagactggctactcggcgtagagggtacaaaaatcatcaggccgaagaggttcgcgccaaatcgcgacatgctggcctaccacaatgagtttgtattcctgaggtgattccatgcagcgagcagtgatatacgccaggtacagccctggaccaaatcagacggagcagtcg

SEQ ID NO: 18564 - DNA, 260 bp, Unknown; identical to SEQ ID NO: 18518
  Description of Unknown: LeftRegion for integrase B5565 sequence

SEQ ID NO: 18565 - DNA, 260 bp, Unknown
  Description of Unknown: LeftRegion for integrase B5566 sequence
aggttggttatcatagctgcaaaaaaatataccgaagaaaaagtcaacgccgtatatgacggcgatatttataccatcatcaacctcacgccagttatacataaagacgaccgacaggaacagaaaaatgaaattgaaaaaaccctgtacaccgtctttagcaaatacacgccgaaaaagaaataagacggaggataccgatggaagattttatttacgcaagacagtctgttgataaagaagacagtatctctattgaa

SEQ ID NO: 18566 - DNA, 260 bp, Unknown; identical to SEQ ID NO: 18511
  Description of Unknown: LeftRegion for integrase B5567 sequence

SEQ ID NO: 18567 - DNA, 260 bp, Unknown
  Description of Unknown: LeftRegion for integrase B5568 sequence
ccttgcggtctgcatcgtgtcgctcccggtcggcttgatcattgtagccgttggagcgtaccgggcggtaaaagccggggatatttatgatgctgcagttgctcggtacgagcaacaaatctcggactatgttgactggctggatgaagtcaacgcaaaataaaaagccgccctctgtgggcggcgggaggttgctctgaatgcgcgcaaaaaagaaaccggccgtgatctacactcggtactcgtctcataaccagcgg

SEQ ID NO: 18568 - DNA, 260 bp, Unknown
  Description of Unknown: LeftRegion for integrase B5569 sequence
gccaacgggtccatcgccgtggtggagaccgaggactaccgcgcggtcatgcgccgctggtacaagggcagcaccaagctgatgctgtcggcggatagcttcgaggactacgaggacatgattttcggcatggacgacggacccgtgcgcgtgatcggcacggtggtgtggttccaggccgccgacgagatggagtagccgtgggcgggcgcgcggcgatatacgcccgcttctcgagccacaaccagcgcggcgagtcc

SEQ ID NO: 18569 - DNA, 260 bp, Unknown
  Description of Unknown: LeftRegion for integrase B5570 sequence
tccacgaaatctctgaccttatgaaacttatgaactaaataaaaacgcccaccctagcaaaaaggatgagcaaaaacaaaaatggcccagctggcggcaaccaactggaccaaactaggaagtgcgatatacttcatagctccaactcaagtatatcacacctcctggattttcgcacccaaaatcatggaggtgtttctatgtcgaccattgccgtcatctacgcgcgttactccagcagcaaccagcgcgaagaatcc

SEQ ID NO: 18570 - DNA, 260 bp, Unknown
  Description of Unknown: LeftRegion for integrase B5571 sequence
cagctccgagaacatcagccttcagacgcttaagaagctgtcggaatacttcgggataagcatcgaagagcttgttcatggcaggcatcaaaggcgcgagattgcgttctcaagtagcgcgtatacggacgaagagcttgaccagattcagcgctttgcgcactttttgatagggcaacgaggaaaggggtaattgatgaatgacatatgcgatttatctacgaaaatcaagaaaagacgatgacgcgggctttgccgac

SEQ ID NO: 18571 - DNA, 260 bp, Unknown; identical to SEQ ID NO: 15539
  Description of Unknown: LeftRegion for integrase B5572 sequence

SEQ ID NO: 18572 - DNA, 260 bp, Unknown
  Description of Unknown: LeftRegion for integrase B5573 sequence
aggttggtcatcatagctgcaaaaaaatataccgaagaaaaagtcaacgccgtatatgacggcgatatttataccatcatcaacctcacgccagttatacataaagacgaccgacaggaacagaaaaatgaaattgaaaaaaccctgtacaccgtctttagcaaatacacaccgaaaaagaaataagacggaggataccgatggaagattttatttacgcaagacagtctgttgataaagaagacagtatctctattgaa

SEQ ID NO: 18573 - DNA, 260 bp, Unknown
  Description of Unknown: LeftRegion for integrase B5574 sequence
actcggcattttttcaattgcaatagttttggcacggaactaaaaaaatgcgtctcggtaaattttgggcacgaaaaaatacagttttatttgtacaagataaacaataaaatttacattaatgcccaataaaaataacgccctgcaaatatacagagcgttataaaaaacacaatcaataataaaataaggaggaatttatgcaaaaatatctaatgtacctaagaaaatcaagagccgacggagaacatgaaaccatt

SEQ ID NO: 18574 - DNA, 260 bp, Unknown
  Description of Unknown: LeftRegion for integrase B5575 sequence
actcaaaagcaattggctgagatgataggagtttctcaagcctatatttcaaaaatagaaagtgatgaatttgttaatgtcactttaattgaaataataaaattaagtaaagcactatcaattaatgaactggaagttgctaaatattttctaaataaatacaataattataaatatgaatttgggggagaaatagcataatgaaagtatgtatgtatcttagaaaatcaaggcaagatgaagaattagagaaaaaagaa

SEQ ID NO: 18575 - DNA, 260 bp, Unknown
  Description of Unknown: LeftRegion for integrase B5576 sequence
acgcccgctgctgctggtatcgcaagaaccttgaggctggcaggattttttacggaaagaataagaataatggataaaaaaatcccctgcttggtgcgccaacaccaagcaggggagatggatatgtataaaatacacactccacaacatctgtattttatcatatcctgacgaaaaaatcaataggagtgataaaaaatatgcaaaccgccgtgatatacgcccggtattcgtccgacaagcagacggagcagtccatc

SEQ ID NO: 18576 - DNA, 260 bp, Unknown; identical to SEQ ID NO: 18520
  Description of Unknown: LeftRegion for integrase B5577 sequence

SEQ ID NO: 18577 - DNA, 260 bp, Unknown
  Description of Unknown: LeftRegion for integrase B5578 sequence
agaataataaaaggtatgttacaactaaaagatagagaaagctgggaactggctgttaaaatgattgaaaaactagcacaagctgaaaaaaacagtactgaagaataatttctaatttaaaaagttatgtcataatcataactttttatgctattaataaatagtatattagagaattaatatttaaatacggaggatacatgaaaagaattgcaatctattcaagaaaatctaaagaaactgatacaggtgaatcaatt

SEQ ID NO: 18578 - DNA, 260 bp, Unknown; identical to SEQ ID NO: 15792
  Description of Unknown: LeftRegion for integrase B5579 sequence

SEQ ID NO: 18579 - DNA, 260 bp, Unknown; identical to SEQ ID NO: 18511
  Description of Unknown: LeftRegion for integrase B5580 sequence

SEQ ID NO: 18580 - DNA, 260 bp, Unknown
  Description of Unknown: LeftRegion for integrase B5581 sequence
gggagatatttttatattgcacatatgttttacacattgtataatcatattaacaaaaaatccggtactgacaataccggatttccagttacctatcaactaaggatgttgataatctaactgcttcaattagattataacatgcatcctgtgatttgcatagggtgtattttttatacccttttttagggaggtaatcaatgaactataatgattcaaaaagcatttatttaatgtatctcagaaaatcgcgtgctgac

SEQ ID NO: 18581 - DNA, 260 bp, Unknown
  Description of Unknown: LeftRegion for integrase B5582 sequence
ctcgagtactttatagatgatataaatagtattaaaattgaacaataccaagtattagatagttctatagaaatgttttatgaaaaaggttatatacatgaagatggaacagttgatagttctatagaaagtatcttattagaaatattaagaaaagaaattaaagttaaaatcgaaagaatgaaggaagtgaataaataatgaaaatcgctatttattctagaaaatctaaagaaacagatacaggtgaatctattcaa

SEQ ID NO: 18582 - DNA, 260 bp, Unknown; identical to SEQ ID NO: 18511
  Description of Unknown: LeftRegion for integrase B5583 sequence

SEQ ID NO: 18583 - DNA, 260 bp, Unknown; identical to SEQ ID NO: 13188
  Description of Unknown: LeftRegion for integrase B5584 sequence

SEQ ID NO: 18584 - DNA, 260 bp, Unknown
  Description of Unknown: LeftRegion for integrase B5585 sequence
acaccctttcaaatcttgtaatagcgatatgtatatatttatattatatcatatattttattacatatcaagagataaataaaaaaaacgccccaaaagatgctggaacatctctcggagcgcaggagaatgtggtacattcaccattcatacaatgtgaattataccatatcctccaagaaaagtcaaggaggaattaaatgaaaatcgccgtaatatacgcccgatactcttcggacaagcagacggagcagtccatc

SEQ ID NO: 18585 - DNA, 260 bp, Unknown; identical to SEQ ID NO: 18518
  Description of Unknown: LeftRegion for integrase B5586 sequence

SEQ ID NO: 18586 - DNA, 260 bp, Unknown; identical to SEQ ID NO: 18511
  Description of Unknown: LeftRegion for integrase B5587 sequence

SEQ ID NO: 18587 - DNA, 260 bp, Unknown; identical to SEQ ID NO: 18511
  Description of Unknown: LeftRegion for integrase B5588 sequence

SEQ ID NO: 18588 - DNA, 260 bp, Unknown
  Description of Unknown: LeftRegion for integrase B5589 sequence
aggttggttatcatagctgcaaaaaaatataccgaagaaaaagtcaacgccgtatatgacggcgatatttataccatcatcaacctcacgccagttatacataaagacgaccgacaggaacagaaaaatgaaattgaaaaaaccctgtacaccgtctttagcaaatacacaccgaaaaagaaataagacggaggataccgatggaagattttatttacgcaagacagtctgttgataaagaagacagcatctctattgaa

SEQ ID NO: 18589 - DNA, 260 bp, Unknown
  Description of Unknown: LeftRegion for integrase B5590 sequence
aggcaaatgtgtcacagatttgccaaatgatttcagaaaaagttctctagaaagaaaaagccgcccgcttctgttggcgcagaaacgaacggcaaaaatagaacagcttacccgaaagtggataattccgtccaagcaatgaaattataccactttcgggtaggcttggcaagtcatactctgagggtggtttttgtattatgtacaaagcaagcaacggaagcggtgaactcatggaaaataaagtaatccgcgtcggc

SEQ ID NO: 18590 - DNA, 260 bp, Unknown
  Description of Unknown: LeftRegion for integrase B5591 sequence
agcatcaacgtcaatcgactggtgcaggatgcggtgtgggatacgccgctgcgcgacgtcatggacaggatggaaatacagatcgagaaaatccacaaatacctgatcgccttcaacgagatcctgaaggaacggctggcagccggtctgctgccgggatacgacgcaggctaggacaggttgatcatgacgacatccccatgcagcgggtagcgtgccgcgaattcattgatcggcaaaaggattggactttagtagac

SEQ ID NO: 18591 - DNA, 260 bp, Unknown; identical to SEQ ID NO: 18518
  Description of Unknown: LeftRegion for integrase B5592 sequence

SEQ ID NO: 18592 - DNA, 260 bp, Unknown
  Description of Unknown: LeftRegion for integrase B5593 sequence
ttgggcagcgtacccaacaaagccggatacatcaaggcattgatccgcaaggatattgaagaaaacggataaaaaaaccgccccacggcggcaaccgtgagacggcaagaggaaaaactattgcgataatagccctccagaacaaggtctattatagcatatttcctctgaaaaatcaagtcttaggaggaaatatacacatgaatgcagtgatctacgcccgttacagctgcgaccggcagaccgagcagtccattgag

SEQ ID NO: 18593 - DNA, 260 bp, Unknown
  Description of Unknown: LeftRegion for integrase B5594 sequence
actcaaaagcaattggctgagatgataggagtttctcaagcctatatttcaaaaatagaaagtgatgaatttgttaatgtcactttaattgaaataataaaattaagtaaagcactatcaattaatgaactggaagttgctaaatattttctaaataaatacaataattataaatatgaatttgggggagaaatagcataatgaaagtatgtatgtatcttagaaaatcaagacaagatgaagaattagagaaaaaagaa

SEQ ID NO: 18594 - DNA, 260 bp, Unknown; identical to SEQ ID NO: 18511
  Description of Unknown: LeftRegion for integrase B5595 sequence

SEQ ID NO: 18595 - DNA, 260 bp, Unknown; identical to SEQ ID NO: 18511
  Description of Unknown: LeftRegion for integrase B5596 sequence

SEQ ID NO: 18596 - DNA, 260 bp, Unknown; identical to SEQ ID NO: 18574
  Description of Unknown: LeftRegion for integrase B5597 sequence

SEQ ID NO: 18597 - DNA, 260 bp, Unknown; identical to SEQ ID NO: 13967
  Description of Unknown: LeftRegion for integrase B5598 sequence

SEQ ID NO: 18598 - DNA, 260 bp, Unknown
  Description of Unknown: LeftRegion for integrase B5599 sequence
gccaacgggtccatcgccgtggtggagaccgaggactaccgcgcggtcatgcgccgctggtacaagggcagcaccaagctgatgctgtcggcggatagcttcgaggactacgaggacatgattttcggcatggacgacggacccgtgcgagtgatcggcacggtggtgtggttccaggccgccgacgagatggagtagccgtgggcgggcgcgcggcgatatacgcccgcttctcgagccacaaccagcgcggcgagtcc

SEQ ID NO: 18599 - DNA, 260 bp, Unknown
  Description of Unknown: LeftRegion for integrase B5600 sequence
caactataaaagatggaaaaagttcaaaactaaagaaggctgaagagctaatattaaaaggtcatgatattttaattttatctgaagatactttttatgatttaattctggataattctcataattaaattctaagtattctttataataaagactttgggtttatcgaagtctttatttaatttttattttcaaatgaggtggttaaaattagagttgcaatttactgtagaaaatctgtttatgttgaaggatctgtt

SEQ ID NO: 18600 - DNA, 260 bp, Unknown
  Description of Unknown: LeftRegion for integrase B5601 sequence
cacgccggagcaggaagcggcaaaacgccgggagctggaacagcagctttatgaggtgttccgcaaatatgccgataagcggaagaaagaggaagccggggcgtaaggttttccgaagccatcgttgatttacggggctgctggcagtataatagaattgtcagcagctccgtttctttttgaagaaaaggagcgacaaaatgaataacagaatagacgcaatctatgcaaggcaatcggtggacaaaaaggacagcatt

SEQ ID NO: 18601 - DNA, 260 bp, Unknown
  Description of Unknown: LeftRegion for integrase B5602 sequence
gaagagttcgcttttttagttggtgcttttgcagcagaaggtaatgactttaaaaagagaatcataaaagctatgctagaaatagaaaacaaagacgattgggagctaatagcttcagttgttgaaaggctagcaaaataaaaggagaatttaaatttctccttttttaatatataaatattttattttagtaaaatgaggtgattaaaattagagttgcaatttactgtagaaaatctgtttttgttgaaggatctgtt

SEQ ID NO: 18602 - DNA, 260 bp, Unknown
  Description of Unknown: LeftRegion for integrase B5603 sequence
cacgccggagcaggaagcggcgaaacgccgggagttggaacagcagctttatgaagtgttccgcaagtatgccgataaacggcagaatgagggcgccggggcgtaaggttttccaaagccaccgttgatttgcggggctgctggcggtataataatagtgtcagcagctccgtttcttttttaagaaaaggagcgacaatatgaacaacagaatagacgcaatctatgcaagacaatcggtggacaaaaaagacagtatt

SEQ ID NO: 18603 - DNA, 260 bp, Unknown
  Description of Unknown: LeftRegion for integrase B5604 sequence
tttcgatcaagggcttatgacggtcttgcctgatcttacaattcaggtctcgaactacgtgaaggacggctacgacgaccaaaatacgagagactggctactcggcgtagatggtacaaaaatcatcaggccgaagaggttcgcaccaaatcgcgacatgctggcctaccacaatgagtttgtattcctgaggtgattccatgcagcgagcagtgatatatgccaggtacagccctggaccaaatcagacagagcagtcg

SEQ ID NO: 18604 - DNA, 260 bp, Unknown
  Description of Unknown: LeftRegion for integrase B5605 sequence
atttttctaatggtaagatagtaaaaagaaatggtcgttgtttagatgactagaaaaaatccctcttaccattttcggaaggagggattttttctttatacaaataaaaaccggctcctgcgccaacaggaaccggcaagtaacattccgaagaatgataccctaactcgcaaaaatattgtatcatcttcggagcagctatgcaagcggaacacctgttctacttctggctgttatttttgtactcatttttacataca

SEQ ID NO: 18605 - DNA, 260 bp, Unknown
  Description of Unknown: LeftRegion for integrase B5606 sequence
acgatacatcgaaattatcaagcaataaaaaaaatcccgcaccctgttaccagcaggatgcgggaagcgccgaaggtattaccagtaccatgtcggcaaatataatcaaacctacgtcaataaggggctgattacgtctattattatagcatatgagcccctttattaaccatatacatttaataaggaggcttatttttatgtctaaattagctgttatttacgcccgtttttcgtcggacaaacagcgcgaagaatcc

SEQ ID NO: 18606 - DNA, 260 bp, Unknown
  Description of Unknown: LeftRegion for integrase B5607 sequence
caacatagtgccaatcattgcggtacggttttcgttgttgtgaatcatactcccaatatacataacgaagacagaacagaagtgaagagaaatatcgaagagcgcttgtattctgttttcagtaaatataccacagcgaagcattaaagcgaaggctgccattgttatgatggcagccttattttttaggagacgagagtatggatttaatttatgcaagacagtcagtcgataaagaggatagtatctctatcgaaagt

SEQ ID NO: 18607 - DNA, 260 bp, Unknown
  Description of Unknown: LeftRegion for integrase B5608 sequence
aatgtcttaacattgaataaaaatcgtttgaaatcgtttcaaacgattagaaaaaaccgccaccatgagttatcatgatgacggtttccccggtcggatattagccgtatccgccggaatttgtaaatcactcaccctgagctgattacttctatattatatcacaatcagctcttgttgtagaaaggagctgttttattatgcttagagctgctttatatggcaggttttcctcggataatcaaagagaagaatctatc

SEQ ID NO: 18608 - DNA, 260 bp, Unknown
  Description of Unknown: LeftRegion for integrase B5609 sequence
ggcaagaacgataacggctcgcacggcaccgtgtcgtaccttcgcgacgggtcgatggggaaggccgttatccattactggcgcaaccatgtgtactatggcgcgtatttcaagattatcgacggcgctatagccttgaatgtgctgaattacagggcaacgcctaacgatgaccccgtagagctgtacagggcgtagccatgggcggacgtgcggcgatatatgcccgcttctcgagccacaaccagcgcggcgagtcc

SEQ ID NO: 18609 - DNA, 260 bp, Unknown
  Description of Unknown: LeftRegion for integrase B5610 sequence
aatgtatttttaaaaaatgggcagtaaaatgcccatttgaattatttgttgatatagaatctttgagtcaatttataaatacgttcaataaattgtatatcgttgattctatgtaagtatctaatgatacattcaatcatttcttctttagtcatatttatcacccctatgaaattgtaaaacagaaaggatgtgcaattatgtatgcgatgtatttaagaaagtcacgtgctgatgatccgcatgaaagtatagaagag

SEQ ID NO: 18610 - DNA, 260 bp, Unknown
  Description of Unknown: LeftRegion for integrase B5611 sequence
ggcaagaacgacaacggctcgcacggcaccgtgtcgtaccttcgcgacgggtcgatggggaaggccgttatccattactggcgcaaccatgtgtactatggcgcgtatttcaagattatcgacggcgctatagccttgaacgtgctgaattacaggggagcgccgaacgatgacctcgtagagctgtacagggcgtagccatgggcggacgtgcggcgatatacgcccgcttctccagccacaaccagcgcggcgagtcc

SEQ ID NO: 18611 - DNA, 260 bp, Unknown
  Description of Unknown: LeftRegion for integrase B5612 sequence
tacaaacaatagatatggtcaaagacaaatataaaaaagatttatattcttccgattcacaaaaaataggttgaaaataaaaaaatccccgactgctactaacagtcggggaaatagtgtagtgttatggtacaccaattaaaaacatatatattgtaccataacaccgattaaaaatcaagttaagaggtgttatttttatgaacaaaaaaattaatgcagtcggatatgcacgatatagtacagaatttcaaacagat

SEQ ID NO: 18612 - DNA, 260 bp, Unknown
  Description of Unknown: LeftRegion for integrase B5613 sequence
agttagagggggataaggattcaactgcggcggtctaaggttgtgcctatcgaattacttagaagaaaaaaagtattggaggtgagactatcaaagcggtaatctatgctcgctattcgagccacaatcaaagagaagaatccattgagggacagcttagagagtgccatgagtttgccttgaaaaatggatttgtcgtagtgaacgaatatatagatcgtgcgatttcgggcaagaccgataaccgtccgagctttcag

SEQ ID NO: 18613 - DNA, 260 bp, Unknown
  Description of Unknown: LeftRegion for integrase B5614 sequence
gttcatccgctgctcttttctcttgcacatatgttctatctatcgtataattattttacaaataaaaaatccggtactggcaataccggattcgtaacttatcaaccaggatgattgataataaacacagataaattatatcatacatcctgccgtttgcatagggtgtattttttataccctttttagggaggcaatcaatgtataatgattcaaaaggcatttatttaatgtatctcagaaaatcacgtgctgatgaa

SEQ ID NO: 18614 - DNA, 260 bp, Unknown
  Description of Unknown: LeftRegion for integrase B5615 sequence
atttgataacctttgaggttactgttgaacagatccagaaaatgattgaagatgaaaaaagttttaacgcatagcatgtaaaaaatcccgttatcatactgccatacgataacgggagaatgtaataacccacccacgggctgattactattatattataacacgatcagcccatttctaaaaaaggagctgatttttttatgcttagagccgctttatacgcacgtttttcttctgaaaatcaaagagaagaatccata

SEQ ID NO: 18615 - DNA, 260 bp, Unknown
  Description of Unknown: LeftRegion for integrase B5616 sequence
cccttccactattactactaccgcaaaatgaaaaagcgccgcccgtaggcgacgccctgccgtctctggcggcaataaaataagccccatcctgaccgatggagctttgctgaaggtttgtggccttccccgtgtgaagaaatccatttacatgatacaccatgcggggagggcttgcaagctatataggaggttattttatgattgctgctctatacgcccgctattcgtccgacagccagcgggccgaaagcatcgtg

SEQ ID NO: 18616 - DNA, 260 bp, Unknown
  Description of Unknown: LeftRegion for integrase B5617 sequence
atgaccgctagcttgatgccgaacggggacccgggaaggattgaaagcgagtacgctctcttcgagagtggtgcctcgttcggccactattggatagtcacctcaaagatcgtcaacggagaacttgtcgtctcacgaatcagcgaaacgagtccgacaggcgatactccgccgactctttacacattaggcagatagccatgggcgggcgcgcggcgatatacgcccgcttctcgagccacaaccagcgcggcgagtcc

SEQ ID NO: 18617 - DNA, 260 bp, Unknown
  Description of Unknown: LeftRegion for integrase B5618 sequence
cttccactattactactaccgcaaaataaaaaagcgccgcccgtaggcgacgccccgccgctactggcggcaacaataaaataagccccatcctgtccgatggagctttgctgaaagccttgcggccctccctgtgaagaaatccatttacatgatacaacatgcggggagggcttgcaagccatataggaggttattctatgattgctgcactctacgcccgctactcgtccgacagccagcgggccgaaagcatcgtg

SEQ ID NO: 18618 - DNA, 260 bp, Unknown
  Description of Unknown: LeftRegion for integrase B5619 sequence
gccaacgggtccatcgccgtggtggagaccgaggactaccgcgcggtcatgcgccgctggtacaagggcagcaccaagctgatgctgtcggcggatagcttcgaggactacgaggacatgattttcggcatggacgacggacccgtgcgcgtgatcggcacggtggtgtggttccaggccgccgacgagatggagtagccgtggtcgggcgcgcggcgatatacgcccgcttctcgagccacaaccagcgcggcgagtcc

SEQ ID NO: 18619 - DNA, 260 bp, Unknown
  Description of Unknown: LeftRegion for integrase B5620 sequence
caatgactaattttttcttttaataaaaaaaaatcccgcaccctgttaccagcaagatgcgggaagcgccgacggtattcccagtaccgtatcggcaaatataatcatctacccagcttataaggggctgattacgtctattattatagcatatgagcccctttattaaccatacacatttaataaggaggcttatttttatgtctaaattagcagttatttacgcccgtttctcgagcgacaagcaaagagaggaaagc

SEQ ID NO: 18620 - DNA, 260 bp, Unknown
  Description of Unknown: LeftRegion for integrase B5621 sequence
agcaaataatcttgacagttaaccaaaaaaatcccgccatcgtgctaccaacacgacagcgggaagcgccgaaggtattaccagtaccatctcggcaaatataatcatttacccagtctataaggggctgattacgtctattattatagcatatgagcccctttattcaccatacacatttaataaggaggcttatttttatgtctaaattagctgttatttacgcccgtttttccagtgataaacaacgcgaagagtcc

SEQ ID NO: 18621 - DNA, 260 bp, Unknown
  Description of Unknown: LeftRegion for integrase B5622 sequence
ggttaaagttaaatctaatagtgatgtcacaacggttgtagtaacgcgtaccggcgcaaagtatcaccttcccgactgccgctatgttgaaaacaaaaccgatactgaagaaatgactgttgaagaggctttgtcagaaggctatggaccatgtaaagtgtgtgaacccggaacaaattaatatataaagggctgatatcatgtcaaaaaagcagaaattaatttgcgctatgtatttacgaaaatcccgcgcggatagt

SEQ ID NO: 18622 - DNA, 260 bp, Unknown
  Description of Unknown: LeftRegion for integrase B5623 sequence
gggatctgataacttttgaagttacaaccgaacaaattcagaagatggttgaagacgaaaagaattttaacgcataacataaaaatcccgctatcgtattaacggtacgataacgggaagatgtaataacccacccagggctgattactattatattataacatgatcagcccatttctaaaaaggagctgattttttttatgcttagagccgctttatacgcacgtttttcttccgaaaaccagcgtgaagaatctatt

SEQ ID NO: 18623 - DNA, 260 bp, Unknown; identical to SEQ ID NO: 18609
  Description of Unknown: LeftRegion for integrase B5624 sequence

SEQ ID NO: 18624 - DNA, 260 bp, Unknown
  Description of Unknown: LeftRegion for integrase B5625 sequence
ctgaaggcgaccgatcgcgcgaagtgggtttcgctcgatttgtggaacgccgctgatgaaataaaaaaagacgatcgtttgcagatcgtcaaaaatcgaaatcagcggcattggaaaatcccgctttcctgcgtcgccgatcttgaacaatattcatattttataaatgccgcatatagcgcgaataaggaagattgtgtatgaacggcgtaatttatgcccgctattcttcggacagacaaacggaacaaagtatcgaa

SEQ ID NO: 18625 - DNA, 260 bp, Unknown; identical to SEQ ID NO: 18609
  Description of Unknown: LeftRegion for integrase B5626 sequence

SEQ ID NO: 18626 - DNA, 260 bp, Unknown
  Description of Unknown: LeftRegion for integrase B5627 sequence
tttcgatcaagggcttatgacggtcttgcctgatcttacaattcaggtctcgaattacgtgaaggacggctacgacgaccaaaatacgagagactggctactcggcgtagagggtacaaaaatcatcaggccgaagaggttcgcaccaaatcgcgacatgctggcctaccacaatgagtttgtattcctgaggtgattccatgcagcaagcagtaatatacgccaggtacagccctggaccaaatcagacagaacagtcg

SEQ ID NO: 18627 - DNA, 260 bp, Unknown
  Description of Unknown: LeftRegion for integrase B5628 sequence
aactccgaaattaaagtttttacatgggaacaagatgtaaaagaaactaaagaaattacaggagttgatttagaaaataacaactaacgaaaccaatatcttttaaaagggtaaatattatataaaatagaaataatatagataaacatcagggcagttagcagctgctctttttaattgaatgacaaggaggaccaccaatgaaaacatgtatataccttagaaaatctagggctgatgaagaactagagaaaaaagaa

SEQ ID NO: 18628 - DNA, 260 bp, Unknown; identical to SEQ ID NO: 16187
  Description of Unknown: LeftRegion for integrase B5629 sequence

SEQ ID NO: 18629 - DNA, 260 bp, Unknown
  Description of Unknown: LeftRegion for integrase B5630 sequence
gaaatcaattgagagggtattatgacggttgtaaacgtatatccggctgcaaacgataattttgcatgggatgaactggcagagttgtcccagaaactgctcacgcatatttatgctgaaatggaaaaatgcgaaaatagcaaaaacactttgatagatatgggtggcggctgcgagacgagcgtgagggcaagttcgctatgaacgcggtgtatacgaggcaatcccttgacgttaaggacagtttgtcgattgaatca

SEQ ID NO: 18630 - DNA, 260 bp, Unknown
  Description of Unknown: LeftRegion for integrase B5631 sequence
atgtatttttaaaaaatgggcagtaaaatgcccatttgaattatttgttgatatagaatctttgagtcaatttataaatacgttcaataaattgtatatcgttgattctatgtaagtatctaatgatacattcaatcatttcttctttagtcatatttatcacccctacgaaattgtaaaacagaaaggaagtgtttattgtgtatgctatgtatttgagaaaatcacgtgctgatgatccacatgaaagtatagaggat

SEQ ID NO: 18631 - DNA, 260 bp, Unknown; identical to SEQ ID NO: 15325
  Description of Unknown: LeftRegion for integrase B5632 sequence

SEQ ID NO: 18632 - DNA, 260 bp, Unknown; identical to SEQ ID NO: 16420
  Description of Unknown: LeftRegion for integrase B5633 sequence

SEQ ID NO: 18633 - DNA, 260 bp, Unknown
  Description of Unknown: LeftRegion for integrase B5634 sequence
gagcctggcgcgattgcccaggcgatgggaataccggacgagccgactcagccgcagcaggttattcgagtggtcgacaaacgcctacagaacatcgaggacgcctacgactccatgaacgagaacgggcgccacatactgcacagcgtggccacgtcgctggcgaaggaccccgcgaacgcggcggaggagggctagccgtggccaacgccgtcatatacgccaggtacagcagcgcgggccagcgcgaggagtccatc

SEQ ID NO: 18634 - DNA, 260 bp, Unknown
  Description of Unknown: LeftRegion for integrase B5635 sequence
cttttattaattttaataatagttttttatatgtcatttccaattcaacatattcatccatttcgcacctcgttatacataagctataataaaatactagcattattttataaaaatgtaaagaacaaacgttcgcacaatcttatatattttgtaatttaaagtaactttttttaatcaaattataaggagattataaaatgaacaatatatgtatttatttaagaaaatcaagagcagatgaagaacttgaaaaaaca

SEQ ID NO: 18635 - DNA, 260 bp, Unknown; identical to SEQ ID NO: 16402
  Description of Unknown: LeftRegion for integrase B5636 sequence

SEQ ID NO: 18636 - DNA, 260 bp, Unknown
  Description of Unknown: LeftRegion for integrase B5637 sequence
atgagttcgagaaccgagaggagttacagggggataaacaagacattacggcagtctaagctaattcccatagacttgctcagacgcaagaaatacttggaggtgatactacgaaagctgtaatatacgcacgatactcaagccatagccagcgagaagaatccatagagggacagcttcgggagtgtcatgagttcgcattgaaaaacggttttaccatcatcaacgaatactgtgacagagctatatcgggtaagacc

SEQ ID NO: 18637 - DNA, 260 bp, Unknown
  Description of Unknown: LeftRegion for integrase B5638 sequence
gccaacgggtccatcgccgtggtggagaccgaggactaccgcgcggtcatgcgccgctggtacaagggcagcaccaagctgatgttgtcggcggatagcttcgaggactacgaggacatgattttcggcatggacgacggccccgtgcgcgtgatcggcacggtggtgtggttccaggccgccgacgagatggagtagccgtgggcggacgtgcggcgatatacgcccgcttctccagccacaaccagcgcggcgagtcc

SEQ ID NO: 18638 - DNA, 260 bp, Unknown; identical to SEQ ID NO: 18613
  Description of Unknown: LeftRegion for integrase B5639 sequence

SEQ ID NO: 18639 - DNA, 109 bp, Unknown
  Description of Unknown: LeftRegion for integrase B5640 sequence
gtaaaccggttatgtgatgaaggttacgcagatgcgatttatattgtaaatggttaaattgcgtgcggcggcatattgccgtgtatcgaccgacagagcggagcaggcg

SEQ ID NO: 18640 - DNA, 260 bp, Unknown
  Description of Unknown: LeftRegion for integrase B5641 sequence
tttcgatcaaggacttatgacggtcttgcctgatcttacaattcaggtctcggactatgtgaaagacagctacgacgaccaaaatacaagagactggctactcggcgtagagggtacaaaaatcatcaggccgaaaagattcgcgccaaatcgcgacatgctggcctaccataatgagtttgtattcctgaggtgattccatgcagcgagcagtgatatacgccaggtacagccctggaccaaatcagacggagcagtcg

SEQ ID NO: 18641 - DNA, 260 bp, Unknown
  Description of Unknown: LeftRegion for integrase B5642 sequence
gtgtttgctaatgagtagtattatagtatttttaattttattgtggatctactttacgtacgtgaaagaaaaatagcagcataaaaatcccgctaccgtactgccatacgatagcgggaaaatgtaataacccacctcgggctgattacgcttatagtatagcataatcagcccattttcaaaaaggagctgatttttttatgcttagagccgctttatacgcacgtttttcttccgaaaaccagcgtgaagaatctatt

SEQ ID NO: 18642 - DNA, 260 bp, Unknown; identical to SEQ ID NO: 18601
  Description of Unknown: LeftRegion for integrase B5643 sequence

SEQ ID NO: 18643 - DNA, 260 bp, Unknown
  Description of Unknown: LeftRegion for integrase B5644 sequence
aatgtgtcttttgagcaatttgaaggattaaccgttgtaattaataaattgatatctactggtgatattgatgaaaacggaaaaatgaacgatgatgctaaggcattaatttttaaaatattagaagcagaaattaaattgatgttaaagaaaaagagctagcgataagacctagctcttttgatactaggaggttattaatggatagagtttgtatttatttacgaaaatctcgtgctgatgaagaactagaaaaaact

SEQ ID NO: 18644 - DNA, 260 bp, Unknown; identical to SEQ ID NO: 18608
  Description of Unknown: LeftRegion for integrase B5645 sequence

SEQ ID NO: 18645 - DNA, 260 bp, Unknown
  Description of Unknown: LeftRegion for integrase B5646 sequence
aggggatctgataacttttgaagttacgatcgaacaaattcagaagatgattgaagatgaaaagaattttaatgcataacataaaaatcccgctaccgtacggcaatacgatagcgggaaaatgtaataacccaccccgggctgattactttataattatatcacaatcagcccatttctaaaaaggagctgatttttttatgcttagagccgctttatacgcacgtttttcttccgaaaaccagcgtgaagaatctatt

SEQ ID NO: 18646 - DNA, 260 bp, Unknown; identical to SEQ ID NO: 16187
  Description of Unknown: LeftRegion for integrase B5647 sequence

SEQ ID NO: 18647 - DNA, 260 bp, Unknown
  Description of Unknown: LeftRegion for integrase B5648 sequence
gtatgttttaaaattacaaatagagcaaaacggaagtataaccgttacatttatgaacggaagcgttgtttcaagcgatataggaggtgaaaagttcagtgaatgcggcaaaaaagattataacgcgaatagaagcggatccgaaaaagaaagcggcgaacgcagaactttcgatactccgtacagcggcgtattgtcgtgtgtcaacggatagttccgaccagcttgaaagttataaagcacaggttgcctattatacg

SEQ ID NO: 18648 - DNA, 260 bp, Unknown
  Description of Unknown: LeftRegion for integrase B5649 sequence
gaagtttttcatgttgatcttaattatttgttggggttcacggacaaaatagagaagcccgcaggagatgaaacggatccggcagcgaacaaatacctcgcggtcactctggcggagatcgacctgatcgaagcgttccgccatgcaggtccggagactcaggccgcgatccgggcgatcctgcacttggagggtcggaagtgatcggcgcgatttatgcccggtactcgaacgggccgaaccagacagaccagtcgatc

SEQ ID NO: 18649 - DNA, 260 bp, Unknown
  Description of Unknown: LeftRegion for integrase B5650 sequence
aggaaaaaatgaaaatgaccgtaacaaatatacttccacatcatacatcgaataacgcagagaggaaacataaaattgaaattcaactttttcaaattttccaaaaatatgtgtaatacagttgtgagaatatatgttcggtggtataattataggtgtggaaaacctaagtcatacattcttggcaggaggacaagaatatgatgtatgacgcactatacggacgacagtccatcgagaagaaagatagtatatccgtt

SEQ ID NO: 18650 - DNA, 260 bp, Unknown
  Description of Unknown: LeftRegion for integrase B5651 sequence
gcgcaaaggacgttgaattagcgattcagaaaataatcgtagaaagacttctttcgctacagatacatgaaacattatcaaaagtcagttgaaaccagcctatattctcaacagcaaaggagatcaagcggtttcctttgctttctttttatgctaaaatagagagcgatataggttggttggcgaaaggagcaaccgacatgaaaatagcggcttattgtcgcgtatcaacagataaagatgagcagttagacagtctg

SEQ ID NO: 18651 - DNA, 260 bp, Unknown
  Description of Unknown: LeftRegion for integrase B5652 sequence
gcttgtacatatattgtaaagtagcaattttgtataagaagggaggactaatgaaattattaagtgtcaattatataaatggatataaagtaaataattatgctacggaaataacaaaagaagaagaagaagagatagtttttaacatatacaaaatattaacgaaagatgataaaatggataacaaggaagtgatgtaaatgatagcaatatacgcgagacaaagtgtagacaaaaaggattctatctccatagaaagc

SEQ ID NO: 18652 - DNA, 260 bp, Unknown
  Description of Unknown: LeftRegion for integrase B5653 sequence
aaattgctgattttttaggggttactgaaagttatttagaagatgcaatagattattatagatgtaaatacggtgtttcttgcaaaatagataattatgaagttagatttattcctaacttaatgattggtaagttcttttaaaattaaagtctcttaggcaattttgactaagagattttttaataaggagggattaacatgaaaaaagtagcaatttacagtagaaaatctgtttatatagaaggttctgtttcaata

SEQ ID NO: 18653 - DNA, 260 bp, Unknown
  Description of Unknown: LeftRegion for integrase B5654 sequence
ctgctgcccgttcagagcggtaaaataagcaaaaagctcccgtgctggtaacacggaagcctttgcatagattaacccttactggatgaaccagaaatgatataacctatccgaacaatagaattatatcattcctggtacgtcctggcaaggggcgtattttttatgctcttaagtcatagtatgaatagggtgatataatgaaaaagaaaatattaatggctgcactgtatattcgtgtcagcaccgaaaagcaagaa

SEQ ID NO: 18654 - DNA, 260 bp, Unknown
  Description of Unknown: LeftRegion for integrase B5655 sequence
aatatattttagactaaaacaatagaaaataaaaaccgccctactctttcaagcaaggcggtatgcttccgaataatacgaaagccctaagcaagcatattgtatcattccggaagcagctacgcaagcggaacacccgttcctcgctggctgttatttttgtacccattttttcatacacttaacaaaggagtgataacatgaccgacaacacctccatgcgtaccggtgccctctacatccgggtatctaccggcaag

SEQ ID NO: 18655 - DNA, 260 bp, Unknown
  Description of Unknown: LeftRegion for integrase B5656 sequence
cactaatattttacagctgtgagcagggattttcaacaggaaatattttccaataaaaatattaaaacaaatgtttgtatatattgtaaaacatctgtttgttattgtcaataacaaaatttgtaaaacgttgtcgctgtcccattagttggacatttaaaatatttttttgcatattaataaaaaagggagtgttgtttatggaaaaatatgcaatgtacttgcgaaagtcaagagctgaccaggataaaacgcttgaa

SEQ ID NO: 18656 - DNA, 260 bp, Unknown
  Description of Unknown: LeftRegion for integrase B5657 sequence
aataaggatgctcaaaactctgaaattaaagtttttacatgggaacaaaatgtaaaagaaactaaagaaaccacaggagttgatttagaataacaataacgtgtagaatatgaaggagaagattacacaaaatagaaattaataatatagatacgtacagggcagttagcagctgctctttttaattaggaggaaataaaatgaaaacatgtatataccttagaaaatctagggctgatgaagaactggagaaaaaagaa

SEQ ID NO: 18657 - DNA, 260 bp, Unknown
  Description of Unknown: LeftRegion for integrase B5658 sequence
catatctctaggtggcattaatataaatatcattaaaatagctaaataaacgatacttaaaatagatgatattaatagttcttttgttttttttacttccattacaaatcaaaatcctttactaaaatcttattattaatattactatatttacataatattatctatattaaaataatctaaacatatgaggtgataatatgaaaagaatagcaatttatagtagaaagtcagtatatatagaaggttctatatcaata

SEQ ID NO: 18658 - DNA, 260 bp, Unknown
  Description of Unknown: LeftRegion for integrase B5659 sequence
gccgctgcccgttcagagcggtaaaataagcaaaaagctcccgtgctggtaacacggaagcctttgcatagattaactcttaccggatgaaccaggaagatataacctatccgaacattagaattatatcattcctggtacgtcctggcaaggggcgtattttttatgctcttaagtcatagtatgaatagggtgatataatgaaaaagaaaatattaatggctgcactgtatattcgtgtcagcaccgaaaagcaggaa

SEQ ID NO: 18659 - DNA, 260 bp, Unknown
  Description of Unknown: LeftRegion for integrase B5660 sequence
acgaagaaataattggagctttattacatatatcagatactttaagtggattagctctccattttaatgttactgaagaaattataaaatataagttattatcaatctacctaaaggaagataagtttagaatatctaaatcaatgattatggaagatgaaataatttataattcttgttctgtttaatggaggtctattatgaaaaaagttgctatttattcaaggaaatctgttttagttgaaggatcagtatccata

SEQ ID NO: 18660 - DNA, 260 bp, Unknown
  Description of Unknown: LeftRegion for integrase B5661 sequence
aacagcagattatttttctggaagtaagttaataacattaaaagatggtcaatatttgaaactagatagtaatactaaagttattaaataataagattaacatatagaatataaaggaatagaaactaaaaaaatagaaataaataatatagatacgtacagggcagttagcagctgctctttttttaggaggaaatcatatgaaaacatgtatatatttaagaaaaagtcgtgccgatgaagaactggagaaaaaagaa

SEQ ID NO: 18661 - DNA, 260 bp, Unknown
  Description of Unknown: LeftRegion for integrase B5662 sequence
caaaggcattagcgccagagattaggaagttctatgatagtgacgagggcaaagcttactttgaaaaatggcttaccaaacaccctgaatatgatgaacggacacctgatgcaactgcatcgggcgtctgagttttcgcacattcgacagcaaataaaggaggattataattatgtatagaaagaattggaggctcacagatgaatgttgtaatatacgctcggttttccagccatagtcaaaccgagcaatctattaaa

SEQ ID NO: 18662 - DNA, 260 bp, Unknown
  Description of Unknown: LeftRegion for integrase B5663 sequence
tcatccagtgattttttacaacaaaattttaaaaaccgccctactctttcaagcaaggcggcatgcttccgaataatacgaaagccctaagcaagcatattgtatcattccggaagcagctacgcaagcggaacacccgttcctcgctggctgttatttttgtacccattttttcatacacttaacaaaggagtgataacatgaccgacaacacctctatgcgtaccggtgccctctacatccgggtatcgaccggtaag

SEQ ID NO: 18663 - DNA, 260 bp, Unknown
  Description of Unknown: LeftRegion for integrase B5664 sequence
tgtccgggatctgatcgtccgctgcttccagaaggcgatgctgaacgctgagaagctaaaaacggagaagggaaagcgcggccagtttgagaagttccagatctccctggagccctatttcttccggatgtctgacgagaacgccagactggtccaggatctacacgatgaagcactaaagaagatcggagggtgagcctatgcgcggcgtcatttatgccagatattcaccaggcccacgccagacggagcagtccatc

SEQ ID NO: 18664 - DNA, 260 bp, Unknown
  Description of Unknown: LeftRegion for integrase B5665 sequence
atgtaataaaagttgtaattttctacagaaaaattgacaaatttgttgatttttttatacaaaaaatctataatataagaacaaagaggttaagcctcaaactaaaattattataagcggtttagccgcaaaaaagataaggtcttgttcttatacgttcaaggccttatctttttttatttgtcataaggagcgaacatatgagcgaaactactcaaataggtgttatttatgcccggtattcctcggacaaacaacgg

SEQ ID NO: 18665 - DNA, 260 bp, Unknown
  Description of Unknown: LeftRegion for integrase B5666 sequence
ctatttgctggggtattctgataaaatcacgcggctgtccggggatcacaccgaccccacatctggcccctgtgttgaagttactgctgcggagctggagctgctgaaggctttccggcacgccggagctgagacccaggcagcgatcagagcgatcctgcacatttaacgggaggaccccgggaagggaggacggtgccatgcgcggcgtcatttatgcgagatattcaccaggcccgcaccagacggagcagtccatc

SEQ ID NO: 18666 - DNA, 260 bp, Unknown
  Description of Unknown: LeftRegion for integrase B5667 sequence
tattggaaaatctaattccggtactatccccggatgaaaagaacaagcgaaaaagagaaatcgaaaatcacttatatgatgtgttcagtaaatacacggacagattttactaatcaaccgcaacattgttgtccggggctgcctatggtataatataattgtaaggttggtagctccattccatacggaaggagcccaatatggacattatcagagaagattgtatatacgcgagacagtcggtagaccgtaaggacagt

SEQ ID NO: 18667 - DNA, 260 bp, Unknown
  Description of Unknown: LeftRegion for integrase B5668 sequence
ctatttgctcggcttcactgacaagatcgaaaagccggccggtgatgagactgacgtcgctgccaataagtacctggcggtaactctcgcagagatcgacctgatcgaagcataccggcacgccggagctgagactcaggcagcgatcagagcgatcctgcacatttaacgggaggcccccgggaagggaggacggtgccatgcgcggcgtcatttatgcgagatattcaccaggcccacgccagacggagcagtccatc

SEQ ID NO: 18668 - DNA, 260 bp, Unknown
  Description of Unknown: LeftRegion for integrase B5669 sequence
gcttgtacatatattataaagtagcaattttgtacaaggaaggaggagtaatggaactaataaaagtaaattatatgaatggatataaaataaataattatgctacggaaataactaaagaagaagaagaggagatagtttttaacatatacaaaatattaacaaaagatgataaaatggataacaaggaagtgatgtagatgatagcaatatacgctagacaaagtgtagacaaaaaggattctatctccatagagagc

SEQ ID NO: 18669 - DNA, 260 bp, Unknown
  Description of Unknown: LeftRegion for integrase B5670 sequence
atgagttgaagaagtgaagtcccggatggacaagaaattttcaagaattgaaaatttgtggccacgggacgattcttgctctcagctttttcgctgcgtttcgcaattttcacatttcaatctgctcgcagattgttgacaagctgcgcttgacccgatactataaaggcaagtcgaatacacgccaaggaggtgcaaccatgaccgccgtgatctacgcccgctattcatctgacagccagcgagaagcgtccattgaa

SEQ ID NO: 18670 - DNA, 260 bp, Unknown
  Description of Unknown: LeftRegion for integrase B5671 sequence
atatattttagactaaaacaatagaaaataaaaaccgccctactctttcaagcaaggcggtcagcttccggattaatacgaaagccctacacaagcatattgtatcattccggaagcagctacgcaagcggaacacccgttcctcgccggctgttatttttgtacccattttttcatacacttaacaaaggagtgataacatgactgacaacacctccatgcgtaccggtgccctctacatccgggtatcgaccggcaag

SEQ ID NO: 18671 - DNA, 260 bp, Unknown
  Description of Unknown: LeftRegion for integrase B5672 sequence
tagaacgtaatgaaaaactcattatattaggtgttagattaaaaactattaaaaatatcgctaatgcacttaatgtaaatgaaaataaaatattaattttggataaggactagattatatatttttattaatctagtccttattttattgaattacatctattaattacatataataaatgtaaaaggaggggctttccaatgactaataaaatatgtatttatttaagaaaaagtcgtgctgatgaagaattagaaaaa

SEQ ID NO: 18672 - DNA, 260 bp, Unknown
  Description of Unknown: LeftRegion for integrase B5673 sequence
gctacatccttcctgccggtgctgaaaaaattatctgattactataaagaaatttaaataaaaaatcccccttccctgttggcgcagagaaagaggattcataaagcggtcgcatgatacaaccactcctcgcaacagtattgtatcataagaccgctttctttgctatacatttttatagacagaaggaggtcttttttatgattgcgatttatgcacggcagtctgtcgagaaaaaggacagcatcagcattgaatct

SEQ ID NO: 18673 - DNA, 260 bp, Unknown
  Description of Unknown: LeftRegion for integrase B5674 sequence
ttattgatgattttaggctatgcatttataatccttacaataaagcagataataacaaaaacttgcgaatttttgaggattatattaggcttacactattgccaaaaaatgtcttgaaaaggttaaatgattactatataacaataaattcaaagttttaggggctatgcccctttaattttttaattaggagcgaacatatgagcgacactactcaaataggtgttatttatgcccggtattcctcggacaaacaacgg

SEQ ID NO: 18674 - DNA, 260 bp, Unknown
  Description of Unknown: LeftRegion for integrase B5675 sequence
catccagtgattttttacaacaaaattttaaaataccgccctactctttcaagcaaggcggcttgcttccgaataatacgaaagccctaagcaagcatattgtatcattccggaagcagctacgcaagcggaacacccgttcctcgctggctgttatttttgtacccattttttcatacacttaacaaaggagtgataacatgaccgacaacacctctatgcgtactggtgccctctacatccgggtatctaccggtaag

SEQ ID NO: 18675 - DNA, 260 bp, Unknown
  Description of Unknown: LeftRegion for integrase B5676 sequence
tcataatgcaacagttaaatttacaatgattgcagaagctacacaatatcgcgaaagtttaaaacttgccaacacataataaaattcccccggctgttcgtgcagctgggggaaaaggagtgcatgcgataaacacacgcaccaatgacgtgtttattatatcatatacgctccgaaaaagcaagaaaaggagtatttttatgaacgcagtaatatatgccagattttcttcagataatcaatcggaggaaagcattacg

SEQ ID NO: 18676 - DNA, 260 bp, Unknown
  Description of Unknown: LeftRegion for integrase B5677 sequence
ctacctgctgggatatactgataagattgagaagccggcaggcgatgaaacagaccccgccgctaataagtttctggccgtaactctggccgagatcgacctgatcgaagcataccggcacgccggagctgagacccaggcagcggtcagagcgatcctgcacatttaacgggaggaccccgggaagggaggacggtgccatgcgcggcgtcatttatgcgagatattcaccaggcccgcaccagacggagcagtccatt

SEQ ID NO: 18677 - DNA, 260 bp, Unknown
  Description of Unknown: LeftRegion for integrase B5678 sequence
atgaagaaataattggagctttattacacctatctggtactttaaatggattggctctccattttaatgttactgaagaaatcataaaatataagttattatcaatctacctaaaggaagataagtttagaatatctaaatcaatgattatggaagatgaaataatttataattcttgttctgtttaatggaggtctattatgaaaaaagttgctatttattcaaggaaatctgttttagttgaaggatcagtatccata

SEQ ID NO: 18678 - DNA, 260 bp, Unknown
  Description of Unknown: LeftRegion for integrase B5679 sequence
tttcgatcaagggcttatgacagtcttgcccgatcttacgattcaggtctcggactatgtgaaggacagctatgacgaccagaatacaagagactggctgcttggcgtagagggtacaaaaatcatcaggccaaagagattcgcgccaaatcgcgatatgctggcctatcacaatgagttcgtcttcctgaggtgattccatgcagcgagcagtgatatatgccaggtacagccctggaccaaatcagacagagcagtcg

SEQ ID NO: 18679 - DNA, 260 bp, Unknown
  Description of Unknown: LeftRegion for integrase B5680 sequence
gttttgtatttagtttaaaactaataattacccgccctaacaactttaaagaaatgattaaaaatgctaaaataatgaactcatatagaaataatgggtatgcagtagactacaaaacaaccgaagaagaacaaaaacgatttgaaaaaaaatacaaagaatacaattacagctacaaaaactataaaaaaggataaaatatggctaataacgcagttttatatacaagggtttcgtccgacgaacaaaagaaaacgggc

SEQ ID NO: 18680 - DNA, 260 bp, Unknown
  Description of Unknown: LeftRegion for integrase B5681 sequence
ttattggttgtaggattaaatcctggaaaaagcaaattattaaaagctaaagatttaaatttagttattatttctgaagataaattttgggatattattaattctaaaacttatccttattaaacttatatatttatttaaggacaagtaaactattttatttgttcttaaatagtttattttaccaaggagtgttataaatgaataataaaatatgtatgtatcttagaaaaagtcgtgctgatgaagaacttgaaaaa

SEQ ID NO: 18681 - DNA, 260 bp, Unknown
  Description of Unknown: LeftRegion for integrase B5682 sequence
gtcattcagtaattttttacaacaaaatttttaaaaaccgccccactctaaagcaaggcggtcagcttccgaataatacgaaagccctaagcaagcatattgtatcattccggaagcagctacgcaagcggaacacccgttcctcgctggctgttatttttgtacccattttttcatacacttaacaaaggagtgataacatgcccgacaacacctccatgcgtaccggtgccctctacatccgggtatcgaccggcaag

SEQ ID NO: 18682 - DNA, 260 bp, Unknown
  Description of Unknown: LeftRegion for integrase B5683 sequence
cgtccgggatctgatcgttcgctgcttccagaaggcccagctgaacgccgagaagctgaagacagagaagggaaagctcggccagtttgagaagttccagagctctctggaggtgtacttcttccggatgtctggcgagaacgcccggctggtccaggatctacacgatgaagcactgaagcagatcggagggtgagcctatgcgtggcgttatttatgccagatactcaccgggcccacgccagacggagcagtccatc

SEQ ID NO: 18683 - DNA, 260 bp, Unknown
  Description of Unknown: LeftRegion for integrase B5684 sequence
tacttgctggggtattctgataaaatcacgcggctgtccggggaccacaccgaccccacatccggcccctatgttgaagtcactgctgcggagctggagctgctgaaggctttccggcacgccggagctgagacccaggcggcgatcagagcgatcctgcacatttaacgggaggacccccgggaagggaggacggtgccatgcgcggcgtcatttatgcgagatattcaccgggcccacgtcagacagagcagtccatc

SEQ ID NO: 18684 - DNA, 260 bp, Unknown
  Description of Unknown: LeftRegion for integrase B5685 sequence
tatatcccctgcaaacgctgttgtaaataaaaataccgccccactctttcaagcaaggcggtatgcttccgaataatacgaaagccctaagcaagcatattgtatcattccggaagcagctacgcaagcggaacacccgttcctcgctggctgttatttttgtacccattttttcatacacttaacaaaggagtgataacatgaccaacaacacctccatgcgtaccggtgccctctacatccgggtatctaccggcaag

SEQ ID NO: 18685 - DNA, 260 bp, Unknown
  Description of Unknown: LeftRegion for integrase B5686 sequence
atacaaaaggggataaaaataaatataaacctaaagattatgaaatttcttaaaagttaaactctcaaaaattatacgaaggaaagtttgaaatgaaccgtaacataatttatacataataataaaatacacttaataatctcataagaataactaattatctatcttttgaaaatatatctttagaaggaggtgcttatatgaaaagaatagcaatttacagtagaaaatctgtatatatagaaggttctatatcaata

SEQ ID NO: 18686 - DNA, 260 bp, Unknown
  Description of Unknown: LeftRegion for integrase B5687 sequence
acgaagaaataattggagctttattacatatatcaggtactttaagtggattatctctccattttaatgttactgaagaaattataaaatataagttattatcaatctacctaaaagaagataagtttagaatatctaaattaatggttatggaagatgaaataatttataattcttgttacgtttaatggaggtctattatgaaaaaagttgctatttattcaagaaaatctgttttagttgaaggatcagtatccata

SEQ ID NO: 18687 - DNA, 260 bp, Unknown
  Description of Unknown: LeftRegion for integrase B5688 sequence
tggcaaagaagaaaaagttgtatcttttacattagataaaaatactatacaaggtataaaagacggaaatatagtagccaatgaaatagtaaatacatatgcaaatgatgtatacatacatcaaagtttaaaataatattaataatataataaacatcagggcagtccacagctgctctttttaattaggagggaataaaatgaaaacatgtatatatttaagaaaaagccgtgctgatgaagaactggagaaaaaagaa

SEQ ID NO: 18688 - DNA, 260 bp, Unknown
  Description of Unknown: LeftRegion for integrase B5689 sequence
ctacctgctgggatttactgataaaatcgagaagccggcaggcgatgaaacggatcctgctgccaataagttcctggccgtaactctggccgagatcgacctgatcgaagcataccggcacgccggagctgagacccaggcggcgatcagagcgatcctgcacatttaacgggaggaccccgggaagggaggacggtgccatgcgcggcgtcatttatgcgagatattcaccgggcccacgtcagacggagcagtccatc

SEQ ID NO: 18689 - DNA, 260 bp, Unknown; identical to SEQ ID NO: 13412
  Description of Unknown: LeftRegion for integrase B5690 sequence

SEQ ID NO: 18690 - DNA, 260 bp, Unknown
  Description of Unknown: LeftRegion for integrase B5691 sequence
actatatagaaaataaaaataactatagaagtcaaaatatatcaagtgatgcagatgaattaatgaaattcaaaaaacttctagatatgggtgctataactgaagaagaatatgaaaataaaaaagaacaaatattaaaattatagacaaacatcagggcagttttaccagctgctctttttttataaggagggttaccaatgaaaacatgtatataccttagaaaatctagggctgatgaagaattagaaaagaaagaa

SEQ ID NO: 18691 - DNA, 260 bp, Unknown; identical to SEQ ID NO: 13468
  Description of Unknown: LeftRegion for integrase B5692 sequence

SEQ ID NO: 18692 - DNA, 260 bp, Unknown
  Description of Unknown: LeftRegion for integrase B5693 sequence
tagattcacaaaatcaacaaaagtaaaaataaaaaccgccctactctttcaagcaaggcggcatgcttccgaataatacgaaagccctaagcaagcatattgtatcattccggaagcagctacgcaagcggaacacccgttcctcgctggctgttatttttgtacctattttttcatacacttaacaaaggagtgataacatgaccgacaacacctccatgcgtaccggtgccctctacatccgggtatcgaccggcaag

SEQ ID NO: 18693 - DNA, 260 bp, Unknown
  Description of Unknown: LeftRegion for integrase B5694 sequence
aatatttaaaaggcggcaaatttgcagtcaagccaacagataggggtatagcaatgatagcatcaatgaattaaaataaaaaattccccgctcgatgttggcgcatcgaacggggagagggatatgtataaaatacacaccacagtaactgtattttatcatatcctgacgaaaaaatcaataggagtgataacaaatatatgaaaaccgccgtaatatacgcccggtattcgtccgacaagcagacggagcagtccatc

SEQ ID NO: 18694 - DNA, 260 bp, Unknown
  Description of Unknown: LeftRegion for integrase B5695 sequence
ctggaaagcctcacgccggtacttcccccgaaggagaaagaacagcgcaaaaaagaaattgagcgttgtctttacgaggtgttcagcaaatatggggacagatttccctaatcattcgcaacattgttgtccggggctgctgatggtataatatagttgtaaggttggtagctccattccaacaaggaaaggagcccaatatggaatttatcagagaagattgtatttacgcaagacagtcagtagaccgcaaggacagt

SEQ ID NO: 18695 - DNA, 260 bp, Unknown
  Description of Unknown: LeftRegion for integrase B5696 sequence
atgcaataatagttgcaaatttgtaaaaaaaatagtcaaatttgttgatttttttttacaaaacatctataatataagaacaaagaggtttagcctcaaactaaaattattataagcggttcagccgcaactagagataaggtcttgttcttatacgttcaggaccttatctctttttatttgccattaggagcgaacatatgagcgaaactactcagataggtgttatttatgcccgatattcctcagacaaacaacgg

SEQ ID NO: 18696 - DNA, 260 bp, Unknown
  Description of Unknown: LeftRegion for integrase B5697 sequence
atgcaataaaagttgtaattttctacagaaaaattgacaaatttgttgatttttttatataaaaaatctataatataagaacaaagaggttaagcctcaaactaaaattattataagcggtttagccgaaaaaaagataaggtcttgttcttatacgttcaaggccttatctttttttatttgtcataaggagcgaacatatgagcgaaactactcagacaggtgttatttatgcccgatattcctcggacaaacaacgg

SEQ ID NO: 18697 - DNA, 260 bp, Unknown
  Description of Unknown: LeftRegion for integrase B5698 sequence
tatttgctgggttattctgataaaatcacgcggctgtccggggatcacaccgaccccacacccggcccctgtgttgaagttaccgctgcggagctggagctgctgaaggctttccggcacgccggagctgagacccaggcagcgatcagagcgatcctgcacatttaacgggggggaccccgggaagggaggacggtgccatgcgcggcgtcatttatgcgagatattcaccaggcccgcaccagacggagcagtccatc

SEQ ID NO: 18698 - DNA, 260 bp, Unknown
  Description of Unknown: LeftRegion for integrase B5699 sequence
gctacatccttcctgccggtgctgaaaaaattatctgattactataaagaaatttaaataaaaaatcccccttccctgttggcgcagggaaaggagattcataaagcggtcgcatgatacaaccactcctcgcaacagtattgtatcataagaccgctttctttgctatacatttttataagcagaaggaggtcttttttatgattgcgatttatgcacggcaatccgtcgagaaaaaggacagcatcagcatcgaatct

SEQ ID NO: 18699 - DNA, 260 bp, Unknown
  Description of Unknown: LeftRegion for integrase B5700 sequence
caaaaaattcactcatttagatgttccatagactatttatggttgttttaacaactacataccatacatagttacagagagttacacaaaatactattagaaggtgccattcaacatagactctccctaacagtattggtaaattcttaagcaactagcttatataagtttgtctagagacccataggattcaccataccatgaagaaagcgtattcatacatccggtttagctcagaagctcaaagacaaggtgactca

SEQ ID NO: 18700 - DNA, 260 bp, Unknown
  Description of Unknown: LeftRegion for integrase B5701 sequence
ctggaaagcctcacgccggtacttcccccgaaggagaaagcacagcgcaaaaaagaaattgagcgttgtctttatgaggtgttcagaaaatatggggacagatttccctaatcattcgcaacattgttgtccggggctgctgatggtataatatagttgtaaggttggtagctccattccaacaaggaaaggagcccaatatggaatttatcagagaagattgtatttacgcaagacagtcagtagaccgcaaggacagt

SEQ ID NO: 18701 - DNA, 260 bp, Unknown; identical to SEQ ID NO: 18653
  Description of Unknown: LeftRegion for integrase B5702 sequence

SEQ ID NO: 18702 - DNA, 260 bp, Unknown
  Description of Unknown: LeftRegion for integrase B5703 sequence
gtccgtcgccgtatgccgccaagagataataggctcccaatgtcgggagcgatgatagtcaaaaagcacggagggaaaaatatatcggtaaaagttcttgataagggttttgaatacgaagggcgcaattatcgttcattgtcggcaatcgcccgcgaaattacgggaactaactggaacggatttaaatttttcgatctatgaaaacggatagcaataaagaattgagatgtgcaatatacacgagaaagtctgtcgca

SEQ ID NO: 18703 - DNA, 260 bp, Unknown
  Description of Unknown: LeftRegion for integrase B5704 sequence
atatatcccctgcaaacgctgttgtaaataaaaaaccgccctactctttcaagcaaggcggcatgcttccgaataatacgaaagccctaagcaagcatattgtatcattccggaagcagctacgcaagcggaacacccgttcctcgctggctgttatttttgtacccattttttcatacacttaacaaaggagtgatcacatgaccaacaacacctccatgcgtaccggtgccctctacatccgggtatctaccggtaag

SEQ ID NO: 18704 - DNA, 260 bp, Unknown
  Description of Unknown: LeftRegion for integrase B5705 sequence
tattgaaaagttagttgaagctaatttgaatcaaataaaacattatgaactagcagaatatttaaatgtaacagatgaatttttaaccgaagctatactatattataaaagcaaatatggcatgtatgttaactataagaattatattttaatgtttgaaccttttggtttactagaatcttttgataggagataaatatatgaataaagtttgtatctacttaagaaaatctagagctgacgaagaaatagaaaaagct

SEQ ID NO: 18705 - DNA, 260 bp, Unknown; identical to SEQ ID NO: 16075
  Description of Unknown: LeftRegion for integrase B5706 sequence

SEQ ID NO: 18706 - DNA, 260 bp, Unknown
  Description of Unknown: LeftRegion for integrase B5707 sequence
aatatattttagactaaaacaatagaaaataaaaaccgccctactctttcaagcaaggcggtatgcttccgaataatacgaaagccctaagcaagcatattgtatcattccggaagcagctacgcaagcggaacacccgttcctcgctggctgttatttttgtacccattttttcatacacttaacaaaggagtgataacatgaccgacaacacctccatgcgtaccggtgccctctacatccgggtatcgaccggtaag

SEQ ID NO: 18707 - DNA, 260 bp, Unknown
  Description of Unknown: LeftRegion for integrase B5708 sequence
actagaacgtaatgaaaagatagttgtattgggtgtcaagctaaaaattataaaaaatattgctaaagctcttaatgtcagtgaaagaaaaatattaattttagacaaggactaggttatatacttttaataacctagtttttattttcttgaattacatacattaaatacatataatgaatgtaaaggaggttattttcatgaataataaaatatgtatgtatcttagaaaaagtcgtgctgatgaagaacttgaaaaa

SEQ ID NO: 18708 - DNA, 260 bp, Unknown
  Description of Unknown: LeftRegion for integrase B5709 sequence
agccgagaaagcggtatatctaatcaaaaagttgctttctgatggcgatatgagatctagagaaatctatatacggctaagcgatgaaggcatcagccgcagaacggcagaaaacataaaaaaggcactcggcatccgaagttaccggaggatgcgtcagtggtattggagcatccagccggaagattgagaggaaacaaatgacaaaaagtgaacagcaagagcgtaaacaaaaaattagagaacgttataaaggcgca

SEQ ID NO: 18709 - DNA, 260 bp, Unknown
  Description of Unknown: LeftRegion for integrase B5710 sequence
tcatccagtgattttttacaacaaaattttaaaaaccgccctactctttcaagcaaggcggcatgcttccgaataatacgaaagccctaagcaagcatattgtatcattccggaagcagctacgcaagcggaacacccgttcctcgctggctgttatttttgtacccattttttcatacacttaacaaaggagtgataacatgaccgacaacacctctatgcgtaccggtgccctctacatccgggtatctaccggtaag

SEQ ID NO: 18710 - DNA, 260 bp, Unknown
  Description of Unknown: LeftRegion for integrase B5711 sequence
acaccctttcaaatcttgtaatagcgatatgtatatatttatattatatcatatattttattacatatcaagagataaataaaaaaaacgccccaaaagatgctggaacatctctcggagcgcaggagaatgtggtacattcaccattcatacaatgtgaattataccatatcctccaagaaaagtcaaggaggaattaaatgaaaaccgccgtaatatacgcccgatactcttcggacaagcagacggagcagtccatc

SEQ ID NO: 18711 - DNA, 260 bp, Unknown
  Description of Unknown: LeftRegion for integrase B5712 sequence
gctggaaaacctgacgccgatactctccccggaggaaaagaagaagcgaaaaagagaaatcgaaaataacctgtacgatatattcagcaagtacggggacaggtttcgctaatcaatcgcaacattgtcgtccggggctgctaatggtataatatagttgtaaggttggtagctccattccatacggaaaggagcccaatatggacattatcagagaagattgtatttacgcaaggcagtcagtagaccgaaaggacagt

SEQ ID NO: 18712 - DNA, 260 bp, Unknown
  Description of Unknown: LeftRegion for integrase B5713 sequence
agcaataattatatctagatatataaatattatacttactaatagtatatacaattataaaaaaataattcattttattaaaataaaaataatttgagtagtctaaaagctactcttcttatatactttttattcgtatatatatattctataatatcaatcaaaatacattaataaaatatgataaggaggtaataaacatgaaaacatgtatctatctaagaaaaagccgtgccgatgaggaagcagaaaagcagggc

SEQ ID NO: 18713 - DNA, 260 bp, Unknown
  Description of Unknown: LeftRegion for integrase B5714 sequence
gtatcaatgatttactccattcgaacataaaaaaaccgccctactctttcaagcaaggcggcatgcttccgaataatacgaaagccctaagcaagcatattgtatcattccggaagcagctacgcaagcggaacacccgttcctcgctggctgttatttttgtacccattttttcatacacttaacaaaggagtgataacatgaccgacaacacctccatgcgtaccggtgccctctacatccgggtatcgaccggcaag

SEQ ID NO: 18714 - DNA, 260 bp, Unknown
  Description of Unknown: LeftRegion for integrase B5715 sequence
gagtatcccgtgttttttgctgaaaaaggaaccaaaggaacggatcaccgaccggcttggtatatccgattccaataaaaaatccgcccaggctgctacctgtgcggatcaaacgcaaggaaaatgcaaacaccactaagcactttccgcagtcagtatatcacaagctgcctgcgttgtaaagtcggaaaggattaagattgaacgctgtaatctacgcccgtttctcgtcgcacagccagcgggagcagtccatcgaa

SEQ ID NO: 18715 - DNA, 260 bp, Unknown
  Description of Unknown: LeftRegion for integrase B5716 sequence
tgctacatccttcctgccggtgctgaaaaaattatctgattactataaagaaatttaaataaaaaatccccttccctgttggcgcagagaaagaggattcataaagcggtcgcatgatacaaccactccttgcaacagtattgtatcataagaccgctttctttgctatacatttttatagacagaaggaggtcttttttatgattgcgatttatgcacggcaatccgtcgagaaaaaggacagcatcagcatcgaatct

SEQ ID NO: 18716 - DNA, 260 bp, Unknown
  Description of Unknown: LeftRegion for integrase B5717 sequence
ataatgaaataatcggagctatactccaaaatgtaaatactatatatggactctcaatccattttaatgttactgaagaaattataaaatataagttattatcaatctacctaaaggaagataagtttagaatatctaaattaatgattatggaagatgaaataatttataattcttgttctgtttaatggaggtctattatgaaaaaagttgctatttattcaaggaaatctgttttagttgaaggatcagtatccata

SEQ ID NO: 18717 - DNA, 260 bp, Unknown; identical to SEQ ID NO: 18700
  Description of Unknown: LeftRegion for integrase B5718 sequence

SEQ ID NO: 18718 - DNA, 260 bp, Unknown
  Description of Unknown: LeftRegion for integrase B5719 sequence
gtatcaatgatttactccattcgaacataaaaaaaccgccctactctttcaagcaaggcggcatgcttccgaataatacgaaagccctaagcaagcatattgtatcattccggaagcagctacgcaagcggaacacccgttcctcgctggctgttatttttgtacccattttttcatacacttaacaaaggagtgataacatgaccgacaacacctccatgcgtaccggtgccctctacatccgggtatctaccggtaag

SEQ ID NO: 18719 - DNA, 260 bp, Unknown
  Description of Unknown: LeftRegion for integrase B5720 sequence
gctacatccttcctgccggtgctgaaaaaattatctgattactataaagaaatttaaataaaaaatcccctctccctgttggcgcagagaaagaggattcataaagcggtcgcatgatacaaccactcctcgcaacagtattgtatcataagaccgctttctttgctatacatttttatagacagaaggaggtcttttttatgattgcgatttatgcgcggcaatccgtcgagaaaaaggacagcatcagcattgaatcc

SEQ ID NO: 18720 - DNA, 260 bp, Unknown; identical to SEQ ID NO: 18706
  Description of Unknown: LeftRegion for integrase B5721 sequence

SEQ ID NO: 18721 - DNA, 260 bp, Unknown; identical to SEQ ID NO: 18657
  Description of Unknown: LeftRegion for integrase B5722 sequence

SEQ ID NO: 18722 - DNA, 260 bp, Unknown
  Description of Unknown: LeftRegion for integrase B5723 sequence
gaacaggacaatcctgattgaaaacgcaacgcctgtttatcgttgggaagaacgagagactgtcaaaaaagccattgaagaacggctttatgatattttctgtaaatatgcgtcaagttaaagcttgagttgttggagctgctcccttataattaaggtgttagcagctccgcttctttttgcgaagaagggagcaacaagtgaacctaatcgacgcaatttatacacggcaatcggttgaccggatcgacagcatatcc

SEQ ID NO: 18723 - DNA, 260 bp, Unknown
  Description of Unknown: LeftRegion for integrase B5724 sequence
gtacgccgccgtatgccgccaagggacaataggctcccaatgtcgggagcgatgatagtcaaaaagcacgaagggaaaaacatatcggtaaaagttcttgataagggctttgaatacgaagggcgcaattatcgttcattgtcggcaatcgcccgtgaaattacgggaactaactggaacggatttaaatttttcgatctatgaaaacggataaaaagaaagaattgagatgcgcgatatacacgagaaagtctgtcgcc

SEQ ID NO: 18724 - DNA, 260 bp, Unknown
  Description of Unknown: LeftRegion for integrase B5725 sequence
aacagagtaatatctgcaatgcttgttatggtatttgtcacctgatggctgtacggaaatgaccaaggatcaagccgaacagtcaggatacgaagcttgtaaagtctgcggcggataaataaaaaacgccgtccgagctttgctggtgctcggacggcaataaattatgcaattaaaaccactgcaaaggaggtcaaaaaatgccctactgcatatatctgagaaaatcccgaaaagacatggagttggagcaatacggt

SEQ ID NO: 18725 - DNA, 260 bp, Unknown
  Description of Unknown: LeftRegion for integrase B5726 sequence
ttaaataaaaactataattttgtacaaaaaaatagtcaaatttgttgatttttttgtacaaaccatctataatataagaacaaagaggttaagcctcaaactaaaattattataagcggttcagccgcaactagagataaggtcttgttcttatacgttcaagaccttatctctttttatttgtcacaaggagcgaacatatgagcgaaactactcaaataggtgttatttatgcccggtattcctcggacaaacaacgt

SEQ ID NO: 18726 - DNA, 260 bp, Unknown
  Description of Unknown: LeftRegion for integrase B5727 sequence
aaattgctgattttttaggggttactgaaagttacttagaagatgcaatagattattatagatgtaaatacggtgtttcttacaaaatagataattatgaagttagatttattcctaacttaatgattggtaagttcttttaaaattaaagtctcttagacaattttgactaagagattttttaatatggagggattaacatgaaaaaagtagcaatttacagtagaaaatctgtttatatagaaggttctgtttcaata

SEQ ID NO: 18727 - DNA, 260 bp, Unknown
  Description of Unknown: LeftRegion for integrase B5728 sequence
atatattttagactaaaacaatagaaaataaaaaccgccctactctttcaagcaaggcggtcagcttccggattaatacgaaagccctacgcaagcatattgtatcattccggaagcagctacgcaagcggaacacccgttcctcgccggctgttatttttgtacccattttttcatacacttaacaaaggagtgataacatgactgacaacacctccatgcgtaccggtgccctctacatccgggtatcgaccggcaag

SEQ ID NO: 18728 - DNA, 260 bp, Unknown
  Description of Unknown: LeftRegion for integrase B5729 sequence
acgaagaaaacaagaaaaatatttcttttgaagtcagtgaatcactacatagtaaaataacagaatttgcaaaaactcataatgtgtctaaaaaggaactttttaatgcttttattataggactttgcaaagattaacatttagtatatagagcagtttattagctgctctttttaattgaatgacaaggaggaccaccaatgaaaacatgtatataccttagaaaatctagggctgatgaagaactagagaaaaaagaa

SEQ ID NO: 18729 - DNA, 260 bp, Unknown
  Description of Unknown: LeftRegion for integrase B5730 sequence
agaaaacgagggtgacaaaattactagcgatgaacgcgaaatcgtcgataactaccgtgacagctcgccggaatggcaacagaacatttcgatgaccgccagagctgcggcatctgaatcaaaaagaaaataaaaaagccccagcgctaccgtccaaagtctcgcaggggcatacctaaaaaaggcaaggtgattttatcatgccaaagggcacgcgtgccgccatctatgcacgtttcagttcgcataaccagcgaagt

SEQ ID NO: 18730 - DNA, 260 bp, Unknown
  Description of Unknown: LeftRegion for integrase B5731 sequence
ctacctgctgggatatactgataagattgagaagccggcaggcgatgaaacggaccccgccgctaataagtttctggccgtaactctggccgagatcgacctgatcgaagcataccggcacgccggagctgagacccaggcagcgatcagagcgatcctgcacatttaacgggaggaccccgggaagggaggacggtgccatgcgcggcgtcatttatgcgagatattcaccaggcccgcaccagacggagcagtccatc

SEQ ID NO: 18731 - DNA, 260 bp, Unknown
  Description of Unknown: LeftRegion for integrase B5732 sequence
ttacatatttcagaatatggtatcagaaagatgatgatgcagccagcagatccgataatggaaatctttgatttataaataaaaatccccgctcgatgttgcagcaccgaacgggggaagaagctgtgatacaatcacaaccttagacaagcttattgtatcacagctccctgaaaatgtcaaggagtgataacaaatatatgaaaaccgccgtaatatacgcccgatattcatcggacaagcagacagagcagtccatt

SEQ ID NO: 18732 - DNA, 260 bp, Unknown
  Description of Unknown: LeftRegion for integrase B5733 sequence
ctatttgctggggtattctgataaaatcacgcggctgtccggggatcacaccgaccccacatccggcccctgcgttgaagttactgctgcggagctggagctgctgaaggctttccggcacgccggagctgagactcaggcagcgatcagagcgatcctgcacatttaacgggaggaccccgggaagggaggacggtgccatgcgcggcgtcatttatgcgagatattcaccaggcccgcaccagacggagcagtccatc

SEQ ID NO: 18733 - DNA, 260 bp, Unknown; identical to SEQ ID NO: 18700
  Description of Unknown: LeftRegion for integrase B5734 sequence

SEQ ID NO: 18734 - DNA, 260 bp, Unknown
  Description of Unknown: LeftRegion for integrase B5735 sequence
aatatattttagactaaaacaatagaaaataaaaaccgccctactctttcaagcaaggcggcatgcttccgaataatacgaaagccctaagcaagcatattgtatcattccggaagcagctacgcaagcggaacacccgttcctcgctggctgttatttttgtacccattttttcatacacttaacaaaggagtgataacatgactgacaacacctccatgcgtaccggtgccctctacatccgggtatctaccggtaag

SEQ ID NO: 18735 - DNA, 260 bp, Unknown
  Description of Unknown: LeftRegion for integrase B5736 sequence
tcgaagcaaacgaaacacacaacaacgaagcaagagagcattattgcatacgcgccgtttccaaccagtaaattctacaaaaaaccgccccggctttcgccgggacggaacatttggaaagcgaaaacaccactaaacgccctccgccaccagtatagcactgccgcgcggagatgtaaagcacagagagggaaatttacatgaacgcagttatctacgcgcgtttttcatcgcataaccaacgggaacaatccatcgaa

SEQ ID NO: 18736 - DNA, 260 bp, Unknown
  Description of Unknown: LeftRegion for integrase B5737 sequence
actagagcgtaatgaaaaagtcgttgtattaggtgttagactaaagattattaaaaatattgctaaagctcttaatgtaagtgaaggaaaaatattaatattagacaaggactaggttatatatttttaataacctagtttttattttattgaattacatacattaaatacatataatgaatgtaaaggaggttgttttcatgaataataaaatatgtatgtatcttagaaaaagtcgtgctgatgaagaacttgaaaaa

SEQ ID NO: 18737 - DNA, 260 bp, Unknown
  Description of Unknown: LeftRegion for integrase B5738 sequence
tcatccagtgattttttacaacaaaattttaaaaaccgccctactctttcaagcaaggcggtatgcttccgaataatacgaaagccctaagcaagcatattgtatcattccggaagcagctacgcaagcggaacacccgttcctcgctggctgttatttttgtacccattttttcatacacttaacaaaggagtgataacatgaccgacaacacctccatgcgtaccggtgccctctacatccgggtatcgaccggcaag

SEQ ID NO: 18738 - DNA, 260 bp, Unknown
  Description of Unknown: LeftRegion for integrase B5739 sequence
ctacctgctgggatatactgataagattgagaagccggcaggcgatgaaacggaccccgccgccaataagtttctggccgtaactctggccgagatcgacctggtcgaagcataccggcacgccggagctgagacccaggcagcgatcagagcgatcctgcatatctaacgggaggcccccgggaagggaggacggtgccatgcgcggcgtcatttatgcgagatattcaccaggcccgcaccagacggagcagtccatc

SEQ ID NO: 18739 - DNA, 260 bp, Unknown; identical to SEQ ID NO: 18715
  Description of Unknown: LeftRegion for integrase B5740 sequence

SEQ ID NO: 18740 - DNA, 260 bp, Unknown
  Description of Unknown: LeftRegion for integrase B5741 sequence
cttccctatttgcatatattgttttatgaggtgaggaacaaatggatataaagaacatctaccccaatctgaccgacgatcttagcactttagccattattgccaatcagcttttaactgaaattgatttgcaattatcccaagcacaggttataattaaatcaagcgatgacgtgtactgtgtaaattaggagggacacatgaatgcagtatacgccagacaatcattagataaaaaagacagtttatctatcgaaaca

SEQ ID NO: 18741 - DNA, 260 bp, Unknown
  Description of Unknown: LeftRegion for integrase B5742 sequence
ctgtgccgacagcggcctgggatattccccgccggggatgcgtggcaaatgcggcgaacctgatttacagcagattgaaatggatattctatgctttcttctggccatccttgccccaccgcatccttgccgctccgtgccgcccgaggtataatataggtgtaaggtttggtagctcctgaaacagaaaggagtaccaaatgaacattcgggaagatgcaatttacggacggcaatcggtagaccgcaaggacagtatc

SEQ ID NO: 18742 - DNA, 260 bp, Unknown
  Description of Unknown: LeftRegion for integrase B5743 sequence
cttccctattcgcatatattgttttatgaggtgaggaacaaatggatataaagaacatctaccccaatctgaccgacgatcttagcactttagccattattgccaatcagcttttaactgaaattgatttgcaattatcccaagcacaggttataattaaatcaagcgatgacgtgtactgtgtaaattaggagggacacatgaacgcggtatacgccagacaatcgttagataaaaaggacagtttatctatcgaaaca

SEQ ID NO: 18743 - DNA, 260 bp, Unknown
  Description of Unknown: LeftRegion for integrase B5744 sequence
cttccctatttgcatatattgttttatgaggtgaggaacaaatggatataaagaacatctaccccaatctgaccgacgatcttagcactttagccattattgccaatcagcttttaactgaaattgatttgcaattatcccaagcacaggttataattaaatcaagcgatgacgtgtactgtgtaaattaggagggacacatgaacgcggtatacgccagacaatcgttagataaaaaggacagtttatctatcgaaaca

SEQ ID NO: 18744 - DNA, 260 bp, Unknown
  Description of Unknown: LeftRegion for integrase B5745 sequence
cacgccccaacaagaagctgtcccaaagtggcaagaattttcaagaattgaaaatttgtggccacgggacgattcttgctctcacctttttcgctgcgtttcgcaattttcacatttcaatctgctcgcagattgttgacaagctgcgcttgacccgatactataaaggcaagtcgaatacacgccaaggaggtgcaaccatgaccgccgtgatctacgcccgctattcatccgacagccagcgtgaagcgtccattgag

SEQ ID NO: 18745 - DNA, 260 bp, Unknown
  Description of Unknown: LeftRegion for integrase B5746 sequence
tgtcggaattggaatcattgcaatcccgaccggcatcatttctgccggctttacatctttacttaaagaggatggagctgaagcagacgaaaaaaggtactgtccgtattgcggtcataagctcgatgaataaccgcccgattttttaagcaaaatagtctgaatgcagtctgtttttagtattagaagtaggtgattgaatgaacgccgtcatatacgcccgtttttccagccacaatcaacgcgaagaatccattgag

SEQ ID NO: 18746 - DNA, 260 bp, Unknown
  Description of Unknown: LeftRegion for integrase B5747 sequence
cttccctattcgcatatattgttttatgaggtgaggaacaaatggatataaagaacatctaccccaatctgaccgacgatcttagcactttagccattattgccaatcagcttttaactgaaattgatttgcaattatcccaagcacaggttataattaaatcaagcgatgacgtgtactgtgtaaattaggagggacacatgaatgcagtatacgccagacaatcgttagataaaaaagacagtttatctatcgaaaca

SEQ ID NO: 18747 - DNA, 260 bp, Unknown
  Description of Unknown: LeftRegion for integrase B5748 sequence
gtctttagtttttattcattcttttgtgctttcaagattatggtgtaagaaaattgcaatacgattattgttgtatattcaagataatgtgaccttaattgtctttttaaataaaaattaaacaaaaatcatatctcaccactaaggtttataaaagcatactttagcaggtgtcaccatgaaaaaaagccatagcatatatgcgattttcatcaccaggtcagatgtctggtgattcattaaaccgccagagaaggctt

SEQ ID NO: 18748 - DNA, 260 bp, Unknown
  Description of Unknown: LeftRegion for integrase B5749 sequence
aaacctgaccccgatgctctctccccgagcacgggacaagcgcaagcgtgaaattgaaagctgtctgtatgaggtctttgtaaagtatgcgccggggcgggcgcagatgcactaatgcgggacatccttgagatgcggggctgccagaggtataatataggtgtaaggtttggtagctcctacacggaaaggagcaccaaatgattattcgtgaagatgccatttatggcagacagtccgttgaccgcaaggacagtatc

SEQ ID NO: 18749 - DNA, 260 bp, Unknown; identical to SEQ ID NO: 18742
  Description of Unknown: LeftRegion for integrase B5750 sequence

SEQ ID NO: 18750 - DNA, 260 bp, Unknown
  Description of Unknown: LeftRegion for integrase B5751 sequence
cttccctattagcatatattgttttatgaggtgaggaacaaatggatataaagaacatctaccccaatctgaccgacgatcttagcactttagccattattgccaatcagcttttaactgaaattgatttgcaattatcccaagcacaggttataattaaatcaagcgatgacgtgtactgtgtaaattaggagggacacatgaacgcggtatacgccagacaatcgttagataaaaaggacagtttatctatcgaaaca

SEQ ID NO: 18751 - DNA, 260 bp, Unknown
  Description of Unknown: LeftRegion for integrase B5752 sequence
agaaaattacgaataggatatactcgtgctcttaaaataattaatacgttagaatatttgaaaatactaaatcgaaataatggttctttttatgtaaatcatgatgttgcacttaactttttaaattcaaataaaaaaaatagtattttcaaaaaggtaatttgtaaaatattaagaaataatatttaggaggttcttgtatgaaaagaatagcaatttatagtagaaaatcagtgtatatagaaggttctatatcaata

SEQ ID NO: 18752 - DNA, 260 bp, Unknown
  Description of Unknown: LeftRegion for integrase B5753 sequence
cttccctattagcatatattgttttatgaggtgaggaacaaatggatataaagaacatctaccccaatctgaccgacgatcttagcactttagccattattgccaatcagcttttaactgaaattgatttgcaattatcccaagcacaggttataattaaatcaagcgatgacgtgtactgtgtaaattaggaggggcacatgaatgcagtatacgccagacaatcgttagataaaaaagacagtttatctatcgaaacc

SEQ ID NO: 18753 - DNA, 260 bp, Unknown
  Description of Unknown: LeftRegion for integrase B5754 sequence
gaggaagatagccagtaaataaaaaaagcgccgaccctctggaaagggtcagcgctggggccagtgctacaaaatataaaagggtgaggcggctgcttcctgctggaacaggggctgcgccacaaagcacaggcagttgacatggaaaccaactgcctttattgtagcacgtcgccctgaatttgaaaaggggtgattttatgcgcgatatggattccgcccgcctgcgggtggtgtgctatgtccgcgtcagcacgaga

SEQ ID NO: 18754 - DNA, 260 bp, Unknown
  Description of Unknown: LeftRegion for integrase B5755 sequence
atgaggaagatagccagtaaataaaaaaagcgccgaccctctggaaagggtcagcgctggggccagtgctacaacataaaaaggtgaggtggccgcttcctgctggaacagggggctgcgccacaaagcacaggcagttggcatggaaccgactgcctttattgtagcacgtcgccctgaatttgaaaaggggtgattttatgcgcgatatggattccgcccgcctgcgggtggtgtgctatgtccgcgtcagcacgaga

SEQ ID NO: 18755 - DNA, 260 bp, Unknown
  Description of Unknown: LeftRegion for integrase B5756 sequence
agtcttacgccggtactctctccgaaggaaaaggaaaagcggaaaaaggagattgaacgctgtctttatgaggtgttcagcaagtacagaagggccagcgataccccggcctgaccatcgacaacattgtccttcggggctatcaatggtataatatacttgtaggttggtagctccattccacaggaaaggagcccaacatgaatatcagagaagatgtaatttatgcaagacaatccgtagaccgcaaggacagtatc

SEQ ID NO: 18756 - DNA, 260 bp, Unknown
  Description of Unknown: LeftRegion for integrase B5757 sequence
cttccctatttgcatatattgctttatgaggtgagcaacaaatggagataaagaacatctaccctaatctgaccgacgatctcagcactttagccattatcgccagccagcttttaactgaaattgatttgcaattatcccaagcacaagctataattaaatcaagcgatgacgtgtgctgcgtaaattaggagggacgcatgaatgcagtatacgccagacaatcgttagataaaaaagacagtctatctatcgaaaca

SEQ ID NO: 18757 - DNA, 260 bp, Unknown
  Description of Unknown: LeftRegion for integrase B5758 sequence
tttcaaatatgataacggtgttttgagctatgaggctaccgccatgggaaccacgacgaccgtgaaaatggagcggcaataattacctattcccatagtaatctgaaaaatgctacttttgtagtagtaaaagatggaagggcggcgacatcaagcgaaacgccgcccttcccacttatgaaaggcagtgacgttttaacatgagaagacgtatagacccgaacggtcgctactgcgcgtacctgcgcaagtcccgcgac

SEQ ID NO: 18758 - DNA, 260 bp, Unknown
  Description of Unknown: LeftRegion for integrase B5759 sequence
tttttttatcaaacggaaataacattggctcaaatggtttaagcatagttagcacctcttttcttcctattttatattatatccatatttttaattttatacaacaattttatttaaaaaaatgttctaacattatttttttaatatagttcattggtttttctgtccctataaatcttagcaaaaaggaggctcatgctatgcaaaacgccatatatttgcgtaaatctcgtgccgaccagggcaccgtggaagacacc

SEQ ID NO: 18759 - DNA, 260 bp, Unknown
  Description of Unknown: LeftRegion for integrase B5760 sequence
caagcgagtgataccgctggagaacatagccccggtactaagtatcgacgaggagagccggacaaaacagtcgatcgagtcaaagctctacgacgtgttcgtgcggtacatgaaaaaatagcttgtcagagcggggccacgcatcctataatcagggtgatgatggctccgatcctttttagaggaggagggagcttcggatgtttgacgccatttacacaaggcaaagtgtggacaaggctgacagcatatctgttacg

SEQ ID NO: 18760 - DNA, 260 bp, Unknown
  Description of Unknown: LeftRegion for integrase B5761 sequence
gtcggctcaaggtcgccgccgaggatcttcataaaggtggatttaccactaccgttcgcgccaatcaggccgtaacggttgccgccgccaaatttgacggaaatgttttcaaacaacggcttactgccgaactgcatggtgatgttgttgctaaggagcaaaattgatactctctactaagtgattgaaaggattagaatatgcaaaagcaaaacgggttagcttacagttacatacgattttcgagcaagaaacaagaa

SEQ ID NO: 18761 - DNA, 260 bp, Unknown
  Description of Unknown: LeftRegion for integrase B5762 sequence
atttttctccgttgccttttgcaacgtctattatagaacaaatgttctaattttgcaataacaaattgtggatatgaatatataaatacgtcattgaaccacagggggctatctcgtggcggaaaaatccgccaccaaatatccggaatgaactgaacgagattttccgttcaccccaaaacccacatggaggtgatctcatgtcagaaaagtccgctgttatttatgcccgatacagcagccacaaccaacgggaggaa

SEQ ID NO: 18762 - DNA, 260 bp, Unknown
  Description of Unknown: LeftRegion for integrase B5763 sequence
cttccctatttgcatatattgttttatgaggtgaggaacaaatggagataaagaacatctaccccaatctgaccgacgatcttagcactttagccattatcgccaatcagcttttaactgaaattgatttgcaattatctcaagcacaggttataattcaatcaagcgatgacgtgtactgtgtaaattaggagggacacatgaacgcggtatacgccagacaatcgttagataaaaaagacagtttatctatcgaaaca

SEQ ID NO: 18763 - DNA, 260 bp, Unknown
  Description of Unknown: LeftRegion for integrase B5764 sequence
acttactgggtcttagtgaagtcagaaaaccggaagtcttagtattgtcagaaaaagagaaaatcctcattgacgcataccgtactgctaatgacatgggacagttgaacataatctatgtctgcatggatgaaatgaaaaaagcaaaaggagaaggcgtacttgtagggtaattgatttcatagaatggaggaagaaccatgtatgaggatataaaaacagcctgcctatacgttagattctcaagccataaccagact

SEQ ID NO: 18764 - DNA, 260 bp, Unknown
  Description of Unknown: LeftRegion for integrase B5765 sequence
ataagtaaagcccttgattttacgcaagggcttattttttatggttgaatatgatatactaaaatcaaaaaatgaggtgataaaatgtcacgaggcggaaaacgtgaaggcgctggtagaccttcgatatatccgaaagatgcaaaactaaaatgttataaatttagattgacaccagaacaggagaaggttgttgacgaatggataaaacaaataaggaaaaaaatacaaaatacgcaggacgcgcagtaatatatgca

SEQ ID NO: 18765 - DNA, 260 bp, Unknown; identical to SEQ ID NO: 17513
  Description of Unknown: LeftRegion for integrase B5766 sequence

SEQ ID NO: 18766 - DNA, 260 bp, Unknown
  Description of Unknown: LeftRegion for integrase B5767 sequence
aaacctgaccccgatgctctctccccgagcacgggataagcgcaagcgtgaaattgaaagctgtctgtatgaggtctttgtgaagtatgcgccgggacgggcgcagatgcactaatgcgggacatccttgagatgcggggctgccagaggtataatataggtgtaaggtttggtagctcctacacggaaaggagcaccaaatgattattcgtgaagatgccatttatggcagacagtccgttgaccgcaaggacagtatc

SEQ ID NO: 18767 - DNA, 260 bp, Unknown
  Description of Unknown: LeftRegion for integrase B5768 sequence
agatggcttacaacatgaccatggtgatggctaagagcttgcttgaaaaaggaaccattacaaaggatgagtatgctgatttccacgctaaaattctaaaaaaatataatctgaagaatagctcattatttgccgacattaacttgctatagttcggatagtatgggaatatagctatgccaaaggaggcgatgataataatggctatagtaaaaaagattatgcctatggttttgagcttggataccagaaagcgtgtg

SEQ ID NO: 18768 - DNA, 260 bp, Unknown
  Description of Unknown: LeftRegion for integrase B5769 sequence
cttcgatcaagggcttatgacggtcttgcctgattttacaattcaggtctcggactacgtgaaggacagctacgacgaccaaaatacgagagactggctactcggcgtagagggtacaaaaatcatcaggccgaagaggttcgcaccaaatcgcgatatgctggcctaccacaatgagtttgtattcctgaggtgattccatgcagcgagcagtgatatacgccagatacagccctggaccaaatcagacagagcagtcg

SEQ ID NO: 18769 - DNA, 260 bp, Unknown; identical to SEQ ID NO: 18757
  Description of Unknown: LeftRegion for integrase B5770 sequence

SEQ ID NO: 18770 - DNA, 260 bp, Unknown
  Description of Unknown: LeftRegion for integrase B5771 sequence
tatgaggaagatagccagtaaataaaaaagcgccgaccctctggaaagggtcagcgctggggccagtgctacaacataaaaaggtgaggtggccgcttcctgctggaacagggggctgcgccacaaagcacaggcagttggcatggaaccgactgcctttattgtagcacgtcgccctgaatttgaaaaggggtgattttatgcgcgatatggattccgcccgcctgcgggtggtgtgctatgtccgcgtcagcacgaga

SEQ ID NO: 18771 - DNA, 260 bp, Unknown
  Description of Unknown: LeftRegion for integrase B5772 sequence
cgtaaaataagcccttgcaaaagcaggggcttattttttatggttgaatatgatatactaaaatcaaaaaaatgaggtgataaaatgtcacgaggcggaaaacgtgaaggcgctggtagaccttcgatatatccgaaagatgcaaaattaaaatgttataaatttagattgacaccagaacaggagaaggttgttgacgaatggataaaacaaataaggaaaaaaatacaaaatacgcaggacgcgcagtaatatatgca

SEQ ID NO: 18772 - DNA, 260 bp, Unknown
  Description of Unknown: LeftRegion for integrase B5773 sequence
tatgcttgccattttaaataaattgaatcaaaccggaagattaaaaaccgaattttacgatttacacaaaaaatggctggaaaggatacgggtcactgaaatatgggaaagccgccctccaaccactttgtattccgctgtaaagccacaatcctgattttaaatagatcgaacttgataggtgaaaggagcctgtgattatggatgtattcatgtacctgcgaaaatcgcgggcagataacccggaatccagcgtggaa

SEQ ID NO: 18773 - DNA, 260 bp, Unknown
  Description of Unknown: LeftRegion for integrase B5774 sequence
tgcacatcaaaacaaaaccaatccttacatatacgttcgacaacccgaacgccagagacactatagtgcaaacattacgcgaaatgataatcagcaaaatcgtcgagaaagaccaatccgtttacataccaacccaacgtgcacataatcaagaccaataagcgcgtggcgcggaatttcgacgataagaggtacaaaaaatgagaattgcggcttattgcagagtatcaacaggcaaggaagatcagcttgacagctta

SEQ ID NO: 18774 - DNA, 260 bp, Unknown
  Description of Unknown: LeftRegion for integrase B5775 sequence
aaacctgaccccgatgctctctccccgagcacgggataagcgcaagcgtgaaattgaaagctgtctgtatgaggtctttgtgaagtatgcgccgggacgggcgcagatgcactaatgcgggacatccttgagatacgggactgccagaggtataatataggtgtaaggtttggtagctcctacacggaaaggagcaccaaatgattattcgtgaagatgccatttatggcagacagtccgttgaccgcaaggacagtatc

SEQ ID NO: 18775 - DNA, 260 bp, Unknown
  Description of Unknown: LeftRegion for integrase B5776 sequence
cttccctatttgcatatattgttttatgaggtgaggaacaaatggagataaagaacatctaccccaatctgaccgacgatcttagcactttagccattatcgccaatcagcttttaactgaaattgatttgcaattatctcaagcacaggttataattcaatcaagcgatgacgtgtactgtgtaaattaggagggacacatgaacgcggtatacgccagacaatcgttagataaaaaagacagtttatctatcgaaacc

SEQ ID NO: 18776 - DNA, 260 bp, Unknown; identical to SEQ ID NO: 15631
  Description of Unknown: LeftRegion for integrase B5777 sequence

SEQ ID NO: 18777 - DNA, 260 bp, Unknown
  Description of Unknown: LeftRegion for integrase B5778 sequence
ataagcaaagcccttgattttacgcaagggcttattttttatggttgaatatgatatactaaaatcaaaaaatgaggtgataaaatgtcacgaggcggaaaacgtgaaggcgctggtagaccttcgatatatccgaaagatgcaaaactaaaatgttataaatttagattgacaccagaacaggagaaggttgttgacgaatggataaaacaaataaggaaaaaaatacaaaatacgcaggacgcgcagtaatatatgca

SEQ ID NO: 18778 - DNA, 260 bp, Unknown; identical to SEQ ID NO: 18505
  Description of Unknown: LeftRegion for integrase B5779 sequence

SEQ ID NO: 18779 - DNA, 260 bp, Unknown
  Description of Unknown: LeftRegion for integrase B5780 sequence
atgaggaagatagccagtaaataaaaaaagcgccgaccctctggaaagggtcagcgctggggccagtgctacaacataaaaaggtgaggcggccgcttcctgctggaacagggggctgcgccacaaagcacaggcagttggcatggaaccgactgcctttattgtagcacgtcgccctgaatttgaaaaggggtgattttatgcgcgatatggattccgcccgcctgcgggtggtgtgctatgtccgcgtcagcacgaga

SEQ ID NO: 18780 - DNA, 260 bp, Unknown
  Description of Unknown: LeftRegion for integrase B5781 sequence
agtctgacgccggtactctccccgaaggaaaaggagaagcggaagaaagacattgaacgctgtctgtatgaagtgttcagcaagtacagaagggccggggacagccctgcttgaccatcgacaacattgtcctgcggggctatcaatggtataatatacttgtaggttggtagctccattccacaggaaaggagcccaacatgaatatcagagaagatgtaatttatgcaagacaatccgtagaccgcaaggacagtatc

SEQ ID NO: 18781 - DNA, 260 bp, Unknown
  Description of Unknown: LeftRegion for integrase B5782 sequence
ttacatttacacttttgtcaaactaaataccgccctgctctaccaaagcaaggcggcaagctcccgaatgatacgaaagccctcaacaagcacattatatcattctcggagcagcttcgcaagcggaacacccgtttgacgcaggctgttatttttgtacccaaaaaccaatacaatatagagaaagaggtgcatgtgctatgaaagaaaaagtttcagaacgcaaaacaggcgcgatctatatccgtgtatccacagac

SEQ ID NO: 18782 - DNA, 260 bp, Unknown
  Description of Unknown: LeftRegion for integrase B5783 sequence
aaacctgaccccgatgctctctccccgagcacgggataagcgcaagcgtgaaattgaaagctgtctgtatgaggtctttgtgaagtatgcgccgggacgggcacagatgcactaatgcgggacatccttgagatgcggggctgccagaggtataatataggtgtaaggtttggtagctcctacacggaaaggagcaccaaatgattattcgtgaagatgccatttatggcagacagtccgttgaccgcaaggacagtatc

SEQ ID NO: 18783 - DNA, 260 bp, Unknown
  Description of Unknown: LeftRegion for integrase B5784 sequence
tgtggtctttggtagtaaaaacaaaagagcgccgaccctctggaaagggtcggcgctggggccagtgctacaacacaaaaaggtgaggtggccgcttcctgctggaacagggggctgcgccacaaagcacaggcagttgacatggaaggcaactgcccttattgtaacacgtcgccctgaatttgaaaaggggtgattttatgcgcgatatggattccgcccgcctgcgggtggcgtgctatgtccgcgtcagcacgaga

SEQ ID NO: 18784 - DNA, 260 bp, Unknown; identical to SEQ ID NO: 13468
  Description of Unknown: LeftRegion for integrase B5785 sequence

SEQ ID NO: 18785 - DNA, 260 bp, Unknown; identical to SEQ ID NO: 18762
  Description of Unknown: LeftRegion for integrase B5786 sequence

SEQ ID NO: 18786 - DNA, 260 bp, Unknown
  Description of Unknown: LeftRegion for integrase B5787 sequence
ctacctgctgggatatactgataagattgagaagccggcaggcgatgaaacggaccccgccgccaataagtttctggccgtaactctggccgagatcgacctgatcgaagcataccggcacgccggagctgagacccaggcagcggtcagagcgatcctgcacatttaacgggagggccccgggaagggaggacggtgccatgcgcggcgtcatttatgcgagatattcaccaggcccgcaccagacggagcagtccatt

SEQ ID NO: 18787 - DNA, 260 bp, Unknown; identical to SEQ ID NO: 18743
  Description of Unknown: LeftRegion for integrase B5788 sequence

SEQ ID NO: 18788 - DNA, 260 bp, Unknown
  Description of Unknown: LeftRegion for integrase B5789 sequence
tatctttaacaactgttggctatggcgatatatacccggtatcaaccgctgggcgtgttttcactatgctgtcgtcgctggttggtattgccgttgtggccttgcctgccggtatcataacggcggggtacatggacgcactgcgcgaagattccgacaaaaagaaatagcccgccgatcggcgggcagggggtgcttatatgcgagcgtttatctattgccgattttccagccataagcagcaagagcttagcatagag

SEQ ID NO: 18789 - DNA, 260 bp, Unknown
  Description of Unknown: LeftRegion for integrase B5790 sequence
accgaggcctcataacgatcaccccgtccatgaaaatccatgtttcgccgtcaattctcaatgcccctcaggacgcatttacagcccgctggctgacttctctcgacgggaatgttttacccccccccccgatttccgccgcgtagagagctcctggagtaccataacgacgtaatttttaagagggaggcagaaagtacatgaatacagtaatctacgcacgctattctgccggcccgagacagaccgatcagagtatc

SEQ ID NO: 18790 - DNA, 260 bp, Unknown
  Description of Unknown: LeftRegion for integrase B5791 sequence
cttcgatcaagggcttatgacggtcttgcctgatcttacaattcaagtctcggactacgtgaaggacggctacgacgaccaaaatacgagagactggctactcggcgtagagggtacaaaaatcatcaggccgaagaggttcgcaccaaatcgcgacatgctggcctaccacaatgagtttgtattcctgaggtgatttcatgcagcgagcagtgatatacgccagatacagccctggaccaaatcagacagagcagtca

SEQ ID NO: 18791 - DNA, 260 bp, Unknown
  Description of Unknown: LeftRegion for integrase B5792 sequence
ttgtgttacttatcctgtcatatattgaagaggtcggcagaagaagataaatcaggggtcctcttctatgcacatttttctacaataaaattgcagtttcggcacaaaatgttacgaatcggtggttttaatgccgaaaaattgcgttaaatatatactacgccgccgaggtgcggcgttttttagtgaggtgatacacagtgagaaacgcggttatttatgctaggtattcgtcagataggcagagagaggaatctatc

SEQ ID NO: 18792 - DNA, 260 bp, Unknown
  Description of Unknown: LeftRegion for integrase B5793 sequence
acttactgggtcttagtgaagtcagaaaaccagaagtcttagttttgtcagaaaaagaaaaaatcctcattgacgcataccgtactgctaatgacatgggacagttgaacataatctatgtctgcatggatgaaatgaaaaaagcaaaaggagaaggcgtacttgtagggtaattgatttcatagaatggaggaagaaccatgtatgaggatataaaaacagcctgcctatacgttagattctcaagccataaccagact

SEQ ID NO: 18793 - DNA, 260 bp, Unknown
  Description of Unknown: LeftRegion for integrase B5794 sequence
ttagatgtgacacctgcgtacctgatgggctgggaggaaaaagatgcaggggtagagctgccggaggatgttttgcagaaagccaaggctctgtatgaggacccgggcctcaagatccttctggatgtaaaggaaaagctgagcgctgaggagctgaatgctctgctgctgtttgcgaaaagtctgatggagaagaaaaaatgagagctgtgatatatgcgagatactcgccggggcctaagcagacagatctgtctatc

SEQ ID NO: 18794 - DNA, 260 bp, Unknown
  Description of Unknown: LeftRegion for integrase B5795 sequence
ccagccttgccacactggatagccaaactcttactctatccgcagaggaagtgcgcttaatcctcaagtaccgtgctttagacaaagagggacgcacgatggtagagtctacccttattcaggaaacccgcagaatggatacggagaaaggggaaactgtaagtgccgggtaatcagccttgccgaatggaggaagaaccatgtatgaagaagtgaaaaatgcctgcatctatgccagatattccagcagcaatcaaacc

SEQ ID NO: 18795 - DNA, 260 bp, Unknown
  Description of Unknown: LeftRegion for integrase B5796 sequence
taaactgttgggcgaaaatctcataaccgaggcgcagcgcaggaaaatcgaaagtgctgtcataaagcggctttcggatgtttgaacccatgtccgcttttgttggttatgatacaaaccgccgcagatattttagtggcattggtgatagataaacccgaatcgtttcggtatactgtgttgtgaaagggagtgatgagatggcggaaattacaatcatacctgctaaaaatcatgcggacgaaatcgtcagaaccgcc

SEQ ID NO: 18796 - DNA, 260 bp, Unknown; identical to SEQ ID NO: 18755
  Description of Unknown: LeftRegion for integrase B5797 sequence

SEQ ID NO: 18797 - DNA, 260 bp, Unknown
  Description of Unknown: LeftRegion for integrase B5798 sequence
ggtcggctgaaaacatcagcttgcagacgctaaagaagctgtcggaatacttcggcatcagcatcgaggagcttgtccacggtacgaagacacggcgcgagctggtattcacgagcgacacatacacggaagaagaactcgcacagattaagcaattcgcgcactttttaatagggcaacgagaaaggaatgattgatgaatggcatacgcaatgtacctgcgcaaatcccgcgcagacgaggaactaggatacgaaaac

SEQ ID NO: 18798 - DNA, 260 bp, Unknown
  Description of Unknown: LeftRegion for integrase B5799 sequence
gcagcgccgagaacatcagcttgcagacgctgaagaagctgtctgattacttcgggataagcatcgaagagcttgtccacggtacgaagacgcggcacgagctggtattcacgagcgatacatacacggaagatgaactcgcgcagattaagcaattcgcgcactttttaataggacaacgagaaaggaatgaatgatggatggcatacgcaatgtacctgcgcaagtcacgcgcagacgaggaattgggatacgaaaac

SEQ ID NO: 18799 - DNA, 260 bp, Unknown
  Description of Unknown: LeftRegion for integrase B5800 sequence
ccctgcggcatctgcagaccgtgagggatccacgccccaacaaaaaaaaatcccgccaccgtgctaccaacacgatgccgggaagtgcagctttgtactggtaatactcagctgcagtctaaaccacccccacaggaggtcgactatgctaatagtatatcacgtcggcctccatctagccatagaaggaggctattattatgcaaaaaaacaccactattgaaaatacaacaaaggctgtcatttatgctcggtactct

SEQ ID NO: 18800 - DNA, 260 bp, Unknown
  Description of Unknown: LeftRegion for integrase B5801 sequence
attattaaatgctgcgttaaacgacataaattcaaagattgaaaagggctatgtatataagcccagaggaaagagtaggaaataaaaaatccccgcccggcgctggaacaccgaacggggaagaagctgtgatacaatcacaaccttagacaagtttattgtatcatagctccctgaaaatgtcaaggagtgatttaaatttgaaaaccgccgtaatatacgcccggtattcgtccgacaagcagacggagcagtccatt

SEQ ID NO: 18801 - DNA, 260 bp, Unknown
  Description of Unknown: LeftRegion for integrase B5802 sequence
gcagcgccgagaacatcagcttgcagacgttgaagaagctgtcggactacttcggtataagcatcgaggagcttgtccacggcagcaagcaaacgcgcgagataacattttcgagcagcgcgtacactgacgaagaattgaaacagataaaacagttcgcacactttttgataaggcaacgagaaaggaatgaatgatggatggcatacgcaatgtacctgcgcaagtcacgcgcagacgaggaactaggatacgagaac

SEQ ID NO: 18802 - DNA, 260 bp, Unknown; identical to SEQ ID NO: 16104
  Description of Unknown: LeftRegion for integrase B5803 sequence

SEQ ID NO: 18803 - DNA, 260 bp, Unknown; identical to SEQ ID NO: 15792
  Description of Unknown: LeftRegion for integrase B5804 sequence

SEQ ID NO: 18804 - DNA, 260 bp, Unknown
  Description of Unknown: LeftRegion for integrase B5805 sequence
tatttaccttgtaaaaaatgttatagcgattaaaaaaccgcccctgcgccaacaggaacggtctaacatatatccgaagatatacagttattctgaacaaatatattgtatcatcttcggaacagccttgcaatcggaacatactttcgatggctgttatttttatactctttttgaataaaataaagaaggtgatgaaattgtctagcacagaaactcttaaatccggtgctctctatatacgtgtgagtacccatgga

SEQ ID NO: 18805 - DNA, 260 bp, Unknown
  Description of Unknown: LeftRegion for integrase B5806 sequence
ttgaattgtaaaataattgtgtatataatgaaagcacgaaatcccgatgtggatacaccgggatttcgttttcccttgcgggaatgtgatatattattcgcaatccaattatatcgcatttctcataagtccacaagggcttattttttataccattttttatttacgcatcggttgcaccggtgcaactggaggtttatatgagaaagaaagctattgattcaactgctgccgttgtgtacgcaagatattctgccgga

SEQ ID NO: 18806 - DNA, 260 bp, Unknown
  Description of Unknown: LeftRegion for integrase B5807 sequence
cagcgccgagaacataagcttgcagacactcaagaagctgtctgactacttcggggtaagcatcgaggagcttgtccacggcaagcagcgacggcgcgagataacattttcaagcaacacatacacagacgacgagctgaaccagatagcgcagttcgcgcaatttttgatagggcaacgaggaaaggggtaattgatgaatggcatatgcaatgtatctgcgcaaatcccgcgcagacgaggaactaggatacgaaaac

SEQ ID NO: 18807 - DNA, 260 bp, Unknown
  Description of Unknown: LeftRegion for integrase B5808 sequence
gtaggttaatagcctactctttcttttttacataaacatttaaaataaaataatctttttatttaatagtaaatgaatattatttaaataattaaaataaagggtaaatttgttatctcaaatatttctttttttatgcattgatgtaaaataactattacaaagagttcttaaatatttatgaggtgatttttgtgaaaatgaaaagcgttttatatgcaagagttagtacagaagatttagaacaaaacaatagttat

SEQ ID NO: 18808 - DNA, 260 bp, Unknown; identical to SEQ ID NO: 15483
  Description of Unknown: LeftRegion for integrase B5809 sequence

SEQ ID NO: 18809 - DNA, 260 bp, Unknown; identical to SEQ ID NO: 13967
  Description of Unknown: LeftRegion for integrase B5810 sequence

SEQ ID NO: 18810 - DNA, 260 bp, Unknown
  Description of Unknown: LeftRegion for integrase B5811 sequence
taaaaaatgggcagtaaaatgcccatttgaatcatttgttgatatagaatctttgagtcaatttataaatacgttcaataaattgtatatcgttgattctatgtaagtatctaatgatacattcaatcatttcttctttagtcatatttatcacccctacgaaattgtaaaacagaaaggaagtgtttattgtgtatgctatgtatttgagaaaatcacgtgctgatgatccacatgaaagtatagaggatactttgagg

SEQ ID NO: 18811 - DNA, 260 bp, Unknown
  Description of Unknown: LeftRegion for integrase B5812 sequence
gaatactatgaaaacaaaaatcatttatcgtctttcgcatcgggagcgtaaacgaaaactgcggtttgtcaagggtaaaatgtatgcttgaagcacccttgacaaacctataaaactactatgatatagacaatatcgtttccgtttttctctctcttgtcgaaagacaaatcaatcgtaaaaggagaaagaaaaacaatatgaaaacagcagcaatatacgcaagatactcttgcgagaatcaaacggaacagtccatc

SEQ ID NO: 18812 - DNA, 260 bp, Unknown; identical to SEQ ID NO: 13967
  Description of Unknown: LeftRegion for integrase B5813 sequence

SEQ ID NO: 18813 - DNA, 260 bp, Unknown
  Description of Unknown: LeftRegion for integrase B5814 sequence
taaagccttcgaccgaggccttataactatcactccttccatgaaaatctatgtttctccgataattttggatagccctcaggacgcttttacagcccgctggctggcttctctcgacggaatggttttacccccccccgatttccgccgcgtagagagcttctggagtaccataacgacgaaatttttaggagggtcacatgaatacagtaatttatgctcggtattctgccggcccgagacagaccgaccagagtatc

SEQ ID NO: 18814 - DNA, 260 bp, Unknown; identical to SEQ ID NO: 15702
  Description of Unknown: LeftRegion for integrase B5815 sequence

SEQ ID NO: 18815 - DNA, 260 bp, Unknown
  Description of Unknown: LeftRegion for integrase B5816 sequence
gtagcgccgagaacatcagcctgcaaacactgaagaagctgtcggaatacttcggcataagcatcgaggagcttgtccacggtacgaagacgcggcacgagctggtattcacaagcgacgcatacacggaagaagagctcgcgcagattaagcaattcgcgcactttttaataggacaacgagaaaggaatgattgatgaatggcatacgcaatgtatctgcgcaagtcacgcgcagacgaggaacttggatacgagaac

SEQ ID NO: 18816 - DNA, 260 bp, Unknown
  Description of Unknown: LeftRegion for integrase B5817 sequence
ctcagaagattatttctgattttgacaaggaaataaaaaagctcacgaagaaaaaataaaaaaccgcccgcttctgttggcgcagaaacgagcgacgaaaatagaacagcttacccaaagtggataatgcgtccgaacaacgaaattataccactttctgggtaggcttggcaagtcttactttggaggtggtttttattatgaaagcggcggcttatgctcgctactcaacagacaagcaaacggaaaatagtatagcg

SEQ ID NO: 18817 - DNA, 260 bp, Unknown
  Description of Unknown: LeftRegion for integrase B5818 sequence
gcagcgccgagaacatcagcttgcagacgttgaagaagctgtcggattacttcggcataagcatcgaggaacttgtacgcggcagcaggcaaacgcgcgagataacattttcaagcagcgcatacacggacgcagagcttgaccagataacgcagttcgcacactttttgataaggcaacgaggaaggaatgaataatggatggcatacgcaatgtatctgcgcaagtcacgcgcagacgaggaactaggatacgagaac

SEQ ID NO: 18818 - DNA, 260 bp, Unknown
  Description of Unknown: LeftRegion for integrase B5819 sequence
gcagcgccgagaacatcagcttgcagacgctgaagaagctgtcggattacttcggtataagcatcgaggaacttgtccacggcaagcaacaacggcgcgagataacattttcaagcagcgcgtacactgacgcagagcttgaccagataaagcagttcgcacactttttgataaggcaacgagaaaggaatgaataatggatggcatatgcaatgtacctgcgcaagtcacgcgcagacgaggaactgggatacgagaac

SEQ ID NO: 18819 - DNA, 260 bp, Unknown
  Description of Unknown: LeftRegion for integrase B5820 sequence
accgagaggaattagagggggataaagaatcttctacgcacagcgaagataatccccatagaattgctcaggcataagaagcacttggaggtgatactacgaaagcggtaatctatgccagatattcgagccataaccagagagaggaatccatagagggacagctccgtgagtgtcacgactttgcactgaaaaatggaatgacgatcatcggtgaatattgcgacagagcaatctcaggtaaaaccgataatcgtcca

SEQ ID NO: 18820 - DNA, 260 bp, Unknown
  Description of Unknown: LeftRegion for integrase B5821 sequence
cttatgttagttttatagataacgcagtatgcatttcgattatgtactcaataaaatagaataaaaaaatcctgcaatcgtctgccaacggttgcaggatataaatggtaaggtgttaaataatagataattcacacgtccttaacctctgttattttaccacctttccgggcaaatgtcaaaagaaaggtgttttttttatgccacaaaatacaaattatggaaatctctctcattccgacagcacaaagcgagccgca

SEQ ID NO: 18821 - DNA, 260 bp, Unknown
  Description of Unknown: LeftRegion for integrase B5822 sequence
gtttcaggtgaaaaagccaacacaagtggtatttaccatcgaatgcggtgcgactcctgacgaactaatgcaggccattcaagatatcgtgctttcaaaactgcttgccggccgagcggaggtagcatcttgaacgagcgggatgtgcgtggtataatcgaaccagcagaatttggctggcatcgaaaggaggccggcacatgagaatgtgcggatacgcacgagttagcaccgacgaggaacggcaattagatagctta

SEQ ID NO: 18822 - DNA, 260 bp, Unknown
  Description of Unknown: LeftRegion for integrase B5823 sequence
taaacttttttgaaatgaaaacagtcaaagacaaaaaagagagtgaaaaaagcgaataaaaaaccgcccgcttctgttggcgcagaaacgagcggcaaaaatagaacagcttacccaaagtggataatgcgtccaaacaatgaaattataccactttcggggtaaacttggcaagtcttactttggaggtggtttttattatgaaagcggcggcttatgcgcgctactcaacggacaagcaaacggaaaatagtatagcg

SEQ ID NO: 18823 - DNA, 260 bp, Unknown
  Description of Unknown: LeftRegion for integrase B5824 sequence
gtttcaggtgaaaaagccaacacaagtggtatttaccatcgaatgcggtgcgactcctgacgaactaatgcaggccattcaagatatcgtgctttcaaagctgcttgccggccgagcggaggtagcatcttgaacgagcgggatgtgcgtggtataatcgaaccagcagaatttggctggcatcgaaaggaggccggcacatgagaatgtgcggatacgcacgagttagcaccgacgaggaacggcaattagatagctta

SEQ ID NO: 18824 - DNA, 260 bp, Unknown
  Description of Unknown: LeftRegion for integrase B5825 sequence
ttgcggttgtggctattgatggagaaacagcaacagtaaaaagaattaagtgccaaaatgagatttgcatattgatgccttcaaaccctaagctgcagccgactatcgttgatgcatctaaagttgaaattattggtaaagttgtagaagtcagacggagatattagagtttacgggcctctggaaaggaggtgaaataaatggtggtacgagcccgtgaaacgaatgaagaaatagaagcgatcggatatatacgacaa

SEQ ID NO: 18825 - DNA, 260 bp, Unknown
  Description of Unknown: LeftRegion for integrase B5826 sequence
tcatacggtaccgtgttttcattatacacctttcttgtcgaaatgtcactatgtttgttgcctattggcaaaatttttccgcatatatcctattttttagcagattgttacccgctgaaattataaactgtgcccgaatcgggtacaaaaatcgataaggccgtcctccggggcggcctttgtcgcaaaaggaggctgccgtgaaagaccgaagcgcgctgtatttgcgaaaatcccaggcggaccagcctgacgaaagc

SEQ ID NO: 18826 - DNA, 260 bp, Unknown
  Description of Unknown: LeftRegion for integrase B5827 sequence
tatttcattctttgcatctgaaaatagttaataaaaaccgcccggtgttggcgcaccagacggtctgagatatatccgaagatataccaaattttagcaaatatattgtatcatcttcggaaacagtttgcaagcagaacaaaagtttgctggctgttatttttatactctttttgaataaaataaagaaggtgatgaaattgtctaacacagaaactcttaaatccggcgctctctatatacgtgtgagcacccacggc

SEQ ID NO: 18827 - DNA, 260 bp, Unknown
  Description of Unknown: LeftRegion for integrase B5828 sequence
gtctgaattgatggacgaacaggattttctaaatgctaccatctctatgacacaggaagaaatggacgatttgcacaaggtagataaaggcacacaagatgcactaaaaagaagaatggaagaaaacgaacgctttagaacgatgtaaataaaaaaagagccacctacacaggtggctttatttgtagagaggattaactatggaattatcaaagggagtaatatacgctagatattcatcagacaaacaacgtgatgaa

SEQ ID NO: 18828 - DNA, 260 bp, Unknown
  Description of Unknown: LeftRegion for integrase B5829 sequence
gtttcaggtgaaaaagtcaacacaagtggtatttaccatcgaatgcggtgcgactcctgacgaactaatgcaggccattcaagatatcgtgctttcaaagctacttgccggccgagcggaggtagcatcttgaacgagctggatgcgcgtggtataatcgaaccagcagaatttggctggcatcgaaaggaggccggcacatgagaatgtgcggatacgcacgagttagcaccgacgaggaacggcaattagatagctta

SEQ ID NO: 18829 - DNA, 260 bp, Unknown; identical to SEQ ID NO: 16696
  Description of Unknown: LeftRegion for integrase B5830 sequence

SEQ ID NO: 18830 - DNA, 260 bp, Unknown
  Description of Unknown: LeftRegion for integrase B5831 sequence
ccgaacaaagggacgaaataatcaataaaaataaactttcttttctttcctaattaagagccttttgtctggacttccttcgatttatacgctattgtttgtgctaccctgactgcggggtggcacaaatttttttatcaagttaaagtcctacataagtcaagggtaagtaaaataaaaagtctaaaaaggaggctcgtatggataaaaaactaaaagttgcggcatacggaagagtatctactaacagtaaacagcaa

SEQ ID NO: 18831 - DNA, 260 bp, Unknown; identical to SEQ ID NO: 18810
  Description of Unknown: LeftRegion for integrase B5832 sequence

SEQ ID NO: 18832 - DNA, 260 bp, Unknown
  Description of Unknown: LeftRegion for integrase B5833 sequence
tcgtttgtaatcttttttactttcttcccattgagtatacagattatcattttgtgatatgagattgtcaattattccatctttttcttttgatttttctcgatacccgtacgctgccatcaaagatatcaaaagcactgttattataacaaaatccatactaaacacctcaatactattttatcaaaggagatgactctatgcaaagagcagttatctacgcgcgcttttcctcggacatgcagcgcgaagagtctatt

SEQ ID NO: 18833 - DNA, 260 bp, Unknown
  Description of Unknown: LeftRegion for integrase B5834 sequence
ctgcgtcatatggggtttaaatatacacaccgcaaaagacatacaagatgtatttgacgtaagttacacagacgccgaaatacgtgctgagcgaatgcaaatattgtacgaaagaaatagatttttgacgagcccgttggaaaaacgggtatacgataggtttgaatcctatataaaagcaaacaggagggtttaaggcaatgaatgttgttctgtatatgagatacagtagcgatagacaaacggagcagtctatagag

SEQ ID NO: 18834 - DNA, 260 bp, Unknown
  Description of Unknown: LeftRegion for integrase B5835 sequence
atcaaagacttagatagttataaactatctagcttgtgcgaggagcagaatatacaatgtagcaactatcacactgcacttgctgatgcactagcgtgtggaatactctttattgatattgttaagattgtcaaagaagttaaaagcatagaagatttatagaaattaaaaataatcaaaaataaaaaggtgaattaaaaatgaatgaaaaaattaatgcagtgatttatgctcgattttcgagtcataaccaacaagaa

SEQ ID NO: 18835 - DNA, 260 bp, Unknown
  Description of Unknown: LeftRegion for integrase B5836 sequence
aatatcattttgtttagaacataaaaaccgcccagtgttggcgcactgaacggtcccgatatatacccgaagatatactaaaaacgcaaatatattgtatcatcttcggaaacagcttgcaagtggaacaaatgttctttgctggctgttatttttgtactcttttttgagtaaatgaataagattaagaaggtgatgttatgtctaataaagaaactcttaaatctggtgctctctatatacgtgtgagcacccacggg

SEQ ID NO: 18836 - DNA, 260 bp, Unknown
  Description of Unknown: LeftRegion for integrase B5837 sequence
aaatcaaagacttagatagttataaactatctagcttgtgcgaggagcagaacatacagtgtagtaactatcatactgcacttgctgatgcactagcgtgtggaatactctttgtcgatattgttaagattgtcaaagaagttaaaagcgtagaaaatttataaaaaactaaaaatactcaaaaataaaaaggtgaaataatgaatgaaaaaattaatgcagtgatttatgctagattttctagccataatcaacaagag

SEQ ID NO: 18837 - DNA, 260 bp, Unknown
  Description of Unknown: LeftRegion for integrase B5838 sequence
taaaaaatgagcagtaaaatgcccatttgaatcatttgttgatatagaatctttgagtcaatttataaatacgttcaataaattgtatatcgttgattctatataagtatctaatgatacattcaatcatttcttctttagtcatatttatcacccctacgaaattgtaaaacaaaaaggaagtgtttattgtgtatgctatgtatttaagaaaatcgcgtgctgatgatccgcatgaaagtatagaagaaactttgaga

SEQ ID NO: 18838 - DNA, 260 bp, Unknown
  Description of Unknown: LeftRegion for integrase B5839 sequence
agccttcgaccgaggccttataactatcactccttccatgaaaatctatgtttctccgataattttggatagccctcaggacgcttttacagcccgctggctggcttctcttgacggaatggttttaccccccccccccgatttccgccgcgtagagagcttctggagtaccataacgacgaaatttttaggagggtcacatgaatacagtaatttatactcggtattctgccggcccgagacagaccgaccagagtatc

SEQ ID NO: 18839 - DNA, 260 bp, Unknown
  Description of Unknown: LeftRegion for integrase B5840 sequence
ttggcgttaacaaaatggtggattttaaccccctcgaatttgatggggttaaccgggataataaaaaatcccccaccggttgcagccggaaggggatcaaatagaacagcttacccaaagtggataatgcgtccaaacaatgaaattataccactttctgggtaaacttggcaagtcttactttggaggtggtttttattatgaaagcggcggcttatgcgcgctactcaacggacaagcaaacggaaaatagtatagcg

SEQ ID NO: 18840 - DNA, 260 bp, Unknown
  Description of Unknown: LeftRegion for integrase B5841 sequence
atctgaattaatggacgaacaggactttctaaacgctacaatctctatgacacaggaagaaatggacgatttacacaagactgataaaggcacacaagatgcgttaaaaagaagaatggaagaaaacgaacgttttagaacaatgtaaataaaaaaagagccacctacacaggtggctttgtttgtagagaggattaactatggaattgtcaaaaggagttatatacgctcgttattcatcagataaacaacgtgatgaa

SEQ ID NO: 18841 - DNA, 260 bp, Unknown
  Description of Unknown: LeftRegion for integrase B5842 sequence
tcaaagacttagatagttataaactatctagcttgtgtgaggaacagaacatacagtgtagtaactatcatactgcacttgctgatgcactagcgtgtggaatactctttgtcgatattgttaagattgtcaaagaagttaaaagcgtagaagaattatagacatttaaaaaatactcaaaaataaaaaggtgacgaaaaatgaatgaaaaaattaatgcagtgatttatgctcgattttcgagtcacaatcagcaagaa

SEQ ID NO: 18842 - DNA, 260 bp, Unknown
  Description of Unknown: LeftRegion for integrase B5843 sequence
cttatgttagttttatagataacgcagtatgcatttcgattatgtactcaataaaatagaataaaaaaaatcctgcaaccgtccgccaacggttgcaggatataaacggtaaggtgttaaataatagataattcacacttccttaacctctgttattttaccacctttccgggcaaatgtcaaaagaaaggtgtatttttatgccaaaaaattcaaattatggaaatctctcacattccgacagcacaaagcgagccgca

SEQ ID NO: 18843 - DNA, 260 bp, Unknown
  Description of Unknown: LeftRegion for integrase B5844 sequence
taaaaaatgggcagtaaaatgcccatttgaatcatttgttgatatagaatctttgagtcaatttataaatacgttcaataaattgtatatcgttgattctatataagtatctaatgatacattcaatcatttcttctttagtcatatttatcacccctacgaaattgtaaaacagaaaggaagtgtttattgtgtatgctatgtatttgagaaaatcacgtgctgatgatccacatgaaagtatagaggatactttgagg

SEQ ID NO: 18844 - DNA, 260 bp, Unknown; identical to SEQ ID NO: 17493
  Description of Unknown: LeftRegion for integrase B5845 sequence

SEQ ID NO: 18845 - DNA, 260 bp, Unknown
  Description of Unknown: LeftRegion for integrase B5846 sequence
ccgatgaccggggaactgtaacaatccctattcaggaatctattcaactttctgaggaagaacgtattttgatttccgcatttaggagtgcttctatagaaggacgcatgagaattatccaagtctgcatgaatgaaaaggattcaaaaggggaaaatatcattgcaggataataagcatcgaagaatggaggaagaaccatgtacgaagagattaagactgcttgtctatatctacgatattcaagtagcaaccaaacc

SEQ ID NO: 18846 - DNA, 260 bp, Unknown
  Description of Unknown: LeftRegion for integrase B5847 sequence
atcaaagacttagatagttataaactatctagcttgtgtgaggaacagaacatacagtgtagtaactatcatactgcactttctgatgcactagcgtgtggaatactctttattgacattgttaagcttgtcaaagaagttaaaaatgtagaagaattataaacgttaaaaatactcaaaaataaaaaggtgaattaaaaatgaatgaaaaaattaatgcggtgatttatgctagattttctagccacaatcagcaagaa

SEQ ID NO: 18847 - DNA, 260 bp, Unknown
  Description of Unknown: LeftRegion for integrase B5848 sequence
accgaggccttataactatcactccttccatgaaaatctatgtttctccaataattttggatagccctcaggacgcttttacagcccgctggctggcttctcttgacggaatggttttaccccccccccccccccccccgatttccgccgcgtagagagcttctggagtaccataacgacgaaatttttaggagggtcacatgaatacagtaatttatgctcggtattctgccggcccgagacagaccgaccagagtatc

SEQ ID NO: 18848 - DNA, 260 bp, Unknown
  Description of Unknown: LeftRegion for integrase B5849 sequence
attatctgttctgtttatccgattcaccttacccaaaagtagagatttccctaacggaagaagagcaattactgcttgacgcattccgttccgctaccccacaaggtagattcaacattattactacctgtatgtgtgagaagcgaaaaggggacaacgaaagtgccgggtaattgatttcatagaatggaggaagaaccatgtatgaggatataaaaacagcctgcctatacgttagattctcaagccataaccagact

SEQ ID NO: 18849 - DNA, 260 bp, Unknown
  Description of Unknown: LeftRegion for integrase B5850 sequence
attacaatttcagagcttttaaactaaagaaaaaccgcccctgcgccaacaggaacggctttctatatatcccgaagatataccatataacataagcaactatattgtatcatcttcggaaacagcttgcaatcggaacatattttcgatagctgttatttttatacactttttgaataaaataaagaaggtgatgtaaaatgtctagcaaagaaactcttaaatccggtgctctctatatacgtgtcagcacccacgga

SEQ ID NO: 18850 - DNA, 260 bp, Unknown
  Description of Unknown: LeftRegion for integrase B5851 sequence
aacatatgccttcaagttcgctgttgaaagcggtaagatggcgaaagcaaaggcaaagagcaaataaaaaaaggccctattaagggcctttctttctaactaaaataaaataaccgccgatgtatacgttcggcggttatctgataacacatgtctaatcttctctaatgcaattatatcattaaaaggaacattacacaatgaatagtttaaaagctgtaatatacgcaagatactcatcagataagcaacgagatgaa

SEQ ID NO: 18851 - DNA, 260 bp, Unknown; identical to SEQ ID NO: 18828
  Description of Unknown: LeftRegion for integrase B5852 sequence

SEQ ID NO: 18852 - DNA, 260 bp, Unknown
  Description of Unknown: LeftRegion for integrase B5853 sequence
gactactttgacgtatcgctggactacattttcggcaggacggacgacccgcatggcatgatctataacaactgcgtgaagctcggcctgaacaatcccgaaatggcgcggttcgtggaaatgtgcttcgaccccggctcggccatgaacgaacgattgaaagcaacgcttgtgcagatgctctcggaggtggatacgaaatgaaagccgtgatctatgcccgctattcctcggacagccagcgagaggaatccattgaa

SEQ ID NO: 18853 - DNA, 260 bp, Unknown
  Description of Unknown: LeftRegion for integrase B5854 sequence
ggtcggctgagaacatcagcttgcagacgctgaagaagctgtcggattacttcggtataggcatcgaggagcttgtccacggaaagcaacaacggcgtgagataacattttcaagcggcgcgtacacggacgcagagcttgaccagataaagcagttcgcacactttttgataaggcaacgagaaaggaatgattaatggatggcatacgcaatgtacctgcgcaagtcacgcgcagacgaggaactaggatacgagaac

SEQ ID NO: 18854 - DNA, 260 bp, Unknown
  Description of Unknown: LeftRegion for integrase B5855 sequence
cttggaatgtaaaacatgataataaaaccgcccagtgttggcgcactgaacggtcccgatatatacccgaagatatactaaaaacgcaaatatattgtatcatcttcggaaacagcttgcaagtggaacaggtgttctttgccggctgttatttttgtactcttttttgagtaaatgaataagattaagaaggtgatgttatgtctaataaagaaactcttaaatctggtgctctctatatacgtgtgagcacccacggg

SEQ ID NO: 18855 - DNA, 260 bp, Unknown; identical to SEQ ID NO: 18797
  Description of Unknown: LeftRegion for integrase B5856 sequence

SEQ ID NO: 18856 - DNA, 260 bp, Unknown
  Description of Unknown: LeftRegion for integrase B5857 sequence
ctaaaagcctcccacaagtcaatatgtatgtatttatattatatcatatattttattacatatcaatggatatataaaaaaacgccccaaaagatgctggaacatctctcggagcgcaggagaatgtggtacattcaccattctttcaatgtgaattataccatatcctcctccaaatgtcaaggagtgataacaaatatatgaaaaccgccgtaatatacgcccgatactcttcggacaagcagacggagcagtccatt

SEQ ID NO: 18857 - DNA, 260 bp, Unknown
  Description of Unknown: LeftRegion for integrase B5858 sequence
atcacacaactatgcacagccgcgtcactgtcgcgcgggcaatcttggaaaactatgagatggaagccgcgcaaggcaatcttgtcgcgacagatcacattgcgccggatctagaccgtttgcgtgcagccgtggaaagcggaaaagatgccgcgcaggaaggcaaaatcggatatgtacacgcaggggaggtgtgatacatggatgctatatacgcccgtcagtcaattgagaaaaaagactctctatccatcgagcag

SEQ ID NO: 18858 - DNA, 260 bp, Unknown
  Description of Unknown: LeftRegion for integrase B5859 sequence
ctgcgtaatatggggtttaaatatacacaccgcaaaagacatacaagatgtgtttgatgtaagttacacagccgccaaaatacgtgctgaacgaatgcaaatattgtacgaaagaaatagatttttgacgagcccgttggaaaaacgggtatatgataggtttgaaccatatataaaagcaaacaggagggcataaggcaatgaatgttgttctatatatgagatacagtagcgatagacaaacggagcagtctatagag

SEQ ID NO: 18859 - DNA, 260 bp, Unknown
  Description of Unknown: LeftRegion for integrase B5860 sequence
ctgcgtcatatggggtttaaatatacacaccgcaaaagacatacaagatgtatttgatgtaagttacacatccgccagaatacgcgccgaacgaatgcaaatattgtatgaaagaaatagctttttgacgagcccgttggaaaaacgggtatatgataggtttgaaccatatataaaagcaaacaggaggatataaggcaatgaatgttgttctatatatgagatacagtagcgatagacaaacggagcagtctatagaa

SEQ ID NO: 18860 - DNA, 260 bp, Unknown
  Description of Unknown: LeftRegion for integrase B5861 sequence
gatgcattaaaacaacagatcaatcagatataaatgaaataataatcaaaaagaccgccctttgcgggcggtcaagaccttacactttacccacaaaagaatatggctaaaatataaagataacgcatatttattttaacataagccacttcttttgtataggcttatttttttatactcaactttaaggaggaagacgcatgagtgaaaagttaaaagaagtctgtgcatatatccgtgtctctactgacaaacaggaa

SEQ ID NO: 18861 - DNA, 260 bp, Unknown
  Description of Unknown: LeftRegion for integrase B5862 sequence
tatgccggcaaagttggaaccggaattatatggtttttaaccgctggcttttttgtatttggctggatttacgatatcataaagattgcttccggaacatttactgacggcatgggtttcacaatcagaaaataaaaaaatcccccaccagccgaggctgatgggggaacagttttataaattataaagagggtaagaacatgtcactttatgcgttatatttaagaaaaagccgttccgatgatccagaaaaaagcgta

SEQ ID NO: 18862 - DNA, 260 bp, Unknown
  Description of Unknown: LeftRegion for integrase B5863 sequence
ctgcgtcatatggggcttaaatatacacaccgcaaaagacatacaagatgtatttgatgtaagttacacatccgccagaatacgcgccgaacgaatgcaaatattgtatgaaagaaatagctttttgacgagcccgttggaaaaacgggtatatgataggtttgaaccgtatatacaagcaaacaggaggatataaggcaatgaatgttgttctatatatgagatacagtagcgatagacaaacggagcagtctatagaa

SEQ ID NO: 18863 - DNA, 260 bp, Unknown
  Description of Unknown: LeftRegion for integrase B5864 sequence
tgcaaataatggggtttaaaaggataaaaaaataaaaaaataaaaaaacaccccctgctggaacagggggctgcattaaaaacaagagtacgaaaatgacactgtacgaactcacgccgttttcaatgctacatttattatagcattgaaacccatactccgcaagtgtatttttgtacacagaaggaggatataaggcaatgaatgttgttctatatatgagatacagtagcgatagacaaacggagcagtctatagag

SEQ ID NO: 18864 - DNA, 260 bp, Unknown
  Description of Unknown: LeftRegion for integrase B5865 sequence
ctgcgtaatatggggtttaaatatacacaccgtgaaagacatacaagatgtatttgatgtaagttacacagccgccaaaatacgtgctgaacgaatgcaaatattgtacgaaagaaatagatttttgacgagcccgttggaaaaacgggtatatgataggtttgaaccatatataaaagcaaacaggagggcataaggcaatgaatgttgttctatatatgagatacagtagcgacaggcaaacggagcagtctatagag

SEQ ID NO: 18865 - DNA, 260 bp, Unknown
  Description of Unknown: LeftRegion for integrase B5866 sequence
gtgatggggctgtaccacatggtatggttcgcgccctcacggaagaccttgcatcccgcctttttcagttctttttccagctcgctgtatcgcactgcatcacctgctttctgatattgattatagcacgtattcgcacgtgtgtcaatacatttttacgtatttatacgtatttattttgctaatttgaggtaatcgaaatgaaggacaagtacgcgctgtacctgcgcaaatcccaggctgaccagcccgacgagagc

SEQ ID NO: 18866 - DNA, 260 bp, Unknown; identical to SEQ ID NO: 18861
  Description of Unknown: LeftRegion for integrase B5867 sequence

SEQ ID NO: 18867 - DNA, 260 bp, Unknown
  Description of Unknown: LeftRegion for integrase B5868 sequence
ttaaaacaacaaatcaatcagatataaatgaggtatatttaatataacaaaaagaccgccctttgcgggcggtcaagaccttacactttacccacaaaagaatatggctaaaatataaagataacgcatatttattttaacataagccacttcttttgtataggcttattttttatactcaattttaaggaggaagacgcatgagtgaaaagttaaaagaagtctgtgcatatatccgtgtctctactgacaaacaggaa

SEQ ID NO: 18868 - DNA, 260 bp, Unknown
  Description of Unknown: LeftRegion for integrase B5869 sequence
tactaacatatcatagcacctcccttataatatataatatacctatttacaaatattatgtcaatttttttgtgattttttcacaatttctttaattttaatttatttttatgtgattttatattcaaaaatcttagcattatatggcaactcaagacaaatagtgctataataaaatgctaagaaggagggcacgcattatgagtgaaaagttaaaagaagtctgtgcatatatccgtgtctctactgacaaacaggaa

SEQ ID NO: 18869 - DNA, 260 bp, Unknown
  Description of Unknown: LeftRegion for integrase B5870 sequence
aagtggatatgccgtcttatcttaaatgcatcaaggaaaatattaattattcctgatgaaaacaaaaaagaggttaaatattcccttgaatctatctacgatattgaaaattacagggatcagttaatcgaagtagcgaagagatttttataggatgggaacgaggcttaacttaacataaggcgaatagaggtggatttatggcctacgccgaatatctccgaaaaagccggtacgacaatccggatgaaacgctggaa

SEQ ID NO: 18870 - DNA, 260 bp, Unknown
  Description of Unknown: LeftRegion for integrase B5871 sequence
ctatgccggcaaagttggaaccggaattatatggtttttaaccgctggcttttttgtatttggctggatttacgatattataaagattgcttccggaacatttactgacggcatgggtttcacaatcagaaaataaaaaatcccccaccagccgaggccgatgggggaacagttttataaattataaagagggtaagaacatgtcactttatgcgttatatttaagaaaaagccgttccgatgatccagaaaaaagcgta

SEQ ID NO: 18871 - DNA, 260 bp, Unknown; identical to SEQ ID NO: 17630
  Description of Unknown: LeftRegion for integrase B5872 sequence

SEQ ID NO: 18872 - DNA, 260 bp, Unknown; identical to SEQ ID NO: 15831
  Description of Unknown: LeftRegion for integrase B5873 sequence

SEQ ID NO: 18873 - DNA, 260 bp, Unknown
  Description of Unknown: LeftRegion for integrase B5874 sequence
ctgcgtcatatggggtttaaatatacacaccgcaaaagacatacaagatgtatttgatgtaagttacacagccgccgaaatacgtgctgaacgaatgcaaatattgtacgaaagaaatagatttttgacgagcccgttggaaaaacgggtatacgataggtttgagccatatatacaagcaaacaggagggtataaggcaatgaatgttgttctatatatgagatacagtagcgatagacaaacggagcagtctatagaa

SEQ ID NO: 18874 - DNA, 260 bp, Unknown
  Description of Unknown: LeftRegion for integrase B5875 sequence
ctgcgtcatatggggcttaaatatacacaccgcaaaagacatacaagatgtatttgatgtaagttacacagccgccgaaatacgtgctgaacgaatgcaaatattgtacgaaagaaatagatttttgacgagcccgttggaaaaacgggtatacgataggtttgaaccgtatatacaagcaaacaggagggtataaagcaatgaatgttgttctatatatgagatacagtagcgacaggcaaacggagcagtctatagag

SEQ ID NO: 18875 - DNA, 260 bp, Unknown
  Description of Unknown: LeftRegion for integrase B5876 sequence
cattgcaactaattagtctttcggatcgggaaaggttaaacgaaaacgactttttcgtcaagggtaaagtgcattgcttggcgcaacccttgacgataaaagtcgcaagccacgaaagaaaacaattttaattcgtttccgttttttccgttcccgtcgaaagacaaatctaaaaaataaaattaaaggagtaacaaattttgaaaacagcagttatttacgctcgttattcgagcgatacacaaacggaacagtccata

SEQ ID NO: 18876 - DNA, 260 bp, Unknown
  Description of Unknown: LeftRegion for integrase B5877 sequence
ggcctcaagtgccccaagtgcggctccgaggacgtcgccctcgtcggcgacaccggaaggccgctgtctgccggaaaggcgctggtcggcggcgcggtcgcggggcctgcgggcgcggcggtgggtgcgatgctcggcaagcgcggccacagggagtacgtgtgcctctcgtgcggccacaggtacagggccaagtgacgatggcaaggaggaggcgctgcgcgatatacgcccgcttctccagcgagaggcagcgcgag

SEQ ID NO: 18877 - DNA, 260 bp, Unknown
  Description of Unknown: LeftRegion for integrase B5878 sequence
aaattgatgaaattttaattgatatgcaacaggatggatatgaaattattgatgttaaatttaactctctagcaaatcaaggaatgacaggttctgcagagatgtttcatactctaataatttataaataaaaactttttatttttataatataaatttgctctcttttagagagctttttttaaaaaagaggtgtaataatgaaaaaagcattcgcttatgctcgtttttcaacagatatgcaaagagaagaaagtatt

SEQ ID NO: 18878 - DNA, 260 bp, Unknown; identical to SEQ ID NO: 18868
  Description of Unknown: LeftRegion for integrase B5879 sequence

SEQ ID NO: 18879 - DNA, 260 bp, Unknown
  Description of Unknown: LeftRegion for integrase B5880 sequence
ctgcgtcatatggggcttaaatatacacaccgcaaaagacatacaagatgtatttgacgtaagttacacagccgccgaaatacgtgctgagcgaatgcaaatattgtacgaaagaaatagatttttgacgagcccgttggaaaaacaggtgtatgataggtttgaaccatatatacaagcaaacaggaggatataaggcaatgaatgttgttctatatatgagatacagtagcgatagacaaacggagcagtctatagaa

SEQ ID NO: 18880 - DNA, 260 bp, Unknown
  Description of Unknown: LeftRegion for integrase B5881 sequence
ctgcgtcatatggggtttaaatatacacaccgcaaaagatatacaagatgtatttgatgtaagttacacagccgccaaaatacgtgctgaacgaatgcaaatattgtacgaaagaaatagatttttgatgagcccgttggaaaaacgggtatacgataggtttgaaccgtatatacaagcaaacaggagggtataaagcaatgaatgttgttctatatatgagatacagtagcgatagacaaacggagcagtctatagaa

SEQ ID NO: 18881 - DNA, 260 bp, Unknown
  Description of Unknown: LeftRegion for integrase B5882 sequence
ctgaaataatcatattgttttgtcggattccgacagacatacataacaaaaagaccgccctttgcgggcggtcaagaccttacactttacccacaaaagaatatggctaaaatataaagataacgcatatttattttaacataagccacttcttttgtataggcttatttttttatactcaactttaaggaggaagacgcatgagtgaaaagttaaaagaagtctgtgcatatatccgtgtctctactgacaaacaggaa

SEQ ID NO: 18882 - DNA, 260 bp, Unknown
  Description of Unknown: LeftRegion for integrase B5883 sequence
tatatattgtaaacttttgctatttatattatactatttacaaaaaagaaaaagaccgtccaaaaaggacggtcaagacattacactttacccacaaaaaatatggctaaaatataaagataacgcatatctattttagcataagccttttcttttgtataggcttattttttataccaaattttaaggaggaagaaaccatgtctgaaaaattaaaagaagtctgtgcatacatccgagtctctactgacaaacaggaa

SEQ ID NO: 18883 - DNA, 260 bp, Unknown
  Description of Unknown: LeftRegion for integrase B5884 sequence
aaagcccccgtcaacaagcgtctgaaagaggcgctgttccgtatcatggaggagggggagcagaaatgaaagccgtgatttatgcccgctattccagcgacaaccagcgggaggaaagcatagaaggccagcttcgggagtgtacggcctactgttagaagaacgacattaccatcttacggacatacattgaccgggccatgtccgccaagaccgaccaccgcccggacttccagcggatgattaaagacagcgcaaag

SEQ ID NO: 18884 - DNA, 260 bp, Unknown
  Description of Unknown: LeftRegion for integrase B5885 sequence
ctctaatatcttttaacagaaacattcgcccgtttcattacaacttatctgtatggaatattttcttctcttttgttatgctgaattcgcagacgtctgtgaattttatccctgattttatctcttattatcaaatcagggacaaaataccttcaatggcgttatactgcttacaacaagcaataaaaggagatgcctcaatgaaaaaggcagtaatctatgccagatacagttccgatatgcagcgtgaggagtccatc

SEQ ID NO: 18885 - DNA, 260 bp, Unknown
  Description of Unknown: LeftRegion for integrase B5886 sequence
aaatagcaatttaatgaactaattcatataaatgaaatctaatcaaaaaaatgaccgcccataaaggacggtcaaaatcttacgctttacccacaaaagaatatggctaaaagctaaagataacgcatatctattttagcataagccttttcttttgtataggcttattttttataccaaattttaaggaggaagaaacaatgtctgaaaaattaaaagaagtctgtgcatacatccgagtctctactgacaagcaagag

SEQ ID NO: 18886 - DNA, 260 bp, Unknown
  Description of Unknown: LeftRegion for integrase B5887 sequence
ctgcgtcatatggggtttaaatatacacaccgcaaaagacatacaagatgtatttgatgtaagttacacatccgccagaatacgcgccgaacgaatgcaaatattgtacgaaagaaatagatttttgacgagcccgttggaaaaacgggtatacgataggtttgaaccgtatatacaagcaaacaggagggtataaagcaatgaatgttgttctatatatgagatacagtagcgatagacaaacggagcagtctatagaa

SEQ ID NO: 18887 - DNA, 260 bp, Unknown
  Description of Unknown: LeftRegion for integrase B5888 sequence
actatgcctataactgcggcttcaacgatggttacaaggacggccatacccacggcgagaaaactgggcacagctccggttactcccagggttacatggaggcaaaacgcgagtatggcccgcgtgaggagccacccaatgtgcgctatgtcggcggcgcccagggcaattaaatcgttttcgccataagaggtaggagtatgaaagacaagtatgcgcagtacctgcgtaaatcccaggctgaccagcccgacgagagc

SEQ ID NO: 18888 - DNA, 260 bp, Unknown
  Description of Unknown: LeftRegion for integrase B5889 sequence
ttaaaacaacaaatcaatcagatataaatgcggtatatttaatataacaaaaagaccgccctttgcgggcggtcaataccttacactttacccacaaaagaatatggctaaaatataaagataacgcatatttattttaacataagccacttcttttgtataggcttattttttatactcaattttaaggaggaagacgcatgagcgaaaaattaaaagaagtctgtgcatatatccgagtctctactgacaaacaggaa

SEQ ID NO: 18889 - DNA, 260 bp, Unknown
  Description of Unknown: LeftRegion for integrase B5890 sequence
tattcgctgcaatacatcaacggtggcgaggaaaacccagaggttgaagtcgtttacctgatcgctgaatgtaaataaaaaatccgcccaggctgctacctgtgcggatcaaacgcaaggaaaatgcaaacaccactaagcactttccacagtcagtatatcacaagctgcctgcgttgtaaagtcggaaaggattaagattgaacgctgtaatctatgcccgtttctcgtcgcacagccagcgggagcagtccatcgaa

SEQ ID NO: 18890 - DNA, 260 bp, Unknown
  Description of Unknown: LeftRegion for integrase B5891 sequence
aacactgaaataatatattgtttgtcggaatccgacagacatatacaacaaaaagaccgtccacaaaggacggtcaagacattacactttacccacaaaaaatatggctaaaatataaagataacgcatatttattttaacataagccatcttttttgtataggcttattttttatacataaatttaaggaggaagatacatgagtgaaaatttaaaagaagtatgtgcatatatccgagtttctactgacaagcaagaa

SEQ ID NO: 18891 - DNA, 260 bp, Unknown
  Description of Unknown: LeftRegion for integrase B5892 sequence
tcgggaaatgacgtatcagatggtgatgcgtgcttcatggaaaatgctgcagagcggacttttgtcagaggacgagtatcttgcgtttgaagcgaaaatgcgcgagaaatatcgtcccgtcatcggacttttattttcagatattgacttgctatcgtgcggatagtacgggaatatgggactggaaaggagggagcaccatgaagatacgaagagtccaaccaagccctatattgcagaaaaagctacgtgtggcggca

SEQ ID NO: 18892 - DNA, 260 bp, Unknown
  Description of Unknown: LeftRegion for integrase B5893 sequence
tttgacagcaaaccgaatctcacgattggtcagcgcgtgacgatatccgggcagttaagtaccggaacaatcagcgacaacagcgtgtttctgaggaactgcaaggtcaagtagcaaaacgtcaccaggcgatgcaaacgggcatcgcctgggaatgtgcttgcgggccagcttggaacgggcacgaggtgaggtgaagaatggcaaggaggaggcgctgcgcgatatacgcccgcttctcaagcgagaggcagcgcgag

SEQ ID NO: 18893 - DNA, 260 bp, Unknown
  Description of Unknown: LeftRegion for integrase B5894 sequence
ctgcgtcatatggggtttaaatatacacaccgcaaaagatatacaagatgtatttgatgtaagttacacagccgccaaaatacgtgctgaacgaatgcaaatattgtacgaaagaaatagatttttgacgagcccgttggaaaaacgggtatacgataggtttgaaccgtatatacaagcaaacaggagggtataaagcaatgaatgttgttctatatatgagatacagtagcgatagacaaacggagcagtctatagaa

SEQ ID NO: 18894 - DNA, 260 bp, Unknown
  Description of Unknown: LeftRegion for integrase B5895 sequence
atttcattttaatacctcttttattattattataaggttcgtttcctttaccttacatatattattatacgcctttacccgtagtttgtcaagcgtttttcaaaaattttttcaattttttcaaaaaaactcttggaatttatttaaaaatcaatataattttaattacatcaatttgataataaaagaggtaattaaaaatggaaaatgcggttatttacgcgcgatttagttcgcataatcagcaagaacaaagtatt

SEQ ID NO: 18895 - DNA, 260 bp, Unknown; identical to SEQ ID NO: 17630
  Description of Unknown: LeftRegion for integrase B5896 sequence

SEQ ID NO: 18896 - DNA, 260 bp, Unknown
  Description of Unknown: LeftRegion for integrase B5897 sequence
ctgcgtcatatggggtttaaatatacacaccgcaaaagatatacaagatgtatttgatgtaagttacacagccgccaaaatacgtgctgaacgaatgcaaatattgtacgaaagaaatagatttttcacgagcccgttggaaaaacgggtatatgatatgtttgaaccatatatacaagcaaacaggagggtataaggcaatgaatgttgttctatatatgagatacagtagtgacaggcaaacggagcagtctatagag

SEQ ID NO: 18897 - DNA, 260 bp, Unknown
  Description of Unknown: LeftRegion for integrase B5898 sequence
gatgcattaaaacaacagatcaatcagatataaatgaaataataatcaaaaagaccgccctttgcgggcggtcaagaccttacactttacccacaaaagaatatggctaaaatataaagataacgcatatttattttaacataagccatcttttttgtataggcttattttttatactcaattttaaggaggaagaaactatgtctgaaaagttaaaagaagtctgtgcatatatccgtgtctctactgacaagcaagag

SEQ ID NO: 18898 - DNA, 260 bp, Unknown; identical to SEQ ID NO: 18858
  Description of Unknown: LeftRegion for integrase B5899 sequence

SEQ ID NO: 18899 - DNA, 260 bp, Unknown
  Description of Unknown: LeftRegion for integrase B5900 sequence
aatattaaaaataatagttttgtcggattccgacagacatacataacaaaaagaccgccctttgcgggcggtcaagaccttacactttacccacaaaagaatatggctaaaatataaagataacgcatatttattttaacataagccacttcttttgtataggcttatttttttatactcaactttaaggaggaaggcgcatgagtgaaaagttaaaagaagtctgtgcatatatccgtgtatctactgacaaacaggaa

SEQ ID NO: 18900 - DNA, 260 bp, Unknown
  Description of Unknown: LeftRegion for integrase B5901 sequence
atttgtggatataccaagtgctgaacagtatagagtttctttgaagatgaagcaaaataacacggtttgatagcagtagaataaaaaatccccgcccggcgctggaacaccgaacggggaagaagctgtgatacaatcacaaccttagacaagtttattgtatcatagctccctgaaaatgtcaaggagtgataaaaaatatgcaaaccgccgtgatatacgcccggtattcgtccgacaagcaaacggagcagtccatc

SEQ ID NO: 18901 - DNA, 260 bp, Unknown
  Description of Unknown: LeftRegion for integrase B5902 sequence
ctgcgtcatatggggcttaaatttacacaccgcaaaagatatacaagatgtatttgatgtaagttacacagccgccgaaatacgtgctgaacgaatgcaaatattgtacgaaagaaatagatttttgacgagcccgttggaaaaacgggtatatgataggtttgaaccatatataaaagcaaataggagggtataaggcaatgaatgttgttctatatatgagatacagtagcgatagacaaacggagcagtctatagaa

SEQ ID NO: 18902 - DNA, 260 bp, Unknown
  Description of Unknown: LeftRegion for integrase B5903 sequence
gtcggctccaggtcgccgccgaggatcttcataaaggtggattttccgctaccgttggcaccaatcaggccgtaacggttgccgccgccaaatttgacggaaatgttttcgaacagcggcttactgccaaactgcatagtgatattgttgcaaagaagcaaaattgatattctctcgtaagtgattgaaaggaatagattatgcaaaaacaaaacgggttagcattcagttacataagattctcaagcaagaagcaagaa

SEQ ID NO: 18903 - DNA, 260 bp, Unknown
  Description of Unknown: LeftRegion for integrase B5904 sequence
gaacatagtggaaaatctatagattattggatggatggtattgatgaatttgaagctcctaactctgtagaccttgtattagataaaatgattgaagaaggattaattactgatacaaacttaaatagtgaagtttgggaaataataaagaaagcagtacaactagaaattgaaagaaaattaaagtaggaaggtttaaaatgaaggttgctatttatttaagaaaatcaagagctgatgaagaattagaaagaacagta

SEQ ID NO: 18904 - DNA, 260 bp, Unknown
  Description of Unknown: LeftRegion for integrase B5905 sequence
tcgtaaaatacctaaccgaaatgatgatccaataagagaacagttactcaacgaaatgatatcttttttgaattcacttaccacagaaaaattaagctcgctaatctggatttttagaggtatggaattttctttacaaacagatccaaacaaacaagaagaattgatacagaaaatggtaaataacagatattgagagcatgaaacagagcaaagcgaaaatttcggtagacattcgttttgctcttctttgtattata

SEQ ID NO: 18905 - DNA, 260 bp, Unknown
  Description of Unknown: LeftRegion for integrase B5906 sequence
gcggagaaaggtgataaatactacctgctctcaatcaaccaaagcggaaaagactacgaattcaggaaagatgaatataatcccgtccgcgcagtctataccgtgattcagtctatgcgggatgaaaaggctcttgatcgagcaatggctgaagcgggaatccatcatttctgggaaacaaaacttaaggaacttgactgatgaaatacttgatatatgctcgaatttcggaacgcggctcgtcttttgaccataaagcg

SEQ ID NO: 18906 - DNA, 260 bp, Unknown
  Description of Unknown: LeftRegion for integrase B5907 sequence
agtaagcaagaataacttcctgattctcaggggtaagctcgcggaactttgcaaggatctctcgatcaagtcggtcaaacattgtgacctctctttccctcagaagctcccgatgattgtattcggcgccgcgcatcagtatataccattctgtcccgccccgccacaggtaaaaattcccagcaaaggagtgacctcttatgaccccgccgaaaggcttttcttcttccacccacgcgccgctgcctgatcttcgtatt

SEQ ID NO: 18907 - DNA, 260 bp, Unknown
  Description of Unknown: LeftRegion for integrase B5908 sequence
agggacgaaatcatgagcaaaaataaagcatcttttctttcataaaataagcggttttgtctggactttatttggtttacgcgctattgtttgtgctaccctgacctgaaatacggggtagcacaaaattttttaatctaaatgaaatcctacacaggtcggggagaaagtaaacaaaaagtctaacgaggaggtaaagcgtggatagaaagataagagcggctgcatacggtcgagtgtctactaacagtaaagagcaa

SEQ ID NO: 18908 - DNA, 260 bp, Unknown
  Description of Unknown: LeftRegion for integrase B5909 sequence
gtaaagcaacttatgaaaatagcaaaagtattagatgtaccacctaaaaagttagctggatggtgtgacgaaccaactcaaaaagaagaaatggttaataagtggattgataaagtcggcgagctgaatttcaatgaaaaagaattggatgaattgataagctacgcacagtttattgtttctaagcgaggtgataaataatgtctgaatatttaatgtacttgagaaagtccagacaagatgatccaaatgaaaatgta

SEQ ID NO: 18909 - DNA, 260 bp, Unknown
  Description of Unknown: LeftRegion for integrase B5910 sequence
gatagccagtaaataaaaaagcgctgaccctctggaaagggtcagcgctggggccagtgctacaacacaaaaaagtgaggtggccgcttcctgctggaacagggggctgcgccacaaagcacaggcagttggcatggaaccgactgcctttattgtagcacgtcgccctgaatttgaaaaggggtgattttatacgcgatatggattccgcccgcctgcgggtggcgtgctatgtccgcgtcagcacgagagagcaggcc

SEQ ID NO: 18910 - DNA, 260 bp, Unknown
  Description of Unknown: LeftRegion for integrase B5911 sequence
caagccatttggctcttttagcccaatgagcaagagcattcgaaaaatgatccgtatgggataccgggtcaagatcaggtgcaaaaacgttggatggtacgcgcaggggatacctgagattgttgccatgattccagatccagaagctgtgttctcttggcttgacgagtgcgagagaagtggcgaggaggttccgttcaatgccaacagctaaaactgcggtgatatacgcccgcttttcgtgcaataagcagcgcgag

SEQ ID NO: 18911 - DNA, 260 bp, Unknown
  Description of Unknown: LeftRegion for integrase B5912 sequence
agtaagcaagaatagcttcctgattctcaggggtaagctcgcggaactttgcaaggatctctcgatcgagtcggtcaggcattgtgacctctctttccctcagaagctcccgatgattgtattcggcgccgcgcatcagtatataccattccgtcccgccccgccaccggtaaaaattcccagcaaaggagtgacctcttatgaccccgccgaaaggcttttcttcttccgcccacgcgccgctgcctgatcttcgtatt

SEQ ID NO: 18912 - DNA, 260 bp, Unknown
  Description of Unknown: LeftRegion for integrase B5913 sequence
aatctcgccagttctgggtatgtgatattcttttcaagcataatctcccccagcagtattttcatgtggtgtacctcgtactccctattttattctgtttttcaataaattaaaacaagaaatgttttccagtttgcctatcttgattttttaataatatcagcgtatttttatactatactttaagaaggaggcacgttatggcaaatatccaaccagtaaaaaatggagctttatatatccgcgtatccacgcacttg

SEQ ID NO: 18913 - DNA, 260 bp, Unknown
  Description of Unknown: LeftRegion for integrase B5914 sequence
taagcaagaatagcttcctgattctcaggggtaagctcgcggaactttgcaagaatctctcgatcaagtcggtcaaacattgtgacctctctttccctcagaagctcccgatgattgtattcggcgccgcgcatcagtatataccattctgtcccgccccgccaccggtaaaaatcccccccgcaaaggagtgacctcttatgaccccaccaaaaggcttttcttcttccgcccacgcgccgctgcctgatcttcgtatt

SEQ ID NO: 18914 - DNA, 260 bp, Unknown
  Description of Unknown: LeftRegion for integrase B5915 sequence
caagaatagcttcctgattctcagggttcagtctacggaacttttcaaggatctcttgatcgagtcggtttggcatggtttgcctctctttcctctcagaatcttccgatgataatattttggcgccgcgcatcagtatataccattctgtcccgccccgccaccggtaaaaatccccccccgcaaaggagtgacctcttatgaccccgccgaaaggctttacttcttccgtccccgcgccgctgcctgatcttcgcatc

SEQ ID NO: 18915 - DNA, 260 bp, Unknown
  Description of Unknown: LeftRegion for integrase B5916 sequence
taagcaagaatagcttcctgattctcaggggtaagctcgcggaactttgcaagaatctctcgatcaagtcggtcaaacattgtgacctctctttccctcagaagctcccgatgattgtattcggcgccgcgcatcagtatataccattctgtcccgccccgccaccggtaaaaatcccccccgcaaaggagtgacctcttatgaccccgccgaaaggctttacttcttctgtccccgcgccgctgcctgatcttcgtatt

SEQ ID NO: 18916 - DNA, 260 bp, Unknown; identical to SEQ ID NO: 18085
  Description of Unknown: LeftRegion for integrase B5917 sequence

SEQ ID NO: 18917 - DNA, 260 bp, Unknown
  Description of Unknown: LeftRegion for integrase B5918 sequence
taagcaagaatagtttcctgattctcaggggtaagctcgcggaactttgcaaggatctctcgatcaagtcggtcaaacattgtgacctctctttccctcagaagctcccgatgataaaatttcggcgccgcgcatcagtatataccattctgtcccgccccgccactggtaaaaaattcccagcaaaggagtgaccttttatgaccccgccgaaaggctttacttcttccgtccccgcgccgctgcctgatcttcgtatt

SEQ ID NO: 18918 - DNA, 260 bp, Unknown
  Description of Unknown: LeftRegion for integrase B5919 sequence
aggaaattgccgcactttgcaacgtgtccatgcaggcggcagaaatccgctccaggcgaatgcaaatcttgcttgcaagaaataaatttttgacgcatccgctggaacgacaggtgtttgaacagtttcaacagtttatcaacaatcagtaaaaaaccgccctgcaaggaattgtggggcggtacaattaaggagcgattatgaaaagagcagtgttttatggtcgttattccagcgaccgacagaccgagcagagcatt

SEQ ID NO: 18919 - DNA, 260 bp, Unknown
  Description of Unknown: LeftRegion for integrase B5920 sequence
attgacaaggaatcctttgaggcagttgaaggtgaacttagcaagcgttccacaaaacttggacgcaatgaccgctacaatgcaccaaaagcaaaaaggccacctacagcctttcgccttggtgacattacagagaataatgacaatccaatcagacaggccgagtacttatacagtctgatagaaagcgaggttatttgatgggaaatgttatggtcatccctgcaaaaaggcaagttggaaatactgccagacagcag

SEQ ID NO: 18920 - DNA, 260 bp, Unknown
  Description of Unknown: LeftRegion for integrase B5921 sequence
tgatagagatgttgcgtcagttgaatcctgacgggcaacgctacattttgcagcaagcggaatttgctaattctcgggaagaataccgtctatcccccgcccctaccgcaaagtcgggcgcgtgattcacgtcgacttccgcggaaaagattaaagtcccgccaccggtaaaaattcccctcgcaaaggagtgacctcttatgaccccgccgaaaggcttttcttcttccgcccacgcgccgctgcctgatcttcgcatc

SEQ ID NO: 18921 - DNA, 260 bp, Unknown
  Description of Unknown: LeftRegion for integrase B5922 sequence
ttcaacagtttatcaacaatcagtgaatttatcaacaatcagtgaaaaagcaatcattctcgtgaggtcacgaaaatgaaaaaagccgccccacggcggcaaccgtgaagcggcaagagggaactattgctataatagtccaaaccagaacggtactattatagcacattctctcaaaaaatgcaaggaggaagtgcaaaatgcaagcagcagcatatgcaagatacagcacagagcatcagacagagagcagtattgct

SEQ ID NO: 18922 - DNA, 260 bp, Unknown
  Description of Unknown: LeftRegion for integrase B5923 sequence
ccattatcgagtcataatggtcagccagtaaccattatcaagttattgcaaaacttgcaacaacttgcaaccaacttgcaaccacttgcaactaaaaaaagccccatccggagatggagcttcatttgtaaaaagccgtgaaaatgcaaacaagccttttcttcattggtacttttggcactttttaacaaggagaaatcatggagaataagagagcagtcatctatgcacgttattcatccgacaggcagagagaagaa

SEQ ID NO: 18923 - DNA, 260 bp, Unknown
  Description of Unknown: LeftRegion for integrase B5924 sequence
gaagaaccgatataactcaccctcgacaagtgaaattataccattctcccggtaaaaatacaagttaccgggcatttttatgcctaatttagggggatgatatgatgacaaaaaacctatctgtgtctcactatcatttcttttctattttttttaatacccaaatgttttcgtaatatattataagaaggaggcacgtcatgtcagatattcaaccagtaaaaaatggagctttatatatccgagtatctacgcactta

SEQ ID NO: 18924 - DNA, 260 bp, Unknown
  Description of Unknown: LeftRegion for integrase B5925 sequence
tacctgatagagatatttcgtagtatgaataatgaggggcgccgaaagctcatcggctatcttgatgatttggtaaggaatgaagataatcttctgtcttcctctgccataaaagtcgggcgcgtgattcacgtcgactttcgcggaaaagattaaagtcccgccactggtgaaaattcccagcaaaggagtgacctcttatgaccccgccgaaaggctttacttcttccgtccccgcgccgctgcctgatcttcgtatt

SEQ ID NO: 18925 - DNA, 260 bp, Unknown; identical to SEQ ID NO: 16544
  Description of Unknown: LeftRegion for integrase B5926 sequence

SEQ ID NO: 18926 - DNA, 260 bp, Unknown
  Description of Unknown: LeftRegion for integrase B5927 sequence
tacgagcagtattcattaaaagcctcacatttgtggggctttttttgtaaaaacataaaaaatcccccctgcgccaacaggagggaaatggatataccattgctgatataaccacaaaagcaatcatattatatcagctctggtagtaaattgcaaataccagggtatttttatacccttttttaagaaagggtgattctatgaaccaaaatgaatctttgaaaacagcgttcggatacatacgagtttctacacacatg

SEQ ID NO: 18927 - DNA, 260 bp, Unknown
  Description of Unknown: LeftRegion for integrase B5928 sequence
atccctgaacatcctgccagagcgctgtgcgctagtggaaagtgagccggagcgcactcaagggctgcggcagatgctggtggacaactactcggtgttctacattgtgggcgaggataccgtgtcggtggctcgtgtgctgtacagtgcatccgaccttgtgcgccgcctgcggagaatgaagtgaaaggggtgtttgcatgaccgccgtgatttacgcccgctattccagcgataaccagcgtgaggaatccatcgaa

SEQ ID NO: 18928 - DNA, 260 bp, Unknown
  Description of Unknown: LeftRegion for integrase B5929 sequence
tcattcttgaagcaactacgcaagcggaacaccagttccatgctagctgctatttttatactcatttttaagagaatgaaatgatatgatgacaagaagaaacatccaaccaaaaacctatctgtgtctcactatcatttcttttctatttttttaatacccaaatgttttcgtaatatattataagaaggaggcacgtcatgtcagatattcaaccagtaaaaaatggagctttatatatccgagtatctacgcactta

SEQ ID NO: 18929 - DNA, 260 bp, Unknown
  Description of Unknown: LeftRegion for integrase B5930 sequence
caggtatttgaacagtttcaacagtttatcaacaatcagtgaaaaagcaatcattctcgtgaggtcacgaaaatgaaaaaaaaagccgccccacggcggcaaccgtgaagcggcaagagggaactattgctataatagtccaaaccagaacggtactattatagcacattctctcaaaaaatgcaaggaggaagtgcaaaatgcaagcagcagcatatgcaagatacagcacagagcatcagacagagagcagtattgct

SEQ ID NO: 18930 - DNA, 260 bp, Unknown
  Description of Unknown: LeftRegion for integrase B5931 sequence
cacttcactttttatgcaatatgccgaaaagaaatacggtaagtctgtggtcaaaacgcacgttactttcgatgagaggacaaatacagttgtttttgatgcaagtcctatagcccagacgcttaaacaagattatctttccggaaaacgataaagaatgctgccaaattgaaaacgcattccatacatggaggttcacattgaacgctgttatctatgcccggtacagcacgcgaaaccaaaaagaattgtccattgag

SEQ ID NO: 18931 - DNA, 260 bp, Unknown
  Description of Unknown: LeftRegion for integrase B5932 sequence
gtaaagcaacttatgaaaatagcaaaagcattagatgtaccacctaaaaagttagctggatggtgtgacgagccaactcaaaaagaagaaatggttaataagtggattgataaagtcggcgagctgaatttcaatgaaaaagaattggatgaattgataagctacgcacagtttattgtttctaagcgaggtgataaataatgtctgaatatttaatgtacttgagaaagtccagacaagatgatccaaatgaaaatgta

SEQ ID NO: 18932 - DNA, 260 bp, Unknown
  Description of Unknown: LeftRegion for integrase B5933 sequence
aaacaagaatagcttcctgattctcagggttcagtctacggaacttttcaaggatctcttgatcgagtcggtcgggcatggtttgcctctctttcctctcagaaacttccgatgataaaatttcggcgccgcgcatcagtatataccattccgtcccgccccgccactggtaaaaattcccagcaaaggagtgaccttttatgaccccgccgaaaggctttacttctcccgtccccgcgccgctgcctgatcttcgcatc

SEQ ID NO: 18933 - DNA, 260 bp, Unknown
  Description of Unknown: LeftRegion for integrase B5934 sequence
ataaagccttcgaccgaggccttataactatcactccttccatgaaaatctatgtttctccgataattttggatagccctcaggacgcttttacagcccgctggctggcttctcttgacggaatggttttaccccccccgatttccgccgcgtagagagcttctggagtaccataacgacgaaatttttaggagggtcacatgaatacagtaatttatgctcggtattctgccggcccgagacagaccgaccagagtatc

SEQ ID NO: 18934 - DNA, 260 bp, Unknown
  Description of Unknown: LeftRegion for integrase B5935 sequence
ttcttgctctctatcgcggtgtgaatcctgacgggcaacgctacattttgcagcaagcggaatttgctaattctcgggaagaataccgtctatcccccgcccctaccgcaaagtcgggcgcgtgattcacgttgacttccgcggaaaagattaaagccccgccactggtaaaaaatcccccagcaaaggagtgacctcttatgaccccgccgaaaggctttacttcttccgtccacgcgccgctgcctgatcttcgcatc

SEQ ID NO: 18935 - DNA, 260 bp, Unknown
  Description of Unknown: LeftRegion for integrase B5936 sequence
ttgctctctatcgcggtgtgaatcctgacgggcagcgctacattttgcagcaagcggaatttgccaattctcgggaagaataccgtctatctcccgcccctaccgcaaagtcgggcgcgtgattcacgttgattttcaaagaaaatattaaagccccgccgttctatctgtaatgtttcccagcaaaggagtgaccttttatgaccccgccgaaaggctttacttctcccgtccccgcgcccctgcctaatcttcgcatt

SEQ ID NO: 18936 - DNA, 260 bp, Unknown
  Description of Unknown: LeftRegion for integrase B5937 sequence
gttcacgccggaacaggaagtggccaaacgccgggaactggagcagcagctttatgaggtgttccgcaaatatgccgataagcggcagaaagaggaagccggggcataaatcccgaagccatcgttgatttgcggggctgctggcggtataatagaactgtcagcagctccgtttcttttttaagaaaaggagcgacaatatgaacaatcgaatagacgcaatctatgcaagacaatcggtggacaaaaaggacagcatt

SEQ ID NO: 18937 - DNA, 260 bp, Unknown
  Description of Unknown: LeftRegion for integrase B5938 sequence
ggagttgttttgagtgtctccctctttacgagggagtggattgaaatgtgccagacggatgcaaatcttgcttgcaagaaataaatttttaacgcatccgctggaacgacaggtgtttgaacagtttcaacagtttatcaacaatcagtaaaaaagccgccctgcaaggaattgtggggcggtcatattaaggagcgattatgaaaagagcagtgttttatggtcgttattccagcgaccgacaaacagaacagagcatt

SEQ ID NO: 18938 - DNA, 260 bp, Unknown
  Description of Unknown: LeftRegion for integrase B5939 sequence
agcaagaatagcttcctgattctcaggggtaagctcgcggaactttgcaaggatctcttgatcgagtcggtctggcatggtttgcctctctttcctctcagaagctcccgatgataaaatttcggcgccgcgcatcagtatataccattctgtcccgccccgccaccggtaaaaaaatcccagcaaaggagtgacctcttatgaccccgccgaaaggctttacttcttccgtccacgcgccccttcctgttatccgcatc

SEQ ID NO: 18939 - DNA, 260 bp, Unknown; identical to SEQ ID NO: 18926
  Description of Unknown: LeftRegion for integrase B5940 sequence

SEQ ID NO: 18940 - DNA, 260 bp, Unknown
  Description of Unknown: LeftRegion for integrase B5941 sequence
gtaagcaagaatagcttcctgattctcaggggtaagctcgcggtactttgcaaggatctctcaatcaagtcggtcaggcattgtgacctctctttccctcagaagctcccgatgataaaatttcggcgccgcgcattagtatataccattctgtcccgccccgccacatgtaaaaattcccagcaaaggagtgacctcttatgaccccgccgaaaggcttttcttcttccgcccacgcgccgctgcctgatcttcgtatt

SEQ ID NO: 18941 - DNA, 260 bp, Unknown
  Description of Unknown: LeftRegion for integrase B5942 sequence
gtttagattatcttgaaggatttacaactgagaaaaatggactatctgataaaagagaaagtttagtaactaactttttacaattcttaattaaaagtggaattatcgaaaatgaaaatgaaattgacgaaaaaactgaggaaatgattttagaaatggttaaaaaggagatatcaaacttaaaacgaggtgaatagaaagtgaagatagcgatatacacaagaaaatctgttgcagttgaacgaagtgaaagcatacaa

SEQ ID NO: 18942 - DNA, 260 bp, Unknown
  Description of Unknown: LeftRegion for integrase B5943 sequence
tgcgcattgattggtcttgcaatcgctgttttaggtactgcaatcgttggtgttccaattgcgatatttggcgctttgcttgccgtaggttcaatgggaaggaaatagaaaaccctgcgcggcttcttggcggtcggcgcgcagggcaagtgcaaagaacgaagcgcataagcgcactcgctctaaggggtgattttagcatggtgaagaacagagcagccatatacgcgcgcttcagctcgcacaatcagcgctctgag

SEQ ID NO: 18943 - DNA, 260 bp, Unknown
  Description of Unknown: LeftRegion for integrase B5944 sequence
gtaccgcttttgtctgtatctatcgtcttttgatagatatattctcacccttattataaagtcactttctatgggatatttcctgctgatttgctatgcttaaattcacagacgtctgttattttttatcaaatcgaggacaaaacagacttccctgcgatatactactcacagcatccggcaggaaaggagaaggttccgtgaaaaaggcagtaatctatgctcgatacagttccgatatgcagcgtgaagaatccatt

SEQ ID NO: 18944 - DNA, 260 bp, Unknown
  Description of Unknown: LeftRegion for integrase B5945 sequence
acttactgggtcttagtgaagtcagaaaaccagaagtcttagttttgtcagaaaaagaaaaaatcctcattgacgcataccgtactgctaatgacatgggacaattaaacataatctatgtctgcatggatgaaatgaaaaaagcaaaaggggaaggcgtacttgtagggtaattgatttcatagaatggaggaagaaccatgtatgaggatataaaaacagcctgcctatacgttagattctcaagccataaccagact

SEQ ID NO: 18945 - DNA, 260 bp, Unknown; identical to SEQ ID NO: 18937
  Description of Unknown: LeftRegion for integrase B5946 sequence

SEQ ID NO: 18946 - DNA, 260 bp, Unknown
  Description of Unknown: LeftRegion for integrase B5947 sequence
cgggaaaaacctgattataacgtccattgtgtcgtttgtgctgtacgtgattgtcgtgtctgtaatctccaaccataaagcaaaaaaggcagaagaggaactgtcaagcttgtatgatagttatagctacagctataacattgatgattaaaaaagccgccttgcatttttttgcagggcggtacaattaaggagcgattatgaaaagagcagtgttttatggtcgttattccagcgacagacagaccgaacagagcatt

SEQ ID NO: 18947 - DNA, 260 bp, Unknown
  Description of Unknown: LeftRegion for integrase B5948 sequence
tctgatagagatgttgcgtcagttgaatcctgacgggcaacgctacattttgcagcaagcggaatttgctaattctcgggaagaataccgtctatctcccgcccctaccgcaaagtcgggcgcgtgattcacgtcgacttccgcggaaaagattaaagtcccgccactggtaaaaattcccagcaaaggagtgacctcttatgaccccgccgaaaggcttttcttcttccgcccacgcgccgctgcctgatcttcgtatt

SEQ ID NO: 18948 - DNA, 260 bp, Unknown
  Description of Unknown: LeftRegion for integrase B5949 sequence
taaacaagaatagcttcctgattctcagggttcagtctacggaacttttcaaggatctcttgatcaagtcggtttggcatggtttgcctctctttcctctcagaagctcccgatgattatattcggcgccgcagaacagtatataccattctgtcccgccgttccaccggcaaaaattcccagcaaaggagtgaccctttatgaccccgccgaaaggctttacttctcccgtccccgcgccgctgcctgatcttcgcatc

SEQ ID NO: 18949 - DNA, 260 bp, Unknown
  Description of Unknown: LeftRegion for integrase B5950 sequence
cagaaaaactttatgaaatgatgttaaaaatctttgactaataatgcattttaataaaaaaatcccccctgcgccaacaggagggaaatggatataccattgctgatataaccacgaaagcaatcatattatatcagctctggtagtaaattgcaaataccagggtatttttatacccttttttaagaaagggtgattctatgaaccaaaatgaatctttgaaaacagcgttcggatacatacgagtttctactcacatg

SEQ ID NO: 18950 - DNA, 260 bp, Unknown
  Description of Unknown: LeftRegion for integrase B5951 sequence
tgaagctcgacgaactcccgcagggaataattcttgatcaaattgaaagtttggcaaacaatccgaagaattgcaaagaaaagtatcgttcttccgcccctaccgcaaagtcgggcgcgtgattcacgttgattttcaaagaaaatattaaagtcccgccgttctatctgtaatgtttccccgcaaaggagtgacctcttatgaccccgccgaagggctttacttctcccgcccccgcgccgctgcctgatcttcgtatc

SEQ ID NO: 18951 - DNA, 260 bp, Unknown
  Description of Unknown: LeftRegion for integrase B5952 sequence
cagaaaaactttatgaaatgatgttaaaaatctttgactaataatgcattttaataaaaaaatcccccctgcgccaacaggagggaaatgaatataccattgctgatatatccacgaaagcaatcatattatatcagctctggtagtaaattgcaaataccagggtatttttatacccttttttaagaaagggtgattctatgaaccaaaatgaatctttgaaaacagcgttcggatacatacgagtttctacacacatg

SEQ ID NO: 18952 - DNA, 260 bp, Unknown
  Description of Unknown: LeftRegion for integrase B5953 sequence
agaagcatcgtcctgacaagaattttgagaaaataagtaggggagttgttttgagtgtctccctctttacgagggagtggattgaaatttaacgcatccgctggaacggcaggtatttgaacagtttcaacagtttatcaacaatcagtaaaaaaaccgccctgcaaggaattgtggggcggtacaattaaggagcgattatgaaaagagcagtgttttatggtcgttattccagcgacagacagaccgaacagagcatt

SEQ ID NO: 18953 - DNA, 260 bp, Unknown
  Description of Unknown: LeftRegion for integrase B5954 sequence
ttggtggtaaaacaaaaaagcgccgaccctctggaaagggtcagcgctggggccagtgctacaacacaaaaaaagtgaggtggccgcttcctgctggaacagggggctgcgccacaaagcacaggcagttggcatggaaccgactgcctttattgtagcacgtcgccctgaatttgaaaaggggtgattttattcgcgatatggattccgcccgcctgcgggtggcgtgctatgtccgcgtcagcacgagagagcaggcc

SEQ ID NO: 18954 - DNA, 260 bp, Unknown
  Description of Unknown: LeftRegion for integrase B5955 sequence
cgaccgaacaaagggacgaaataatcaataaaaataaactttcttttctttcgtaattacaagtcttttgtctggactttaattgttttatacgctattgtttgtgctaccctgaccatgggtggcacaaattttttataatcttgaaatcctacaaaggtcagggaaataatagacaaaaggtctaaaaggaggttgtaatggaagaaaaattaagagctgcggcatacggacgagtatctacaaatagtaaggaacaa

SEQ ID NO: 18955 - DNA, 260 bp, Unknown
  Description of Unknown: LeftRegion for integrase B5956 sequence
tcattcttgaagcaactacgcaagcggaacaccagttccatgctagctgctatttttatactcatttttaagagaatgaaatgatatgatgacaagaagaaacatccaaccaaaaacatatctgtgtctcaatatcacttcttttttatttttttaatacccgcgtattttcgtaatatattataaggaggaggcacattatggcagatatccaaccagtaaaaaatggagctttatatatccgcgtatccacgcacttg

SEQ ID NO: 18956 - DNA, 260 bp, Unknown
  Description of Unknown: LeftRegion for integrase B5957 sequence
gagccgacatgggaaaaggcgtgcgcgatagtcgatgcgttcggcctaacggttgacgaatttagacagattcagaacgcagaatgacatgcagataacactaggccccggtaccgtccgccaagacaacacaccggggcctcaatggaacgcggggccgtaaccttccgcattcatacccatagaagggcaatcaaattatgacacagaagacagcggttatatacgcccgcttcagctgctccaagcagcgcgaggcg

SEQ ID NO: 18957 - DNA, 260 bp, Unknown
  Description of Unknown: LeftRegion for integrase B5958 sequence
ggggtgatggtggtggttatcaccgtgataaccaccactattcatatgtatcgacctaaaagcctctctggatatagtgtctcactttttcatctaaaatgtattgcaaattcttatagaatatggtatatacattatacgaaacaatgttttgaatgaacgcactgccgttctatgatgtgtaaagtgaggtgcctgccatgaccgccgtaatttacgcccgctattccagcgacaaccagcgtgaagaatccatcgaa

SEQ ID NO: 18958 - DNA, 260 bp, Unknown
  Description of Unknown: LeftRegion for integrase B5959 sequence
gactttgccccatctgcttcacagtatggcgacacgcttattgacgcacaaaatcagattgttgctttatctgaatttgtcacgctgcaaggtgataaccctaaacaggatttagaaaaatattcttcattgataaatcagaaaataagagcctttacagacgacattctgaaaggttaataaaataaaatgccccggtcgtgctgggaacacttccggggtgtgcaaagatatatcataccagatacaacataccgtct

SEQ ID NO: 18959 - DNA, 260 bp, Unknown
  Description of Unknown: LeftRegion for integrase B5960 sequence
tccattttctcgccacttgaccgtttccgttttttcttctataatgcaaataaaaaaatgcccctggcgaaccaggggcttatatgtagcatttttacgaaagatgatactacatatcggctttattagtgtatcatcaatcgggtgctgtgtcaattattactgcgctctttttttgcgctcttttggaggtacagactatgaaaaaagaacttattaacggtgttatttatgctagatattctcctggtccgaatcag

SEQ ID NO: 18960 - DNA, 260 bp, Unknown
  Description of Unknown: LeftRegion for integrase B5961 sequence
cagaaaaactttatgaaatgatgttaaaaatctttgactaataatgcattttaataaaaaaatcccccctgcgccaacaggagggaaatggatataccattgctgatataaccacgaaagcaatcatattatatcagctctggtagtaaattgcaaataccagggtatttttatacccttttttaagaaagggtgattctatgaaccaaaatgaatctttgaaaacagcgttcggatacatacgagtttctacacacatg

SEQ ID NO: 18961 - DNA, 260 bp, Unknown
  Description of Unknown: LeftRegion for integrase B5962 sequence
acccttacatatttcagaatatggtatcagaaagatgatgatgcagccagcagatccgataatggaaatctttgatttataaataaaaatccccgcccggcgctggaacaccgaatggggaagaagctgtgatacaatcacaaccttagacaagtttattgtatcatagctccctgaaaatgtcaaggagtgatataaatttgaaaaccgccgtaatatacgcccgatattcatcggacaagcagacggagcagtccatt

SEQ ID NO: 18962 - DNA, 260 bp, Unknown
  Description of Unknown: LeftRegion for integrase B5963 sequence
atctcgccagttctgggtatgtgatattcttttcaagcataatctcccccagcagtattttcatgtggtgtacctcgtactccctattttattctgtttttcaataaattaaaacaagaaatgttttccagtttgcctatcttgattttttaataatatcagcgtatttttatactatactttaaaaagggggttacattatggcagacatccaaccagtaaaaaacggagctttatatatccgcgtatccacgcaccta

SEQ ID NO: 18963 - DNA, 260 bp, Unknown; identical to SEQ ID NO: 18951
  Description of Unknown: LeftRegion for integrase B5964 sequence

SEQ ID NO: 18964 - DNA, 260 bp, Unknown
  Description of Unknown: LeftRegion for integrase B5965 sequence
cactgaaataatcatattgttttgtcggattccggcagacatatataataaaaagaccgccctttgcgggcggtcaagaccttacactttacccacagaaaatatggctaaaagctaaagataacgcatatctattttagcataagccttttcttttgtataggcttattttttataccaaattttaaggaggaagacgcatgagtgaaaagttaaaagaagtctgtgcatatatccgagtctctactgacaaacaggaa

SEQ ID NO: 18965 - DNA, 260 bp, Unknown
  Description of Unknown: LeftRegion for integrase B5966 sequence
ccgatttacaagtgtcattatacaagtttatgtaagacttgtcaataatattcagtaaaaaatcccccctgcgccaacaggagggaaatggatataccattgctgatataacctcaaaagcaatcatattatatcagctctggtagtaaattgcaaataccagggtatttttatacccttttttaagaaagggtgattctatgaaccaaaatgaatctttgaaaacagcgttcggatacatacgagtttctacacacatg

SEQ ID NO: 18966 - DNA, 260 bp, Unknown
  Description of Unknown: LeftRegion for integrase B5967 sequence
tcattctgataaaaagaaaaaagccccgccggtgctaccaacaccgacgaggccgcccgggtcaccccggtggacaatatagtcccaagcaagctatattgtaccacctgacccgggcaaaagcaatagcccgggcatttttatgcccaattttaaacgcatataaatagagcgggataaaaacaggaggtacataaacaatgagatacgcgatatatctgcgcaaaagccgtgcggatgatacgtccgagccgctggag

SEQ ID NO: 18967 - DNA, 260 bp, Unknown
  Description of Unknown: LeftRegion for integrase B5968 sequence
gaactggatgatgttgagaaaggaaaaacattatcagtttccacgtctacaaattctttagaaaaagaagattataaaaataaaagagcataaaaacagccatgatgttataaataacatcatgactgtttttaatttaatcattatataatattactatacagtaatagacctgcttttttataggaggttttcatattatggaaaacatttttcatacagcagcaatatatgctagagtatctactaaaaaacaagct

SEQ ID NO: 18968 - DNA, 260 bp, Unknown
  Description of Unknown: LeftRegion for integrase B5969 sequence
tacgagcagtattcattaaaagcctcacatttgtggggctttttttgtaaaaatataaaaaatcccccctgcgccaacaggagggaaatggatataccattgctgatataaccacaaaagcaatcatattatatcagctctggtagtaaattgcaaataccagggtatttttatacccttttttaagaaagggtgattctatgaaccaaaatgaatctttgaaaacagcgttcggatacatacgagtttctactcacatg

SEQ ID NO: 18969 - DNA, 260 bp, Unknown
  Description of Unknown: LeftRegion for integrase B5970 sequence
tcgcgactgcagatatttcaacaaaaacagtaatatacgcaactgccaattttgtggtggactgaaaaaaagataatttttgactgccgttttatctatttctctaaacttgccatttttttcctatacagatatgagacttttgcaatctattaatttcccgatacaataaaaaatagtatagattttcaggaagaagtatgaaatatttgatttatgcgcgtgtcagcgaacgcggttccggctttgaaggacagaca

SEQ ID NO: 18970 - DNA, 260 bp, Unknown
  Description of Unknown: LeftRegion for integrase B5971 sequence
aaacagcaatttaatgaactaattcatataaatgaaatctaatcaaaaaaatgaccgcccacaaaggacggtcaaaatcttacgctttacccacaaaagaatatggctaaaagctaaagataacgcatatctattttagcataagccttttcttttgtataggcttattttttataccaaattttaaggaggaagaaaccatgtctgaaaaattaaaagaagtctgtgcatacatccgagtctctactgacaaacaggaa

SEQ ID NO: 18971 - DNA, 260 bp, Unknown
  Description of Unknown: LeftRegion for integrase B5972 sequence
tacgagcagtattcattaaaagcctcacatttgtggggctttttttgtaaaaacataaaaaatcccccctgcgccaacaggagggaaatgaatataccattgctgatatacccacaaaagcaatcatattatatcagctctggtagtaaattgcaaataccagggtatttttatacccttttttaagaaagggtgatcctatgaaccaaaatgaatctttgaaaacagcgttcggatacatacgagtttctactcacatg

SEQ ID NO: 18972 - DNA, 260 bp, Unknown
  Description of Unknown: LeftRegion for integrase B5973 sequence
ccaagtttcgcacacagttggcaaagtgaatttcacttacttagagatcctcttaatttattagagtttctcagaaataaaaaaagccgccccagtgctgcaacaccaggacggctgattggaggcccgaaagaatttgagcaaaccccgggcaggaacagtataccacctcccgggcgtattgtctaggaggtggttttttgaacagatacgcagaatacatccgaaaaagccgcgcggatgacccccacgaaagcttg

SEQ ID NO: 18973 - DNA, 260 bp, Unknown
  Description of Unknown: LeftRegion for integrase B5974 sequence
ggaatctacgcccttgcatggtatgcagcccgtagcataaactatttcatacaacaaaaaaatcccccctgcgccaacaggagggaaatgaatataccattgctgatataaccacaaaagcaatcatattatatcagctctggtagtaaattgcaaataccagggtatttttatacccttttttaagaaagggtgattctatgaaccaaaatgaatctttgaaaacagcgttcggatacatacgagtttctactcacatg

SEQ ID NO: 18974 - DNA, 260 bp, Unknown
  Description of Unknown: LeftRegion for integrase B5975 sequence
gcccgccacaaaacaaaaaaaagccccgccggtgctaccaacaccgacgaggctgcccgggtcaccccggtggacaatatagtcccagacaagctatattgtaccacctgacccgggcaaaagcaatagcccgggcatttttatgcccaattttaaacgcatataattgagaacggataaaaacaggaggtacataaacaatgagatacgcgatatatctgcgcaaaagccgtgcggatgatacgtccgagccgctggag

SEQ ID NO: 18975 - DNA, 260 bp, Unknown
  Description of Unknown: LeftRegion for integrase B5976 sequence
cagcctcaaaaaactgctgggcatcaaggcctagaaacaaacaaaataaaaagcccctgccatatcgcgagatatgacaggggaatgcagccaggcattaccagtaccaggttgcggttataatccactcttgcggaggcagattatgtatacattatatcataaagcctccatgcaccatagaaggaggctctatttttatgcctaaaacagaagaaaagcaagccataaaggccgtaatatatgcaagatattcgtca

SEQ ID NO: 18976 - DNA, 260 bp, Unknown; identical to SEQ ID NO: 18951
  Description of Unknown: LeftRegion for integrase B5977 sequence

SEQ ID NO: 18977 - DNA, 260 bp, Unknown
  Description of Unknown: LeftRegion for integrase B5978 sequence
gaggctgcccggcgaaccgggtggacaatatagtcctcgacaagctatattgtaccacctgacccgggcaaaagcaatagcccgggcatttttatgcccaaaattagtcgttcccctttgaggacatggatagaaataggacgtgtatagaaatagccgcatataaatagagcgggataaaaacaggaggtacataaacaatgagatacgcgatatatctgcgcaaaagccgtgcggatgatacgtccgagccgctggag

SEQ ID NO: 18978 - DNA, 260 bp, Unknown; identical to SEQ ID NO: 16083
  Description of Unknown: LeftRegion for integrase B5979 sequence

SEQ ID NO: 18979 - DNA, 260 bp, Unknown; identical to SEQ ID NO: 18965
  Description of Unknown: LeftRegion for integrase B5980 sequence

SEQ ID NO: 18980 - DNA, 260 bp, Unknown
  Description of Unknown: LeftRegion for integrase B5981 sequence
agatgaatcattatgtgaggacctcgtagaaatacgaggttctttacgtttaataaaaaaatccccccctgcgccaacaggagggaaatggatataccattgctgatataacctcaaaagcaatcatattatatcagctctggtagtaaattgcaaataccagggtatttttatacccttttttaagaaagggtgattctatgaaccaaaatgaatctttgaaaacagcgttcggatacatacgagtttctactcacatg

SEQ ID NO: 18981 - DNA, 260 bp, Unknown
  Description of Unknown: LeftRegion for integrase B5982 sequence
aaaagccatgattcgaattgaaaacctctcccctcaacttaccgctgaagagtgcatggagcagcggcgatgtattgaagagggccttttcgagatttttatcaaatacgagaaacaacaggaaaatgatagctatttaggagctgctgcggtatgatgtacctgtcagcagctcttttctatgagaaaggagctacaaaatgaatgcaatatacgcaagacaatccgttgacagagccgatagcatttccatcgaaagc

SEQ ID NO: 18982 - DNA, 260 bp, Unknown
  Description of Unknown: LeftRegion for integrase B5983 sequence
gaatctacgcccttgcatggtatgcagcccgtagcataaactatttcatacaacaaaaaaatccccccctgcgccaacaggagggaaatggatataccattgctgatataaccacaaaagcaatcatattatatcagctctggtagtaaattgcaaataccagggtatttttatacccttttttaagaaagggtgattctatgaaccaaaatgaatctttgaaaacagcgttcggatacatacgagtttctactcacatg

SEQ ID NO: 18983 - DNA, 260 bp, Unknown
  Description of Unknown: LeftRegion for integrase B5984 sequence
aagcccgccacaaaacaaaaaaagccccgccggtgctaccaacaccgacgaggccgcccggcgaaccgggtggacagtatagtcccgaacaaactatattgtaccacctgacccgggcaaaagcaatagcccgggcatttttatgcccaattttaaacgcatataattgagaacggataaaaacaggaggtacataaacaatgagatacgcgatatatctgcgcaaaagccgtgcggatgatacgtccgagccgctggag

SEQ ID NO: 18984 - DNA, 260 bp, Unknown
  Description of Unknown: LeftRegion for integrase B5985 sequence
taaagcccgccacaaaaaaaaagccccgccggtgctaccaacaccgacgaggccgcccggcgaaccgggtggacaatataagtcctgaacaaactatattgtaccacctgacccgggcaaaagcaatagcccgggcatttttatgcccaattttaaacgcatataaatagagcgggataaaaacaggaggtacataaacaatgagatacgcgatatatctgcgcaaaagccgtgcggatgatacgtccgagccgctggag

SEQ ID NO: 18985 - DNA, 260 bp, Unknown
  Description of Unknown: LeftRegion for integrase B5986 sequence
gcccgccacaaaacaaaaaaaagccccgccggtgctaccaacaccgacgaggccgcccggcgaaccgggtggacaatataagtcccagacaagctatattgtaccacctgacccgggcaaaagcaatagcccgggcatttttatgcccaattttaaacgcatataattgagaacggataaaaacaggaggtacataaacaatgagatacgcgatatatctgcgcaaaagccgtgcggatgatacgtccgagccgctggag

SEQ ID NO: 18986 - DNA, 260 bp, Unknown
  Description of Unknown: LeftRegion for integrase B5987 sequence
ggaatctacgcccttgcatggtatgcagcccgtagcataaactatttcatacaacaaaaaaatcccccctgcgccaacaggagggaaatgaatataccattgctgatatatccacgaaagcaatcatattatatcagctctggtagtaaattgcaaataccagggtatttttatacccttttttaagaaagggtgattctatgaaccaaaatgaatctttgaaaacagcgttcggatacatacgagtttctacacacatg

SEQ ID NO: 18987 - DNA, 260 bp, Unknown
  Description of Unknown: LeftRegion for integrase B5988 sequence
ggaatctacgcccttgcatggtatgcagcccgtagcataaactatttcatacaacaaaaaaatcccccctgcgccaacaggagggaaatgaatataccattgctgatatacccacaaaagcaatcatattatatcagctctggtagtaaattgcaaataccagggtatttttatacccttttttaagaaagggtgattctatgaaccaaaatgaatctttgaaaacagcgttcggatacatacgagtttctactcacatg

SEQ ID NO: 18988 - DNA, 260 bp, Unknown; identical to SEQ ID NO: 13967
  Description of Unknown: LeftRegion for integrase B5989 sequence

SEQ ID NO: 18989 - DNA, 260 bp, Unknown
  Description of Unknown: LeftRegion for integrase B5990 sequence
atatatattgtaaacttttgctatttatattatactatttacaaaaagaaaaagaccgtccacaaaggacggtcaagacattacactttacccacaaaaaatatggctaaaatataaagataacgcatatttattttaacataagccatcttttttgtataggcttattttttatacccaaatttaaggaggaagataccatgtctgaaaaattaaaagaagtctgtgcatacatccgagtctctactgacaagcaagag

SEQ ID NO: 18990 - DNA, 260 bp, Unknown
  Description of Unknown: LeftRegion for integrase B5991 sequence
gaggccgcccggcgaaccgggtggacaatatagtcccagacaagctatattgtaccacctgccccgggcaaaagcaatagcccgggcatttttatgcccaaaattagtcgttctcttttgagaacgtggatagaaataggacgtgtatagaaatagccgcatataaatagagcgggataaaaacaggaggtacataaacaatgagatacgcgatatatctgcgcaaaagccgtgcggatgatacgtccgagccgctggag

SEQ ID NO: 18991 - DNA, 260 bp, Unknown
  Description of Unknown: LeftRegion for integrase B5992 sequence
agtcgctgaacatcctgccggaacgctgtgcgctggttgaaagcgagccggagcgcacccaaggactgcggcagatgctggtggacaactactcggtgttctacatcgtgagcgaggatgcggtgtcggtagcccgtgtgctgtacagtgcatccgaccttgtgcgccgtctgcggaaaatgaagtaaggaggtgcagccatgactgccgtgatttacgcccgctattccagcgataatcagcgcgaagaatccatcgaa

SEQ ID NO: 18992 - DNA, 260 bp, Unknown
  Description of Unknown: LeftRegion for integrase B5993 sequence
gtgctaccaacaccggcgaggctgcccgggtcaccccggtggacaatatagtcccagacaagctatattgtaccacctgacccgggcaaaagcaatagcccgggcatttttatgcccaaaattagtcgttctcttttgagagcgtggatagaaatagccgcatataatagagcgggataaaaacaggaggtacataaacaatgagatacgcgatatatctgcgcaaaagccgtgcggatgatacgtccgagccgctggag

SEQ ID NO: 18993 - DNA, 260 bp, Unknown
  Description of Unknown: LeftRegion for integrase B5994 sequence
aatttaaataataaaagcattgggaaaattaaagcgtttatttgggataatacagaaaatttagttcctgtatcaaatgttaaaacttattaaattattttttcaataagcgtggactgtaaatgaggttaaattgatatgcaatgcaaaaaatgtagaaaagaaatcccggacaaaagaaatactcaaaggagcacacaatggtagcaatatacgcacgtcagtcaatagataaaaaagacagcatctctatagacagt

SEQ ID NO: 18994 - DNA, 260 bp, Unknown; identical to SEQ ID NO: 17524
  Description of Unknown: LeftRegion for integrase B5995 sequence

SEQ ID NO: 18995 - DNA, 260 bp, Unknown
  Description of Unknown: LeftRegion for integrase B5996 sequence
tacttaaaagagggctaattacgaatgcagaaaaggaaaaaattataaataaatttgcataataagcgcaaatttatctggacttgcggaaaagataacggtataattcatgctaccaaaagcagaattataccgtttattttttacatgattcaacccctgtttgaaaggtagggtaatgcacgaaaaaggaggcttgaatggaagtaacgaaaataccgaagcaaaaggcacaaaagccaaaaatcggagtttatgtt

SEQ ID NO: 18996 - DNA, 260 bp, Unknown
  Description of Unknown: LeftRegion for integrase B5997 sequence
ggaatctacgcccttgcatggtatgcagcccgtagcataaactatttcatacaacaaaaaaatcccccctgcgccaacaggagggaaatggatataccattgctgatataaccacaaaagcaatcatattatatcagctctggtagtaaattgcaaataccagggtatttttatacccttttttaagaaagggtgattctatgaaccaaaatgaatctttgaaaacagcgttcggatacatacgagtttctactcacatg

SEQ ID NO: 18997 - DNA, 260 bp, Unknown
  Description of Unknown: LeftRegion for integrase B5998 sequence
acaaataaaagttaaagaaaaagccccgccggtgctaccaacaccgacgaggccgcccggcgaaccgggtggacaatataagtcccagacaagctatattgtaccacctgacccgggcaaaagcaatagcccgggcatttttatgcccaattttaaacgcatataattgagaacggataaaaacaggaggtacataaacaatgagatacgcgatatatctgcgcaaaagccgtgcggatgatacgtccgagccgctggag

SEQ ID NO: 18998 - DNA, 260 bp, Unknown
  Description of Unknown: LeftRegion for integrase B5999 sequence
gccacaacacaaaaataaaaaagccccgccggtgctaccaacaccgacgaggccgcccggcgaaccgggtggacaatataagtcccagacaagctatattgtaccacctgacccgggcaaaagcaatagcccgggcatttttatgcccaattttaaacgcatataattgagaacggataaaaacaggaggtacataaacaatgagatacgcgatatatctgcgcaaaagccgtgcggatgatacgtccgagccgctggag

SEQ ID NO: 18999 - DNA, 260 bp, Unknown
  Description of Unknown: LeftRegion for integrase B6000 sequence
agtcgctgaacatcctgccggaacgctgtgcgctggtagagagcgagccggagcgcactcaagggctgcggcagatgctggtggacaactactcggtgttctacatcgtgggcgaggatgccgtgtcggtggcgcgtgtgctgtacagtgcatccgaccttgtgcgccgtctgcggagaatgaaataaggaggtgcagccatgaccgctgtgatttacgcccgctattccagcgacaaccagcgtgaggaatccatcgaa

SEQ ID NO: 19000 - DNA, 260 bp, Unknown
  Description of Unknown: LeftRegion for integrase B6001 sequence
aaaagccatgattcgaatcgaaaacctctcccctcaacttaccgctgaagagtgcatggagcagcggcgatgtattgaagagggccttttcgagatttttatcaaatacgaaaaacaacaggaaaataatagctatttagaagctgctgcggtatgatgtacctgtcagcagctcttttctatgagaaaggagctacaaaatgaatgcaatatacgcaagacaatccgttgacagagccgatagcatttccatcgaaagc

SEQ ID NO: 19001 - DNA, 260 bp, Unknown
  Description of Unknown: LeftRegion for integrase B6002 sequence
attaaaaataggctattacaagtaaaaaccgcccggtgcttccaacaccgaacggccaaacatatacccgaagatatacactatactaacaaaaatattgtatcatcttcggagcagccttgcaagcggaacaccagttcctcgctggctgtcatttttatacccatttttacatatagaattaagaaggagatgatacaatgaagcaacgatacgcttatggctacgtccgtgtcagcacagacaagcaggaagaactc

SEQ ID NO: 19002 - DNA, 260 bp, Unknown
  Description of Unknown: LeftRegion for integrase B6003 sequence
atagagcaggagattccgttgaattatagcagtccagtttaatattgttatgctgagataaagctcaggaggtaaaaatcctgggctttattttttgacaaatgataccaaagattagtcattgtacccgttataaatgacttgctatctttggtactcagaggtaatatgtcactacccaaaggaaaggagctgatttcatgaaaatacacgtcataactccgacaagtgaaacgccggaaaaattgcgtgtttgtgcg

SEQ ID NO: 19003 - DNA, 260 bp, Unknown
  Description of Unknown: LeftRegion for integrase B6004 sequence
ctaccaacaccgacgaggccgcccgggtcaccccggtggaacaataatattccaagcaagtaatattgtaccacctgacccgggcaaaagcaatagcccgggcatttttatgcccaaaattagtcgttctctttatgaggacgtggatagaaatagccgcatataaatagagcgggatagaaacaggaggtacataaacaatgagatacgcgatatatctgcgcaaaagccgtgcggatgatacgtccgagccgctggag

SEQ ID NO: 19004 - DNA, 260 bp, Unknown
  Description of Unknown: LeftRegion for integrase B6005 sequence
gccacaacacaaaaataaaaaagccccgccggtgctaccaacaccagcgaggccgcccgggtcaccccggtggaacaataatattccaagcaagtaatattgtaccacctgacccgggcaaaagcaatagcccgggcatttttatgcccaaaatagccgcatataaatagagcgggataaaaacaggaggtacataaacaatgagatacgcgatatatctgcgcaaaagccgtgcggatgatacgtccgagccgctggag

SEQ ID NO: 19005 - DNA, 260 bp, Unknown
  Description of Unknown: LeftRegion for integrase B6006 sequence
tgtgggccgacattaagcccgatttgtttgaacacatcgacggcctgaaaagtcaatggaaaaagaaagaagataaataaaaaaagccgccccagtgctgcaacaccaggacggctgattggaggcccgaaagaatttgagcaaaccccgggcaggaacagtataccacctcccgggcgtattgtctaggaggtggttttttgaacagatacgcagaatacatccgaaaaagccgcgcggatgacccccacgaaagcttg

SEQ ID NO: 19006 - DNA, 260 bp, Unknown
  Description of Unknown: LeftRegion for integrase B6007 sequence
cgaagctgccgttgtactccccgtacaccgcgtggaaatgcggcggattgtgttctctggtcaaaaagatcttgatgatgattccgtaaaaacgagctatctcaggcattgtctttccctctctttctgtaatatattataactcaaaagttattaaaagtcaataactttttcgcattattttcaaaaaaggtgatcatatgcgttatgcgatgtacctgcgcaaaagccgcgcggacgatgcttcggagccgattgaa

SEQ ID NO: 19007 - DNA, 260 bp, Unknown
  Description of Unknown: LeftRegion for integrase B6008 sequence
gagatgaatcattatgtgaggacctcgtagaaatacgaggttctttacgtttaataaaaaaatcccccctgcgccaacaggagggaaatgaatataccattgctgatatacccacaaaagcaatcatattatatcagctctggtagtaaattgcaaataccagggtatttttatacccttttttaagaaagggtgattctatgaaccaaaatgaatctttgaaaacagcgttcggatacatacgagtttctactcacatg

SEQ ID NO: 19008 - DNA, 260 bp, Unknown
  Description of Unknown: LeftRegion for integrase B6009 sequence
actgaaataatcatattgttttgtcggattccgacagacatacataacaaaaagaccgccctttgcgggcggtcaagaccttacactttacccacaaaagaatatggctaaaatataaagataacgcatatttattttaacataagccacttcttttgtataggcttattttttatactcaattttaaggaggaagacgcatgagtgaaaagttaaaagaagtctgtgcatatatccgagtctctactgacaaacaagag

SEQ ID NO: 19009 - DNA, 260 bp, Unknown
  Description of Unknown: LeftRegion for integrase B6010 sequence
tcaacggaagaacgagatgcgattatagccaaaaacaaacgcacttttctttccgaataaagcggtttttctctggactttcgtcgcaaagtacgctatcgtttgtcctgccctgggatgggcaggacaaattttttatcgtcaataagtcctcacatcacatagggagaataagacgaaaagtctaaaaggaggttggaatgaacaaaaagagagctgcagcatacgccagagtatctaccaacagtcgggcgcaggaa

SEQ ID NO: 19010 - DNA, 260 bp, Unknown
  Description of Unknown: LeftRegion for integrase B6011 sequence
aagcaaatattaggaatttagaataaagaaaaagcccgccgtagctattggcgtagcggcggcgggactggttttggaaccatgcacaactttacgataatgcacttttcaagcaagtccattatacaatgcaaggctccaaagcacaagtagaattttggggctatttttatgcccttttttagaaaggctgtgttgtgatgaaagtaaaaaagaataatgaaatcccggccgcgactgggacaatccgtgttgctgtt

SEQ ID NO: 19011 - DNA, 260 bp, Unknown; identical to SEQ ID NO: 18201
  Description of Unknown: LeftRegion for integrase B6012 sequence

SEQ ID NO: 19012 - DNA, 260 bp, Unknown
  Description of Unknown: LeftRegion for integrase B6013 sequence
actgaaataatcatattgttttgtcggattccgacagacatacataacaaaaagaccgccctttgcgggcggtcaagaccttacactttacccacaaaagaatatggctaaaatataaagataacgcatatttattttaacataagccacttcttttgtataggcttattttttatactcaattttaaggaggaagacgcatgagtgaaaagttaaaagaagtctgtgcatatatccgtgtctctactgacaaacaggaa

SEQ ID NO: 19013 - DNA, 260 bp, Unknown
  Description of Unknown: LeftRegion for integrase B6014 sequence
aatgtaacatccaatacatatgttttgggattgtaattatattcaaacattctatattctcccctatttttataagtatatagtaacatttgtaacacattcctgcaagtaagccagcatatattttctatatcctattgacgcattttttaattagctttacaattttaaatcattaaaacacttgggaggaaattgtgatggggaaatccataaccaaaacaggggcattatatattcgagtttctaccggcaaacag

SEQ ID NO: 19014 - DNA, 260 bp, Unknown
  Description of Unknown: LeftRegion for integrase B6015 sequence
gagatgaatcattatgtgagagcctcgtagaaatacgaggttctttacgtttaataaaaaaatcccccctgcgccaacaggagggaaatggatataccattgctgatataacctcaaaagcaatcatattatatcagctctggtagtaaattgcaaataccagggtatttttatacccttttttaagaaagggtgattctatgaaccaaaatgaatctttgaaaacagcgttcggatacatacgagtttctactcacatg

SEQ ID NO: 19015 - DNA, 260 bp, Unknown
  Description of Unknown: LeftRegion for integrase B6016 sequence
gccaacgggtccatcgccgtggtggagaccgaggactaccgcgcggtcatgcgccgctggtacaagggaagcaccaagctgatgctgtcggcggacagcttcgaggactacgaggacatgattttcggcatggacgacggacccgtgcgcgtgatcggcacggtggtgtggttccaggccgccgacgagatggagtagccgtgggcgggcgcgcggcgatatacgcccgcttctcgagccacaaccagcgcggcgagtcc

SEQ ID NO: 19016 - DNA, 260 bp, Unknown; identical to SEQ ID NO: 18968
  Description of Unknown: LeftRegion for integrase B6017 sequence

SEQ ID NO: 19017 - DNA, 260 bp, Unknown
  Description of Unknown: LeftRegion for integrase B6018 sequence
gagatgaatcattatgtgagagcctcgtagaaatacgaggttctttacgtttaataaaaaaatcccccctgcgccaacaggagggaaatggatataccattgctgatataaccacaaaagcaatcatattatatcagctctggtagtaaattgcaaataccagggtatttttatacccttttttaagaaagggtgattctatgaaccaaaatgaatctttgaaaacagcgttcggatacatacgagtttctactcacatg

SEQ ID NO: 19018 - DNA, 260 bp, Unknown
  Description of Unknown: LeftRegion for integrase B6019 sequence
aagggcttaatcaacgatacagaaagggatcgtatgaaagagaaaaataaattgaaaattctttcttaattacggcgatttcgtctggacttaagtgagattatacgctattgtttgtcctgcccaaacgggcgggacaaattttttagcctacattcaagtccataaatgaaaagagtgtggcggacaaggaggtagtaatgaacgacaggaaacgagcagtcgcgtatatccgtgtgtcaacgaagagcgatgcacag

SEQ ID NO: 19019 - DNA, 260 bp, Unknown
  Description of Unknown: LeftRegion for integrase B6020 sequence
agatattattacagttcagcaaatcagacattaataaaaaatcgccctggcgctaccaacaccaaggcgatgtaacctgtactccgaagagtataagtcccagacaagacatattataccctgcggagcaccatctgtcaaaagattggtgttatttttgtaccctttttttcatacatttacagagaggcaggtatattatggaaaaattacgaaatggagcactctatatacgagtgtcaaccgacaagcaggaggaa

SEQ ID NO: 19020 - DNA, 260 bp, Unknown
  Description of Unknown: LeftRegion for integrase B6021 sequence
aaacaagctactttctttaaaatagaataatatattaaaaatcgccctagtgctaccaacaccaaggcgatgtaacccgtactccgaagagtataataggtccagacaaccatattatacctttcggaacaccatctgtcaaaggataggtgttatttttgtaccttttttcatatatttttagaaaggataggtgtaatatggaaaaactacgcactggtgctctgtatatcagagtctcaacagacaaacaggaagag

SEQ ID NO: 19021 - DNA, 260 bp, Unknown
  Description of Unknown: LeftRegion for integrase B6022 sequence
tgcgcattagttgggcttgtaatcgctgttttaggcgctgcaattgtcggcgttccaattgcgatattgggcgctttgcttgcctttgggtcaaagggaaggaaatagaaaaccctgcgcggcttcttggcggtcagcgcgcagggcaagtgcaaagaacgaagcgcaatagcgcactcgctctaaggggtgattttagcatggtgaagaaccgagctgccatatacgcgcggttcagctcgcacaaccaacgctcagaa

SEQ ID NO: 19022 - DNA, 260 bp, Unknown
  Description of Unknown: LeftRegion for integrase B6023 sequence
tctcattcccgttcccgattgatgaggtaagggattcggacacgtaccagctaacgacgaggtggagagcttacttggagagacataggaagctgctcaaataaaaaagaagccccgtgcggcttcttggcggttggcgcacggggcaaaggtgaagaacagagcgcttaaccgcgcccgtcctgagaggtgattttagcatggtgaagaaccgagccgccatatatgcgcgcttcagctcgcacaaccagcgttcggaa

SEQ ID NO: 19023 - DNA, 260 bp, Unknown
  Description of Unknown: LeftRegion for integrase B6024 sequence
aagggcttaatcaacgatatagaaagggatcgtatgaaagagaaaaataaattgaaaattctttcttaattacggcgatttcgtctggacttaagtgagattatacgctattgtttgtcctgcccaaacgggcgggacaaattttttagcctacattcaagtccataaatgaaaagagtgtggcggacaaggaggtagtaatggacgacaggaaacgagcagtcgcgtatatccgtgtgtcaacgaagagcgatgcacag

SEQ ID NO: 19024 - DNA, 260 bp, Unknown
  Description of Unknown: LeftRegion for integrase B6025 sequence
tgggacttactccttgcaaacgttgctactaaatttaaaaatcgccctggcgctaccaacaccaaggcgatgtaacctgtactccgaagagtataagtcccagacaagacatattatacctttcggagtggcatttgtcgagagacagatgttatttttgtacccttttttcatatatttttagaaaggataggtgtaatatggaaaaactacgcactggtgctctgtatatcagagtctcaacagacaaacaggaagag

SEQ ID NO: 19025 - DNA, 260 bp, Unknown
  Description of Unknown: LeftRegion for integrase B6026 sequence
tgtgaggtcttttacgttatacaaagctttataataaaaaatcgccctggcgctaccaacaccaaggcgatgtaacctgtactccgaagagtataataggtccagacaaccatattatacctttcggaacgccatctgtcaaaggataggtgttatttttgtacctttttgcatatatttttagaaaggataggtgtaatatggaaaaattacgaaatggagcactctatatacgagtgtcaaccgacaagcaggaagag

SEQ ID NO: 19026 - DNA, 260 bp, Unknown
  Description of Unknown: LeftRegion for integrase B6027 sequence
agacatgggaaaagatccttgtaagaaatgctactaaaatatattgcttttgtgctaccaacactaagcaatgtaacctgtactccgaagagtataagtcccagacaagacatattataccctgcggagcaccatctgtcaaagattggtgttatttttgtaccctttttttcatacatttacagagaggcagggatattatggaaaaattacgaaatggagcactctatatacgagtgtcaaccgacaagcaggaggaa

SEQ ID NO: 19027 - DNA, 260 bp, Unknown
  Description of Unknown: LeftRegion for integrase B6028 sequence
tgggacttactccttgcaaacgttgctactaaatttaaaaatcgccctagtgctaccaacaccaaggcgatgtaacccgtactccgaagagtataataggtccagacaaccatattatacctttcggaacaccatctgtcaaaggataggtgttatttttgtaccttttttcatatatttttagaaaggataggtgtaatatggaaaaactacgcactggcgctctgtatatcagagtctcaacagacaaacaggaagag

SEQ ID NO: 19028 - DNA, 260 bp, Unknown
  Description of Unknown: LeftRegion for integrase B6029 sequence
tgtgaggtcttttacgttatacaaagctttataataaaaaatcgccctggcgctaccaacaccaaggcgatgtaacctgtactccgaagagtataagtcctaagcaagacatattatacctttcggagtggcatttgtcgagagacagatgttatttttgtacccttttttcatatatttttagaaaggataggtgtaatatggaaaaactacgcactggcgctctgtatatcagagtctcaacagacaaacaggaagag

SEQ ID NO: 19029 - DNA, 260 bp, Unknown
  Description of Unknown: LeftRegion for integrase B6030 sequence
tgttctgtttatccgattcaccttacccaaaagtagagatttccctaacagaaaaagagaaaatccttattgacgcataccgtgctgctgatgacatgggacagttgaacataatctatgtctgcctggatgaaatgaaaaaagcaaaaggggacagcgaaagtgccgtgtgattgattttgtagagtggaggaagaaccatgtatgaggatataaaaacagcctgcctatatgttagattctcaagccataaccagact

SEQ ID NO: 19030 - DNA, 260 bp, Unknown
  Description of Unknown: LeftRegion for integrase B6031 sequence
tgtgaggtcttttacgttatacaaagctttataataaaacatcgccctggcgctaccaacaccaaggcgatgtaacctgtactccgaagagtataagtcctaagcaagacatattatacctttcggagtggcatttgtcgagagacagatgttatttttgtacccttttttcatatatttttagaaaggataggtgtaatatggaaaaactacgcactggtgctctgtatatcagagtctcaacagacaaacaggaagag

SEQ ID NO: 19031 - DNA, 260 bp, Unknown
  Description of Unknown: LeftRegion for integrase B6032 sequence
cgacaaggcatataccactcatactaaaaaataataaataatcgccctggcgctaccaacaccaaggcgatgtaacctgtactccgaagagtataataggtccagacaaccatattatacctttcggaacaccatctgtcaaaggataggtgttatttttgtacctttttgcatatatttttagaaaggataggtgtaatatggaaaaactacgcactggtgctctgtatatcagagtctcaacagacaaacaggaagag

SEQ ID NO: 19032 - DNA, 260 bp, Unknown; identical to SEQ ID NO: 19020
  Description of Unknown: LeftRegion for integrase B6033 sequence

SEQ ID NO: 19033 - DNA, 260 bp, Unknown
  Description of Unknown: LeftRegion for integrase B6034 sequence
ttactgggtcttagtgaagtcagaaaaccagaagtcttagttttgtcagaaaaagagaaaattctcattgacgcataccgtactgctaatgacatgggacagttgaacataatctatgtctgcatggacgaaatgaaaaaaaagcaaaaggagaaggcgtacttgtagggtaattgatttcatagaatggaggaagaaccatgtatgaggatataaaaacagcttgcctatacgttagattctcaagccataaccagact

SEQ ID NO: 19034 - DNA, 260 bp, Unknown
  Description of Unknown: LeftRegion for integrase B6035 sequence
aaacaagctactttctttaaaatagaataatatattaaaaatcgccctggcgctaccaacaccaaggcgatgtaacctgtactccgaagagtataagtcccagacaagacatattatacctttcggagtggcatttgtcgagagacagatgttatttttgtacccttttttcatatatttttagaaaggataggtgtaatatggaaaaactacgcactggtgctctgtatatcagagtctcaacagacaaacaggaagag

SEQ ID NO: 19035 - DNA, 260 bp, Unknown
  Description of Unknown: LeftRegion for integrase B6036 sequence
aaacaagctactttctttaaaatagaataatatattaaaaatcgccctggcgctaccaacaccaaggcgatgtaacctgtactccgaagagtataagtcctaagcaagacatattatacctttcggagtagcatttgtcgagagacagatgttatttttgtacccttttttcatatatttttagaaaggataggtgtaatatggaaaaactacgcactggcgctctgtatatcagagtctcaacagacaaacaggaagag

SEQ ID NO: 19036 - DNA, 260 bp, Unknown
  Description of Unknown: LeftRegion for integrase B6037 sequence
tatagaattcaagctatgatttgcgccggcgcaattgaaataagcgccctgcaggtaccaactgcagagcgctcatatatccgtactccgaaaagtaaggaccagacacatatattatacctttcggagtggcatttgtcgagagacaggtgttatttttgtaccctttttgcatatattttagaaaggataggtgtaatatggaaaaactacgtactggtgctctgtatatcagagtctcaacagacaaacaggaagag

SEQ ID NO: 19037 - DNA, 260 bp, Unknown
  Description of Unknown: LeftRegion for integrase B6038 sequence
gcagaacagtattatcaaagtcagtctatggataagcctttggaacaagcagattttgaagaagtataaataaaaaaaaaccgccccacggcggcaaccgtgaagcggtaagaggaaaaactattgcgataatagcccccaaacaaggtctattatagcatatttcctctgaaattgcaagtacaaggaggaaatttatcatgcaggcagcagcatatgcacgatacagcacagagcatcaaaccgacagcagcatcgcc

SEQ ID NO: 19038 - DNA, 260 bp, Unknown
  Description of Unknown: LeftRegion for integrase B6039 sequence
ggtgctggcaactacgagcctttcgacgtccccgctgatgccgtcgctgctgtggtgtctcgccggttcgatgcactgctcgtagatcgcgcctctgtgctttctgaggacgcggagaaacttgccgcaaccgtggcgtatataattgcctacggcggatccgtcgtgacgcctgagggcgctctgggaggccctgccgcgtgaatgccgcaatctacgctcgcgtctctactgactggcaggccgaacatggctactcg

SEQ ID NO: 19039 - DNA, 260 bp, Unknown
  Description of Unknown: LeftRegion for integrase B6040 sequence
tgggacttaccccttgcaaacgttgctactaaatttaaaaatcgccctggtgctaccaacaccaaggcgatataacccgtactccgaagagtataataggtccagacaaccatattatacctttcggaacaccatctgtcaaaggataggtgttatttttgtacctttttgcatatatttttagaaaggataggtgtaatatggaaaaactacgcactggcgctctgtatatcagagtctcaacagacaaacaggaagag

SEQ ID NO: 19040 - DNA, 260 bp, Unknown
  Description of Unknown: LeftRegion for integrase B6041 sequence
tcgataaagaagtccaaaaaatgctaaacaagcattaaaaaatcgccctggcgctaccaacaccaaggcgatgtaacctgtactccgtagagtataagtcccagacaagacatattataccctgcggagcaccatctgtcaaagattggtgttatttttgtaccctttttttcatacatttacagagaggcaggtatattatggaaaaattacgaaatggagcactctatatacgagtgtcaaccgacaagcaggaggaa

SEQ ID NO: 19041 - DNA, 260 bp, Unknown
  Description of Unknown: LeftRegion for integrase B6042 sequence
tagtagctattgctaaagaacatggttacataatttaataatcgccccggtgctaccaacaccaaggcgatataacccgtactccgaagagtataataggtccagacaaccatattatacctttcggaacaccatctgtcaaaggataggtgttatttttgtaccttttttcatatatttttagaaaggataggtgtaatatggaaaaactacgcactggcgctctgtatatcagagtctcaacagacaaacaggaagag

SEQ ID NO: 19042 - DNA, 260 bp, Unknown
  Description of Unknown: LeftRegion for integrase B6043 sequence
tgtgaggtcttttacgttatacaaatctttataataaaaaatcgccctggcgctaccaacaccaaggcgatgtaacctgtactccgaagagtataagtcccagacaagacatattatacctttcggagtggcatttgtcgagagacagatgttatttttgtacccttttttcatatatttttagaaaggataggtgtaatatggaaaaactacgcactggtgctctgtatatcagagtctcaacagacaaacaggaagag

SEQ ID NO: 19043 - DNA, 260 bp, Unknown
  Description of Unknown: LeftRegion for integrase B6044 sequence
tagaaacattcgcatctctgccggaaagctggttgctatgggatatttcctccccttttgttatgctaaattcacagacgtctgtgaatttgacacctgatttcacgcctttctatcaaatcagggacaaaatagcgtccgctgcgctatactgctcacaacggccgtattttacaagcaacaccaaaggagatgctcccatgaaaaaggcagtgatctatgctcgatacagttctgatatgcagcgcgaggaatctatc

SEQ ID NO: 19044 - DNA, 260 bp, Unknown; identical to SEQ ID NO: 19034
  Description of Unknown: LeftRegion for integrase B6045 sequence

SEQ ID NO: 19045 - DNA, 260 bp, Unknown
  Description of Unknown: LeftRegion for integrase B6046 sequence
aaagacatccagattccataaacagaaaaagggccgtgccctcagcgccggcacggcccttctccgcttacaacagagtgaaaaatatgaatcttcaaaagaaaaacgcaatgggaagtgatcccttctactactgaccctcttttattgtaacatacgctaatgttttgacaagcatttattataggaggtttttaactatgaaaaacgccgttatctacgcccgctattccagcgataagcagcgggatgaaagcatt

SEQ ID NO: 19046 - DNA, 260 bp, Unknown
  Description of Unknown: LeftRegion for integrase B6047 sequence
gaaataattattagtttaattgcgccggcgcaaattaaaagccaccctgcagctaccaacaccaaggcgatgtaacctgtactccgaagagtataaaatccagacaagacatattatacctttcggagtggcatttgtcgagagacagatgttatttttgtacccttttttcatatatttttagaaaggataggtgtaatatggaaaaactacgcactggtgctctgtatatcagagtctcaacagacaaacaggaagag

SEQ ID NO: 19047 - DNA, 260 bp, Unknown
  Description of Unknown: LeftRegion for integrase B6048 sequence
acattcccgaaggatgatgcaacccaaaaatccaaaagtattgtatcatccttccgggcagccttgcaagcggaacttttgttccccgctggctgtattttttatagccttttttaccggttgcaaattgcgccggcgcaaattacaagatcattttgctgacgtcaacaaaatggtcagagaaggaggatgatcatattatgaaacatatactatctcctgcctctgttcttgacaatgtcgttgatctctatatcaga

SEQ ID NO: 19048 - DNA, 260 bp, Unknown
  Description of Unknown: LeftRegion for integrase B6049 sequence
tgctttaaaatatcgtataaattcagacataaatttaaaaatcgccctggtgctaccaacaccaaggcgatgtaacccgtactccgaagagtataataggtccagacaactatattatacctttcggaacaccatctgtcaaaggataggtgttatttttgtacctttttgcatatatttttagaaaggataggtgtaatatggaaaaactacgcactggcgctctgtatatcagagtctcaacagacaaacaggaagag

SEQ ID NO: 19049 - DNA, 260 bp, Unknown
  Description of Unknown: LeftRegion for integrase B6050 sequence
cacgccggagcaggaagcggcaaaacgccgggaactggaacagcaactttatgaggtgttccgcaagtatgccgacaaacggcagagtgaggaagccggggcataaggttttccaaagccatcgttgatttgcggggctgctgacggtataataaaggtgtcagcagctccgtttcttttttaagaaaaggagcgacaatatgaataatcgaatagacgcaatctatgcaaggcaatcggtagacaaaaaggacagcatt

SEQ ID NO: 19050 - DNA, 260 bp, Unknown
  Description of Unknown: LeftRegion for integrase B6051 sequence
aaattcttaaaagcaactaaattcagacataaatttaaaaatcgccttggcgctaccaacaccaaggcgatgtaacctgtactccgaagagtataagtcccagacaagacatattatacctttcggagtggcatttgtcgagagacagatgttatttttgtacccttttttcatatatttttagaaaggataggtgtaatatggaaaaactacgcactggtgctctgtatatcagagtctcaacagacaaacaggaagag

SEQ ID NO: 19051 - DNA, 260 bp, Unknown
  Description of Unknown: LeftRegion for integrase B6052 sequence
gccttttatgttgtcgatacgtaaaacataaatagaaaaatcccctgccataccgcgaaatatgacagggggatgcagccggtattaccagtaccaggctacggttataatctaccatacaggaggcaatcccagaggccgattacctttatattataccatgtcggcctcacattgccatagaagggggctttatttttatgccaaaagcagataaacaaccagtaaaagccgttatatatgcccgctattcatcagac

SEQ ID NO: 19052 - DNA, 260 bp, Unknown
  Description of Unknown: LeftRegion for integrase B6053 sequence
cccacttttcatgaatgatgacaatttggctgagcgagagcttgcaatattcatggatgtaatccttctcggtaaatgtgacgagctctgggtatttggagatagcatttcagaacgcatggcggttgagattgaagttgcaaagaagcgtagacagccaattcgctattttaattctgctatgcaggaggtgaccgatcatgaatgagattagagcgattcaaacggaatacagaggttaccttttccgatccaggttg

SEQ ID NO: 19053 - DNA, 260 bp, Unknown
  Description of Unknown: LeftRegion for integrase B6054 sequence
ctcttggtttgacaccatgtaaaagatgctgtaactaaaaatcgccctggcgctaccaacaccaaggcgatgtaacctgtactccgaagagtataagtcccagacaagacatattatacctttcggagtggcatttgtcgagagacagatgttatttttgtacccttttttcatatatttttagaaaggataggtgtaatatggaaaaactacgcactggcgctctgtatatcagagtctcaacagacaaacaggaagag

SEQ ID NO: 19054 - DNA, 260 bp, Unknown
  Description of Unknown: LeftRegion for integrase B6055 sequence
aatacaagcttattatcaggcaagacaaaaacaattagaactacaaaactaaaaaaatcctctcagcaccacctgagaggatatgacagaatgcagatacaccacatatctgcagtacagaaaaagtttatctaccacgatatatgctttttctgtacccattttaccaaatttagatatgaaaagaaaggatgggtactatgttttactatatcatgtatttacgtaaatctcgtgcagacgatccaaatgaaagcata

SEQ ID NO: 19055 - DNA, 260 bp, Unknown
  Description of Unknown: LeftRegion for integrase B6056 sequence
taagggattaatcaacgatacagaaagggaccatatgaaagagaaaaataaattgaaaattctttcttagttacggcgatttcgtctggacttaagtgagattatacgctattgtttgtcctgcccaaacgggcgggacaaattttttagcctacattcaagtccataaatgaaaagagtgtggcggacaaggaggtagtatggacgacaggaaacgagcagtcgcgtatatccgtgtgtcaacgaagagcgatgcacag

SEQ ID NO: 19056 - DNA, 260 bp, Unknown; identical to SEQ ID NO: 19031
  Description of Unknown: LeftRegion for integrase B6057 sequence

SEQ ID NO: 19057 - DNA, 260 bp, Unknown
  Description of Unknown: LeftRegion for integrase B6058 sequence
accgaacaaagggacgaaataatcaataaaaataaactttcttttctttcctaattaagagccttttgtctggacttccttcgatttatacgctattgtttgtgctaccctgactgtggggtagcacaaatttttttatcaagttaaagtcctacataagtcaagggtaagtaaaataaaaagtctaaaaggaggctcgtatggatagaaaactgaaagttgcggcatacggaagggtatctactaacagtaaacagcaa

SEQ ID NO: 19058 - DNA, 260 bp, Unknown
  Description of Unknown: LeftRegion for integrase B6059 sequence
ggcttcggtccagacgtttcatactacggtcaagccttgattgacgtacaaaatcagattgttgctttatctgaatttgtcatgctgcaaggtgataaccctaaacaggatttagaaaactattcttcttttgtaagtcagaaaataacagcctttacagacgacattctgaaagactaataaaacaaaatgccccggtcgtgctgggaacacttccggggcgtgcaaagatatgtcataccagatacaacaataccgtc

SEQ ID NO: 19059 - DNA, 260 bp, Unknown; identical to SEQ ID NO: 19027
  Description of Unknown: LeftRegion for integrase B6060 sequence

SEQ ID NO: 19060 - DNA, 260 bp, Unknown
  Description of Unknown: LeftRegion for integrase B6061 sequence
acccttacatatttcagaatatggtatcagaaagatgatgatgcagccagcagatccgataatggaaatctttgatttataaataaaaatccccgcccggcgctggaacaccgaacggggaagaagctgtgatacaatcacaaccttagacaggtttattgtatcatagctccctgaaaatgtcaaggagtgatttaaatttgaaaaccgccgtaatatacgcccggtattcgtccgacaagcaaacggagcagtccatc

SEQ ID NO: 19061 - DNA, 260 bp, Unknown
  Description of Unknown: LeftRegion for integrase B6062 sequence
ggtgctggcaaatacgagcctttcgacgccccctctgatgccgttgccgccgtggtgtctcgccggtgcgatgcgctacttgtagatcgtgcctatgtgctcgctgaggacgcgcagaaacgcgctgccgccgtggcgtatataatcgcctatggcggctccgtcgtgacgcctgatggcgttctgggaggccctgccgcatgaatgccgcaatctacgcccgcgtctctaccgactggcaggccgaacacggctactct

SEQ ID NO: 19062 - DNA, 260 bp, Unknown
  Description of Unknown: LeftRegion for integrase B6063 sequence
tgtgaggtcttttacgttatacaaagctttataatgaaaaatcgccctggcgctaccaacaccaaggcgatgtaacctgtactccgtagagtataagtcccagacaagacatattataccctgcggagcaccatctgtcaaaagattggtgttatttttgtaccctttttttcatacatttacagagaggcaggtatattatggaaaaattacgaaatggagcactctatatacgagtgtcaaccgacaagcaggaggaa

SEQ ID NO: 19063 - DNA, 260 bp, Unknown
  Description of Unknown: LeftRegion for integrase B6064 sequence
cgacaaggcatataccactcatactaaaaaataataaataatcgccctggcgctaccaacaccaaggcgatgtaacctgtactccgaagagtataagtcctaagcaagacatattatacctttcggagtggcatttgtcgagagacagatgttatttttgtacccttttttcatatatttttagaaaggataggtgtaatatggaaaaactacgcactggtgctctgtatatcagagtttcaacagacaaacaggaagag

SEQ ID NO: 19064 - DNA, 260 bp, Unknown
  Description of Unknown: LeftRegion for integrase B6065 sequence
aagctcgtaaccggcagaacaaaaagcccgacttgggaaaaggctgtccatattgtcgagaatcttggcatgactccgtcagaattcagagcaattgagattgaatatgacagtcaagagtccaaaagaaaagcccactgagtggtcaagactcagcgggctttggtccaattccaaacggcagaacggacaattacattatggcagaaaaagcggtcatctacgcgagattcagctcagataagcagcgcgaggaatcg

SEQ ID NO: 19065 - DNA, 260 bp, Unknown
  Description of Unknown: LeftRegion for integrase B6066 sequence
ggcttcggtccagacgtttcatactacggtcaagccttgattgacgtacaaaatcagattgttgctttatctgaatttgtcatgctgcaaggtgataaccctaaacaggatttagaaaactattcttcttttgtaagtcagaaaataacagcctttacagacgacattctgaaagactaataaaacaaaatgccccggtcgtgctgggaacacttccgaggcatgcaaagatatgtcataccagatacaacaataccgtc

SEQ ID NO: 19066 - DNA, 260 bp, Unknown
  Description of Unknown: LeftRegion for integrase B6067 sequence
cgttatataaacattttttcaaaacaaaaccgctcctgcgccaacaggaacggctcaagactaatgccccgaaggatacaccagtacgttcaaaatatagtgtatcatcttcgggcagccaccgcaagcagaactcatgttcttctgctggctgttatttttgtacccttttttacataaaatacaaaggagctgatacaatgagcctaaaatatgcatacggatatatccgtgtatccacgcacgatcaggaagaaatc

SEQ ID NO: 19067 - DNA, 260 bp, Unknown
  Description of Unknown: LeftRegion for integrase B6068 sequence
atatgtcaaataagtaaagaccgcccctgttggcgcaaggacggctcaaagactaatgccccgaaggatacaccagtacgttcaataaatagtgtatcatcttcggagcagtcacgcaagcggaacacttgttcctcgctggctgttatttttatacgcaaaattgtgcgacgtcgcacatatatactaaggaaggtgatatgatgagtgaattaagatatgcctatggctatatccgtgtatccacgcacgatcaggaa

SEQ ID NO: 19068 - DNA, 260 bp, Unknown
  Description of Unknown: LeftRegion for integrase B6069 sequence
aaataaaaaaccgctcctgcgccaacaggaacggtcgagcgatgaaacatacaccaatatgtttctattaagttctccgaagagatacccaattccaaataatattgtatcatctccggagcagccacgcaagagaacaaaagttctcaggctgttatttttgtacccttttttacataaaatacaaaggagctgatacaatgagcctaaaatatgcatacggatatatccgtgtatccacgcacgatcaggaagaaatc

SEQ ID NO: 19069 - DNA, 260 bp, Unknown
  Description of Unknown: LeftRegion for integrase B6070 sequence
aaaaaaccgctcctgcgccaacaggaacggtcgagcgatggaaacatacgccaatatgtttctctattaagtactccgaagagatacccaatttccaaataatattgtatcatctccggagcagccgcgcaagagaacaaaagttctagggctgttatttttgtacccttttttacataaaatacaaaggagctgatacaatgagcctaaaatatgcatacggatatatccgtgtatccacgcacgatcaggaagaaatc

SEQ ID NO: 19070 - DNA, 260 bp, Unknown
  Description of Unknown: LeftRegion for integrase B6071 sequence
cattcagacagatatgtcaaataagtaagaaacgcccctgttgataacagaggcgaatcaattgaatactatacagtgccaaggcacgtacaatactccctcaacaagaatattgtatcacatttccttggcatctgtacaggtgttatttttatacgcaaatttgtgcgacgtcgcacatatatactaaggaaggtgatatgatgagtgaattaagatatgcctatggctatatccgtgtatccacgcacgatcaggaa

SEQ ID NO: 19071 - DNA, 260 bp, Unknown
  Description of Unknown: LeftRegion for integrase B6072 sequence
accgctcctgcgccaacaggaacggtcgagcgatggaaacatacgccaatatgtttctctattaagtactccgaagagatacccaatttccaaataatagtgtatcatcttcaggcagccaccgcaagcagaactcatgttcttctgctggctgttatttttgtacccttttttacataaaatacaaaggagctgatacaatgagcctaaaatatgcatacggatatatccgtgtatccacccacgatcaggaagaaatc

SEQ ID NO: 19072 - DNA, 260 bp, Unknown; identical to SEQ ID NO: 19066
  Description of Unknown: LeftRegion for integrase B6073 sequence

SEQ ID NO: 19073 - DNA, 260 bp, Unknown
  Description of Unknown: LeftRegion for integrase B6074 sequence
taaaagaaccgctcctgcgccaacaggaacggtcgagcgatggaaacatacgccaatatgtttctcattaagttctccgaagagatacctaaatccaaataatattgtatcatctccggagcagccacgcaagagaacaaaagttctcgggctgttatttttgtacccttttttacataaaatacaaaggagctgatacaatgagcgtaaaatatgcatacggctacatccgggtatccacgcacgatcaggaagaaatc

SEQ ID NO: 19074 - DNA, 260 bp, Unknown
  Description of Unknown: LeftRegion for integrase B6075 sequence
ctgcgccaacaagaacggtttcctcataatcaatatgaggtcgtatataacgtatatatccgaagagatacatacaatactcacaaaaatattgtatcatcttcgggcagctatcgcaagcggaacacttgttcctcgctggctgttatttttatacgcaaaattgtgcgacgtcgcacatatatactaaggaaggtgatatgatgagtgaattaagatatgcctatggctatatccgtgtatccacgcacgatcaagaa

SEQ ID NO: 19075 - DNA, 260 bp, Unknown
  Description of Unknown: LeftRegion for integrase B6076 sequence
ataaaaaccgctcctgcgccaacaggaacggtcgagcgatgaaacatacaccaatatgtttctctattaagtactccgaagagatacccaattttcaaataatattgtatcatctccggagcagccacgcaagagaacaaaagttctcgggctgttatttttgtacccttttttacataaaatacaaaggagttgatacaatgagcctaaaatatgcatacggatatatccgtgtatccacgcacgatcaggaagaaatc

SEQ ID NO: 19076 - DNA, 260 bp, Unknown
  Description of Unknown: LeftRegion for integrase B6077 sequence
attaaaaccgctcctgcgccaacaggaacggtcgagcgatgaaacatacgccaatatgtttctctattaagtactccgaagagatacccaatttccaaataatattgtatcatcttcggagcagccacgcaagagaacaaaagttctcgggctgttatttttgtacccttttttacataaaatacaaaggagctgatacaatgagcctaaaatatgcatacggatatatccgtgtatccacgcacgatcaggaagaaatc

SEQ ID NO: 19077 - DNA, 260 bp, Unknown
  Description of Unknown: LeftRegion for integrase B6078 sequence
atagcaaaaccgctcctgcgccaacaggaacggtcataggatgaaacatacgccaatatgtttctttcagtactccgaagagatacactgatttccaacaaatattgtatcatctccggagcagccacgcaagagaacaaaagttctcaggctgttatttttgtacccttttttacataaaatacaaaggagctgatacaatgagcctaaaatatgcatacggatatatccgtgtatccacgcacgatcaggaagaaatc

SEQ ID NO: 19078 - DNA, 260 bp, Unknown
  Description of Unknown: LeftRegion for integrase B6079 sequence
aaacgcccagcaggtcatggccatgctgggcgaaattgaacagtataatagacaacagaatgcaaagtctgctgatgaaaaagttatatctatccctgagcagataaaggaatacaaaagcctgctcgattgtggagccataacgcaggaagaatacgatattaagaaaaaagagttattgaagtcttaaggagaacactatgagcaatgcagttatatatgcaagatactcttcagacaagcagtctgaggatagcatt

SEQ ID NO: 19079 - DNA, 260 bp, Unknown
  Description of Unknown: LeftRegion for integrase B6080 sequence
aggaaaacgatgctgagattcttgagggcatccagggaaccgctatttccatttccatggagaacggagacgatgccatggagtacatcgaccagctgcgtgaggcgcttggcgaaacagaataaaagaagccccggtgcgtccgccaagacacatcaccggggctgcaaacaaaggcctcgaaaggaggcatgaacattatgtcacagaagaccgccgttctctacgcgcggttctcgtgctctaagcagcgcgaggct

SEQ ID NO: 19080 - DNA, 260 bp, Unknown
  Description of Unknown: LeftRegion for integrase B6081 sequence
aaataaaaaccgctcctgcgccaacaggaacggtcgagcgatgaaacatactccaatatgtttctgttaagttctccgaagagataccttaactccaaacaacattgtatcatctccggagcagccatgcaagagaacaaaagttctcgggctgttatttttgtacccttttttacataaaatacaaaggagctgatacaatgagcctaaaatatgcatacggatatatccgtgtatccacgcacgatcaggaagaaatc

SEQ ID NO: 19081 - DNA, 260 bp, Unknown
  Description of Unknown: LeftRegion for integrase B6082 sequence
ataaaaaaccgctcctgcgccaacaggaacggtcataggatgaaacatacgccaatatgtttctttcagtactccgaagagatacatcaattttccatttaatattgtatcatctccggagcagccacgcaagagaacaaaagttctcaggctgttatttttgtacccttttttacataaaatacaaaggagctgatacaatgagcctaaaatatgcatacggatatatccgtgtatccacgcacgatcaggaagaaatc

SEQ ID NO: 19082 - DNA, 260 bp, Unknown
  Description of Unknown: LeftRegion for integrase B6083 sequence
aataaaaaccgttcctgcgccaacaggaacggtcgagcgatgaaacatacgccaatatgtttctcattaagttctccgaagagatactcaaactgcaaataatattgtatcatctccggagcagccacgcaagagaacaaaagttctcaggctgttatttttgtacccttttttacataaaatacaaaggagctgatacaatgagcctaaaatatgcatacggatatatccgtgtatccacgcacgatcaggaagaaatc

SEQ ID NO: 19083 - DNA, 260 bp, Unknown
  Description of Unknown: LeftRegion for integrase B6084 sequence
aggagaacgacgccgagatacttgagggcatccaaggaaccgcgatatcagtttcgatggagaacggcgacgacgccatggagtacatcgaccagctgcgcgaggcacttggccaagctgaatagaagaagccccggtgcgtccgccaagacacatcaccggggcagcaaacaaaggcctcgaaaggaggcatgaacattatgtcacagaagaccgccgttctctacgcgcggttctcgtgctccaagcagcgcgaggcg

SEQ ID NO: 19084 - DNA, 260 bp, Unknown
  Description of Unknown: LeftRegion for integrase B6085 sequence
tagaattacagtaaaatactaaaaaatccccggtgttaccagcaccagggaaaacgagaaaactatagggtgtttggaacacagtacaattctctccctcacaaagattattgtatcacaaaaatccggcaccgtataggtgttatttttgtacccatttttgtgcgacgtcgcacatataattacaggaaggtgatacaatgagcctaaaatatgcatacggatatatccgtgtatccacgcacgatcaggaagaaatc

SEQ ID NO: 19085 - DNA, 260 bp, Unknown
  Description of Unknown: LeftRegion for integrase B6086 sequence
caagccatttggctcttttagcccaatgagcaaaagcattcgaaaaatgatccgtatgggataccgggtcaagattaggtgcaaaaacgttggatggtacgcgcaggggatacctgagattgttgccatgattccagatccagaagctgtgttctcttggcttgacgagtgcgagagaagtggtgaggaggttccgttcaatgccaacagctagaactgcggtgatatacgcccgcttttcgtgcaacaagcagcgcgag

SEQ ID NO: 19086 - DNA, 260 bp, Unknown
  Description of Unknown: LeftRegion for integrase B6087 sequence
aaacaagctactttctttaaaatagaataatatattaaaaatcgccctggcgctaccaacaccaaggcgatgtaacccgtactccgaagagtataataggtccagacaaccatattatacctttcggaacaccatctgtcaaaggataggtgttatttttgtacctttttgcatatatttttagaaaggataggtgtaatatggaaaaactacgcactggcgctctgtatatcagagtctcaacagacaaacaggaagag

SEQ ID NO: 19087 - DNA, 260 bp, Unknown
  Description of Unknown: LeftRegion for integrase B6088 sequence
catgggtgtcttttatttttattaaagtaaaaaccgctcctgctaccaacaggaacggcttaatgaatactatacagtgccaaggcacgtacaataccccgtgacaagagtattgtatcacatttccttggcacctgtacaggtgttatttttatacacaaatttgtgcgacgtcgcacatatatactaaggaaggtgatatgatgagtgaattaagatatgcctatggctatatccgtgtatccacgcacgatcaggaa

SEQ ID NO: 19088 - DNA, 260 bp, Unknown
  Description of Unknown: LeftRegion for integrase B6089 sequence
aaaacaggcggtttatcgcttagcttcaaagctgtgaactggtgttattcggttttagttgtgttgggaagtggtgaaaaacggcaacataaagtgctgttttcagagagaaaccccgcgcgggaacttggcggaacgcgcgcggggctggtcaagaagcagagcgctttaccgcgctcgctctaaggggtgattttagcatggtaaagaaccgcgccgccatatatgcgcgcttcagctcgcacaatcagcgctcagag

SEQ ID NO: 19089 - DNA, 260 bp, Unknown; identical to SEQ ID NO: 19084
  Description of Unknown: LeftRegion for integrase B6090 sequence

SEQ ID NO: 19090 - DNA, 260 bp, Unknown
  Description of Unknown: LeftRegion for integrase B6091 sequence
tactgctagaaaaatgattgctcagcttcaggcaatacaactttataacgaagaacagcgattgaagcctgctgatgaaaaagttatatctatccctgagcagataaaggaatacaaaagcctgctcgattgtggagccataacgcaggaagagtacgatattaagaaaaaagagttattgaagtcttaaggagaacactatgagcaatgcagttatatatgcaagatactcgtcggacaagcagtctgaggatagcatt

SEQ ID NO: 19091 - DNA, 260 bp, Unknown; identical to SEQ ID NO: 19080
  Description of Unknown: LeftRegion for integrase B6092 sequence

SEQ ID NO: 19092 - DNA, 260 bp, Unknown
  Description of Unknown: LeftRegion for integrase B6093 sequence
ctacctgctgggatatactgataagattgagaagccggcaggcgatgaaacggaccccgccaccaataagtttctggccgtaactctggccgagatcgacctgattgaagcataccggcacgccggagctgagacccaggcagcgatcagagcgatcctgcacatttaacgggaggaccccgggaagggaggacggtgccatgcgcggcgtcatttatgcgagatattcaccaggcccgcaccagacggagcagtccatc

SEQ ID NO: 19093 - DNA, 260 bp, Unknown
  Description of Unknown: LeftRegion for integrase B6094 sequence
tgggacttactccttgcaaacgttgctactaaatttaaaaatcgccctagtgctaccaacaccaaggcgatgtaacccgtactccgaagagtataataggtccagacaaccatattatacctttcggaacaccatctgtcaaaggataggtgttatttttgtacctttttgcatatatttttagaaaggataggtgtaatatggaaaaactacgcactggtgctctgtatatcagagtctcaacagacaaacaggaagag

SEQ ID NO: 19094 - DNA, 260 bp, Unknown; identical to SEQ ID NO: 19080
  Description of Unknown: LeftRegion for integrase B6095 sequence

SEQ ID NO: 19095 - DNA, 260 bp, Unknown
  Description of Unknown: LeftRegion for integrase B6096 sequence
aaaaaccgctcctgctaccaacaggaacggtcataggacgaaacatacgccaatatgtttctcattaagtactccgaagagatactcattttttccaaacaatattgtatcatctccggagcagccatgcaagagaacaaaagttctcgggctgttatttttgtacccttttttacataaaatacaaaggagctgatacaatgagcctaaaatatgcatacggatatatccgtgtatccacgcacgatcaggaagaaatc

SEQ ID NO: 19096 - DNA, 260 bp, Unknown; identical to SEQ ID NO: 19080
  Description of Unknown: LeftRegion for integrase B6097 sequence

SEQ ID NO: 19097 - DNA, 260 bp, Unknown
  Description of Unknown: LeftRegion for integrase B6098 sequence
caaaaaaccgctcctgcgccaacaggaacggtcgagcgatgaaacatacgccaatatgtttctctattaagtactccgaagagatacccaatttccaaataatattgtatcatctccggagcagccatgcaagagaacaaaagttctcaggctgttatttttgtacccttttttacataaaatacaaaggagttgatacaatgagcctaaaatatgcatacggatatatccgtgtatccacgcacgatcaggaagaaatc

SEQ ID NO: 19098 - DNA, 260 bp, Unknown
  Description of Unknown: LeftRegion for integrase B6099 sequence
tgtaatgtactccgtggtctcgaagcatagcatcgacatcaacaagctcaaggccaaggtgggctgaccaccccaaatccgacagcgctgtcggatttgccacagccgaaaagggaatgccgcctctgcggaggcggctccttaatacccggcagatagaacacttgtattattttatcgttttcagggcaggtgatcttatggatgcggcgcaatacctccgcaaatcccgcatggaggagggcatggacacggaagag

SEQ ID NO: 19099 - DNA, 260 bp, Unknown
  Description of Unknown: LeftRegion for integrase B6100 sequence
aaaaaaccgctcctgcgccaacaggaacggtcgagcgatggaaacatacgccaatatgtttctctattaagtactccgaagagatacccaatttccaaataatattgtatcatctccggagcagccacgcaagagaacaaaagttctcgggctgttatttttgtacgcttttttacataaaatacaaaggagctgatacaatgagcctaaaatatgcatacggatatatccgtgtatccacgcacgatcaggaagaaatc

SEQ ID NO: 19100 - DNA, 260 bp, Unknown
  Description of Unknown: LeftRegion for integrase B6101 sequence
gtgtacaccagaaagggctagtatgtggaaaggatgtgtgattcatgaaatatgagtcgctttttttagcttaataatggacaaaccttgatgcatagcatatataaagaggtgatgctaggtgcatgtcacaagaaacaagattcctgatgacaagcaaatttttaagtgctatgattatttacgagaggtgataaataatgatagcgctctacgggagagtctcaacagaagaacaagcgaccaaaggttacagtcta

SEQ ID NO: 19101 - DNA, 260 bp, Unknown
  Description of Unknown: LeftRegion for integrase B6102 sequence
aaaaaaaccgctcctgcgccaacaggaacggtcgagcgatgaaacatacaccaatatgtttctctattaagtactccgaagagatacccaatttccaaataatattgtatcatctccggagcagccatgcaagagaacaaaagttctcaggctgttatttttgtacccttttttacataaaatacaaaggagttgatacaatgagcctaaaatatgcatacggatatatccgtgtatccacgcacgatcaggaagaaatc

SEQ ID NO: 19102 - DNA, 260 bp, Unknown
  Description of Unknown: LeftRegion for integrase B6103 sequence
aacagttttataagtaaaaaccgcccctgttggcgcaaggacggttcaaagactaatgccccgaaggatacaccagtacgttcaataattagtgtatcatcttcgggcagtcactgcaagcggaacacttgttccttgctggctgttatttttatacgcaaaattgtgcgacgtcgcacatatatactaaggaaggtgatatgatgagtgaattaagatatgcctatggctatatccgtgtatccacgcacgatcaggaa

SEQ ID NO: 19103 - DNA, 260 bp, Unknown; identical to SEQ ID NO: 19102
  Description of Unknown: LeftRegion for integrase B6104 sequence

SEQ ID NO: 19104 - DNA, 260 bp, Unknown
  Description of Unknown: LeftRegion for integrase B6105 sequence
tcgcgtcacggatgaaaccggacatctcataagtaacaacgaagacctttttaggaacgccagagaaaaaagcgaagccgatttgatatgtaggctgttttgaaaaaagaaaaccccacgcgggaacttgccggaacgcgcgcggggctggtgagaaagcagagcgctttaccgcgctcgctctaaggagtgattttagcatggtgaagaaccgagctgccatatacgcgcgctttagctcgcacaatcagcgctcagag

SEQ ID NO: 19105 - DNA, 260 bp, Unknown
  Description of Unknown: LeftRegion for integrase B6106 sequence
aaaagaaaaccgctcctgcgccaacaggaacggtcgagcgatgaaacatacgccaatatgtttctctattaagtactccgaagagatacccaaatgcaataatattgtatcatctccggagcagccacgcaagagaacaaaagttctctggctgttatttttgtacccttttttacataaaatacaaaggagctgatacaatgagcctaaaatatgcatacggatatatccgtgtatccacacacgatcaggaagaaatc

SEQ ID NO: 19106 - DNA, 260 bp, Unknown
  Description of Unknown: LeftRegion for integrase B6107 sequence
aaatgcccagcaagtcatggccatgctgggcgaagtagaacagtataacagacggcagaatgcaaaacctgctgatgaaaaagctatatctattcctgagcagataaaggagtataaaagcctgcttgactgtggggctataacgcaggaagaatacgatattaagaaaaaagagttattgaagtcttaaggagaacactatgagcaatgcagttatatatgcaagatactcttcagacaagcagtctgaggatagcatt

SEQ ID NO: 19107 - DNA, 260 bp, Unknown
  Description of Unknown: LeftRegion for integrase B6108 sequence
ataaaaaccgctcctgcgccaacaggaacggtcgagcgatgaaacatacgccaatatgtttctctattaagtactccgaagagatacccaatttccaaataatattgtatcatcttcggagcagccacgcaagagaacaaaagttctcgggctgttatttttgtacccttttttacataaaatacaaaggagctgatacaatgagcctaaaatatgcatacggatatatccgtgtatccacccacgatcaggaagaaatc

SEQ ID NO: 19108 - DNA, 260 bp, Unknown; identical to SEQ ID NO: 19066
  Description of Unknown: LeftRegion for integrase B6109 sequence

SEQ ID NO: 19109 - DNA, 260 bp, Unknown
  Description of Unknown: LeftRegion for integrase B6110 sequence
atatgtcaaataagtaaagaccgtccctgttggcgcaaggacggctcaaagactaatgccccgaaggatacaccagtacgttcaatgaatagtgtatcatcttcggagcagtcacgcaagcggaacacctgttcctcgctggctgttatttttatacgcaaaattgtgcgacgtcgcacatatatactaaggaaggtgatatgatgagtgaattaagatatgcctatggctatatccgtgtatccacgcacgatcaagaa

SEQ ID NO: 19110 - DNA, 260 bp, Unknown
  Description of Unknown: LeftRegion for integrase B6111 sequence
attgccgatctgctgaaataaataaaaaaccgctcctgcgccaacaggaacggctcaagactaatgacccgaaggatacaccagtacgttcaaaatatagtgtatcatcttcgggcagccaccgcaagcagaactcatgttcttctgctggctgttatttttgtacccttttttacataaaatacaaaggagctgatacaatgagcctaaaatatgcatacggatatatccgtgtatccacccacgatcaggaagaaatt

SEQ ID NO: 19111 - DNA, 260 bp, Unknown
  Description of Unknown: LeftRegion for integrase B6112 sequence
aataaaaaccgctcctgcgccaacaggaacggtcataggacgaaacatacgccaatatgtttctttcagtactccgaagagatacatcaattttccaatcaatattgtatcatctccggagcagccgcgcaagagaacaaaagttctagggctgttatttttgtacccttttttacataaaatacaaaggagctgatacaatgagcctaaaatatgcatacggatatatccgtgtatccacgcacgatcaggaagaaatc

SEQ ID NO: 19112 - DNA, 260 bp, Unknown
  Description of Unknown: LeftRegion for integrase B6113 sequence
aataaaaaccgttcctgcgccaacaggaacggtcgagcgatgaaacatacgccaatatgtttctcattaagttctccgaagagatacctcaattccaatcaatattgtatcatctccggagcagccatgcaagagaacaaaagttctcgggctgttatttttgtacccttttttacataaaatacaaaggagctgatacaatgagcctaaaatatgcatacggatatatccgtgtatccacgcacgatcaggaagaaatc

SEQ ID NO: 19113 - DNA, 260 bp, Unknown
  Description of Unknown: LeftRegion for integrase B6114 sequence
attgccgatttgctgaaataaataaaaaaccgcccctgcgccaacaggaacggctcaagactaatgccccgaaggatacaccagtacgttcaaaatatagtgtatcatcttcgggcagccaccgcaagcagaactcatgttcttctgctggctgttatttttgtacccttttttacataaaatacaaaggagctgatacaatgagcctaaaatatgcatacggatatatccgtgtatccacgcacgatcaggaagaaatc

SEQ ID NO: 19114 - DNA, 260 bp, Unknown
  Description of Unknown: LeftRegion for integrase B6115 sequence
gctaaaagatttatagattaacaaaataaaaaccgctcctgctaccaacaggaacggcttaatgaatactatacagtgccaaggcacgtacaatactccctcaacaagaatattgtatcacatttccttggcatctgtacaggtgttatttttatacgcaaatttgtgcgacgtcgcacatatatactaaggaaggtgatatgatgagtgaattaagatatgcctatggctatatccgtgtatccacgcacgatcaggaa

SEQ ID NO: 19115 - DNA, 260 bp, Unknown
  Description of Unknown: LeftRegion for integrase B6116 sequence
cgagcaaccgacgagacaagaggttatatagagcgcaacgaagacctatttagaaacgcaaggaagagagacgaaggcgatttgatacgtaggatgttctgaaacagaaaaaagccccacgcggcttaacttggcggttgcgcgcggggcatggtcgaattgagcactttgcggtgctcgcttcaagaggtgattctagcatggtcaagaaccgagctgccatatatgcgcgctttagctcgcacaatcagcgctcagag

SEQ ID NO: 19116 - DNA, 260 bp, Unknown
  Description of Unknown: LeftRegion for integrase B6117 sequence
caattattccaattacttcaaaataattaaaaaccgcccctgtgccaacaggaacggcttaatgaatactatacagtgccgaggcacgtacaatactccctcaacaagaatattgtatcacatttccttggcacctgtacaggtgtattttttatacgcaaatttgtgcgacgtcgcacatatatactaaggaaggtgatatgatgagtgaattaagatatgcctatggctatatccgtgtatccacgcacgatcaggaa

SEQ ID NO: 19117 - DNA, 260 bp, Unknown; identical to SEQ ID NO: 19080
  Description of Unknown: LeftRegion for integrase B6118 sequence

SEQ ID NO: 19118 - DNA, 260 bp, Unknown
  Description of Unknown: LeftRegion for integrase B6119 sequence
cgttatataaacattttttcaaaataaaaccgctcctgcgccaacaggaacggctcaagactaatgccccgaaggatacaccagtacgttcaaaatatagtgtatcatcttcgggcagccaccgcaagcagaactcatgttcttctgctggctgttatttttgtacccttttttacataaaatacaaaggagctgatacaatgagcctaaaatatgcatacggatatatccgtgtatccacgcacgatcaggaagaaatc

SEQ ID NO: 19119 - DNA, 260 bp, Unknown
  Description of Unknown: LeftRegion for integrase B6120 sequence
aataaaaaaccgctcctgcgccaacaggaacggtcgagcgatgaaacatacgccaatatgtttctcattaagttctccgaagagatacctaaatccaaataatattgtatcatctccggagcagccacgcaagagaacaaaagttctcaggctgttatttttgtacccttttttacataaaatacaaaggagctgatacaatgagcctaaaatatgcatacgggtatatccgtgtatccacgcacgatcaggaagaaatc

SEQ ID NO: 19120 - DNA, 260 bp, Unknown
  Description of Unknown: LeftRegion for integrase B6121 sequence
atatgtcaaataagtaaagaccgtccctgttggcgcaaggacggctcaaagactaatgccccgaaggatacaccagtacgttcaatgaatagtgtatcatcttcggagcagtcacgcaagcggaacacttgttcctcgctggctgttatttttatacgcaaaattgtgcgacgtcgcacatatatactaaggaaggtgatatgatgagtgaattaagatatgcctatggctatatccgtgtatccacgcacgatcaggaa

SEQ ID NO: 19121 - DNA, 260 bp, Unknown; identical to SEQ ID NO: 19071
  Description of Unknown: LeftRegion for integrase B6122 sequence

SEQ ID NO: 19122 - DNA, 260 bp, Unknown
  Description of Unknown: LeftRegion for integrase B6123 sequence
aaataaaaaaccgctcctgcgccaacaggaacggtcgagcgatgaaacatacaccaatatgtttctattaagttctccgaagagatacccaattccaaataatattgtatcatctccggagcagccacgcaagagaacaaaagttctcaggctgttatttttgtacccttttttacataaaatacaaaggagctgatacaatgagcctaaaatatgcatacggatatatccgtgtatccacccacgatcaggaagaaatt

SEQ ID NO: 19123 - DNA, 260 bp, Unknown; identical to SEQ ID NO: 19107
  Description of Unknown: LeftRegion for integrase B6124 sequence

SEQ ID NO: 19124 - DNA, 260 bp, Unknown
  Description of Unknown: LeftRegion for integrase B6125 sequence
ctcaaaaaccgctcctgctaccaacaggaacggtcataggacgaaacatacgccaatatgtttctttcagtactccgaagagatacactgatttccaacaaatattgtatcatctccggagcagccacgcaagagaacaaaagttctcgggctgttatttttgtacccttttttacataaaatacaaaggagctgatacaatgagcctaaaatatgcatacggatatatccgtgtatccacgcacgatcaggaagaaatc

SEQ ID NO: 19125 - DNA, 260 bp, Unknown
  Description of Unknown: LeftRegion for integrase B6126 sequence
aaacaagctactttctttaaaatagaataatatattaaaaatcgccctggcgctaccaacaccaaggcgatgtaacctgtactccgaagagtataagtcctaagcaagacatattatacctttcggagtggcatttgtcgagagacagatgttatttttgtacccttttttcatataattttagaaaggataggtgtaatatggaaaaactacgcactggtgctctgtatatcagagtctcaacagacaaacaggaagag

SEQ ID NO: 19126 - DNA, 260 bp, Unknown
  Description of Unknown: LeftRegion for integrase B6127 sequence
atctttagattatttagaaggtttaacaactgaaaagactggtttaggaaaagaaaaggaagctttagtttctaattttcttgaatttttaattgaaaatggaataatcaaagatgaaaagaatattgatgaaaaaactgaaaaaatgataatggatatggtaaaaaaggaaattgctaatttaaaaaaggggagataatatgagaattgcgatatataccagaaaatctgttgctgtagaaaatagtgagagtatagaa

SEQ ID NO: 19127 - DNA, 260 bp, Unknown
  Description of Unknown: LeftRegion for integrase B6128 sequence
aatgtataaataaaatagaaatcgccaccccgttggctcagggtggctcgcatatccgaagatatactatatctgattgttcaagtcatattgtatcattttcggagcagtcttgcaagcggaactgttgttctgtgcttggctgttatttttatacgcaaatttgtgcgacgtcgcacatatatactaaggaaggtgatatgatgagtgaattaagatatgcctatggctatatccgcgtatctacacacgatcaggaa

SEQ ID NO: 19128 - DNA, 260 bp, Unknown; identical to SEQ ID NO: 19066
  Description of Unknown: LeftRegion for integrase B6129 sequence

SEQ ID NO: 19129 - DNA, 260 bp, Unknown
  Description of Unknown: LeftRegion for integrase B6130 sequence
gatcagacagaataatataaataaaagaaccgctcctgcgccaacaggaacggctcaagactaatgccccgaaggatacaccagtacgttcaaaatatagtgtatcatcttcgggcagccaccgcaagcagaactcatgttcttctgctggctgttatttttgtacccttttttacataaaatacaaaggagctgatacaatgagcctaaaatatgcatacggatatatccgtgtatccacccacgatcaggaagaaatc

SEQ ID NO: 19130 - DNA, 260 bp, Unknown; identical to SEQ ID NO: 19076
  Description of Unknown: LeftRegion for integrase B6131 sequence

SEQ ID NO: 19131 - DNA, 260 bp, Unknown; identical to SEQ ID NO: 19070
  Description of Unknown: LeftRegion for integrase B6132 sequence

SEQ ID NO: 19132 - DNA, 260 bp, Unknown
  Description of Unknown: LeftRegion for integrase B6133 sequence
gtacacgtacgtcaacggcgagcttgcccccggctcaacggccccgttctctacgatttctcatgaggttcccgagcatgcgagcgttgaggcctacgttgactgcggctggcctatgaccgaataaaagaaccccggtgcgtccgccaagacacatcaccggggcagcaaacccctcctagaaaggaggcaagcacattatgtcacagaagaccgccgttctctacgcgcggttctcgtgctccaagcagcgcgaggag

SEQ ID NO: 19133 - DNA, 260 bp, Unknown
  Description of Unknown: LeftRegion for integrase B6134 sequence
catgggtgtcttttatttttattaaagtaaaaaccgctcctgctaccaacaggaacggcttaatgaatactatacagtgccaaggcacgtacaataccccgtgacaagagtattgtatcacatttccttggcacctgtacaggtgttatttttatacacaaatttgtgcgacgtcgcacatatatactaaggaaggtgatatgatgagtgaattaagatatgcctatggctatatccgcgtatccacgcacgatcaggaa

SEQ ID NO: 19134 - DNA, 260 bp, Unknown
  Description of Unknown: LeftRegion for integrase B6135 sequence
ataaaaaccgctcctgcgccaacaggaacggtcgagcgatgaaacatacaccaatatgtttctctattaagtactccgaagagatacccaattttcaaataatattgtatcatcttcggagcagccacgcaagagaacaaaagttctcaggctgttatttttgtacccttttttacataaaatacaaaggagctgatacaatgagcctaaaatatgcatacggatatatccgtgtatccacgcacgatcaggaagaaatc

SEQ ID NO: 19135 - DNA, 260 bp, Unknown
  Description of Unknown: LeftRegion for integrase B6136 sequence
taatccacctcaataagacataagaaaaaccgcccagtgttaccagcactgaacggtcaatacatatccgaagatatgcaagtatacttagcacatatattgtatcatcttcggagcagccacgcaatcggaacatattttcggtggctgttatttttatacccattttttaatatattttaccgaggagttgatataacatgaaagacggcgctctttatatacgagtaagcacgcatatgcaggacgaactttcgcct

SEQ ID NO: 19136 - DNA, 260 bp, Unknown
  Description of Unknown: LeftRegion for integrase B6137 sequence
atatgtcaaataagtaaagaccgtccctgttggcgcaaggacggctcaaagactaatgccccgaaggatacaccagtacgttcaataaatagtgtatcatcttcggagcagtcacgcaagcggaacacttgttcctcgctggctgttatttttatacgcaaaattgtgcgacgtcgcacatatatactaaggaaggtgatatgatgagtgaattaagatatgcctatggctatatccgtgtatccacgcacgatcaagaa

SEQ ID NO: 19137 - DNA, 260 bp, Unknown
  Description of Unknown: LeftRegion for integrase B6138 sequence
gcacaacaaaatagtatgcttacataagacaacaaaaaaccgtccctactttacatagagacggctaatacacccgaagatgtacagtaattctgaacaaatatattgtatcatcttcggaaacacccgtcaacggaacatattttcgttgggtgttatttttatacatttttttaatatatatagacgaggtgatatgaatgaaaacaggagcattatatatacgtgtaagtacacacatgcaagacgaactgtccccc

SEQ ID NO: 19138 - DNA, 260 bp, Unknown; identical to SEQ ID NO: 19118
  Description of Unknown: LeftRegion for integrase B6139 sequence

SEQ ID NO: 19139 - DNA, 260 bp, Unknown
  Description of Unknown: LeftRegion for integrase B6140 sequence
aagtaaaaaccgcccctactccaatagggacggtcgagcgatggaaacatactccaatatgtttctattaagttctccgaagagatacctaaatgcaaataatattgtatcatctccggagcagccacgcaagagaacaaaagttctcaggctgttatttttgtacccttttttacataaaatacaaaggagttgatacaatgagcctaaaatatgcatacggatatatccgtgtatccacgcacgatcaggaagaaatc

SEQ ID NO: 19140 - DNA, 260 bp, Unknown
  Description of Unknown: LeftRegion for integrase B6141 sequence
tagaattacagtaaaatactaaaaaatccccggtgttaccagcaccagggaaaacgagaaaactatagggtgtttggaacacagtacaattctctccctcacaaagattattgtatcacaaaaatccggcaccgtataggtgttatttttgtacccatttttgtgcgacgtcgcacatataattacaggaaggtgatacaatgagcgtaaaatatgcatacggatatatccgtgtatccacgcacgatcaggaagaaatc

SEQ ID NO: 19141 - DNA, 260 bp, Unknown
  Description of Unknown: LeftRegion for integrase B6142 sequence
acagttttataagtaaaaaccgcccctgttggcgcaaggacggttcaaagactaatgccccgaaggatacaccagtacgttcaataattagtgtatcatcttcgggcagtcactgcaagcggaacacttgttcctcgctggctgttatttttgtactcatttttagtgcgacgtcgcacatatatactaaggaaggtgatatgatgagtgaattaagatatgcctacggttatatccgtgtatccacgcacgatcaggaa

SEQ ID NO: 19142 - DNA, 260 bp, Unknown
  Description of Unknown: LeftRegion for integrase B6143 sequence
taaaaaaaccgctcctgcgccaacaggaacggtcgagcgatgaaacatacaccaatatgtttctcattaagttctccgaagagatactcaaactgcaaataatattgtatcatctccggagcagccacgcaagagaacaaaagttctcgggctgttatttttgtacccttttttacataaaatacaaaggagctgatacaatgagcctaaaatatgcatacggatatatccgtgtatccacgcacgatcaggaagaaatc

SEQ ID NO: 19143 - DNA, 260 bp, Unknown; identical to SEQ ID NO: 19120
  Description of Unknown: LeftRegion for integrase B6144 sequence

SEQ ID NO: 19144 - DNA, 260 bp, Unknown
  Description of Unknown: LeftRegion for integrase B6145 sequence
tttaaaagaataagtaaaaaccgctcctgcgtcaacaggaacggctcaaagactaatgccccgaaggatacaccagtacgttcaataaatagtgtatcatcttcggagcagtcacgcaagcggaacacttgttcctcgctggctgttatttttatacgcaaaattgtgcgacgtcgcacatatatactaaggaaggtgatatgatgagtgaattaagatatgcctatggctatatccgcgtatccacgcacgatcaggaa

SEQ ID NO: 19145 - DNA, 260 bp, Unknown
  Description of Unknown: LeftRegion for integrase B6146 sequence
cgttatataaacattttttcaaaacaaaaccgctcctgcgccaacaggaacggctcaagactaatgccccgaaggatacaccagtacgttcaaaatatagtatatcatcttcgggcagccaccgcaagcagaactcatgttcttctgctggctgttatttttgtacccttttttacataaaatacaaaggagctgatacaatgagcctaaaatatgcatacggatatatccgtgtatccacgcacgatcaggaagaaatc

SEQ ID NO: 19146 - DNA, 260 bp, Unknown
  Description of Unknown: LeftRegion for integrase B6147 sequence
taaaagcgcattgattccttcagatgaaatccggtcagaagaacttctggcggaacaaaaatttgaagcgtttatcacttcgctggcacatatcatcgagaaatatggtatgagagtgctgggcgaggttgacggagctgcgtgagaatcgcagctttacataggatattttccaaaagtaaattttggaggtatgaattatgaatcgatatggaaaacgctgtgttttgtatccgagggtcagcacagagatgcaagtg

SEQ ID NO: 19147 - DNA, 260 bp, Unknown
  Description of Unknown: LeftRegion for integrase B6148 sequence
gctgaataaaaaaaagaaatcgccaccccgttggctcagggtggctcgcatatccgaagatatactatatctgattgttcaagtcatattgtatcatcttcggagcagtcttgcaagcggaacacttgttccttgctggctgttatttttatacgcaaatttgtgcgacgtcgcacatatatactaaagaaggtgatatgatgagtgaattaagatatgcctatggctatatccgtgtatccacgcacgatcaggaagaa

SEQ ID NO: 19148 - DNA, 260 bp, Unknown
  Description of Unknown: LeftRegion for integrase B6149 sequence
tataataactatttttcgaaaatatgtcaacagcccggacggcaatccggactgctgataaaaacactctgatgtgatacgcaatacatacagaatgccccaaacaagcatattgtatcacatcagaacacccgattcaacgcaacaggtgttctttttgtacccatttttagataaacataggataaggatgtgatcgtatgaaacaattaaaagaagtatgcgcctatattcgagtctctaccggcaagcaggaggag

SEQ ID NO: 19149 - DNA, 260 bp, Unknown
  Description of Unknown: LeftRegion for integrase B6150 sequence
caacaaaaaactcgaaataaaatgaagaaaaccgcccctgcgccaacagagacggtaatacatatccgaagatatgcaatctgaagccaagaatattgtatcatcttcgaaacagtttaacaatcagaacatatattctattgttagctgttatttttgtaccctttcatcaatacaatcagataaaggagtgatacagtatgaaaatcggagcattatatgtccgtgtcagtactcataaccaagatgagttatcacca

SEQ ID NO: 19150 - DNA, 260 bp, Unknown
  Description of Unknown: LeftRegion for integrase B6151 sequence
gcttcgcaatttggaaaacatctgcaagctaaaatccaagagcaagtgaacagcgaaagcaattcttctcttttacttgaacagatgaacgaattgtttaacaatgtttccaaattgtccgaaactgaacaaaaagctttttataccggacttgtaaaagggatagagcgttgggaaaatgaacagaagggggaataataatgccggaagcattaaacgcggtcatatacgcccgctattcctccgatcgtcagacagaa

SEQ ID NO: 19151 - DNA, 260 bp, Unknown
  Description of Unknown: LeftRegion for integrase B6152 sequence
agagagttatcatgttaacgaagaaaaaccgcccggtattggcgtaccgaacggctttgaatatatccgaagatataccataatttagcaaatatattgtatcatcttcgggcacagcctgcaatcggaacatttgttcaacgctggctgttatttttgtacctatttttacatacattattcaagcaagaggtgatataatgcaagatattatttatggtgccctctatatccgtgtaagcacccacggaaaacaggaa

SEQ ID NO: 19152 - DNA, 260 bp, Unknown
  Description of Unknown: LeftRegion for integrase B6153 sequence
ccgttacgctggaagaatccggctatacctataccgcaaactaaaaaaaacgccgcccgctgcaaacaggcgacgttcttgccgggcgcgtgttccggcgctctgctgctgcaaacggcaaagcgcccgcgtcgggcggcggttcgttagaccgcccttattataacacgcgccctcgaaaaataaaagggggctatctcatgcgcgttgttggttatgcgcgtgtatctaccagggaacaggccgaccacggctattct

SEQ ID NO: 19153 - DNA, 260 bp, Unknown
  Description of Unknown: LeftRegion for integrase B6154 sequence
accgttacgctggaagaatccggctatacctataccgcaaactaaaaaaacgccgcccgctgcaaacaggcgacgttcttgccgggcgcgtgttccggcgctctgctgctgcaaacggcaaagcgcccgcgtcgggcggcggttcgttagaccgcccttattataacacgcgccctcgaaaaataaaagggggctatctcatgcgcgttgttggttatgcgcgtgtatctaccagggaacaggccgaccacggctattct

SEQ ID NO: 19154 - DNA, 260 bp, Unknown
  Description of Unknown: LeftRegion for integrase B6155 sequence
gtatcgttggattatcttgaggggttatcggatgatagaaacggaataactaaagagaaggaagctcttgtatctaattttttaaaatatttagttgaaactgggataataaaagatgaaaataatatagataaatccaccgaagaattaatattagcaatggttagaaaagaaattgcaaaattaaaggatggtgattaatgttgagaatagctatttatactagaaagtcagtttttaaagagaatagcgagagtata

SEQ ID NO: 19155 - DNA, 260 bp, Unknown
  Description of Unknown: LeftRegion for integrase B6156 sequence
ttttggaaagattacaaatacaataacaaacagcccggacggcaatccggactgctgataaaaacactctgatgtgatacgcaatacatacagaatgccccaaacaagcatattgtatcacatcagagcacccgattcaacgcaacaggtgttctttttgtacccatttttagataaacataggataaggatgtgatcgtatgaaacagttaaaagaagtatgcgcctatattcgcgtctctaccggcaagcaggaggag

SEQ ID NO: 19156 - DNA, 260 bp, Unknown
  Description of Unknown: LeftRegion for integrase B6157 sequence
accgttacgctggaagaatccggctatacctataccgcaaactaaaaaaacgccgcccgctgcaaacaggcgacgttcttgccgggcgcgtgttccggcgctttgctgctgcaaacggcaaagcgcccgcgtcgggcgtcggttcgttagaccgcccttattataacacgcgccctcgaaaaataaaagggggctatctcatgcgcgttgttggttatgcgcgtgtatctaccagggaacaggccgaccacggctattct

SEQ ID NO: 19157 - DNA, 260 bp, Unknown
  Description of Unknown: LeftRegion for integrase B6158 sequence
aggaaatcacagaaaaatggataggctattttggacagatcgattactattgctaaaataaaaaaatcccccttcctgcgccaacaggaaagggaatttcataaagcggtcgtaagatacaaccacacttagcaactgtattgtatcataagaccgctctttttgctataccctaaatataggaaaaggaggtcttttgtatggtagctatttacgcaagacaatccatcgacaaaaaagacagcatcagcatcgaaagc

SEQ ID NO: 19158 - DNA, 260 bp, Unknown; identical to SEQ ID NO: 19154
  Description of Unknown: LeftRegion for integrase B6159 sequence

SEQ ID NO: 19159 - DNA, 260 bp, Unknown
  Description of Unknown: LeftRegion for integrase B6160 sequence
gtcctcaacgcgcttcaagataagggccttgagattatcagggtagaaaccaactctgttcctgaccaaggtatcagcggcgcagaccgttacgacacgctcataacgtacagatagcaaaatgccctgtatccatccgccaagaccagatacagggcgcgccattccgtagacaactgaaaaggcaaggtgataataccatggcaaagggaaaccgtgctgccatttatgcacgttttagctcgcacaaccagcgagac

SEQ ID NO: 19160 - DNA, 260 bp, Unknown
  Description of Unknown: LeftRegion for integrase B6161 sequence
accgttacgctggaagaatccggctatacctataccgcaaactaaaaaaacgccgcccgctgcaaacaggcgacgttcttgccgggcgcgtgttccggcgctctgctgctgcaaacggcaaagcgcccgcgtcgggcggcggttcgttagaccgcccttattataacacgcgccctcgaaaaataaaagggggctatttcatgcgcgttgttggttatgcgcgtgtatctaccagggaacaggccgaccacggctattct

SEQ ID NO: 19161 - DNA, 260 bp, Unknown
  Description of Unknown: LeftRegion for integrase B6162 sequence
caccgttacgctggaagaatccggctatacctataccgcaaactaaaaaacgccgcccgctgcaaacaggcgacgttcttgccgggcgcgtgttccggcgctctgctgctgcaaacggcaaagcgcccgcgtcgggcggcggttcgttagaccgcccttattataacacgcgccctcgaaaaataaaagggggctatctcatgcgcgttgttggttatgcgcgtgtatctaccagggaacaggccgaccacggctattct

SEQ ID NO: 19162 - DNA, 260 bp, Unknown
  Description of Unknown: LeftRegion for integrase B6163 sequence
ctcctgcgccaacaggaacggtcaactggggaagcacacgccaatgtgctttagtaactccgaagagatactgtcttaccaaagaatattgtatcatcttcggtgcagccacgcaagcggaacacttgttcctcgctggctgttatttttatactcatcttccggctcttgccggaataaactcaaccgaggtgatgtaaatggaaactaaatatggatatggttatgtcagagtgtctacagataagcaggaagaactc

SEQ ID NO: 19163 - DNA, 260 bp, Unknown
  Description of Unknown: LeftRegion for integrase B6164 sequence
taatttcacaatcacagcgcaaagtaaaaaccgctcctgctaccaacaggaacggcttaatgaatactatacagtgccaaggcacgtacaataccccgtgacaagagtattgtatcacacttccttggcacctgtacaggtgttatttttatactcattttttgtgcgacgtcgcacatatattataggaaggtgatactatgaatgaagtaagatatgcttttgcatatatccgtgtatccacgcacgatcaggaagaa

SEQ ID NO: 19164 - DNA, 260 bp, Unknown
  Description of Unknown: LeftRegion for integrase B6165 sequence
tcttttgtatatataataactatttttcgaaaatatgtcaacagcccggacggcaatccggactgctgattcaaacactctgatatgatacagaatgccccaaacaagcatattgtatcacatcagagcacctgattcaacgcaacaggtgttctttttgtacccatttttagataaacataggataaggatgtgatcgtatgaaacaattaaaagaagtatgcgcctatattcgtgtctctaccggcaagcaggaggaa

SEQ ID NO: 19165 - DNA, 260 bp, Unknown
  Description of Unknown: LeftRegion for integrase B6166 sequence
aaaatgttgttaatcatagaataaagtcaacagcccggacggcaatccggactgctgataaaaacactctgatgtgatacgcaatacatacagaatgccccaaacaagcatattgtatcacatcagaacacccgattcaacgcaacaggtgttctttttgtacccatttttagataaacataggataaggatgtgatcgtatgaaacaattaaaagaagtatgcgcctatattcgagtctctaccggcaagcaggaggag

SEQ ID NO: 19166 - DNA, 260 bp, Unknown; identical to SEQ ID NO: 19152
  Description of Unknown: LeftRegion for integrase B6167 sequence

SEQ ID NO: 19167 - DNA, 260 bp, Unknown; identical to SEQ ID NO: 19152
  Description of Unknown: LeftRegion for integrase B6168 sequence

SEQ ID NO: 19168 - DNA, 260 bp, Unknown
  Description of Unknown: LeftRegion for integrase B6169 sequence
gcagccgtcgcccattgttaggagatgcgggagtgccgccccgcctgctataccattttgttgatattaacaaaatggtataaaaaataacccccagtgttggcacaccgaggactattttttattatttacacaattatttgttagtacacttttattataccacacattggtgtaatatgcaagcagaaaggattaagatgaaagcagtaatatacgcccgctatagcagcaacaatcaaacagagcagagcatagaa

SEQ ID NO: 19169 - DNA, 260 bp, Unknown
  Description of Unknown: LeftRegion for integrase B6170 sequence
tgccggtgctggaagatctggcggaatatttccgtgaaaattaacctaatctaaaaaataaaaaaatcccccttcctgcgccaacaggaaagggaatttcataaagcggtcgtaagatacaaccacatgtcgcaactgtattgtatcataagaccgctctttttgctataccctaaatataggaaaaggaggtcttttgtatggtagctatttacgcaagacaatccatcgacaaaaaagacagcatcagcatcgaaagc

SEQ ID NO: 19170 - DNA, 260 bp, Unknown; identical to SEQ ID NO: 19152
  Description of Unknown: LeftRegion for integrase B6171 sequence

SEQ ID NO: 19171 - DNA, 260 bp, Unknown
  Description of Unknown: LeftRegion for integrase B6172 sequence
tatgaatgaagctttttcttaaacagtaatgctacgtgatatggaattttatttaaaataaaaaaattccctctcctgttggcgcaggaaagggaatttcataaagcggtcgtaaaatacaaccacacttagcaactgtattgtatcataagaccgctctttttgctataccctaaatataggaaaaggaggtcttttgtatggtagctatttacgcaagacaatccatcgacaaaaaagacagcatcagcatcgaaagc

SEQ ID NO: 19172 - DNA, 260 bp, Unknown
  Description of Unknown: LeftRegion for integrase B6173 sequence
gtcgctgaacatcctgccggaacgctgtgcgctggtagagagcgagccggagcgcacccaagggctgcggcagatgctggtggacaactactcggtgttctacattgtgggcgaggataccgtgtcggtggctcgtgtgctgtacagtgcatccgaccttgtgcgccgcctgcggagaatgaagtgaaaggggtattcgcatgaccgccgtaatctacgctcgctattccagcgataatcagcgcgaagaatccatcgaa

SEQ ID NO: 19173 - DNA, 260 bp, Unknown; identical to SEQ ID NO: 19153
  Description of Unknown: LeftRegion for integrase B6174 sequence

SEQ ID NO: 19174 - DNA, 260 bp, Unknown
  Description of Unknown: LeftRegion for integrase B6175 sequence
cgttgtatttgcaagcgaaaagtatcaacctatatatgcaaatgaaattagtcacttccaaatattaggaaggctatgtactgtaatcacaagttatgatgatgaagaataacgaaaaataaccatctttcgatgattattcccctacctcattcggctatctaggctcacattataacattttaagaaaaggaaacaatatgaaagaacttataccagccgttatatatgcaagattttcttcatctggacaacgtgaa

SEQ ID NO: 19175 - DNA, 260 bp, Unknown
  Description of Unknown: LeftRegion for integrase B6176 sequence
gtcactgaacatcctgccggaacgctgtgcgctagtggaaagcgagccggagcgcacccaagggctgcggcagatgctggtggataactactcggtgttctacattgtgggcgatgataccgtgtcggtggctcgtgtgctgtacagtgcatctgaccttgtgcgccgcctgcggagaatgaagtgaaaggggtgtttgcatgaccgccgtgatctatgcccgctattccagcgacaaccagcgcgaagaatccatcgaa

SEQ ID NO: 19176 - DNA, 260 bp, Unknown
  Description of Unknown: LeftRegion for integrase B6177 sequence
ataaaaaccgccccttcgccaaaagggacggctccggaagaaacactcgccaatgtgcttcttgggtaactccgaagagatactactcaaccaaggaatattgtatcatcttcggtcagtcagtgcaagtggaacgcacgttcctcgctggctgttatttttatacttattttcacataaaataaagaaggtgatgtaacatggaaactaaatatggatacggttatgtccgggtgtccacagataagcaggaagaactt

SEQ ID NO: 19177 - DNA, 260 bp, Unknown
  Description of Unknown: LeftRegion for integrase B6178 sequence
aaaagaaataaaaaagaaatcgccacccagttggctcagggtggctcgcatatccgaagatatactatatctgattgttcaagtcatattgtatcatcttcgggcagctatcgcaagcggaacatctgttctttgctggctgttatttttgtactcatttttagtgcgacgtcgcacatatattataggaaggtgatactatgaatgaagtaagatatgcttttgcatatatccgtgtatccacgcacgatcaggaagaa

SEQ ID NO: 19178 - DNA, 260 bp, Unknown
  Description of Unknown: LeftRegion for integrase B6179 sequence
aaacacgacgttcgtcgataccccgtccaagggcgagtccgagccgttcgagatttcctgcttcaacatgcccgagcactcctcgttcgaggtatacgcccaggtctggtagcggcaaagtgaaaccccgcaggtcgaagcgcgccaacgctgctgcggggtttaccagatagccgcccgtttggagggcatcctagattatgccagaagatataaagaccgccgtcatatacgcccgcttctcgtgctcgaagcagcgc

SEQ ID NO: 19179 - DNA, 260 bp, Unknown
  Description of Unknown: LeftRegion for integrase B6180 sequence
tattctcctgataaaatcgggattcaaagtttttaattgggtactacacgcacaacatttattaaaacctgcttaaataaaaacgctccgcccatgttaccattatgaacgaagcaaagtattcaattcacttttttcctcgatgcggctcatcaagggattcattcaactgttatcactatttaagggggtgatccaatttgaaagccgttatatatgcccgcttttccagccacaaccagcgcgaagagtccatcgaa

SEQ ID NO: 19180 - DNA, 260 bp, Unknown
  Description of Unknown: LeftRegion for integrase B6181 sequence
aaacacgacgttcgtcgataccccgtccaagggcgagtccgagccgttcgagatttcctgcttcaatatgcccgagcactcctcgttcgaggtatacgcccaggtctggtagcggcaaagtgaaaccccgcaggtcgaagcgcgccaacgctgctgcggggtttaccagatagccgcccgtttggagggcatcctagattatgccagaagatataaagaccgccgtcatatacgcccgcttctcgtgctcgaagcagcgc

SEQ ID NO: 19181 - DNA, 260 bp, Unknown; identical to SEQ ID NO: 19153
  Description of Unknown: LeftRegion for integrase B6182 sequence

SEQ ID NO: 19182 - DNA, 260 bp, Unknown
  Description of Unknown: LeftRegion for integrase B6183 sequence
aaaaaaccgtcccttcgccaaaagggacggcactggaagaaacacacgccaatgtgcttcttttggtaactccgaagagatactactcaaccaaagaatattgtatcatcttcggtcagtcagtgcaagcggaacgcacgttcctcgctggctgttatttttatacttattttcacataaaataaagaaggtgatgtaacatggaaactaaatatggatacggttatgtccgggtgtccacggataagcaggaagaactt

SEQ ID NO: 19183 - DNA, 260 bp, Unknown
  Description of Unknown: LeftRegion for integrase B6184 sequence
cgttacgctggaagaatccggctatacctataccgcaaactagaaaaaaacgccgcccgctgcaaacaggcgacgttcttgccgggcgcgtgttccggcgctctgctgctgcaaacggcaaagcgcccgcgtcgggcggcggttcgttagaccgcccttattataacacgcgccctcgaaaaataaaagggggctatctcatgcgcgttgttggttatgcgcgtgtatctaccagggaacaggccgaccacggctattct

SEQ ID NO: 19184 - DNA, 260 bp, Unknown
  Description of Unknown: LeftRegion for integrase B6185 sequence
ctcctgcgccaacaggaacggtcaactggggaagcacacgccaatgtgctttagtaactccgaagagatactgtcttaccaaagaatattgtatcatcttcggtgcagccacgcaagcggaacacttgttcctcgctgactgttatttttatactcatcttccggctcttgccggaataaactcaaccgaggtgatgtaaatggaaactaaatatggatatggttatgtcagagtgtctacagataagcaggaagaactc

SEQ ID NO: 19185 - DNA, 260 bp, Unknown; identical to SEQ ID NO: 19153
  Description of Unknown: LeftRegion for integrase B6186 sequence

SEQ ID NO: 19186 - DNA, 260 bp, Unknown
  Description of Unknown: LeftRegion for integrase B6187 sequence
atccctgaacatcctgccagagcgctgtgcgctagtggaaagtgagccggagcgcactcaagggctgcggcagatgctggtggacaactactcggtgttctacattgtgggcggggatgctgtttcggtggctcgtgtgctgtacagcgcatccgaccttgtgcgccgcctgcggagaatgaagtgaaaggggtgtttgcatgaccgccgtgatttacgcccgctattccagcgataaccagcgcgaagaatccatcgaa

SEQ ID NO: 19187 - DNA, 260 bp, Unknown
  Description of Unknown: LeftRegion for integrase B6188 sequence
ataaaaccgccccttcgccaaaagggacggcactggaagaaacacacgccaatgtgcttctttgggtaactccgaagagatactactcaaccaaagaatattgtatcatcttcgggcagtcagtgcaagcggaacacacgttcctcgctggctgttatttttatacttattttcacataaaataaagaaggtgatgtaacatggaaactaaatatggatacggttatgtccgggtgtccacggataagcaggaagaactt

SEQ ID NO: 19188 - DNA, 260 bp, Unknown
  Description of Unknown: LeftRegion for integrase B6189 sequence
aagtgctcaacggactccaggataaaggactcgaaattatccgcgttgagacaaactcggttcccaatcagggtatcggcggagcagaccgctacgacacgctcattacgtatcgatagcaaaatgccctgcactcggtcttggcggattagtgcagggctcgccattccagaaaaatgaaaaggcaaggtgataataccatgaccaaaggtagtcgtgcggccatctatgcacgctttagctcgcacaaccagcgcgat

SEQ ID NO: 19189 - DNA, 260 bp, Unknown
  Description of Unknown: LeftRegion for integrase B6190 sequence
accgttacgctggaagaatccggctatacctataccgcaaactaaaaaaacgccgcccgctgcaaacaggcgacgttcttgccgggcgcgtgttccggcgctctgctgctgcaaacagcaaagcgcccgcgtcgggcggtggttcgttagaccgcccttattataacacgcgccctcgaaaaataaaagggggctatctcatgcgcgttgttggttatgcgcgtgtatctaccagggaacaggccgaccacggctattct

SEQ ID NO: 19190 - DNA, 260 bp, Unknown
  Description of Unknown: LeftRegion for integrase B6191 sequence
ttgaaaagtggctttcctacttcggtagtatctcttacttctgctaactggttgtcacctctctcgcgggaggtgtggattgaaaaaaagaaatatcaaaatgtgtccgacttggacacattagcaccccgtcccggctgtggccggggcagggtgcttgttaattatcaaaatccctagctatggacaggggggattccatggacgcagcacaatacctccgcaagagccgtatggaggagggcctggacaccgaggag

SEQ ID NO: 19191 - DNA, 260 bp, Unknown
  Description of Unknown: LeftRegion for integrase B6192 sequence
gtacaaaaaaaggctgataacctttctggagtatgggaaaatctcaaaaaagttagaaaaaagaagcgatttgtgatagactttccaaacctttgacggtataatccttgctaatcctagcggggctataccgtcaaatttttatacactgttcgaagcccgtcgcaaaggatgaagaaacaagggaaataggagaaaacatgcaggtaacaaagataacaaaaacaatatgcgaaaagccaagggtgtgcgcttatgca

SEQ ID NO: 19192 - DNA, 260 bp, Unknown
  Description of Unknown: LeftRegion for integrase B6193 sequence
accgttacgctggaagaatccggctatacctataccgcaaactaaaaaaacgccgcccgctgcaaacaggcgacgttcttgccgggcgcgtgttccggcgctctgctgctgcaaacggcaaagcgcccgcgtcgggcggcggttcgttagaccgcccttattataacacgcgccctcgaaaaataaaagggggctatctcatgcgcgttgttggttatgcgcgtgtatctaccagagaacaggccgaccacggctattct

SEQ ID NO: 19193 - DNA, 260 bp, Unknown
  Description of Unknown: LeftRegion for integrase B6194 sequence
cgggcagccgtcacccattgttaggagatgcgggagtgccgccccgcctgctataccattttgccgacgttgacaaaatggtataaaagaaaaccgcccagtgcggcaacactggacggaaaaaataaaaataacaaaaagtttgtgcattgcttattatatcatattttgatatggtaagcaagcggaaaggaattaaaatgaaagcagtaatctacgcccgctatagcagtaataaccaaacagagcagagcatagag

SEQ ID NO: 19194 - DNA, 260 bp, Unknown
  Description of Unknown: LeftRegion for integrase B6195 sequence
cttgaatacgcgaattaattaagaaaaaccgcccggtattggcgtaccgaacggctttgaatatatccgaagatataccataatttagcaaatatattgtatcatcttcggaaacagcccgcaagcagaacgtctgttcaacgttggctgttatttttgtacctatttttacatacattattcaagcaagaggtgatataatgcaagatatgatttatggtgccctctatatccgtgtaagtacccacggaaaacaggaa

SEQ ID NO: 19195 - DNA, 260 bp, Unknown
  Description of Unknown: LeftRegion for integrase B6196 sequence
ttcacatgtaaataacttaaaaccgccccggtacgccaataccggagcagttctagcacaatccgtagattatgcggtgttctctcacaagaatattgtatcatcttcggtgcagccgcacaatccagaacatttgtgcgctgttatttttatacacattttttatgctatttttgaataaaatcaaccgaggtgatgtaatgaaaactaaatatggatatggctatgtacgcgttagcacagacaagcaggaagaactt

SEQ ID NO: 19196 - DNA, 260 bp, Unknown
  Description of Unknown: LeftRegion for integrase B6197 sequence
aaaacattgctttcttctgcaaaataacaacagcccggacggcaatccggactgctgataaaaacactctgatgtgatacgcaatacatacagaatgccccaaacaagcatattgtatcacatcagaacacccgattcaacgcaacaggtgttctttttgtacccatttttagataaacataggataaggatgtgatcgtatgaaacaattaaaagaagtatgcgcctatattcgagtctctaccggcaagcaggaggag

SEQ ID NO: 19197 - DNA, 260 bp, Unknown
  Description of Unknown: LeftRegion for integrase B6198 sequence
caaacgattggaaaacattgctttcttctgcaaaataacaacagcccggactgcaatccaggctgctgataaaaacactctgatgtgatacagaatgccccaaacaagcatattgtatcacatcagagcacccgattcaacgcaacaggtgttctttttgtacccatttttagataaacataggataaggatgtgatcgtatgaaacaattaaaagaagtatgcgcctatattcgtgtctctaccggcaagcaggaggag

SEQ ID NO: 19198 - DNA, 260 bp, Unknown
  Description of Unknown: LeftRegion for integrase B6199 sequence
gtcgctggacatcctgccggaacgatgtgcgctggtggaaagtgagccggagcgcacccaagggctgcggcagatgctggtggacaactactcggtgttctacattgtgggcgaggatgccgtgtcggtggctcgtgtgctgtacagtgcatccgaccttgtgcgccgcctgcggagaatgaagtgaaaggggtgttcgcatgaccgccgtgatctatgctcgctattccagcgataaccagcgtgaggaatccatcgaa

SEQ ID NO: 19199 - DNA, 260 bp, Unknown
  Description of Unknown: LeftRegion for integrase B6200 sequence
aaataaaacggaaaaaccgctcctgctaccaacaggaacggctcaaagactaatgccccgaaggatacaccagtacgttcaataattagtgtatcatcttcggagcagtcacgcaagcggaacatctgttctttgctggctgttatttttatactcattttttgtgcgacgtcgcacatatattataggaaggtgatactatgaatgaagtaagatatgcttttgcatatatccgtgtatccacgcacgatcaggaagaa

SEQ ID NO: 19200 - DNA, 260 bp, Unknown; identical to SEQ ID NO: 19187
  Description of Unknown: LeftRegion for integrase B6201 sequence

SEQ ID NO: 19201 - DNA, 260 bp, Unknown
  Description of Unknown: LeftRegion for integrase B6202 sequence
aaacacgacgttcgtcgataccccgtccaagggcgagtccgagccgttcgagatttcctgcttcaacatgccagagcactcctcgttcgaggtatacgcccaggtctggtagcggcaaagtgaaaccccgcaggtcgaagcgcgccaacgctgctgcggggtttaccagatagccgcccgtttggagggcatcctagattatgccagaagatataaagaccgccgtcatatatgcccgcttctcgtgctcgaagcagcgc

SEQ ID NO: 19202 - DNA, 260 bp, Unknown; identical to SEQ ID NO: 19152
  Description of Unknown: LeftRegion for integrase B6203 sequence

SEQ ID NO: 19203 - DNA, 260 bp, Unknown
  Description of Unknown: LeftRegion for integrase B6204 sequence
ataaaaaccgccccttcgccaaaagggacggctccggaagaaacactcgccaatgtgcttcttgggtaactccgaagagatactactcaaccaaggaatattgtatcatcttcggtcagtcagtgcaagcggaacgcacgttcctcgctggctgttatttttatacttattttcacataaaataaagaaggtgatgtagcatgaaaactaaatacggatacggttatgtccgggtgtccacagataagcaggaagaactt

SEQ ID NO: 19204 - DNA, 260 bp, Unknown
  Description of Unknown: LeftRegion for integrase B6205 sequence
tcacacgaacatttttgtcaatttaaaaccgccctgctctaccaaagcaaggcggcaagctcccgaatgatacagaagccctcaacaagcacattgtatcattctcggagcagctacgcaagcggaacacccgttccacgctggctgttatttttgtatccaaaaatcaatacaatatagagaaagaggtgtaatgtgctatgaaagaaaaagtttcagaacgcaaaacaggggcaatctacatccgtgtatccaccgac

SEQ ID NO: 19205 - DNA, 260 bp, Unknown
  Description of Unknown: LeftRegion for integrase B6206 sequence
taacaaaagaataataaaaattccccggtgtctaccaaacaccagggaaaatcccgagtaatatatacggcgaaggattcgctcgatacagtactccctcaacaagaatattgtatcacaaaaatccggcaccgtataggtgttatttttgtacccatttttgtgcgacgtcgcacatataattacaggaaggtgatacaatgagcgtaaaatatgcatacggctatatccgggtatccacacacgatcaggaagaaatc

SEQ ID NO: 19206 - DNA, 260 bp, Unknown
  Description of Unknown: LeftRegion for integrase B6207 sequence
aataacagtagttacaaataaaaacgccccagtgttaccagcactggggcattgagaaaactatactttgaaaggaacttgcggtataatcctctccctcacagagactattatatcacaaattcctggcaccgtataggtgttatttttgtacccatttttgtgcgacgtcgcacatataattacaggaaggtgatacaatgagcgtaaaatatgcatacggctatatccgggtatccactcacgatcaagaagaaatt

SEQ ID NO: 19207 - DNA, 260 bp, Unknown
  Description of Unknown: LeftRegion for integrase B6208 sequence
caccacatttaaatgaataattaataaaaccgtccctgctaccaacagaaacggcttattgaatactatacagtgccaaggcacgatataacattccctgaacaagaatattgtatcacaaaaatccagcaccgtataggtgttatttttgtacccatttttgtgcgacatcgcacatataattacaggaaggtgatgcaatgagcgtaaaatatgcatacggctacatccgtgtatccacacacgatcaggaagagatc

SEQ ID NO: 19208 - DNA, 260 bp, Unknown
  Description of Unknown: LeftRegion for integrase B6209 sequence
gtacctaaaaagtcaagaaccgctcctgcgccaacaggaacggctcaagtaacattccgaagaatgataccccaactcaaaaatattgtatcatcttcggtcagctatcgcaatcagaacatttgtttcttgatagctgttatttttatactcattttcctgctctgtcaggaatagaatgaatcaaccgaggtgatgtcatgaaaactaaatattgttatggttatgttagggtatccacatccggccaagaagaactc

SEQ ID NO: 19209 - DNA, 260 bp, Unknown
  Description of Unknown: LeftRegion for integrase B6210 sequence
aggtaaataatatgagaaccaccactctatagatttataattcctaatttaaagtataatctcattcaattcttttttcatctaaataattaaattatattaatataaatttactatatgctcctccttttttattttatacttctctgttctaactgtattttacacatgatataattatcttgaaaggtggttttataatgaaaacgtgtatatatttaagaaaatctcgtgctgatattgaagcagaaaaagaaggg

SEQ ID NO: 19210 - DNA, 260 bp, Unknown
  Description of Unknown: LeftRegion for integrase B6211 sequence
ttttacataagaaagaaccgcccctgcgccaacaggaacggctctggaatatatccgaagatatacacctaatcaacgaaaatattgtatcatcttcggaacagtcacgcaagccggaacactcgttccatgctggctgttatttttatactcattttcctgctctgtcaggaatagaatgaatcaaccgaggtgatgtcatgaaaactaaatattgttatggttatgttagggtatccacatctggccaagaagagctc

SEQ ID NO: 19211 - DNA, 260 bp, Unknown
  Description of Unknown: LeftRegion for integrase B6212 sequence
tgcagatctgctgaaataaaaaaagaaacgcccctgctgacaacagaggcggatctattgaatactatacagtgccaaggcacgatataacattccgtgaacaagagtattatatcacatttccccggcacctgcataggtgttatttttgtacccatttttgtgcgacgtcgcacatataattacaggaaggtgatacaatgagcgtaaaatatgcatacggctacatccgggtatccactcacgatcaagaagaaatt

SEQ ID NO: 19212 - DNA, 260 bp, Unknown
  Description of Unknown: LeftRegion for integrase B6213 sequence
caatataatacacttttgtcaaactaaataccgccctgctctaccaaagcaaggcggcaagctcccgaatgatacagaagccctcgacaagcatattgtatcattctcggagcagctatgcaagcggaacacccgttccacgctggctgttatttttgtgccccaaaacatacactatagagaaagaggtgtaatatgccatgaaagaaaccttatctgaacgcaaaaccggcgcgatctacatccgtgtatccaccgac

SEQ ID NO: 19213 - DNA, 260 bp, Unknown
  Description of Unknown: LeftRegion for integrase B6214 sequence
aataaatgtaattaataaaaaatccccggtgcctatcaaacaccggggaaatcccgagtaatatatacggcgaaggattcgctcgatacagtactccctcaacaagaatattgtatcacaaaaatccggcaccgtataggtgttatttttgtacccatttttgtgcgacgtcgcacatataattacaggaaggtgatacaatgagcgtaaaatatgcatacggctacatccgggtatccactcacgatcaagaagaaatt

SEQ ID NO: 19214 - DNA, 260 bp, Unknown
  Description of Unknown: LeftRegion for integrase B6215 sequence
aaatttatccatacaaaaaaattccccggtgcctatcaaacaccggggaaatcccgagtaatatatacggcgaaggattcgctcgatacagtactccctcaacaagaatattgtatcacaaaaatccggcaccgtataggtgttatttttgtacccatttttgtgcgacatcgcacatataattacaggaaggtgatacaatgagcgtaaaatatgcatacggctacatccgggtatccactcacgatcaagaagaaatt

SEQ ID NO: 19215 - DNA, 260 bp, Unknown
  Description of Unknown: LeftRegion for integrase B6216 sequence
accatgtaaaaactgctattaaataaaaattccccggtgtctaccaaacaccagggaaaatcccgagtaatatatacggcgaaggattcgctcgatacagtactccctcaacaagattattgtatcacaaaaatctggcaccgtataggtgttatttttgtacccatttttacgtacacttaagaaggaaaggtgatacaatgagcgtaaaatatgcatacggctacatccgggtatccactcacgatcaagaagaaatt

SEQ ID NO: 19216 - DNA, 260 bp, Unknown
  Description of Unknown: LeftRegion for integrase B6217 sequence
tgcattgcagatctgttgaaataaaaaaccgcccctgctaccaacaggaacggcctaatgaatactatacagtgccaaggcacgatataacattccgtgaacaagagtattatatcacatttccctggcacctgcataggtgttatttttatacccatttttgtgcgacatcgcacatataattacaggaaggtgatacaatgagcgtaaaatatgcatacggctatatccgggtatccacacacgatcaggaagaaatc

SEQ ID NO: 19217 - DNA, 260 bp, Unknown
  Description of Unknown: LeftRegion for integrase B6218 sequence
tttttacataagaaagaaccgcccctgcgccaacaggaacggttcaagtaacattccgaagaatgataccccaattcaaagaatattgtatcatcttcggtcagctatcgcaatcagaacatttgtttcttgatagctgttatttttatactcattttcctgctctgtcaggaatagaatgaatcaaccgaggtgatgtcatgaaaactaaatattgttatggttatgttagggtatccacatccggccaagaagagctc

SEQ ID NO: 19218 - DNA, 260 bp, Unknown
  Description of Unknown: LeftRegion for integrase B6219 sequence
tgcagatctgctgaaataaaaaaagaaacgcccctgctgacaacagaggcggatctattgaatactatacagtgccaaggcacgatataacattccgtgaacaagagtattatatcacatttccccggcacctgcataggtgttatttttgtacccatttttgtgcgacatcgcacatataattactggaaggtgatacaatgagagtaaaatatgcatacggctacatccgggtatccactcacgatcaagaagaaatt

SEQ ID NO: 19219 - DNA, 260 bp, Unknown
  Description of Unknown: LeftRegion for integrase B6220 sequence
acaaattattagaattacagtaaaatactaaaaaatccccggtgttaccagcaccagggaaaacgagaaaactatagggtgtttggaacacagtacaattctctccatcacaaagattattgtatcacaaaaatccggcaccgtataggtgttatttttgtacccatttttacgtacacttaagaaggaaaggtgatacaatgagcgtaaaatatgcatacggctacatccgggtatccactcacgatcaagaagaaatt

SEQ ID NO: 19220 - DNA, 260 bp, Unknown
  Description of Unknown: LeftRegion for integrase B6221 sequence
cgttatataataatttcataaataaaaaccgtccctgctaccaacaggaacggcttaatgaatactatacagtgccaaggcacgatataacattccgtgaacaagagtattatatcacatttccctggcacctgcataggtgttatttttgtacccatttttgtgcgacatcgcacatataattacaggaaggtgatacaatgagcgtaaaatatgcatacggctacatccgggtatccactcatgatcaggaagagatc

SEQ ID NO: 19221 - DNA, 260 bp, Unknown; identical to SEQ ID NO: 19208
  Description of Unknown: LeftRegion for integrase B6222 sequence

SEQ ID NO: 19222 - DNA, 260 bp, Unknown
  Description of Unknown: LeftRegion for integrase B6223 sequence
caccacatttaaatgaataattaataaaaccgtccctgctaccaacagaaacggcttattgaatactatacagtgccaaggcacgatataacattccctgaacaagaatattgtatcacaaaaatccagcaccgtataggtgttatttttgtactcatttttgtgcgacgtcgcacatataattacaggaaggtgatacaatgagcgtaaaatatgcatacggctacatccgtgtatccactcatgatcaggaagagatc

SEQ ID NO: 19223 - DNA, 260 bp, Unknown; identical to SEQ ID NO: 19208
  Description of Unknown: LeftRegion for integrase B6224 sequence

SEQ ID NO: 19224 - DNA, 260 bp, Unknown
  Description of Unknown: LeftRegion for integrase B6225 sequence
ataagcagcttaaaaaccgcggcagaatcgctaaaattcagcgattgggaaggcgaatcagacctctctaagctgatcgacgacaggaacagctttgctgaagatttcggagtttctaacagatcatactaaaaaagcgtaaaatatcacacaaaaaacgccctgcggtttcccgcggggtgttgatatatcggaaaggaatggtacttttggacacatactgcatatatctacgaaaatcccgtgccgacgcagaagca

SEQ ID NO: 19225 - DNA, 260 bp, Unknown
  Description of Unknown: LeftRegion for integrase B6226 sequence
gaaacaatcgaagaagcttacgaaatggcttttgacgcattgggattagctatttcactttttgaagatgaaaaacgtccacttcctaagccctcttcacctgataaaattaagctcaataaaaacgaatttatagtaataataaattttgatattctcgaatataaaaagaatgtcaaaactaaaccaggagaccttatatgatagccatatacgcccgtcagtcaatagataaaaaagactccataagtattgagtct

SEQ ID NO: 19226 - DNA, 260 bp, Unknown
  Description of Unknown: LeftRegion for integrase B6227 sequence
gacaataaaataatgtaatataaaaaatccccggtgttaccagcaccagggaaaatgagaaaactataaggtgtttggaacacaatacaattctctccctcacgaagatattgtatcacaaaaatccggcaccgtataggtgttatttttgtacccatttttgtgcgacatcgcacatataattacaggaaggtgatacaatgagcgtaaaatatgcatacggctacatccgggtatccactcatgatcaggaagagatc

SEQ ID NO: 19227 - DNA, 260 bp, Unknown
  Description of Unknown: LeftRegion for integrase B6228 sequence
tagaattacagtaaaatactaaaaaatccccggtgttaccagcaccagggaaaacgagaaaactatagggtgtttggaacacagtacaattctctccatcacaaagattattgtatcacaaaaatccggcaccgtataggtgttatttttgtacccatttttgtgcgacgtcgcacatataattacaggaaggtgatacaatgagcgtaaaatatgcatacggctacatccgggtatccactcacgatcaagaagaaatt

SEQ ID NO: 19228 - DNA, 260 bp, Unknown
  Description of Unknown: LeftRegion for integrase B6229 sequence
aacaataagaatatataaagaaaaaccgccctgatgctggagcaccaaggcggcaaacactgatccgaagatacaatgccctagacaagcatattgtatcattctcggagcagctatgcaagcggaacacccgttccacgctggctgttatttttgtactcaaaaaacaatacaatatagagaaagaggtgtaatgtgctatgaaagaaaaagtatcagaacgcaaaacaggggcaatctacatccgtgtatccaccgac

SEQ ID NO: 19229 - DNA, 260 bp, Unknown
  Description of Unknown: LeftRegion for integrase B6230 sequence
ctatcgcacaataacagtagttacaaataaaaacgccccagtgttaccagcactggggcattgagaaaactatactttgcaaggaacttgcggtataatcctctccctcacagagactattatatcacaaattcctggcaccgtgtaggtgttatttttgtacccatttttacgtacacttaagaaggaaaggtgatacaatgagcgtaaaatatgcatacggctacatccgggtatccacacacgatcaggaagaaatc

SEQ ID NO: 19230 - DNA, 260 bp, Unknown; identical to SEQ ID NO: 19219
  Description of Unknown: LeftRegion for integrase B6231 sequence

SEQ ID NO: 19231 - DNA, 260 bp, Unknown
  Description of Unknown: LeftRegion for integrase B6232 sequence
gttatccacaataaaacaacagaagccccggtgttaccagcaccagagcctctatctttgaatactatacagtgccaaggcacgatataacattccgtgaacaagagtattatatcacatttccctggcacctgcataggtgttatttttgtacccatttttgtgcgatgtcgcacatataattacaggaaggtgatacaatgagcgtaaaatatgcatacggctacatccgggtatccactcatgatcaggaagagatc

SEQ ID NO: 19232 - DNA, 260 bp, Unknown
  Description of Unknown: LeftRegion for integrase B6233 sequence
tatacgcttattaaccgcctaaaaaaacacccctgataccgaaatatcagaggtgttgtgctcccgaatgatacgaaagccctagacaagcatattgtatcattctcggagcagcttcgcaagcggaacacccgtttgacgcaggctgttatttttgtacccaaaaaccaatacaatatagagaaagaggtgcatatgctatgaaagaaaaggtttctgaacgcaaaaccggcgcgatctacatccgtgtatccaccgac

SEQ ID NO: 19233 - DNA, 260 bp, Unknown
  Description of Unknown: LeftRegion for integrase B6234 sequence
tgctaccggacaataaaataatgtaatataaaaaatccccggtgttaccagcaccagggaaaatgagaaaactataaggtgtttggaacacaatacaattctctccctcacaaagattattgtatcacaaaaatccggcaccgtataggtgttatttttgtacccatttttacgtacacttaagaaggaaaggtgatacaatgagcgtaaaatatgcatacggctacatccgggtatccactcatgatcaggaagagatc

SEQ ID NO: 19234 - DNA, 260 bp, Unknown
  Description of Unknown: LeftRegion for integrase B6235 sequence
ttgcagatctgctgaaataaaaaagaaacgcccctgctgacaacagaggcggatctattgaatactatacagtgccaaggcacgatataacattccgtgaacaagagtattatatcacatttccccggcacctgcataggtgttatttttgtacccatttttgtgcgacatcgcacatataattactggaaggtgatacaatgagagtaaaatatgcatacggctacatccgggtatccactcacgatcaagaagaaatt

SEQ ID NO: 19235 - DNA, 260 bp, Unknown
  Description of Unknown: LeftRegion for integrase B6236 sequence
gcagatctgctgaaataaaaaaagaaacgcccctgctgacaacagaggcggatctattgaatactatacagtgccaaggcacgatataacattccctgaacaagagtattatatcacatttccctggcacctgcataggtgttattttttgtacccatttttgtgcgacgtcgcacatataattacaggaaggtgatacaatgagcgtaaaatatgcatacggctacatccgggtatccactcatgatcaggaagagatc

SEQ ID NO: 19236 - DNA, 260 bp, Unknown; identical to SEQ ID NO: 19228
  Description of Unknown: LeftRegion for integrase B6237 sequence

SEQ ID NO: 19237 - DNA, 260 bp, Unknown
  Description of Unknown: LeftRegion for integrase B6238 sequence
tggtgcaatagaaaaaattcaataaaaaattccccggtgtctaccaaacaccagggaaaatcccgagtaatatatacggcgaaggattcgctcgatacagtactccctcaacaagattattgtatcacaaaaatccggcaccgtataggtgttatttttgtacccatttttacgtacacttaagaaggaaaggtgatacaatgagcgtaaaatatgcatacggctacatccgggtatccactcatgatcaggaagaaatc

SEQ ID NO: 19238 - DNA, 260 bp, Unknown
  Description of Unknown: LeftRegion for integrase B6239 sequence
attcctacggagaaaggactcagcccaaaatacctgatgtttgaaggacaggaatttaccttttaagcaataaaaaaggacgtaccgtcccacaacgatacgtctaagtgcttcattggactggagcactatcacaaaaagtccctaccctaatagaggcctttttgcctcttcattataccacaggagagtaaaaaaccatgaatagttgtgtcatttatgctcgtttttcttcagataagcaaagagaggaatctatt

SEQ ID NO: 19239 - DNA, 260 bp, Unknown
  Description of Unknown: LeftRegion for integrase B6240 sequence
tgtcatacatacatttttgtcaatttaaaaccgccctgctctaccaaagcaaggcggcaagctcccgaatgatacagaagccctagacaagcatattgtatcattctcggagcagcttcgcaagcggaacacccgtttgacgcaggctgttatttttgtacccaaaaacatacactatagagaaagaggtgtaatatgccatgaaagaaaccttatctgaacgcaaaaccggcgccatctacatccgtgtatccaccgac

SEQ ID NO: 19240 - DNA, 260 bp, Unknown
  Description of Unknown: LeftRegion for integrase B6241 sequence
aagaaaaataacgaataaaaattccccggtgcctatcaaacaccggggaaatcccgagtaatatatacggcgaaggattcgctcgatacagtactccctcaacaagaatattgtatcacaaaaatccggcaccgtataggtgttatttttgtacccatttttgtgcgacatcgcacatataattacaggaaggtgatacaatgagcgtaaaatatgcatacggctacatccgggtatccactcatgatcaggaagagatc

SEQ ID NO: 19241 - DNA, 260 bp, Unknown
  Description of Unknown: LeftRegion for integrase B6242 sequence
cttacatatttcagaatatggtatcagaaagatgatgatgcagccagcagatccgataatggaaatctttgatttataaataaaaatccccgcccggcgctggaacaccgaacggggaagaagctgtgatacaatcacaaccttagacaagtttattgtatcatagctccctgaaaatgtcaaggagtgataacaaatatatgaaaaccgccgtaatatacgcccgatattcatcggacaagcaaacggagcagtccatc

SEQ ID NO: 19242 - DNA, 260 bp, Unknown; identical to SEQ ID NO: 19212
  Description of Unknown: LeftRegion for integrase B6243 sequence

SEQ ID NO: 19243 - DNA, 260 bp, Unknown
  Description of Unknown: LeftRegion for integrase B6244 sequence
aatatagataataataaaaattccccggtgcctatcaaacaccagggaaaatcccgagtaatatatacggcgaaggattcgctcgatacagtactccctcaacaagaatattgtatcacaaaaatccggcaccgtataggtgttatttttgtacccatttttgtgcgacgtcgcacatataattacaggaaggtgatacaatgagcgtaaaatatgcatacggctacatccgggtatccactcacgatcaggaagagatc

SEQ ID NO: 19244 - DNA, 260 bp, Unknown
  Description of Unknown: LeftRegion for integrase B6245 sequence
cgccaacaagaacggtttccccataatcaatatgaggacgtatataacgtatatatccgaagagatacatacaatactcacaaaaatattgtatcatcttcgggcagctatcgcaagcagaacacacgttccgtgctagctgttatttttatactcatttttgtgcgacatcgcacatataattacaggaaggtgatacaatgagcgtaaaatatgcatacggctacatccgggtatccactcatgatcaggaagaaatc

SEQ ID NO: 19245 - DNA, 260 bp, Unknown; identical to SEQ ID NO: 19226
  Description of Unknown: LeftRegion for integrase B6246 sequence

SEQ ID NO: 19246 - DNA, 260 bp, Unknown
  Description of Unknown: LeftRegion for integrase B6247 sequence
cgccaacaagaacggtttccccataatcaatatgaggacgtatataacgtatatatccgaagagatacatacaatactcacaaaaatattgtatcatcttcgggcagctatcgcaagcagaacacacgttccgtgctagctgttatttttatacccatttttgtgcgacgtcgcacatataattacaggaaggtgatacaatgagcgtaaaatatgcatacggctacatccgtgtatccactcatgatcaggaagagatc

SEQ ID NO: 19247 - DNA, 260 bp, Unknown
  Description of Unknown: LeftRegion for integrase B6248 sequence
cggcgctgatctggacgatgacgaataaataaaaaagcgccgtccctctggaaagggccagcgcttcgaggccgcgtgttacatttgcttcgtgctcctgctggaacaggggcgggctgtacacgggcagttgacatggaaggcaactgcctttattgtaacacgcaggccccagtttgaaaagggggtttttatcctttatgcgtgtgatctgctatgttcgggtatctacccgcgaacaggcggaaaagggctattct

SEQ ID NO: 19248 - DNA, 260 bp, Unknown
  Description of Unknown: LeftRegion for integrase B6249 sequence
tgtttttacgttatccacaataaaacaacagaagccccggtgttaccagcaccagagcctctatctttgaatactatacagtgccaaggcacgatataacattccgtgaacaagagtattatatcacatttccctggcacctgcataggtgttatttttgtacccatttttacgtacacttaagaaggaaaggtgatacaatgagcgtaaaatatgcatacggctacatccgggtatccactcacgatcaagaagaaatt

SEQ ID NO: 19249 - DNA, 260 bp, Unknown
  Description of Unknown: LeftRegion for integrase B6250 sequence
tagaattacagtaaaatactaaaaaatccccggtgttaccagcaccagggaaaatgagaaaactatagggtgtttggaacacagtacaattctctccctcacaaagattattgtatcacaaaaatccggcaccgtataggtgttatttttgtacccatttttgtgcgacgtcgcacatataattacaggaaggtgatacaatgagcgtaaaatatgcatacggctacatccgggtatccactcatgatcaggaagagatc

SEQ ID NO: 19250 - DNA, 260 bp, Unknown
  Description of Unknown: LeftRegion for integrase B6251 sequence
cccttacatatttcagaatatggtatcagaaagatgatgatgcagccagcagatccgataatggaaatctttgatttataaataaaaatccccgctcgatgcgccaacaccgaacggggaagaagctgtgatacaatcacaaccttagacaagtttattgtatcatagctccctgaaaatgtcaaggagtgataaaaaatatgcaaaccgccgtgatatacgcccggtattcgtccgacaagcaaacggagcagtccatt

SEQ ID NO: 19251 - DNA, 260 bp, Unknown
  Description of Unknown: LeftRegion for integrase B6252 sequence
aaataatgtaatataaaaaatcccctggtgcctatcaaacaccagggaaaatcccgagtaatatatacggcgaaggattcgctcgatacagtactccctcaacaagaatattgtatcacaaaaatccagcaccgtataggtgttatttttgtacccatttttgtgcgacgtcgcacatataattacaggaaggtgatacaatgagcgtaaaatatgcatacggctatatccgggtatccacacacgatcaggaagaaatc

SEQ ID NO: 19252 - DNA, 260 bp, Unknown
  Description of Unknown: LeftRegion for integrase B6253 sequence
accatgtaaaaactgctattaaataaaaattccccggtgtctaccaaacaccagggaaaatcccgagtaatatatacggcgaaggattcgctcgatacagtactccctcaacaagaatattgtatcacaaaaatccggcaccgtataggtgttatttttgtacccatttttacgtacacttaagaaggaaaggtgatacaatgagcgtaaaatatgcatacggctacatccgggtatccactcatgatcaggaagagatc

SEQ ID NO: 19253 - DNA, 260 bp, Unknown
  Description of Unknown: LeftRegion for integrase B6254 sequence
agaaaaaattcaataaaaaaatccccggtgtctaccaaacaccagggaaaatcccgagtaatatatacggcgaaggattcgctcgatacagtactccctcaacaagaatattgtatcacaaaaatccagcaccgtataggtgttatttttgtacccatttttgtgcgacgtcgcacatataattacaggaaggtgatacaatgagcgtaaaatatgcatacggctacatccgggtatccactcatgatcaagaagagatc

SEQ ID NO: 19254 - DNA, 260 bp, Unknown
  Description of Unknown: LeftRegion for integrase B6255 sequence
taacataacaataaaaaccgcccctgcgaatcggacactagtcaacaacaggagcggatgcgtgctccgaagatacacgccctagacaagcacattgtatcattctcggagcagctacgcaagcggaacatccgtttgatgtgagctgttatttttgtacccaaaaaccaatacaatatagagaaagaggtgcatatgctatgaaagaaaaagtctcagaacgcaaaaccggcgcgatctacatccgtgtatccaccgac

SEQ ID NO: 19255 - DNA, 260 bp, Unknown
  Description of Unknown: LeftRegion for integrase B6256 sequence
tgtcatacatacatttttgtcaatttaaaaccgccctgctctaccaaagcaaggcggtaagctcccgaatgatacgaaagccctaagcaagcatattgtatcattctcggagcagctatgcaagcggaacacccgttccacgctggctgttatttttgtaccaaaaaacatacactatagagaaagaggtgtaatatgccatgaaagaaaccttatctgaacgcaaaaccggcgcgatctacatccgtgtatccaccgac

SEQ ID NO: 19256 - DNA, 260 bp, Unknown
  Description of Unknown: LeftRegion for integrase B6257 sequence
ttgcagatctgctgaaataaaaaagaaacgcccctgctgacaacagaggcggatctattgaatactatacagtgccaaggcacgatataacattccgtgaacaagagtattatatcacatttccctggcacctgcataggtgttatttttgtacccatttttgtgcgacgtcgcacatataattacaggaaggtgatacaatgagcgtaaaatatgcatacggctacatccgggtatccactcatgatcaggaagagatc

SEQ ID NO: 19257 - DNA, 260 bp, Unknown
  Description of Unknown: LeftRegion for integrase B6258 sequence
ttagcacaataaaataaaaaatccccggtgtctaccaaacaccagggaaaatcccgagtaatatatacagcgaaggattcgctcgatacagtactccctcaacaagaatattgtatcacaaaaatccggcaccgtataggtgttatttttgtacccatttttgtgcgacgtcgcacatataattacaggaaggtgatacaatgagcgtaaaatatgcatacggctacatccgggtatccactcacgatcaagaagaaatt

SEQ ID NO: 19258 - DNA, 260 bp, Unknown
  Description of Unknown: LeftRegion for integrase B6259 sequence
taatacatacatttttgtcaatttaaaaccgccctgctctaccaaagcaaggcggcaagctcccgaatgatacgaaagccctgaacaagcatattgtatcattctcggagcagctacgcaagcggaacacccgttccacgctggctgttatttttgtatccaaaaatcaatacaatatagagaaagaggtgtaatgtgctatgaaagaaaaagtttcagaacgcaaaacaggggcaatctacatccgtgtatccaccgac

SEQ ID NO: 19259 - DNA, 260 bp, Unknown; identical to SEQ ID NO: 19218
  Description of Unknown: LeftRegion for integrase B6260 sequence

SEQ ID NO: 19260 - DNA, 260 bp, Unknown
  Description of Unknown: LeftRegion for integrase B6261 sequence
ttacatttacacttttgtcaaactaaataccgccctgctctaccaaagcaaggcggtaagctcccgaatgatacgaaagccctagacaagcatattgtatcattctcggagcagcttcgcaagcggaacacccgtttgacgcaggctgttatttttgtacccaaaaaccaatacaatatagagaaagaggtgcatatgctatgaaagaaaaggtttctgaacgcaaaaccggtgcgatctacatccgtgtatccaccgac

SEQ ID NO: 19261 - DNA, 260 bp, Unknown; identical to SEQ ID NO: 19256
  Description of Unknown: LeftRegion for integrase B6262 sequence

SEQ ID NO: 19262 - DNA, 260 bp, Unknown
  Description of Unknown: LeftRegion for integrase B6263 sequence
tcaccgtcaagaatgttacccccatttacccgccgcaggagcgggataagcgaagccgtgaggtcgagcggcggctgtttgatgtgtttgtaaagtacgccggacagagggggtaggccggagtcatccttgttgcatgggggcattagaggtataatatagttgtaggttggctcccatttatggaaagggagctaattatggataacagaattgacgcgatttatgggcggcagtcgattgacaaaaaggacagtatc

SEQ ID NO: 19263 - DNA, 260 bp, Unknown
  Description of Unknown: LeftRegion for integrase B6264 sequence
tacttttgaaatcttaaacaaaaataaaaccgttcctgctaccaacaagaacggcttaatgaatactatacagtgccaaggcacgatataacattccgtgaacaagagtattatatcacatttccctggcaccgtataggtgttatttttgtacccatttttgtgcgacgtcgcacatataattacaggaaggtgatacaatgagcgtaaaatatgcatacggctacatccgggtatccactcacgatcaagaagaaatt

SEQ ID NO: 19264 - DNA, 260 bp, Unknown
  Description of Unknown: LeftRegion for integrase B6265 sequence
catcgccgggtattggaacttcagcagaaaaagaaactgacgaattatcgtctctacacagacttgaagctgaatcccggcaatgtgaatgcatggctcaaacataacgattccagcaaaatgagcctcgactgtgcgcgccagatctacaagtatgcaaaaagctacccatctgttcgataaaaaaaggaagtgagtctatgaccgccgtaatctatgcccgctattcatcggataaccagcgcgaagaatctatcgaa

SEQ ID NO: 19265 - DNA, 260 bp, Unknown; identical to SEQ ID NO: 19219
  Description of Unknown: LeftRegion for integrase B6266 sequence

SEQ ID NO: 19266 - DNA, 260 bp, Unknown
  Description of Unknown: LeftRegion for integrase B6267 sequence
cgccaacaagaacggtttccccataatcaatatgaggacgtatataacgtatatatccgaagagatacatacaatactcacaaaaatattgtatcatcttcgggcagctatcgcaagcagaacacacgttccgtgctagctgttatttttatacccatttttgtgcgacatcgcacatataattacaggaaggtgatacaatgagcgtaaaatatgcatacggctacatccgtgtatccactcatgatcaggaagagatc

SEQ ID NO: 19267 - DNA, 260 bp, Unknown
  Description of Unknown: LeftRegion for integrase B6268 sequence
cggcgctgatctggacgatgacgaataaataaaaaagcgccgtccctctggaaagggccagcgcttcgaggccgcgtgttacatttgcttcgtgctcctgctggaacaggggcgggctatacacgggcagttgacatggaaggcaactgcctttattgtaacacgcaggccccagtttgaaaagggggtttttatcctttatgcgtgtgatctgctatgttcgggtatctacccgcgaacaggcggaaaagggctattct

SEQ ID NO: 19268 - DNA, 260 bp, Unknown
  Description of Unknown: LeftRegion for integrase B6269 sequence
tgcagatctgctgaaataaaaaaagaaacgcccctgctgacaacagaggcggatctattgaatactatacagtgccaaggcacgatataacattccgtgaacaagagtattatatcacatttccctggcacctgcataggtgttatttttatacccatttttgtgcgacatcgcacatataattacaggaaggtgatacaatgagcgtaaaatatgcatacggctacatccgggtatccactcatgatcaggaagagatc

SEQ ID NO: 19269 - DNA, 260 bp, Unknown
  Description of Unknown: LeftRegion for integrase B6270 sequence
tcacacaaacacttttgtcaaataaatagccgccctgctctaccaaagcaaggcggcaagctcccgaatgatacagaagccctcgacaagcacattgtatcattctcggagcagcttcgcaagcggaacacccgtttgtcgcaggctgttatttttgtactcaaaaaccaatacaatatagagaaagaggtgcatgtgctatgaaagaaaaggtttcagaacgcaaaaccggcgcgatctacatccgtgtatccaccgac

SEQ ID NO: 19270 - DNA, 260 bp, Unknown
  Description of Unknown: LeftRegion for integrase B6271 sequence
ttactgacatttaattaagaaaaaggtccccaacgctaccaacgcagaggaccaccaagctcccgaatgatacgaaagccctagacaagcatattgtatcattctcggagcagctgcgcaagcggaacacccgttccacgctggctgttatttttgtacccaaaaatcaatacaatatagagaaagaggtgtaatgtgctatgaaagaaaaagtttcggaacgcaagacaggggcgatctacatccgtgtatctaccgac

SEQ ID NO: 19271 - DNA, 260 bp, Unknown; identical to SEQ ID NO: 19208
  Description of Unknown: LeftRegion for integrase B6272 sequence

SEQ ID NO: 19272 - DNA, 260 bp, Unknown; identical to SEQ ID NO: 19235
  Description of Unknown: LeftRegion for integrase B6273 sequence

SEQ ID NO: 19273 - DNA, 260 bp, Unknown
  Description of Unknown: LeftRegion for integrase B6274 sequence
aataacagtagttacaaataaaaacgccccagtgttaccagcactggggcattgagaaaactatactttgcaaggaacttgcggtataatcctctccctcacagagactattatatcacaaattcctggcaccgtgtaggtgttatttttgtacccatttttgtgcgacgtcgcacatataattacaggaaggtgatacaatgagcgtaaaatatgcatacggctacatccgggtatccactcatgatcaggaagagatc

SEQ ID NO: 19274 - DNA, 260 bp, Unknown
  Description of Unknown: LeftRegion for integrase B6275 sequence
taccataaatgtcaagaaccgcccctgcgccaacaggaacggctctggaatatatccgaagatatacacctaatcaacgaaaatattgtatcatcttcggtcagctatcgcaatcagaacatttgtttcttgatagctgttatttttatactcatttttctgctctgtcaggaatagaatgaatcaaccgaggtgatgtcatgaaaactaaatattgttatggttatgttagggtatccacatccggccaagaagagctc

SEQ ID NO: 19275 - DNA, 260 bp, Unknown
  Description of Unknown: LeftRegion for integrase B6276 sequence
tagaaaaaattcaataaaaaatccccggtgtctaccaaacaccagggaaaatcccgagtaatatatacggcgaaggattcgctcgatacagtactccctcaacaagaatattgtatcacaaaaatccggcaccgtataggtgttatttttgtacccatttttgtgcaacgtcgcacatataattacaggaaggtgatacaatgagcgtaaaatatgcatacggctacatccgggtatccactcatgatcaggaagagatc

SEQ ID NO: 19276 - DNA, 260 bp, Unknown; identical to SEQ ID NO: 19255
  Description of Unknown: LeftRegion for integrase B6277 sequence

SEQ ID NO: 19277 - DNA, 260 bp, Unknown
  Description of Unknown: LeftRegion for integrase B6278 sequence
taaattaaataaacaatatagataataataaaaaatccccggtgttaccagcaccagggaaaatgagaaaactataaggtgtttggaacacaatacaattctctccctcacaaagaatattgtatcacaaaaatccggcaccgtataggtgttatttttgtacccatttttacgtacacttaagaaggaaaggtgatacaatgagcgtaaaatatgcatacggctacatccgggtatccactcatgatcaggaagagatc

SEQ ID NO: 19278 - DNA, 260 bp, Unknown
  Description of Unknown: LeftRegion for integrase B6279 sequence
tgtcatacatacatttttgtcaatttaaaaccgccctgctctaccaaagcaaggcggcaagctcccgaatgatacagaagccctagacaagcatattgtatcattctcggagcagcttcgcaagcggaacacccgtttgacgctggctgttatttttgtacccaaaaacatacactatagagaaagaggtgtaatatgccatgaaagaaaaagtctcagaacgcaaaaccggcgcgatctacatccgtgtatccaccgat

SEQ ID NO: 19279 - DNA, 260 bp, Unknown; identical to SEQ ID NO: 19233
  Description of Unknown: LeftRegion for integrase B6280 sequence

SEQ ID NO: 19280 - DNA, 260 bp, Unknown
  Description of Unknown: LeftRegion for integrase B6281 sequence
gttacatttacacttttgtcaaactaaataccgccctgctctaccaaagcaaggcggcaagctcccgaatgatacagaagccctagacaagcatattgtatcattctcggagcagctacgcaagcggaacacccgttccacgctggctgttatttttgtacccaaaaacatacactatagagaaagaggtgtaatatgccatgaaagaaaccctatctgaacgcaaaaccggcgcgatctacatccgtgtatccaccgac

SEQ ID NO: 19281 - DNA, 260 bp, Unknown
  Description of Unknown: LeftRegion for integrase B6282 sequence
gtcatctatcagctatcgacctgtcataggctaacctatcggtaaatgatatatatcatacaaagattaatatttcaaatttaaaaagcaagaaagcactgccaaacacagcgctctcttgaaatccattgttaccacatgtagtggattgccgtagttacgaaagaagtataacacaaacaacgaaaggagatgatcatatgtctgaaaaagcagtaatttatgcacgctattcctcttcaaatcagcgtgaagaatca

SEQ ID NO: 19282 - DNA, 260 bp, Unknown
  Description of Unknown: LeftRegion for integrase B6283 sequence
ctgcattgcagatctgttgaaataaaaaaccgcccctgctaccaacagagacggcttaatgaatactatacagtgccgaggcacgatataataatccctcaacaagaatattatatcacatttccctggcaccgtataggtgttatttttgtacccatttttgtgcgacgtcgcacatataattacaggaaggtgatacaatgagcgtaaaatatgcatacggctacatccgtgtatccactcatgatcaggaagagatc

SEQ ID NO: 19283 - DNA, 260 bp, Unknown
  Description of Unknown: LeftRegion for integrase B6284 sequence
tgcagatctgttgaaataaaaaaagaaacgcccctgctgacaacagaggcggatctattgaatactatacagtgccaaggcacgatataacattccgtgaacaagagtattatatcacatttccctggcacctgcataggtgttatttttatacccatttttgtgcgacatcacacatataattacaggaaggtgatacaatgagcgtaaaatatgcatacggttacatccgagtatccactcatgatcaggaagagatc

SEQ ID NO: 19284 - DNA, 260 bp, Unknown
  Description of Unknown: LeftRegion for integrase B6285 sequence
cggcgctgatctggacgatgacgaataaataaaaaagcgctgtccctctggaaagggccagcgcttcgaggccgcgtgttacatttgcttcgcgctcctgctggaacaggggcgggctgtacacgggcagttgacatggaaggcaactgcctttattgtaacacgcaggccccggtttgaaaagggggtttttatcctttatgcgtgtgatctgctatgttcgggtatctacccgcgaacaggcggaaaagggctattct

SEQ ID NO: 19285 - DNA, 260 bp, Unknown
  Description of Unknown: LeftRegion for integrase B6286 sequence
atatagataataataaaaaattccccggtgtctaccaaacaccagggaaaatcccgagtaatatatacggcgaaggattcgctcgatacagtactccctcaacaagaatattgtatcacaaaaatccagcaccgtataggtgttatttttgtacccatttttgtgcgacgtcgcacatataattacaggaaggtgatacaatgagcgtaaaatatgcatacggctacatccgggtatccactcacgatcaagaagaaatt

SEQ ID NO: 19286 - DNA, 260 bp, Unknown; identical to SEQ ID NO: 19208
  Description of Unknown: LeftRegion for integrase B6287 sequence

SEQ ID NO: 19287 - DNA, 260 bp, Unknown; identical to SEQ ID NO: 19219
  Description of Unknown: LeftRegion for integrase B6288 sequence

SEQ ID NO: 19288 - DNA, 260 bp, Unknown
  Description of Unknown: LeftRegion for integrase B6289 sequence
attataaaccagaacaacagatacccaccagcttatggcgaaaaccataggtcggtgggcatctgatttacgaaaagaattaaatgctgttcgctgattttcccattgcaaaccgttgtaaaatatggtatatattatacgaaactacattttgaaagaaccgttcgccgtttaatgatgtgtaaagtgaggtgcctgccatgaccgctgtgatctatgcccgctattcatcggataaccagcgcgaagaatccattgaa

SEQ ID NO: 19289 - DNA, 260 bp, Unknown
  Description of Unknown: LeftRegion for integrase B6290 sequence
tcgcgcatccaggacaaaggttgtcaagtcgtcgatgtcaagatggccgtcagcgccaacacgcgcgacagcgacatgatgctgtactcgtttaccgtcttatataggtaaagaaaaaaagaagccccacgtggtcacagcgttgcagcgctacccgtggggctttccacagaacctctgaaaggaggccgtttcatattatgccaaaaacagcggtgatatacgcccgcttttcatgcaacaagcagcgcgaggcctcg

SEQ ID NO: 19290 - DNA, 260 bp, Unknown
  Description of Unknown: LeftRegion for integrase B6291 sequence
ataggagattttatttccaaagattttactcatgatataaaataaaaaaacttcgtgctggaacacgaagtcaaaatgaaaaatcacaaaagtctgctaggactaaaaacaaaatatcaagtgatataatgcattggatctttcttatacattatatcacaaccaataataaaaataaagaaaaaggagtgtaataatgtatgattaatgatgatttttttagaaaaggtgcaatatcagttagagtatcaactgaaatg

SEQ ID NO: 19291 - DNA, 260 bp, Unknown
  Description of Unknown: LeftRegion for integrase B6292 sequence
cttctaataaataatttaatataaaaaccgctccagtgctggaacaccagagcggtcaacattgctccgaagatacaatgccctagacaagcatattgtatcattctcggagcagctatgcaagcggaacacccgttccacgctggctgttatttttgtacccaaaaacatacactatagagaaagaggtgtaatatgccatgaaagaaaccttatctgaacgcaaaaccggcgcgatctacatccgtgtatccaccgac

SEQ ID NO: 19292 - DNA, 260 bp, Unknown
  Description of Unknown: LeftRegion for integrase B6293 sequence
gtcgcgcatccaggacaaaggttgtcaagtcgtcgatgtcaagatggccgtcagcgccaacacgcgcgacagcgacatgatgctgtactcgtttaccgtcttatataggtagagaaaaaagaagccccacggggtcacagcgttgcagcgctacccgtggggctttccacagaacctctgaaaggaggccgtttcttattatgccaaaaacagcggtgatatacgcccgcttttcatgcaacaagcagcgcgaggcctcg

SEQ ID NO: 19293 - DNA, 260 bp, Unknown
  Description of Unknown: LeftRegion for integrase B6294 sequence
cacaaccatttttgtcaaataaataacgccgccccagtgttggcgcaccagagcggcaaatactgctccgaaaagcaatatactcacaaatcatattatacctttcggagcagccaaacgcaagcggaacacccgttccacgctggctgttatttttgtactcaaaaacatacactatagagaaagaggtgtaatatgccatgaaagaaaccttatctgaacgcaaaaccggcgcgatctacatccgtgtatccaccgac

SEQ ID NO: 19294 - DNA, 260 bp, Unknown; identical to SEQ ID NO: 19211
  Description of Unknown: LeftRegion for integrase B6295 sequence

SEQ ID NO: 19295 - DNA, 260 bp, Unknown; identical to SEQ ID NO: 19211
  Description of Unknown: LeftRegion for integrase B6296 sequence

SEQ ID NO: 19296 - DNA, 260 bp, Unknown
  Description of Unknown: LeftRegion for integrase B6297 sequence
cgccaacaagaacggtttccccataatcaatatgaggacgtatataacgtatatatccgaagagatacatacaatactcacaaaaatattgtatcatcttcgggcagctatcgcaagcagaacgcacgttctgtgctagctgttatttttgtacccatttttgtgcgacgtcgcacatataattacaggaaggtgatacaatgagcgtaaaatatgcatacggctacatccgggtatccactcatgatcaggaagaaatc

SEQ ID NO: 19297 - DNA, 260 bp, Unknown
  Description of Unknown: LeftRegion for integrase B6298 sequence
caaaagataaaaatgtattaaataaaaaccgtccctgctaccaacaggaacggcctaatgaatactatacagtgccaaggcacgatataacattccgtgaacaagagtattatatcacatttccctggcacctgcataggtgctatttttgtacccatttttgtgcgacgtcgcacatataattacaggaaggtgatacaatgagcgtaaaatatgcatacggctacatccgggtatccactcatgatcaggaagagatc

SEQ ID NO: 19298 - DNA, 260 bp, Unknown
  Description of Unknown: LeftRegion for integrase B6299 sequence
ttagcacaataaaataaaaaatccccggtgtctaccaaacaccagggaaaatcccgagtaatatatacggcgaaggattcgctcgatacagtactccctcaacaagaatattgtatcacaaaaatccagcaccgtataggtgttatttttgtacccatttttgtgcgacgtcgcacatataattacaggaaggtgatacaatgagcgtaaaatatgcatacggctacatccgtgtatccacacacgatcaggaagagatc

SEQ ID NO: 19299 - DNA, 260 bp, Unknown
  Description of Unknown: LeftRegion for integrase B6300 sequence
taccataaaagtcaagaaccgcccctgcgccaacaggaacggttcaagtaacattccgaagaatgataccccaattcaaagaatattgtatcatcttcggtcagctatcgcaatcagaacatttgtttcttgatagctgttatttttatactcattttcctgctctgtcaggaatagaatgaatcaaccgaggtgatgtcatgaaaactaaatattgttatggttatgttagggtatccacatccggccaagaagagctc

SEQ ID NO: 19300 - DNA, 260 bp, Unknown
  Description of Unknown: LeftRegion for integrase B6301 sequence
ttacagatctgctgaaataaaaaaagaaacgcccctgctgacaacagaggcggatctattgaatactatacagtgccaaggcacgatataacattccgtgaacaagagtattatatcacatttccctggcaccgtataggtgttatttttgtacccatttttgtgcgacgtcgcacatataattacaggaaggtgatacaatgagcataaaatatgcatacggctacatccgggtatccactcatgatcaggaagagatc

SEQ ID NO: 19301 - DNA, 260 bp, Unknown
  Description of Unknown: LeftRegion for integrase B6302 sequence
aaatttattttcaataaaaattccccggtgtctaccaaacaccggggaaaatcccgagtaatatatacggcgaaggattcgctcgatacagtactccctcaacaagaatattgtatcacaaaaatccggcaccgtataggtgttatttttgtacccatttttgtgcgacatcgcacatataattacaggaaggtgatacaatgagcgtaaaatatgcatacggctacatccgggtatccactcacgatcaggaagagatc

SEQ ID NO: 19302 - DNA, 260 bp, Unknown
  Description of Unknown: LeftRegion for integrase B6303 sequence
tgcagatctgctgaaataaaaaaagaaacgcccctgctgacaacagaggcggatctattgaatactatacagtgccaaggcacgatataacattccttgaacaagagtattatatcacatttccctggcacctgcataggtgttatttttatacccatttttgtgcgacatcgcacatataattacaggaaggtgatacaatgagcgtaaaatatgcatacggctacatccgtgtatccactcatgatcaggaagagatc

SEQ ID NO: 19303 - DNA, 260 bp, Unknown; identical to SEQ ID NO: 19219
  Description of Unknown: LeftRegion for integrase B6304 sequence

SEQ ID NO: 19304 - DNA, 260 bp, Unknown
  Description of Unknown: LeftRegion for integrase B6305 sequence
tttatagactacatagataaaactaaattataagacaaaaaagtcccctgctaccaacagaggaccaaaaactaacctaccaaggcagatgccaagatatagtatagcctagacaactatattatatcacaaataacacctgccttgcaaggtgttatttttgtacccaaaaacatatttttaataaggagtgatataatatgaaaacagctatctatgcccgacaaagcgtaaataaaaaagacagtatatctattgaa

SEQ ID NO: 19305 - DNA, 260 bp, Unknown; identical to SEQ ID NO: 19243
  Description of Unknown: LeftRegion for integrase B6306 sequence

SEQ ID NO: 19306 - DNA, 260 bp, Unknown
  Description of Unknown: LeftRegion for integrase B6307 sequence
cggcgctgatctggacgatgacgaataaataaaaaagcgctgtccctctggaaagggccagcgcttcgaggccgcgtgttacatttgcttcgtgctcctgctggaacaggggcgggctgtacacgggcagttgacatggaaggcaactgcctttattgtaacacgcaggccccggtttgaaaagggggtttttatcctttatgcgtgtgatctgctatgttcgggtatctacccgcgaacaggcggaaaagggctattct

SEQ ID NO: 19307 - DNA, 260 bp, Unknown
  Description of Unknown: LeftRegion for integrase B6308 sequence
ttactgacatttaattaagaaaaaggtccccaacgctaccaacgcagaggaccaccaagctcccgaatgatacgaaagccctagacaagcacattgtaccattctcggagcagctgcgcaagcggaacacccgttccacgctggctgttatttttgtacccaaaaatcaatacaatatagagaaagaggtgtaatgtgctatgaaagaaaaagtttcagaacgcaaaacaggcgcgatctacatccgcgtatctaccgac

SEQ ID NO: 19308 - DNA, 260 bp, Unknown
  Description of Unknown: LeftRegion for integrase B6309 sequence
ttaacaaaagaataataaaaattccccggtgcctatcaaacaccggggaaatcccgagtaatatatacggcgaaggattcgctcgatacagtactccctcaacaagaatattgtatcacaaaaatccagcaccgtataggtgttatttttgtacccatttttgtgcgacgtcacacatataattacaggaaggtgatacaatgagcgtaaaatatgcatacggctacatccgggtatccactcatgatcaggaagagatc

SEQ ID NO: 19309 - DNA, 260 bp, Unknown; identical to SEQ ID NO: 19218
  Description of Unknown: LeftRegion for integrase B6310 sequence

SEQ ID NO: 19310 - DNA, 260 bp, Unknown; identical to SEQ ID NO: 19256
  Description of Unknown: LeftRegion for integrase B6311 sequence

SEQ ID NO: 19311 - DNA, 260 bp, Unknown
  Description of Unknown: LeftRegion for integrase B6312 sequence
gtcatacaaccatttttgtcaatttaaaaccgccctgctctaccaaagcaaggcggtaagctcccgaatgatacgaaagccctcaacaagcacattgtaccattctcggagcagcttcgcaagcggaacacccgtttgacgcaggctgttatttttgtacccaaaaatcaatacaatatagagaaagaggtgcatgtgctatgaaagaaaaggtttcagaacgcaagacaggcgcgatctacatccgcgtatctaccgac

SEQ ID NO: 19312 - DNA, 260 bp, Unknown
  Description of Unknown: LeftRegion for integrase B6313 sequence
aataatgtaatataaaaaaatcccctggtgcctatcaaacaccagggaaaatcccgagtaatatatacggcgaaggattcgctcgatacagtactccctcaacaagaatattgtatcacaaaaatccagcaccgtataggtgttatttttgtacccatttttgtgcgacgtcgcacatataattacaggaaggtgatacaatgagcgtaaaatatgcatacggctacatccgggtatccactcatgatcaggaagagatc

SEQ ID NO: 19313 - DNA, 260 bp, Unknown; identical to SEQ ID NO: 19208
  Description of Unknown: LeftRegion for integrase B6314 sequence

SEQ ID NO: 19314 - DNA, 260 bp, Unknown; identical to SEQ ID NO: 19219
  Description of Unknown: LeftRegion for integrase B6315 sequence

SEQ ID NO: 19315 - DNA, 260 bp, Unknown
  Description of Unknown: LeftRegion for integrase B6316 sequence
tagaaaaaattcaataaaaattccccggtgtctaccaaacaccagggaaaatcccgagtaatatatacggcgaaggattcgctcgatacagtactccctcaacaagaatattgtatcacaaaaatccggcaccgtataggtgttatttttatacccatttttgtgcgacgtcgcacatataattacaggaaggtgatacaatgagcgtaaaatatgcatacggctacatccgagtatccacacacgaccaagaagagatc

SEQ ID NO: 19316 - DNA, 260 bp, Unknown
  Description of Unknown: LeftRegion for integrase B6317 sequence
atatagataataataaaaattccccggtgcctatcaaacaccagggaaaatcccgagtaatatatacggcgaaggattcgctcgatacagtactctcctcacaaagattattgtatcacaaaaatccggcaccgtataggtgttatttttgtacccatttttgtgcgacgtcgcacatataattacaggaaggtgatacaatgagcgtaaaatatgcatacggctacatccgtgtatccacacacgatcaggaagagatc

SEQ ID NO: 19317 - DNA, 260 bp, Unknown
  Description of Unknown: LeftRegion for integrase B6318 sequence
ggacagcggattgaaacgcacgtttgatataaaaaataaagtttttgatctgatagggaaatggacaccttatcaagcgcaaaagcgccttccgctgttggaactctgtcaagatttgtccgaagatgaattaaccgaagttataaactatatcaaatacgttcaatcaaagcgcgattgaacaggaagggggaatagtaatgccggaagcattaaacgcggtcatatacgcccgctattcctccgatcgtcagacagaa

SEQ ID NO: 19318 - DNA, 260 bp, Unknown
  Description of Unknown: LeftRegion for integrase B6319 sequence
tctctgctatatctttatactaaaaatccccggtgttaccagcaccagggaaaatgagaaaactataaggtgtttggaacacaatacaattctctccctcacaaagattattgtatcacaaaaatccggcaccgtataggtgttatttttgtacccatttttgtgcgacgtcgcacatataattacaggaaggtgatacaatgagcgtaaaatatgcatacggctacatccgggtatccactcatgatcaggaagagatc

SEQ ID NO: 19319 - DNA, 260 bp, Unknown
  Description of Unknown: LeftRegion for integrase B6320 sequence
aaatttatccatacaaaaaaattccccggtgcctatcaagcaccggggaaatcccgagtaatatatacggcgaaggattcgctcgatacagtactccctcaacaagaatattgtatcacaaaaatccagcaccgtataggtgttatttttgtacccatttttgtgcgacgtcgcacatataattacaggaaggtgatacaatgagcgtaaaatatgcatacggctacatccgggtatccactcatgatcaggaagagatc

SEQ ID NO: 19320 - DNA, 260 bp, Unknown; identical to SEQ ID NO: 19268
  Description of Unknown: LeftRegion for integrase B6321 sequence

SEQ ID NO: 19321 - DNA, 260 bp, Unknown; identical to SEQ ID NO: 19219
  Description of Unknown: LeftRegion for integrase B6322 sequence

SEQ ID NO: 19322 - DNA, 260 bp, Unknown
  Description of Unknown: LeftRegion for integrase B6323 sequence
tgtaaataaaaaagcgccgaccctctggaaagggtcagcgctttggccgcgtgttacaaggggggcgacattctggaagaggtcgcttggctgcatcctgctggaacaggggcgggccgtacacgggcagttgacatggaaagcaactgcctttattgtaacacgcaggccccagtttgaaaagggggtttttatcctttatgcgtgtgatctgctatgttcgggtgtctacccgcgaacaggcggaaaagggctattct

SEQ ID NO: 19323 - DNA, 260 bp, Unknown; identical to SEQ ID NO: 19239
  Description of Unknown: LeftRegion for integrase B6324 sequence

SEQ ID NO: 19324 - DNA, 260 bp, Unknown
  Description of Unknown: LeftRegion for integrase B6325 sequence
aaataatgtaatataaaaaatcccctggtgcctatcaaacaccagggaaaatcccgagtaatatatacggcgaaggattcgctcgatacagtactccctcaacaagaatattgtatcacaaaaatccagcaccgtataggtgttatttttgtacccatttttgtgcgacgtcgcacatataattacaggaaggtgatacaatgagcgtaaaatatgcatacggctacatccgggtatccactcatgatcaggaagagatc

SEQ ID NO: 19325 - DNA, 260 bp, Unknown
  Description of Unknown: LeftRegion for integrase B6326 sequence
tcggaggcccgggatgcttatacaacagtagagcgcaagtttgcccgggatctccagggctttgagctctaaataggcaacaaaaatccccacccgtgaggcaacacgagtggggataccacacaatcaaagcggaggctgattatgtatagatattataccatgtctgcctcctgcatgctataggaggctattttagtatgggacaaaaatgcgtcatatatacaagatacagctctgaccggcagcgggaggagtcc

SEQ ID NO: 19326 - DNA, 260 bp, Unknown
  Description of Unknown: LeftRegion for integrase B6327 sequence
aataacagtagttacaaataaaaacgccccagtgttaccagcactggggcattgagaaaactatactttgcaaggaacttgcggtataatcctctccctcacagagactattatatcacaaattcctggcaccgtgtaggtgttatttttgtacccatttttgtgcgacgtcgcacatataattacaggaaggtgatacaatgagcgtaaaatatgcatacggctacatccgggtatccactcacgatcaagaagaaatt

SEQ ID NO: 19327 - DNA, 260 bp, Unknown
  Description of Unknown: LeftRegion for integrase B6328 sequence
tgcagatctgctgaaataaaaaaagaaacgcccctgctgacaacagaggcggatctattgaatactatacagtgccaaggcacgatataacattccgtgaacaagagtattatatcacatttccctggcacctgcataggtgttatttttgtacccatttttgtgcgacatcgcacatataattactggaaggtgatacaatgagagtaaaatatgcatacggctacatccgggtatccactcacgatcaagaagaaatt

SEQ ID NO: 19328 - DNA, 260 bp, Unknown
  Description of Unknown: LeftRegion for integrase B6329 sequence
gaataaaaaaagcgccgaccctctggaaagggtcagcgctttggccgcgtgttgcaaggggggggcgacatcctggaagaggtcgcttggctgcatcctgctggaacaggggcgggccgtacacgggcagttgacatggacgacaactgcctttattgtaacacgcaggcctcagtttgaaaagggggtttttatcctttatgcgtgtgatctgctatgttcgggtgtctacccgcgaacaggcggaaaagggctattct

SEQ ID NO: 19329 - DNA, 260 bp, Unknown
  Description of Unknown: LeftRegion for integrase B6330 sequence
ttgcagatctgctgaaataaaaaagaaacgcccctgctgacaacagaggcggatctattgaatactatacagtgccaaggcacgatataacattccgtgaacaagagtattatatcacatttccctggcacctgcataggtgttatttttatacccatttttgtgcgacgtcgcacatataattacaggaaggtgatacaatgagcgtaaaatatgcatacggctacatccgggtatccactcatgatcaggaagagatc

SEQ ID NO: 19330 - DNA, 260 bp, Unknown; identical to SEQ ID NO: 19273
  Description of Unknown: LeftRegion for integrase B6331 sequence

SEQ ID NO: 19331 - DNA, 260 bp, Unknown
  Description of Unknown: LeftRegion for integrase B6332 sequence
tcacacgaacatttttgtcaatttaaaaccgccctgctctaccaaagcaaggcggcaagctcccgaatgatacagaagccctcaacaagcacattgtatcattctcagagcagctacgcaagcggaacacccgttccacgctggctgttatttttgcacccaaaaatcaatacaatatagagaaagaggtgtaatgtgctatgaaagaaaaagtatcagaacgcaaaacaggggcaatctacatccgtgtatccaccgac

SEQ ID NO: 19332 - DNA, 260 bp, Unknown
  Description of Unknown: LeftRegion for integrase B6333 sequence
aaaataatgtaatataaaaaatccccggtgtctaccaaacaccagggaaaatcccgagtaatatatacggcgaaggattcgctcgatacagtactccctcaacaagaatattgtatcacaaaaatccggcaccgtataggtgttatttttgtacccatttttgtgcgacgtcgcacatataattacaggaaggtgatacaatgagcgtaaaatatgcatacggctacatccgggtatccactcatgatcaggaagaaatc

SEQ ID NO: 19333 - DNA, 260 bp, Unknown
  Description of Unknown: LeftRegion for integrase B6334 sequence
taacataacaataaaaaccgcccctgcgaatcggacactagtcaacaacaggagcggatgcgtgctccgaagatacacgccttagacaagcacattgtatcattctcggagcagctacgcaagcggaacatccgtttgatgtgagctgttatttttgtacccaaaaaccaatacaatatagagaaagaggtgcatatgctatgaaagaaaaagtctctgaacgcaaaaccggcgcgatctacatccgtgtatccaccgac

SEQ ID NO: 19334 - DNA, 260 bp, Unknown
  Description of Unknown: LeftRegion for integrase B6335 sequence
acaaattattagaattacagtaaaatactaaaaaatccccggtgttaccagcaccagggaaaacgagaaaactatagggtgtttggaacacagtacaattctctccatcacaaagattattgtatcacaaaaatccggcaccgtataggtgttatttttgtacccatttttacgtacacttaagaaggaaaggtgatacaatgagcgtaaaatatgcatacggctatatccgtgtatccactcatgatcaggaagagatc

SEQ ID NO: 19335 - DNA, 260 bp, Unknown; identical to SEQ ID NO: 19240
  Description of Unknown: LeftRegion for integrase B6336 sequence

SEQ ID NO: 19336 - DNA, 260 bp, Unknown; identical to SEQ ID NO: 19318
  Description of Unknown: LeftRegion for integrase B6337 sequence

SEQ ID NO: 19337 - DNA, 260 bp, Unknown; identical to SEQ ID NO: 19302
  Description of Unknown: LeftRegion for integrase B6338 sequence

SEQ ID NO: 19338 - DNA, 260 bp, Unknown
  Description of Unknown: LeftRegion for integrase B6339 sequence
ataaacaatttaagaacggcgtcagaatcgataaaattcagcgattgggaaggcgaatcggacctctctaagctgatcgacgacaggaacagctttgctgaagatttcggagtttctgacagatcgtactaaaaaagcgtaaaatatcacacaaaaaacgccctgcagttccccgcggggtgttgatatatcggaaaggaatggtacttttggacacatactgtatatatctaagaaaatcgcgtgcagacgcagaagcc

SEQ ID NO: 19339 - DNA, 260 bp, Unknown
  Description of Unknown: LeftRegion for integrase B6340 sequence
aaaataatgtaatataaaaaatccccggtgcctatcaaacaccagggaaaatcccgagtaatatatacggcgaaggattcgctcgatacagtactccctcaacaagaatattgtatcacaaaaatccgacaccgtataggtgttatttttgtacccatttttgtgcgacgtcgcacatataattacaggaaggtgatacaatgagcgtaaaatatgcatacggctacatccgagtatccacacacgaccaagaagagatc

SEQ ID NO: 19340 - DNA, 260 bp, Unknown
  Description of Unknown: LeftRegion for integrase B6341 sequence
tatagataataataaaaaatcccccggtgtctaccaaacaccagggaaaatcccgagtaatatatacggcgaaggattcgctcgatacagtactctcctcacaaagattattgtatcacaaaaatccggcaccgtataggtgttatttttgtacccatttttgtgcgacgtcgcacatataattacaggaaggtgatacaatgagcgtaaaatatgcatacggctacatccgggtatccactcacgatcaggaagaaatc

SEQ ID NO: 19341 - DNA, 260 bp, Unknown; identical to SEQ ID NO: 19266
  Description of Unknown: LeftRegion for integrase B6342 sequence

SEQ ID NO: 19342 - DNA, 260 bp, Unknown
  Description of Unknown: LeftRegion for integrase B6343 sequence
aataacagtagttacaaataaaaacgccccagtgttaccagcactggggcattgagaaaactatactttgcaaggaacttgcggtataatcctctccctcacagagactattatatcacaaattcctggcaccgtgtaggtgttatttttgtacccatttttgtgcgacgtcgcacatataattacaggaaggtgatacaatgagcgtaaaatatgcatatggctacatccgtgtatccactcatgatcaggaagaaatc

SEQ ID NO: 19343 - DNA, 260 bp, Unknown
  Description of Unknown: LeftRegion for integrase B6344 sequence
aataaatgtaattaataaaaaatccccggtgcctatcaaacaccggggaaatcccgagtaatatatacggcgaaggatccgctcgatacagtactccctcaacaagaatattgtatcacaaaaatccggcaccgtataggtgttatttttgtacccatttttgtgcgacgtcgcacatataattacaggaaggtgatacaatgagcgtaaaatatgcatacggctacatccgggtatccactcatgatcaggaagagatc

SEQ ID NO: 19344 - DNA, 260 bp, Unknown
  Description of Unknown: LeftRegion for integrase B6345 sequence
ctgacaaataataaaataatataaaaccgctccagtgctggaacaccagagcggtcaacattgctccgaagatacaatgccctagacaagcacattgtatcattctcggagcagctacgcaagcggaacatccgtttgatgtgagctgttatttttgtacccaaaaaccaatacaatatagagaaagaggtgcatatgctatgaaagaaaccttatctgaacgcaaaaccggcgcgatctacatccgtgtatccaccgac

SEQ ID NO: 19345 - DNA, 260 bp, Unknown; identical to SEQ ID NO: 19229
  Description of Unknown: LeftRegion for integrase B6346 sequence

SEQ ID NO: 19346 - DNA, 260 bp, Unknown; identical to SEQ ID NO: 19293
  Description of Unknown: LeftRegion for integrase B6347 sequence

SEQ ID NO: 19347 - DNA, 260 bp, Unknown
  Description of Unknown: LeftRegion for integrase B6348 sequence
acctaaaagataatattcaaaacgacagaatttttgctattatactttgtcttaagtacttgctgaataaagatgaacagtggaactcattcataacaaaattaagtgcacttattgaagaatatgatgaaatagaatttaaatatataggatttcctgataattgggaaaatttattaatctaacaaaggaggtattttatgtccgcggcgatatacactcgacaatccatcgaaaagaaagacagcgaaagcatcgat

SEQ ID NO: 19348 - DNA, 260 bp, Unknown; identical to SEQ ID NO: 19332
  Description of Unknown: LeftRegion for integrase B6349 sequence

SEQ ID NO: 19349 - DNA, 260 bp, Unknown
  Description of Unknown: LeftRegion for integrase B6350 sequence
ctggtgcaatagaaaaaattcaataaaaaatccccggtgtctaccaaacaccagggaaaatcccgagtaatatatacggcgaaggattcgctcgatacagtactccctcacaaagattattgtatcacaaaaatccggcaccgtataggtgttatttttatacccatttttacgtacacttaagaaggaaaggtgatacaatgagcgtaaaatatgcatacggctacatccgggtatccactcatgatcaggaagaaatc

SEQ ID NO: 19350 - DNA, 260 bp, Unknown; identical to SEQ ID NO: 19332
  Description of Unknown: LeftRegion for integrase B6351 sequence

SEQ ID NO: 19351 - DNA, 260 bp, Unknown
  Description of Unknown: LeftRegion for integrase B6352 sequence
ctcaatacgccctctccgcacagcagagataggacgacttaactataacatctccggagatgctacagcatttcagtcaaaaatattgtatcatcttcggtcagctatcgcaatcagaacgtttgtttcttgatagctgttatttttatactcattttcctgctctgtcaggaatagaatgaatcaaccgaggtgatgtcatgaaaactaaatattgttatggttatgttagggtatccacatccggtcaagaagagctc

SEQ ID NO: 19352 - DNA, 260 bp, Unknown; identical to SEQ ID NO: 19227
  Description of Unknown: LeftRegion for integrase B6353 sequence

SEQ ID NO: 19353 - DNA, 260 bp, Unknown
  Description of Unknown: LeftRegion for integrase B6354 sequence
ttacatttacacttttgtcaaactaaataccgccctgctctaccaaagcaaggcggcaagctcccgaatgatacgaaagccctagacaagcatattgtatcattctcggagcagcttcgcaagcggaacacccgtttgacgcaggctgttatttttgtacccaaaaaccaatacaatatagagaaagaggtgcatatgctatgaaagaaaaagtctctgaacgcaaaaccggcgcgatctacatccgtgtatccaccgac

SEQ ID NO: 19354 - DNA, 260 bp, Unknown
  Description of Unknown: LeftRegion for integrase B6355 sequence
acaaatttcattaataatgactataagtaaaaaaccgcccggtgttaccagcaccgaacggcttttacatagattctcttgccggatgcccggaaagataattcagcttgaacacctgaattatatcatttctggtacatcctggcaaggggtgtattttttatacccatttatcgtataatccacaaggagatgatataatgtcacaattatccaccagcaatgcacaacccttggaaatcggggccgcctacatccgt

SEQ ID NO: 19355 - DNA, 260 bp, Unknown
  Description of Unknown: LeftRegion for integrase B6356 sequence
caacaggtcagccgagaatatcagcttgcctacactgcttaaattatctgaatatttcggagtatcaatcgaggaattagtacacggaacaccacaacgtgaaataaccttttcaaaccggatttatacggataaagagcttgaagaaatacaattatttgcacaatttttactacaccgaagaaaggactagatgatgaatggcatacgcaatgtacctgcgaaaatcccgcatagacgaagaagcgggacttgaaaac

SEQ ID NO: 19356 - DNA, 260 bp, Unknown
  Description of Unknown: LeftRegion for integrase B6357 sequence
caaccgctcggcggagaatatcagcttgccgacactactcaaattatcggaatatttcggcgtgacaattgaggaattagtacacggcacgccacaacgggagataactttttcaaaccggatttttactgatgaagaacttgaagaaatacaactatttgcacaatttttactacaccgacgaaaggactagatgatgaatggcatacgcactatatttacgaaaatcccgtgcagacgaagaactgggacacgagaac

SEQ ID NO: 19357 - DNA, 260 bp, Unknown
  Description of Unknown: LeftRegion for integrase B6358 sequence
caaccgctcggcggagaatatcagcttgcctacactgctcaagctatccgaatacttcggcgtgaccatcgaagaactcgtacacgggacaccgcaacgcgagataaccttctcaaaccggattttcactgatgaagaacttgaagaaatacaactatttgcacaatttttattacaccgacgaaaggactagatgatggatggcatacgcaatatacttgaggaaatcccgcatagacgaagaaacagggatagagaac

SEQ ID NO: 19358 - DNA, 260 bp, Unknown
  Description of Unknown: LeftRegion for integrase B6359 sequence
tcaaccggagcgccgaaaatatcagcttgccgacattgcttaaattatctgagtatttcggtgtaacgattgaggaattagtgcacggcacgccacaacgggagataactttttcaaaccggatttacaccgacaaagaacttgaagaaatacaactatttgcacaatttttattacaccgacgaaaggactagatatgcatggcatacgcgatgtacttaaggaaatcccgcatagatgaagaagcagggatagagaac

SEQ ID NO: 19359 - DNA, 260 bp, Unknown
  Description of Unknown: LeftRegion for integrase B6360 sequence
ttattaaaaaaatcccctcaaccgctaccaacagttgagggaaaaagaataaagtgcatttatacacaatatccaaaccaataatattgtatcataaatgcactctgttttcaatataaaaattagagaaaaggagtgttatttttgtgccgttttttagaaaaacgtgtactgcataacacaagaaagggagatttacgatgaatgtagctatgtatttacgaaaatcaagagcagacgaaaacaatccgcttgaaaca

SEQ ID NO: 19360 - DNA, 260 bp, Unknown
  Description of Unknown: LeftRegion for integrase B6361 sequence
actgggaacaatcagtagtttttcaatgtccttttatgaggtacatgggagtcctgagttttcatttacgaattttatcattccagaagcattcagccttgtaagtggaatcatgtttcttggttttggtgaaataattaagcttcttcaggatatatgcaataagatcaaatgattgtatgagttgaaacgaggttattatggctgctattgactttaataatgttgtagatctgtatattcgtgtcagcacttctgag

SEQ ID NO: 19361 - DNA, 260 bp, Unknown
  Description of Unknown: LeftRegion for integrase B6362 sequence
attcttgatagcgtgaaaactttttcaagcaccttaaccgtaacagttattgattatattgataccgcagcttaaataaaaaaatttccctgcctgctccaacaggcagaggaaacagaataaagtgcatttatacacatgtgtcacgctccccacggagcgtgtgagttgaaatataacacaagaaaggaagatttacgatgaatgtagccatgtatttacgaaaatcgagagcggacgaaaacaatccgcttgaaacg

SEQ ID NO: 19362 - DNA, 260 bp, Unknown
  Description of Unknown: LeftRegion for integrase B6363 sequence
atgtaatcactcacaataaataaatataacgcaaaaaccgcccctgcgccaacaggaacggttttcacatagattctcttgccggatgcccggaaagataattcagcttagacacctgaattatatcatttctggtacatcctggcaaggggtgtattttttatacccatttatcgtataatccacaaggagatgatataatgtcacaattatccaccagcaatacacaacccttggaaatcggggccgcctacatccgt

SEQ ID NO: 19363 - DNA, 260 bp, Unknown
  Description of Unknown: LeftRegion for integrase B6364 sequence
aaattgaaaaaatagtatacaaactcgaaaacattataaatgatattgcagttattgactatacaaattctgccgcgtaaaaaattcccctgcctgttggagcagacagaggaaaaagaataaagtgcatttatacacatatgtcacgctccccacggagtgtgtgagttgaaatataacacaagaaaggaagatttacgatgaatgtagccatgtatttacgaaaatcgagagcggacgaaaacaatccgcttgaaaca

SEQ ID NO: 19364 - DNA, 260 bp, Unknown; identical to SEQ ID NO: 19363
  Description of Unknown: LeftRegion for integrase B6365 sequence

SEQ ID NO: 19365 - DNA, 260 bp, Unknown
  Description of Unknown: LeftRegion for integrase B6366 sequence
gattaaaaaaattcccctgcctgttggagcagacagaggataaagaataaagtgcatttatacacaatactcaaaccaataatattgtatcataaatgcactctgttttcaatatacaaattagagaaaaggagtgttatttttgtaccgtttttttattaaaaacgagcattacataacacaagaaaggaagatttacgatgaatgtagctatatacttacgaaaatcgagagcggacgaaaacaatccgcttgaaacg

SEQ ID NO: 19366 - DNA, 260 bp, Unknown
  Description of Unknown: LeftRegion for integrase B6367 sequence
caatcggagcgccgaaaatatcagcttgccgacattgcttaaattatccgagtatttcggtgtgacgattgaggaattagtgcacggcacgccacaacgggagataactttttcaaaccggatttatacggataaagagctagaggaaatacagctattcgcacaatttttactgcatcgaagaaaggactagatgatgaatggcatacgcaatgtacctgcgaaaatcacgcatagacgaagaagcgggacttgaaaac

SEQ ID NO: 19367 - DNA, 260 bp, Unknown
  Description of Unknown: LeftRegion for integrase B6368 sequence
caaccggagcgccgaaaatatcagcttgccgacattgcttaaattatctgagtatttcggtgtaacgattgaggaattagtgcacggcactccacaacgggagataactttttcaaaccggatttacaccgacaaagaacttgaagaaatacaactatttgcacaatttttactacaccgaagaaaggactagatgatgaatggcatacgcaatgtacctgcgaaaatcccgcatagatgaggaagcaggacttgaaaac

SEQ ID NO: 19368 - DNA, 260 bp, Unknown
  Description of Unknown: LeftRegion for integrase B6369 sequence
gattaaaaaaattcccctgcctgttggagcagacagaggataaagaataaagtgcatttatacacaatactcaaaccaataatattgtatcataaatgcactctgttttcaatatacaaattagagaaaaggagtgttatttttgtaccgtttttttattaaaaacgagcattacataacacaagaaaggaagatttacgatgaatgtagccatgtatttacgaaaatcgagagcggacgaaaacaatccgcttgaaacg

SEQ ID NO: 19369 - DNA, 260 bp, Unknown
  Description of Unknown: LeftRegion for integrase B6370 sequence
agcatgccggcgaacgcccctatttcgcctgctgccaaaagcgcgaaggtcacgacggctctcccatatggagggtgaccgttgtctatctcggaagataaaagagccccgtcggcagcgctggtaccgctttagccgacggggcatccaaccagtgcacccatgcaaactcaacttgaaggaagggtgacattcacattatgccaaagagggcagtgatatacgcgaggttctcgtgcaacaggcagagagaagcgtcg

SEQ ID NO: 19370 - DNA, 260 bp, Unknown
  Description of Unknown: LeftRegion for integrase B6371 sequence
ataaagagcatcctcgctgattgcgggggagaccttgcagacgctttcccgcagattatggagaagcagaacacgctcaaggccaaaaccgcctctattctggatagcctcttgcaggccgatgttgcggccttaaaagacagcaacaagtaacctattggcctgcgctccggcgcgggcctttttgtttggaggtcatcatggagcagtatctcatatacctgcgcaagtctcgttccgacctcgaggccgaagcgcac

SEQ ID NO: 19371 - DNA, 260 bp, Unknown; identical to SEQ ID NO: 19359
  Description of Unknown: LeftRegion for integrase B6372 sequence

SEQ ID NO: 19372 - DNA, 260 bp, Unknown
  Description of Unknown: LeftRegion for integrase B6373 sequence
caaccggagcgccgaaaatatcagcttgccgacattgctcaaattatccgagtatttcggtgtaacgattgaggaattagtgcatggcacgccgcaacgggagataactttttcaaaccggatttacaccgacaaagaacttgaagaaatacaactatttgcacaatttttactacaccgaagaaaggactagatgatgaatggcatacgcaatgtacctgcgaaaatcccgcatagacgaagaagcgggacttgaaaac

SEQ ID NO: 19373 - DNA, 260 bp, Unknown
  Description of Unknown: LeftRegion for integrase B6374 sequence
actgggaacaatcagtagtttttcaatgtccttttatgaggtacatgggagtcctgagttttcatttacaaattttatcattccagaagcattcagccttgtaagcggaatcatgtttcttggttttggtgaaataattaagcttcttcaggatatatgcaataagatcaaatgattgtatgagttgaaacgaggttattatggctgctattgactttaataatgttgtagatctgtatattcgtgtcagcacttctgag

SEQ ID NO: 19374 - DNA, 260 bp, Unknown; identical to SEQ ID NO: 19361
  Description of Unknown: LeftRegion for integrase B6375 sequence

SEQ ID NO: 19375 - DNA, 260 bp, Unknown
  Description of Unknown: LeftRegion for integrase B6376 sequence
atttgccctagtaatttttcatttttaatctcttcaatcattttcactatttcttctttcaatcgggtagcctccctttccccaacttttcgaacatatgttctatttttttgttttattatatattatgctacaaaaaaatacaagtaagtatatctttaatttcttgtcaatattatagtttataaggagtgatttagatgacagcagctttatatatacgagtttctactgatgaacaattagagttttcaccagat

SEQ ID NO: 19376 - DNA, 260 bp, Unknown
  Description of Unknown: LeftRegion for integrase B6377 sequence
tatgatgatttagacgaataacttagaaaataaaaaccgcccctgcgccaacaggaacggttttcacatagattctcttgccggatactccggaaagatatatcagcttagacacctgaattatatcatttctggtacatcctggcaaggggtgtattttttatacccatttatcgtataatccacaaggagatgatataatgtcacaattatccaccagcaatacacaacccttggaaatcggggccgcctacatccgt

SEQ ID NO: 19377 - DNA, 260 bp, Unknown
  Description of Unknown: LeftRegion for integrase B6378 sequence
tcaaataaaaaaatcccctgcctgttggagcagacagaggaaaagaataaagtgcatttatacacaatactcaaaccaataatattgtatcataaatgcactctgttttcaatatacaaattagagaaaaggagtgttatttttgtaccatttttttattaaaaacgagcattacataacacaagaaaggaagatttacgatgaatgtagctatatacttacgaaaatcgagagcggacgaaaacaatccgcttgaaaca

SEQ ID NO: 19378 - DNA, 260 bp, Unknown
  Description of Unknown: LeftRegion for integrase B6379 sequence
actgggaacaatcggtagtttttcaatgtccttttatgaggtgcatggaagccctgagttttcatttacgaattttatcattccagaagcgttcagccttgtaagcggaatcatgtttcttggttttggcgaagtaattaagcttcttcaggatataagcaataagctcaaatgattgtatgagttgaaatgaggttattatggctgctattgactttaataatgttgtagatctgtatatccgtgtcagcacttctgag

SEQ ID NO: 19379 - DNA, 260 bp, Unknown
  Description of Unknown: LeftRegion for integrase B6380 sequence
attataaaaaaattcccccgaccgctaccaacagtcggaggaaacagaataaagtgcatttatacacaatactcaaaccaataatattgtatcataaatgcactctattttcaatataaaaattagaaaaggagtgttatttttgtaccgtttttttattaaaaacgagcattacataacacaagaaaggaagatttacgatgaatgtagccatgtatttacgaaaatcgagagcggacgaagacaatccgcttgaaaca

SEQ ID NO: 19380 - DNA, 260 bp, Unknown; identical to SEQ ID NO: 19363
  Description of Unknown: LeftRegion for integrase B6381 sequence

SEQ ID NO: 19381 - DNA, 260 bp, Unknown
  Description of Unknown: LeftRegion for integrase B6382 sequence
caatcggagcgccgaaaatatcagcttgccgacattgcttaaattatccgagtatttcggcgtgacgatcgaggaattagtgcatggcacgccgcaacgggagataactttttcaaaccggatttacaccgacaaagaacttgaagaaatacaactatttgcacaatttttactacaccgaagaaaggactagatgatgaatggcatacgcaatgtacctgagaaaatcccgcatagatgaggaagcaggacttgaaaac

SEQ ID NO: 19382 - DNA, 260 bp, Unknown
  Description of Unknown: LeftRegion for integrase B6383 sequence
actgggaacaatcggtagtttttcaatgtccttttatgaggtgcatggacgccctgagttttcatttacgaattttatcattccagaagcgttcagccttgtaagcggaatcatgtttcttggttttggcgaagtaattaagcttcttcaggatataagcaataagctcaaatgattgtatgagttgaaatgaggttattatggctgctattgactttaataatgttgtagatctgtatatccgtgtcagcacttctgag

SEQ ID NO: 19383 - DNA, 260 bp, Unknown
  Description of Unknown: LeftRegion for integrase B6384 sequence
ttgaaaaggggactaatcacttcggcagagaaggaaagaattatcaaaaaagtttcagaataaagcagtttttgtctggacttttataagtgagcacggtattgtttgtcctgcccgataaaaagggcgggacaaattttttatcgcagttcaagtccagtcggcagagccgaaaaacgaacgagaaaggagcgtgagaaatgaatattcaagagatacctacaacaaggaaggagaaaccacgggtatgtgcgtatgtt

SEQ ID NO: 19384 - DNA, 260 bp, Unknown
  Description of Unknown: LeftRegion for integrase B6385 sequence
ctcaaagcttactctatcacataccacagacgtcatagcaaacagcgggtagaataaaagaacataaaaaatggctcacttcgctattggcgtagcgaagtgagccggtattctactcatgtatgtgtacatgaatcaactaaagcatattcattatacatcacatgagctatgcgcacaagtaggaaaggaaaagtataatgaatgtgaatgtattagataacgtagtagacctgtatgtgcgggttagtactaccgag

SEQ ID NO: 19385 - DNA, 260 bp, Unknown
  Description of Unknown: LeftRegion for integrase B6386 sequence
attcttgatagcgtgaaaactttttcaagcaccttaaccgtaacagttattgattatattgataccgcagcttaaataaaaaaatttccctgcctgctccaacaggcagaggaaacagaataaagtgcatttatacacatatgtcacgctccccacggagcgtgtgagttgaaatataacacaagaaaggaagatttacgatgaatgtagccatgtatttacgaaaatcgagagcggacgaaaacaatccgcttgaaaca

SEQ ID NO: 19386 - DNA, 260 bp, Unknown
  Description of Unknown: LeftRegion for integrase B6387 sequence
attcttgatagcgtgaaaactttttcaagcaccttaaccgtaacagttattgattatattgataccgcagcttaaataaaaaaatttccctgcctgctccaacaggcagaggaaacagaataaagtgcatttatacacatgtgtcacgctccccacggagcgtgtgagttgaaatataacacaagaaaggaagatttacgatgaatgtagctatatacttacgaaaatcgagagcggacgaaaacaatccgcttgaaaca

SEQ ID NO: 19387 - DNA, 260 bp, Unknown
  Description of Unknown: LeftRegion for integrase B6388 sequence
caaccgctcggcagagaatatcagcctgccgacactactcaagctatccgaatacttcggcgtgaccatcgaggaactcgtacacgggacaccacaacgcgagataaccttctcaaaccgcattttcactgatgaagaacttgaagaaatacagttatttgcacaatttttactacaccgacgaaaggattagatgatggatggcatacgcgatgtacttaagaaaatcccgcatagatgaagaagcgggacttgaaaac

SEQ ID NO: 19388 - DNA, 260 bp, Unknown
  Description of Unknown: LeftRegion for integrase B6389 sequence
caatcggagcgccgaaaatatcagcttgccgacattgcttaaattatccgagtatttcggcgtgacgatcgaggaattagtgcatggcacgccgcaacgggagataactttttcaaaccggatttacaccgacaaagaacttgaagaaatacaactatttgcacaatttttactacaccgaagaaaggactagatgatgaatggcatacgcaatgtatctgcgaaaatcccgcatagacgaagaagctggacttgaaaac

SEQ ID NO: 19389 - DNA, 260 bp, Unknown
  Description of Unknown: LeftRegion for integrase B6390 sequence
attattaaaaaaatcccccgaccgctaccaacagtcggaggaaacagaataaagtgcatttatacacaatatccaaaccaataatattgtatcataaatgcactctgttttcaatataaaaattagagaaaaggagtgttatttttgtgccgttttttagaaaaacgtgtactgcataacacaagaaagggagatttacgatgaatgtagctatgtatttacgaaaatcaagagcagacgaaaacaatccgcttgaaaca

SEQ ID NO: 19390 - DNA, 260 bp, Unknown; identical to SEQ ID NO: 19361
  Description of Unknown: LeftRegion for integrase B6391 sequence

SEQ ID NO: 19391 - DNA, 260 bp, Unknown
  Description of Unknown: LeftRegion for integrase B6392 sequence
gtttgtagttgattttcaaaacaaataaaaaccgcccggtgttaccagcaccgaacggctttcacatagattctcttgccggatactccagccatgataaatccagaccaaacatctgaattatatcatttctggtacatcctggcaaggggtgtattttttacacccatttttcatacaatccacaaggagatgatataatgccgccattacccaccagtaattcacagactttggagatcggcgccgcctacatccgc

SEQ ID NO: 19392 - DNA, 260 bp, Unknown
  Description of Unknown: LeftRegion for integrase B6393 sequence
actgggaacaatcagtagtttttcaatgtccttttatgaggtacatgggagtcctgagttttcatttacaaattttatcattccagaaacattcagccttgtaagcggaatcatgtttcttggttttggtgaaataattaagcttcttcaggatatatgcaataagatcaaatgattgtatgagttgaaacgaggttattatggctgctattgactttaataatgttgtagatctgtatattcgtgtcagcacttctgag

SEQ ID NO: 19393 - DNA, 260 bp, Unknown
  Description of Unknown: LeftRegion for integrase B6394 sequence
tttcctcttcaggtgaaccagctatgattactttgcgatgcggtgtttttggatgccatatgagttattttaattccgaattgaaaaaaaagcttcctgaaaagcaagacgttaagaacttctcattataattgcaccggtgcaactctggccgctccccttgttggagcgtggattgaaataaatgattggaggttatcatgtcatctattgacattaacaatgttgtagatctgtatatccgtgtcagtacttccgaa

SEQ ID NO: 19394 - DNA, 260 bp, Unknown
  Description of Unknown: LeftRegion for integrase B6395 sequence
ttgaaaaggggactaatcacttcgtcagagaaggaaagaattatcaaaaaagtttcagaataaagcagtttttgtctggacttttataagtgagcacggtattgtttgtcctgcccgataaaaagggcggggcaaattttttatcgcagttcaaatccagtcggcagagccgaaaaacgaacgagaaaggagcgtgagaaatgaatattcaagagatacctacaacaaggaaggagaaaccacgggtatgtgcgtatgtt

SEQ ID NO: 19395 - DNA, 260 bp, Unknown
  Description of Unknown: LeftRegion for integrase B6396 sequence
attgattggatcactcaaaagattcaatagaaaacaaaaaccgcccctgcgccaacaggaacggctttcaataaatctgtacaggccgtaaggccaaatacaatatagattagacacctacattgtatcacaccttacggcacctgtataggtgtattttttatacccatttttaatataatccacaaggagatgatgcaatgtcagagttatcaacaaacaattcacagcccttggaaatcggtgccgcctacatccgt

SEQ ID NO: 19396 - DNA, 260 bp, Unknown
  Description of Unknown: LeftRegion for integrase B6397 sequence
ttgtcaatatttttttcattatgtaaataccgccctgctctaccaaagcaaggcggcaagctcccgaatgatacgaaagccctagacaagcatattgtatcattctcggagcagcttcgcaagcggaacacccgtttgacgcaggctgttatttttgtacccaaaaaccaatacaatatagagaaagaggtgcatgtgctatgaaagaaaaggtttcagaacgcaaaaccggcgcgatctacatccgtgtatccaccgac

SEQ ID NO: 19397 - DNA, 260 bp, Unknown
  Description of Unknown: LeftRegion for integrase B6398 sequence
attcttgatagcgtgaaaactttttcaagcaccttaaccgtaacagttattgattatattgataccgcagcttaaataaaaaaatttccctgcctgctccaacaggcagaggaaaaagaataaagtgcatttatacacatatgtcacgctccccacggagcgtgtgagttgaaatataacacaagaaaggaagatttacgatgaatgtagccatgtatttacgaaaatcgagagcggacgaaaacaatccgcttgaaaca

SEQ ID NO: 19398 - DNA, 260 bp, Unknown; identical to SEQ ID NO: 19363
  Description of Unknown: LeftRegion for integrase B6399 sequence

SEQ ID NO: 19399 - DNA, 260 bp, Unknown
  Description of Unknown: LeftRegion for integrase B6400 sequence
caatcggagcgccgaaaatatcagcttgccgacattgcttaaattatccgagtatttcggcgtgacgatcgaggaattagtgcatggcacgccgcaacgggagataactttttcaaaccggatttacaccgacaaagaacttgaagaaatacaactatttgcacaatttttactacaccgaagaaaggactagatgatgaatggcatacgcaatgtacctgcgaaaatcccgcatagacgaagaagcgggacttgaaaac

SEQ ID NO: 19400 - DNA, 260 bp, Unknown
  Description of Unknown: LeftRegion for integrase B6401 sequence
acaaatcggttatgacgtacctattaacgtcccaagacgttatcgcagacatatggactacttgaaaaattcggagtattaaaaaaattcacagaataagcctaatatgttattgataatttatagtagtctgcctttatgtgtcacgctccacaaggagcgtgtgagttgaaatataaaacaagaaaggaagatttacgatgaatgtagccatgtatttacgaaaatcgagagcggacgaaaacaatccgcttgaaacc

SEQ ID NO: 19401 - DNA, 260 bp, Unknown
  Description of Unknown: LeftRegion for integrase B6402 sequence
aattagttatttattttttacccttgttacagaacattagtttgccgtcgtgagataaggagatgttatatatagatagaatattaattaagaaaataaaataataatttgaaagaaggtggtactatgtgatatttaaattgattaaaagtaataaacttattatataaaatctaaaatctaaaagaggaggttttcttatgaaaaagatagcaatttattctcgtaaatcagtatttactggcaaaggtgaaagtgtt

SEQ ID NO: 19402 - DNA, 260 bp, Unknown; identical to SEQ ID NO: 19382
  Description of Unknown: LeftRegion for integrase B6403 sequence

SEQ ID NO: 19403 - DNA, 260 bp, Unknown
  Description of Unknown: LeftRegion for integrase B6404 sequence
gaaaatttataaaatgatttgaattttatcatttgtaaaatggtgtaatttaacaattatttaaaataatcaatattatttaattaaatatttaatgaaactatttttaaaataatactttgatatttttctaacaattggttaactttacctacgtttgaaaatttattattatttttttgaaagaaggaggttcttgtatgaaaaaaatagcaatttatattagaaaatctgtaaaaggtgatgaaaattcaatatct

SEQ ID NO: 19404 - DNA, 260 bp, Unknown
  Description of Unknown: LeftRegion for integrase B6405 sequence
caacaggtcagccgagaatatcagcttgcctacactgcttaaattatccgaatatttcggggtatcaatcgaggaattagtacacggaacaccgcaacgtgaaataaccttttcaaaccggatttatacggataaagagcttgaagaaatacaattatttgcacaatttttactacaccgaagaaaggactagatgatgaatggcatacgcaatgtacctgcgaaaatcccgcatagacgaagaagcgggacttgaaaac

SEQ ID NO: 19405 - DNA, 260 bp, Unknown; identical to SEQ ID NO: 19361
  Description of Unknown: LeftRegion for integrase B6406 sequence

SEQ ID NO: 19406 - DNA, 260 bp, Unknown; identical to SEQ ID NO: 19363
  Description of Unknown: LeftRegion for integrase B6407 sequence

SEQ ID NO: 19407 - DNA, 154 bp, Unknown
  Description of Unknown: LeftRegion for integrase B6408 sequence
aaatatatagtatatataagagaaaatgttaagaaaataatatttataaggaattgagaatttttttgttattctgttataaggaggtaattttatgaagtttaaaaacgtcgctctatatgtaagagtatcgaccgatatacaggtagacggc

SEQ ID NO: 19408 - DNA, 260 bp, Unknown
  Description of Unknown: LeftRegion for integrase B6409 sequence
agattgaaaaaatagtatacaaactcgaaaacattataaatgatattgcagttattgactatacaaattctgccgcgtaaaaaattcccctgcctgttggagcagacagaggaaaaagaataaagtgcatttatacacatatgtcacgctccccacggagtgtgtgagttgaaatataacacaagaaaggaagatttacgatgaatgtagccatgtatttacgaaaatcgagagcggacgaaaacaatccgcttgaaaca

SEQ ID NO: 19409 - DNA, 260 bp, Unknown
  Description of Unknown: LeftRegion for integrase B6410 sequence
caacaggtcagccgagaatatcagcttgccgacattgcttaaattatctgagtatttcggtgtaacgattgaggaattagtgcacggcacgccacaacgggaaataactttttcaaaccggatttacaccgacaaagagcttgaagaaatacaactatttgcacaatttttactacaccgaagaaaggactagatgatgaatggcatacgcaatgtacctgcgaaaatcccgcatagacgaagaagcgggacttgaaaac

SEQ ID NO: 19410 - DNA, 260 bp, Unknown
  Description of Unknown: LeftRegion for integrase B6411 sequence
acacaagataaaatatattttatcatcaaataacgaaaaaccgtccctgcgccaacaggaacggctttcaataaatctgtacaggccgtaaggccaaatacaatatagattagacacctacattgtatcacaccttacggcacctgtataggtgtattttttatacccatttttcatataatccacaaggagatgatacaatgtcagagttatcaacaaacaattcacagcccttggaaatcggggccgcttacatccgt

SEQ ID NO: 19411 - DNA, 260 bp, Unknown
  Description of Unknown: LeftRegion for integrase B6412 sequence
caatcggagcgccgaaaatatcagcttgccgacattgcttaaattatccgagtatttcggcgtaacgatcgaggaattagtgcatggcacgccgcaacgggagataactttttcaaaccggatttacaccgacaaagaacttgaagaaatacaactatttgcacaatttttactacaccgaagaaaggactagatgatgaatggcatacgcaatgtacctgcgaaaatcccgcatagatgaagaagcaggacttgaaaac

SEQ ID NO: 19412 - DNA, 260 bp, Unknown; identical to SEQ ID NO: 19394
  Description of Unknown: LeftRegion for integrase B6413 sequence

SEQ ID NO: 19413 - DNA, 260 bp, Unknown
  Description of Unknown: LeftRegion for integrase B6414 sequence
ttattaaaaaaatcccctcaaccgctaccaacagttgagggaaaaagaataaagtgcatttatacacaatatccaaagcaacattattgtatcataaatgcactctgttttcaatatacaaattagagaaaaggagtgttatttttgtgccgttttttagaaaaacacgcacgacataacacaagaaaggaagatttacgatgaatgtagctatgtatttacgaaaatcaagagcggacgaaaacaatccgcttgaaaca

SEQ ID NO: 19414 - DNA, 260 bp, Unknown
  Description of Unknown: LeftRegion for integrase B6415 sequence
ctggaaatccaaaaactaatataatataacgcaaaaaccgcccctgcaccaacaggaacggcttttacatagattctcttgccggatgcccggaaagataattcagcttgaacacctgaattatatcatttctggtacatcctggcaaggggtgtattttttgtacccacttttcatacaatccacaaggagatgatataatgtcacaattatccaccagcaatgcacaacccttggaaatcggggccgcctacatccgt

SEQ ID NO: 19415 - DNA, 260 bp, Unknown
  Description of Unknown: LeftRegion for integrase B6416 sequence
ttattaaaaaaaatcccccgaccgctaccaacagtcggaggaaacagaataaagtgcatttatacacaatatccaaaccaataatattgtatcataaatgcactctattttcaatataaaaattagaaaaggagtgttatttttgtaccgtttttttattaaaaacgagcattacataacacaagaaaggaagatttacgatgaatgtagctatatacttacgaaaatcgagagcggacgaaaacaatccgcttgaaacg

SEQ ID NO: 19416 - DNA, 260 bp, Unknown; identical to SEQ ID NO: 19383
  Description of Unknown: LeftRegion for integrase B6417 sequence

SEQ ID NO: 19417 - DNA, 260 bp, Unknown
  Description of Unknown: LeftRegion for integrase B6418 sequence
acgctattaccgattttcttaaacaaatcggttatgacgtgcccattaacgtcccaagacgttatcgcagacatatggattatttgaaaaattctgattattaaaaaaattcacagattgcgattgatgttatgggcattaagtcacgctccccacggagcgtgtgagttgaaatataacacaagaaaggaagatttacgatgaatgtagccatgtatttacgaaaatcgagagcggacgaaaacaatccgcttgaaaca

SEQ ID NO: 19418 - DNA, 260 bp, Unknown
  Description of Unknown: LeftRegion for integrase B6419 sequence
ttgaagagaggtttaatcacttcgtcagagaaggaaagaattatcaaaaaagtttcagaataaagcggcttttgtctggacttttataggtgagcacggtattgtttgtcctgcccaataaaaagggcgggacaaattttttatcgcagttcgaatccagtcgaaagagccaaaaggcgaacaagaaaggagcgtaagaaatgaatattcaagagatacctacgaaaaaagtggagaaaccacgagtatgtgcctatgtg

SEQ ID NO: 19419 - DNA, 260 bp, Unknown; identical to SEQ ID NO: 19365
  Description of Unknown: LeftRegion for integrase B6420 sequence

SEQ ID NO: 19420 - DNA, 260 bp, Unknown
  Description of Unknown: LeftRegion for integrase B6421 sequence
tcatggagctggggtcgatcgcggaagctcgtgcccacggcaagatgcgcatggagggcaaggactacgtcatgcaggacggggacgtggtcgaattccgcacagggcttacgtctaagaagtaaactggaggtatgaactagacctcctctcagccagtccgcgcagccatctatctccgtatctcactcgacagagagatggacgggctcgctatcgagcgccagcgtgaagactgcgagaacctcgcacggtttcgc

SEQ ID NO: 19421 - DNA, 260 bp, Unknown; identical to SEQ ID NO: 19386
  Description of Unknown: LeftRegion for integrase B6422 sequence

SEQ ID NO: 19422 - DNA, 260 bp, Unknown
  Description of Unknown: LeftRegion for integrase B6423 sequence
gttaagagacatgacggaaatggcagaattgcgggagtacatcgcccatgaatttttgcagctggacgatggagagcagcgagaaacgatgcttattgtcaagaaaaaaattgacgaaataaaagcgaaaaaggaacaatcagcgtaaaaaaagcacccctcggaaagccgtggggtgctaagtgtatccggaaagggaaatgattatggaaacgtattgtatatatctgcgtaagtcccgtgcggacgcagaggcagag

SEQ ID NO: 19423 - DNA, 260 bp, Unknown
  Description of Unknown: LeftRegion for integrase B6424 sequence
atcagccacagggaaagctctacgagtacaggcctgcgtattcgccggaacgcgaggacatgcgccgatttattgagatgtgctttgagcccggttccccggccaacgcaaagctgaaggaaatgctgctgaacaccgtcatggacgacgatcagtcaaagaacccctgatacaatcatgattccttcaatcggaaggtggtgaatcctacgaaagccgtcatctacgcccgctactcctccgataatcaacgcgaggaa

SEQ ID NO: 19424 - DNA, 260 bp, Unknown
  Description of Unknown: LeftRegion for integrase B6425 sequence
agcatgccggcgaacgcccctatttcgcctgctgccaaaagcgagaaggtcacgatggctctcccatatggagggtgaccgttgtctatctcggaagataaaagagccccgtcggcagcgccggtaccgctatagccgacagggcatccaaccagtgcacccatgcaaactcaacttgaaggaagggtgacatacacattatgccaaagaaggcagtgatatacgcgaggttctcgtgcaacaggcagcgcgaggcctca

SEQ ID NO: 19425 - DNA, 260 bp, Unknown
  Description of Unknown: LeftRegion for integrase B6426 sequence
ttattatttaaatcaaattagaacattcaactaaaaaccgcccctgcaccaacaggaacggcttttacatagattttctgtacaggctgtaagggccaatacgatatagcttagacacctacattgtatcacaccttacggcacctgtataggtgtatttttatacccatttttcatataatccacaaggagatgatacaatgtcagagttatcaacaaacaattcacagcccttggaaatcggggccgcttacatccgt

SEQ ID NO: 19426 - DNA, 260 bp, Unknown
  Description of Unknown: LeftRegion for integrase B6427 sequence
ttaaagagaggtttaatcacttcgtcagagaaggaaagaattatcaaaaaagtttcagaataaagcggcttttgtctggacttttataggtgagcacggtattgtttgtcctgcccaataaaaagggcgggacaaattttttatcgcagttcgaatccagtcgaaagagccgaaaggcgaacaagaaaggagcgtaagaaatgaatattcaagagatacctacgaaaaaagtggagaaaccacgagtatgtgcctatgtg

SEQ ID NO: 19427 - DNA, 260 bp, Unknown
  Description of Unknown: LeftRegion for integrase B6428 sequence
actgggaacaatcagtagtttttcaatgtccttttatgaggtacatgggagtcctgagttttcatttacgaattttatcattccagaagcattcagccttgtaagcggaatcatgtttcttggttttggtgaaataattaagcttcttcaggatatatgcaataagatcaaatgattgtatgagttgaaacgaggttattatggctgctattgactttaataatgttgtagatctgtatattcgtgtcagcacttctgag

SEQ ID NO: 19428 - DNA, 260 bp, Unknown
  Description of Unknown: LeftRegion for integrase B6429 sequence
caaccggagtgctgagaatatcagcttacctacactgttgaaattatctgaatatttcggagtatcaatcgaggaattagtacacggaaccccacaacgtgaaataaccttttcaaaccggatttacacagacaaagagctagaggaaatacagctcttcgcacaatttttactgcatcgaagaaaggactagatgatgaatggcatacgcactatatttacgaaaatcacgtgcagacgaagaactggggcacgagaac

SEQ ID NO: 19429 - DNA, 260 bp, Unknown
  Description of Unknown: LeftRegion for integrase B6430 sequence
agggacgcctctgtaagtggagtttatatattcctagccaatggtttatgtagatgtaaacgcttaaatatcactcttgacggacgcttagaggttaaatctgacaaccctaaatatgatatggagattgtaggccctaacgacaacatagagataaatattatcggtagagttatcaacaatttaagtagaggtttataatgtctgatattgctgttatatatgccagagtctctagcaaagaacaggagacagggggt

SEQ ID NO: 19430 - DNA, 260 bp, Unknown
  Description of Unknown: LeftRegion for integrase B6431 sequence
caacaggtcagccgagaatatcagcttacctacactgcttaaattatcagaatatttcggggtatcaatcgaggaattagtgcatggcacgccgcaacgtgagataactttttcaaaccggattttcactgatgaagaacttgaagaaatacagttatttgcacaatttttattacaccgacgaaaggactagatgatggatggcatacgcaatatacttgaggaaatcccgcatagatgaagaagcagggatagagaac

SEQ ID NO: 19431 - DNA, 260 bp, Unknown
  Description of Unknown: LeftRegion for integrase B6432 sequence
tataacaaatgatttaaaataaaaaatcgtccctgatgctaccaacatcaaggacgactctagctgatacttacagagcagtgctctgatataatatctctacacaagtcatattatatcattcatggcaccgcttttgcaagtaggtgtattttttatacccaaatttaatatatttacacataaggagcgtgatacatatgccaaaagcaaaagatttccggaccgcatgtgcatatataagagtgtcaaccgacaaa

SEQ ID NO: 19432 - DNA, 260 bp, Unknown
  Description of Unknown: LeftRegion for integrase B6433 sequence
agcatgccggcgaacgcccctatttcgcctgctgccaaaagcgcgaaggtcacgacggctctcccatatggagggtgaccgttgtctatctcggaagataaaagagccccgtcggcagcgctggcaccgctttagccgacggggcatccaaccagtgcacccatgcaaactcaacttgaaggaagggtgacattcacattatgccaaagagggcagtgatatacgcgaggttctcgtgcaacaggcagagagaagcgtcg

SEQ ID NO: 19433 - DNA, 260 bp, Unknown
  Description of Unknown: LeftRegion for integrase B6434 sequence
aaagagaaacatctatataaggaagcttgccatttcctctttgagcataaccataaagatgttacgattgtcagaggtcgtatctatacgcatgagtggttgcagttgtttgatgacttcattaataaaaaagccacattaggtaaagagttcttctctctggcagaaaaaacccttaaacggaagaaagaagagatagcatgagttacctttggggattggttgtagctatttatttgagaaagtcacgttcagatatt

SEQ ID NO: 19434 - DNA, 260 bp, Unknown; identical to SEQ ID NO: 19363
  Description of Unknown: LeftRegion for integrase B6435 sequence

SEQ ID NO: 19435 - DNA, 260 bp, Unknown
  Description of Unknown: LeftRegion for integrase B6436 sequence
gatacagaattagacgaataacttagaaaataaaaaccgcccctgcgccaacaggaacggctttcacatagattctcttgccggatactccggaaagatatatcagcttagacacctgaattatatcatttctggtacatcctggcaaggggtgtattttttatacccatttatcgtataatccacaaggagatgatataatgtcacaattatccaccagcaatgcacaacccttggaaatcggggccgcctacatccgt

SEQ ID NO: 19436 - DNA, 260 bp, Unknown
  Description of Unknown: LeftRegion for integrase B6437 sequence
caatcggagcgccgaaaatatcagcttgccgacattgcttaaattatccgagtatttcggcgtgacgatcgaggaattagtgcatggcacgccgcaacgggagataactttttcaaaccggatttacaccgacaaagaacttgaagaaatacaactatttgcacaatttttactacaccgaagaaaggactagatgatgaatggcatacgcaatgtacctgcgaaaatcccgcatagatgaagaagcaggacttgaaaac

SEQ ID NO: 19437 - DNA, 260 bp, Unknown; identical to SEQ ID NO: 19361
  Description of Unknown: LeftRegion for integrase B6438 sequence

SEQ ID NO: 19438 - DNA, 260 bp, Unknown
  Description of Unknown: LeftRegion for integrase B6439 sequence
tcgcgtcgaaagatggcggcagactgcggcatcagcccatcggcggtaaattcatggttcaaccggtcagccgaaaatatcagcttgccgacattgcttaaattatccgagtatttcggcgtgacgattgaggaattagtacacggcacgccgcaacgtgagataactttttcaaaccgaatttacaccgacaaatatgcatggcatacgccatttacttgaggaaatcccgcatagatgaagaagcagggatagagaac

SEQ ID NO: 19439 - DNA, 260 bp, Unknown; identical to SEQ ID NO: 19373
  Description of Unknown: LeftRegion for integrase B6440 sequence

SEQ ID NO: 19440 - DNA, 260 bp, Unknown
  Description of Unknown: LeftRegion for integrase B6441 sequence
gaaccgatttgaaaaaaatagaaaattaaataaaaatccgccccagtgttaccagcaccgaagcggatctgaatactcaccggagcaacccggtaaatatgtcctaagcaagcatattatatcatcattgctctggtttcgcaaccagggtatttttatacccttagttaagtatactcaaaaacaggagtgtgatggtaatgaaacaactgaatttcagagagtgtgccctgtacgtccgtgtttccactgacaaacag

SEQ ID NO: 19441 - DNA, 260 bp, Unknown
  Description of Unknown: LeftRegion for integrase B6442 sequence
tttataatattcgaattttcatttttaaaaatcaataaattttatatattcttctactactataacataattatatttttattattaaatagaaataaatatatagtatataaaagtaaaaaaataaagaaaaataatatttataaggaattaaagattttttagttattctgttatgacagtacaaaggaggttttattatgagatttttaaatgtagcattgtatgtaagagtatctacagatattcaggtcgatggt

SEQ ID NO: 19442 - DNA, 260 bp, Unknown
  Description of Unknown: LeftRegion for integrase B6443 sequence
tggctctcttgttaagtgtattatagcaaatctgctgtaaaagtcaactgcccccgatcaacgaccagaggcagtcaacacgtgtctggtgatacaaacacgccctaagcaagcttattgtatcacacacaggcacattttgcaaagatgtgttatttttttacacatttttataaattataccaaaggagtgtgtgaatatgataaaaacagcctgcgcctatgtgcgtgtatccactgacaaacaagaagaactgtcc

SEQ ID NO: 19443 - DNA, 260 bp, Unknown
  Description of Unknown: LeftRegion for integrase B6444 sequence
tggctctcttgttaagtgtattatagcaaatctgctgtaaaagtcaactgcccccggtcaacgaccagaggcagtcaacacgtgtctggtgatacaaacacgccctaagcaagcttattgtatcacacacaggcacattttgcaaagatgtgttatttttatacacatttttataaattataccaaaggagtgtgtgaatatgataaaaacagcctgcgcctatgtgcgtgtatccactgacaaacaagaagaactgtcc

SEQ ID NO: 19444 - DNA, 260 bp, Unknown
  Description of Unknown: LeftRegion for integrase B6445 sequence
gctataacttataactgtcaagaataatacaattaaaaaaagtcccctgctaccaacaggagaccaaaaaactaacctaccaaggtagatgccttgatatagtatagcctagacaactgtattatatcacataaaacacctgccttgcaaggtgttatttttatacccaaaaacatattttttataaggagtgatataatatgatagctatatatacaaggcaatctatcgataagaaagattccatttccattgaaaca

SEQ ID NO: 19445 - DNA, 260 bp, Unknown; identical to SEQ ID NO: 15597
  Description of Unknown: LeftRegion for integrase B6446 sequence

SEQ ID NO: 19446 - DNA, 260 bp, Unknown
  Description of Unknown: LeftRegion for integrase B6447 sequence
ccgcatagcagggctatacggcacgatatgaaccgcaaccatattgtaccatctcagccctgttaaatcaacagggcttcgttttgcccggccgcccccacgcgggagtgtggattgaaatggaaaaaaagcagatgctcggcattattctggctgtcgctccccacacggggcatggattgaaattaggaggttacaatatggatatcataacaagactgcgggctgctgcgtacggcaggtacagcaccgaattgcaa

SEQ ID NO: 19447 - DNA, 260 bp, Unknown
  Description of Unknown: LeftRegion for integrase B6448 sequence
tctttaggacaataaaacaaaataaaaaaccgccccagtgctaccaacacagagacggtctacatacccgaagatatgcgattaaaatccatgaatattgtatcatcttcggaaacagcttgcaatccagaacattcgttcatgtgctggctgttatttttataccatttttgcataaaattaaataaggagatgataacatggaaacgaaatacgcttttggatacgtccgtgtatccactgggaagcaggacgaatta

SEQ ID NO: 19448 - DNA, 260 bp, Unknown
  Description of Unknown: LeftRegion for integrase B6449 sequence
acaaaccatagatattgtcaaagacaaatataaaaaagatttatattcttccgattcacaaaaaataggttgaaaataaaaaaaatccccgaccgctactaacagtcggggaaatagtgtagtgttatggtacaccaattaaaaacatatatattgtaccataacaccgattaaaaatcaagttaagaggtgttatttttatgaacaaaaaaattaatgcagtcggatatgcacgatatagtacagaatttcaaacagat

SEQ ID NO: 19449 - DNA, 260 bp, Unknown
  Description of Unknown: LeftRegion for integrase B6450 sequence
ttctctcaattctttaggacaataaaataccgccccagtgctaccaacactgagacggtctacatatccgaagatatgcgattaaaatccaagaatattgtatcatcttcggaaacagcttgcaatccagaacattcgttcatgtgctggctgttatttttataccatttttgcataaaattaaataaggagatgataacatggaaacgaaatatgcttttggatacgtccgtgtatccactggaaagcaagatgaatta

SEQ ID NO: 19450 - DNA, 260 bp, Unknown
  Description of Unknown: LeftRegion for integrase B6451 sequence
tttgtaatattcgaattttcatttttaaaaatcaataaattttatatattcttctactactataacataattatatttttattattaaatagaaataaatatatagtatataaaagtaaaaaaataaagaaaaataatatttataaggaattaaagattttttggttattctgttatgaaaatacaaaggaggttttattatgagatttttaaatgtagcattgtatgtaagagtatctacagatattcaggtcgatggt

SEQ ID NO: 19451 - DNA, 260 bp, Unknown
  Description of Unknown: LeftRegion for integrase B6452 sequence
ataaataaaaaagcgccgaccctctggaaagggtcagcgctttggccgcgtgttacaagggggggcgacatcctggaagaggtcgcttggctgcatcctgctggaacaggggcgggccgtacacgggcagttgacatggaaagcaactgcctttattgtaacacgcaggccccagtttgaaaagggggtttttatcctttatgcgtgtgatctgctatgttcgggtgtctacccgcgaacaggcggaaaagggctattct

SEQ ID NO: 19452 - DNA, 260 bp, Unknown
  Description of Unknown: LeftRegion for integrase B6453 sequence
agcgattgggaagcacttctcacatcgtcaaacataaaataaaaaaccgcccccgaccaaatggtcaagggcagtcaacacgtgtctggtgatacaaacacgccctaagcaagcttattgtatcacacacaggcacattttgcaaagatgtgttatttttatacacatttttataaattataccaaaggagtgtgtgaatatgataaaaacagcctgcgcctatgtgcgtgtatccactgacaaacaagaagaactgtcc

SEQ ID NO: 19453 - DNA, 260 bp, Unknown
  Description of Unknown: LeftRegion for integrase B6454 sequence
aacttttattttattcaaacgacttaaatctgatataaaaaagtcccctgctaccaacagaggaccaaaaactaacctaccaaggcagatgccaagatatagtatagcctagacaactgtattatatcacaaataacacctgtcttgcaaggtgttatttttatacccaaaaacatattttttataaggagtgatataatatgatagctatatatacaaggcaatctatagataagaaagattctatatctattgaaaca

SEQ ID NO: 19454 - DNA, 260 bp, Unknown
  Description of Unknown: LeftRegion for integrase B6455 sequence
tccggagatagtgattttgttcctgccgcaaaacaagcacgccgtgaaggtattgattttattttagatccaatgagatcccccatcaaacctgatttatatgagcacattgatgggatacgtacaaaaattccacttccaaaatttgatgaaaaagatttaaacgataaccagtaaccattttccaaaggagtgatcctatgtccacaaccatcaaaacagctgctgcctacatccgcgtatcgacagatcgccaggaa

SEQ ID NO: 19455 - DNA, 260 bp, Unknown
  Description of Unknown: LeftRegion for integrase B6456 sequence
tggctctcttgttaagtgtattatagcaaatctgctgtaaaagtcaactgcccccggtcaacgaccagaggcagtcaaatcgtgtctggtgatacaaacacgccctaagcaagcttattgtatcacacacaggcacattttgcaaagatgtgttatttttatacacatttttataaattataccaaaggagtgtgtgaatatgataaaaacagcctgcgcctatgtgcgtgtatccactgacaaacaagaagaactgtcc

SEQ ID NO: 19456 - DNA, 260 bp, Unknown
  Description of Unknown: LeftRegion for integrase B6457 sequence
ttattagccagcaggaacgggaacggatcgcccgacgtacagccgaaggcgtgaaaaacggtgaatgttaactctttgataacaatcgattattgtctggatattccgaaaattgtctggtagttttgtccctgccaacacggcagggacaaaatttttaacgccaatcaaatccaccaaatcgaaaggaggaaacacaagtggagaacacaagaaagtgcaaacgagccgtggcctacgtgagagtgtcctccgggagc

SEQ ID NO: 19457 - DNA, 260 bp, Unknown
  Description of Unknown: LeftRegion for integrase B6458 sequence
attaaattctttaggagaataaaataaaaaccgccccggtgctaccaacacagagacggtctacatacccgaagatatgcgattaaaatccatgaatattgtatcatcttcggagcagctacgcaagcggaacatttgttttgcgctggctgttatttttgtactcgtttttgcataaaattaaataaggagatgacgacatggaaacgaaatacgcttttggatacgtccgtgtatccacaggaaaacaggatgaatta

SEQ ID NO: 19458 - DNA, 260 bp, Unknown
  Description of Unknown: LeftRegion for integrase B6459 sequence
aaagcaaaaaagtcccctgctaccaacagaggacctacactgacaatccaatgctaccaataaaggattgtcaaagtaccatacaaggcagatgccctgatataatacaccaacaaagatattatatcacaaataacacctgccttgcaaggtgttatttttatacccaaaaacatattttttataaggagtgatataatatgatagctatatatacaaggcagtctatcgataagaaagattccatttccattgaaaca

SEQ ID NO: 19459 - DNA, 260 bp, Unknown
  Description of Unknown: LeftRegion for integrase B6460 sequence
aagcaccaacagacaaagttaaagaaagcaagtaaaccttttcctagtacaaactagaaacattacttgctttcagataataagaacattttatttatacttccatgttcttttcttcacttagttagaattcatttctaacttttaaatgttattttactaatatatattgaatatgtcaagttataaggagtgatcctatgtccacaaccatcaaaacagctgctgcctacatccgcgtatcgacagatcgccaggaa

SEQ ID NO: 19460 - DNA, 260 bp, Unknown
  Description of Unknown: LeftRegion for integrase B6461 sequence
tggctctcttgttaagtgtattatagcaaatctactgtaaaagtcaactgcccctggtcaacgaccagaggcagtcaacacgtgtctggtgatacaaacacgccctaagcaagcttattgtatcacacacaggcacattttgcaaagatgtgttatttttatacacatttttataaattataccaaaggagtgtgtgaatatgataaaaacagcctgcgcctatgtgcgtgtatccactgacaaacaagaagaactgtcc

SEQ ID NO: 19461 - DNA, 260 bp, Unknown
  Description of Unknown: LeftRegion for integrase B6462 sequence
agtttttaaaaactatctaatatagcaaataaaaaaagatccttcaccgcgccaacagtgaaggatagatcgatacagtctgcgccaacagaactgcatcagcattgtaaaattatgacctgctaaaatcaccttttacagtgctcattttaacatattttagaaaggatggaaacagatttattatgagcgaatatatcatgtatcttagaaaaagcagacaggataatccagaagaaacagtggaggaggttcttttc

SEQ ID NO: 19462 - DNA, 260 bp, Unknown
  Description of Unknown: LeftRegion for integrase B6463 sequence
acagggaagaattagagggggataaagaatcttctacacacagcgaaggtaatccccatagaactgctcaggcgtaaaaagcgattggaggtgatactacgaaagcggtaatatatgctcgatactcaagccacaatcaaagagaggaatctatcgagggacaacttcgtgagtgtcacgacttcgccttaaaaaatggaatgacgatcatcggcgagtattgcgacagagcaatctctggaaaaaccgataaccgtccg

SEQ ID NO: 19463 - DNA, 260 bp, Unknown
  Description of Unknown: LeftRegion for integrase B6464 sequence
tttataatattcgaattttcatttttgaaaatcaataacttttatatattcttctactactataacataattatatttttattattaaatagaaataaatatatagtatataaaagtaaaaaaacaaagaaaaataatatttataaggaattaaagattttttggttattctgttatgacagtacaaaggaggttttattatgagatttttaaatgtagcattgtatgtaagagtatctacagatattcaggtcgatggt

SEQ ID NO: 19464 - DNA, 260 bp, Unknown
  Description of Unknown: LeftRegion for integrase B6465 sequence
tagcgtcacacgttttataaaataaaaaccgccccagtgctaccaacaccgggacggcaatacatatccgaagatatgcgattgaaatccaagaatattgtatcatcttcggagcagtcacgcaagcggaacatcagttcgcacgttggctgttatttttatactcatttttgcataaaattaaataaggagatgatagcatggaaacaaaatatgcctttggatatgtacgtgtatccacaggaaaacaggatgaatta

SEQ ID NO: 19465 - DNA, 260 bp, Unknown
  Description of Unknown: LeftRegion for integrase B6466 sequence
gctgcttctgttggatattaaaacaaaataaaaaaccgcccctgcgccaacaggaacggtctacatacccgaagatatgcgattaaaatccaagaatattgtatcatcttcggagcagtcacgcaagcggaacatatgttttgtgctggctgttatttttgtactcgtttttgcataaaattaaataaggagatgataacatggaagcgaaatacgcttttggatacgtccgtgtatccactggaaagcaagatgaatta

SEQ ID NO: 19466 - DNA, 260 bp, Unknown
  Description of Unknown: LeftRegion for integrase B6467 sequence
gaataataaaaaaagcgccgaccctctggaaagggtcagcgctttggccgcgtgttacaagggggcgacatcctggaagaggtcgcttggctgcatcctgctggaacaggggcgggccgtacacgggcagttgacatggaaagcaactgcctttattgtaacacgcaggccccagtttgaaaagggggtttttatcctttatgcgtgtgatctgctatgttcgggtgtctacccgcgaacaggcggaaaagggctattct

SEQ ID NO: 19467 - DNA, 260 bp, Unknown
  Description of Unknown: LeftRegion for integrase B6468 sequence
aaattctttaggagaataaaataaaaaccgccccggtgctaccaacaccgagacggtaatacatatccgaagatatgcgattgaaatccaagaatattgtatcatcttcggaaacagcttgcaatccagaacatttgttcatgtgctggctgttatttttgtactcgtttttgcataaaattaaataaggagatgataacatggaaacgcaatatgcttttggatacgtccgtgtatccactggaaagcaagacgaatta

SEQ ID NO: 19468 - DNA, 260 bp, Unknown; identical to SEQ ID NO: 19455
  Description of Unknown: LeftRegion for integrase B6469 sequence

SEQ ID NO: 19469 - DNA, 260 bp, Unknown
  Description of Unknown: LeftRegion for integrase B6470 sequence
gtaccagtatctaatgcctatgtggaagattttataaaaaaaagccccctgctaccaacaggaggcaaaaactaacctatcaaggtagatgccttgatatagtatagcctagacaactgtattatatcacacaaaacacctgccttgcaaggtgttatttttatacccaaaaacatattttttataaggagtgatataatatgatagctatatatacaaggcaatctatagataaaaaagattccatttccatcgaaaca

SEQ ID NO: 19470 - DNA, 260 bp, Unknown
  Description of Unknown: LeftRegion for integrase B6471 sequence
cggcgctgatctggacgatgacgaataaataaaaaagcgccgtccctctggaaagggccagcgcttcgaggccgcgtgttacatttgcttcgtgctcctgctggaacaggggcgggctgtacacgggcagttgacatagacgacaactgcctttattgtaacacgcaggccccaatttgaaaagggggtttttatcctttatgcgtgtgatctgctatgttcgggtatctacccgcgaacaggcggaaaagggctattct

SEQ ID NO: 19471 - DNA, 260 bp, Unknown; identical to SEQ ID NO: 19443
  Description of Unknown: LeftRegion for integrase B6472 sequence

SEQ ID NO: 19472 - DNA, 260 bp, Unknown; identical to SEQ ID NO: 19443
  Description of Unknown: LeftRegion for integrase B6473 sequence

SEQ ID NO: 19473 - DNA, 260 bp, Unknown
  Description of Unknown: LeftRegion for integrase B6474 sequence
cggctcgacgctcgattcggtggtcgaccccttccgtgggcggctggacccgagggcgctcaacgcgatgtacacgaatccgaaagatataccgatggaataccgagactagctcccggccacaagaaagcgcctcggtgcggactgcattccgcaccgaggcaggcgtccacaccttggaagagagggacggtcacattatggcatctcgcaggggatcgcgtaaggcgcccgagaaggaccacaagcgctgcgtcatc

SEQ ID NO: 19474 - DNA, 260 bp, Unknown
  Description of Unknown: LeftRegion for integrase B6475 sequence
tccggagatagtgattttgttcctgctgcgaaacaggcacgtcgtgaaggtattgattttattttagatccaatgagatcccccatcaaacctgatttatatgagcacattgatgggatacgtacaaaaattccacttccaaaatttgatgaaaaagatttaaacgataaccagtaaccattttccaaaggagtgatcctatgtccacaaccatcaaaacagctgctgcctacatccgcgtatcgacagatcgccaggaa

SEQ ID NO: 19475 - DNA, 260 bp, Unknown
  Description of Unknown: LeftRegion for integrase B6476 sequence
aataaataaaaaagcgccgaccctctggaaagggtcagcgctttggccgcgtgttacaaggggggcgacatcctggaagaggtcgcttggctgcatcctgctggaacaggggcgggccgtacacgggcagttgacatggaaagcaactgcctttattgtaacacgcaggccccagtttgaaaagggggtttttatcctttatgcgtgtgatctgctatgttcgggtgtctacccgcgaacaggcggaaaagggctattct

SEQ ID NO: 19476 - DNA, 260 bp, Unknown; identical to SEQ ID NO: 19460
  Description of Unknown: LeftRegion for integrase B6477 sequence

SEQ ID NO: 19477 - DNA, 260 bp, Unknown
  Description of Unknown: LeftRegion for integrase B6478 sequence
cgtgaaataaaaaaccgccgcccttggcgggcgacggctctcagcgcgcaagctgcctttttatatgcccccggtcagcaaggggcagtcgtaagcaagtcgcacatttataggccgctggcgacaggcggcatttggctgatgcctgattttagcacaacgagtcacgacaatgcaagggggtgattcctacgaatttcatgtatctccgcaagagccgcgcggaggaggggcagagcacggaggaggtgctggcgaag

SEQ ID NO: 19478 - DNA, 260 bp, Unknown; identical to SEQ ID NO: 19452
  Description of Unknown: LeftRegion for integrase B6479 sequence

SEQ ID NO: 19479 - DNA, 260 bp, Unknown
  Description of Unknown: LeftRegion for integrase B6480 sequence
acagggctaaaagtcaatttaagacaacaaaaaaaaagatccttcaccgcgccaacagtgaaggatagatcgatacagtctgcgccaacagaactgcatcagcattgtaaaattatgacctgctaaaatcaccttttacagtgctcattttaacatattttagaaaggatggaaacagatttattatgagcgaatatatcatgtatcttagaaaaagcagacaggataatccagaagaaacagtggaggaggttcttttt

SEQ ID NO: 19480 - DNA, 260 bp, Unknown
  Description of Unknown: LeftRegion for integrase B6481 sequence
cgtgaaataaaaaaccgccgtccttggcgggcgacggctctcagcacgcaagctgcctttttatatgcccccggtcagcaaggggcagtcgtaagcaagtcgcacatttataggccgctggcgacaggcggcatttggctgatgcctgattttagcacaacgagtcacgacaacgcaagggggtgattcctacgaattacatgtatctccgcaagagccgcgcggaggaggggcagagcacggaggaggtgctggcgaag

SEQ ID NO: 19481 - DNA, 260 bp, Unknown
  Description of Unknown: LeftRegion for integrase B6482 sequence
ttcattaaattctttaggagaataaaataaaaaccgcccctgcgccaacagagacggtctacatatccgaagatatgcgattgaaatccaagaatattgtatcatcttcggaaacagcttgcaatccagaacattcgttcatgtgctggctgttatttttgtactcgtttttgcataaaattaaataaggagatgataacatggaaacgaaatatgcttttggatacgtccgtgtatccactggaaagcaagacgaatta

SEQ ID NO: 19482 - DNA, 260 bp, Unknown
  Description of Unknown: LeftRegion for integrase B6483 sequence
tcagaaaatcgccgtgcaataaaataaaaaccgccccggtgctaccaacactgagacggtctacatacccgaagatatgcgattaaaatccatgaatattgtatcatcttcggagcagtcacgcaagcggaacatatgttttgcgatgactgttatttttgtactcgtttttgcataaaattaaataaggagatgataacatggaaacgaaatatgcttttggatacgtccgtgtatccactggaaagcaagacgaatta

SEQ ID NO: 19483 - DNA, 260 bp, Unknown
  Description of Unknown: LeftRegion for integrase B6484 sequence
aacgaatacaataatttttcgtaataaaaaccgccccagtgctaccaacactgagacggtctacatacccgaagatatgcgattaaaatccatgaatattgtatcatcttcggaaacagcttgcaagcggaacatatgttttgcgctggctgttatttttgtactcgtttttgcataaaattaaataaggagatgataacatggaaacgaaatacgcttttggatacgtccgtgtatccactggaaagcaagatgaatta

SEQ ID NO: 19484 - DNA, 260 bp, Unknown
  Description of Unknown: LeftRegion for integrase B6485 sequence
agtttttaaaaactatctaatatagcaaataaaaaaagatccttcaccgcgccaacagtgaaggatagatcgatacagtctgcgccaacagaactgtatccgcattgtaaaattatgacctgctaaaatcaccttttacagtgctcattttaacatattttagaaaggatggaaacagatttattatgagcgaatatatcatgtatcttagaaaaagcagacaggataatccagaagaaacagtggaggaggttcttttc

SEQ ID NO: 19485 - DNA, 260 bp, Unknown
  Description of Unknown: LeftRegion for integrase B6486 sequence
atttatagactacatagataaaactaaattataagacaaaaaagtcccctgctaccaacagaggaccaaaaactaacctaccaaggcagatgccaagatatagtatagcctagacaactatattatatcacaaataacacctgccttgcaaggtgttatttttataccaaaaacatattttttataaggagtgatataatatgatagctatatatacaaggcagtctatcgataagaaagattccatttccattgaaaca

SEQ ID NO: 19486 - DNA, 260 bp, Unknown
  Description of Unknown: LeftRegion for integrase B6487 sequence
gcgttttttactttataggaaacgggcagtttcctataaagtaaaaaaccgccccagccaaacggcagaggcagtcaaatcgtgtctggtgatacaaacacgccctaagcaagcttattgtatcacacacaggcacattttgcaaagatgtgttatttttatacacatttttataaattataccaaaggagtgtgtgaatatgataaaaacagcctgcgcctatgtgcgtgtatccactatccaacaagaagaactgtcc

SEQ ID NO: 19487 - DNA, 260 bp, Unknown
  Description of Unknown: LeftRegion for integrase B6488 sequence
ctagttgttgaaggaacaattaatgttcaattcaagagtaaataaaaaaaccgccccacacaaaatgagacggttctgacaatagaataacaaggagttatactatcgccctcgacaagcatattatagcaccttttatataaattaacaataattatattgggtgtattttttatacccttttttaaggagtgcatgtaatgaataataatttagtacctctctctaattcagcaataaatgaattagttgatctttac

SEQ ID NO: 19488 - DNA, 260 bp, Unknown
  Description of Unknown: LeftRegion for integrase B6489 sequence
cagcaagatttaactattcaataaaaataaaaaccgtccctgcgccaacaggaacggtctacatatccgaagatatgctattgaaatccacgaatattgtatcatcttcggaaacagcttgcaatccagaacattcgttcatgtgctggctgttatttttgtactcgtttttgcataaaattaaataaggagatgataacatggaaacgaaatacgcttttggatacgtccgtgtatccactggaaagcaagatgaatta

SEQ ID NO: 19489 - DNA, 260 bp, Unknown; identical to SEQ ID NO: 19443
  Description of Unknown: LeftRegion for integrase B6490 sequence

SEQ ID NO: 19490 - DNA, 260 bp, Unknown
  Description of Unknown: LeftRegion for integrase B6491 sequence
gttcgtctcggtagctttttctgtttaaacaaaaaaagatccttcaccgcgccaacagtgaaggatagatcgatacagtctgcgccaacagaactgcatccgcattgtaaaattatgacctgctaaaatcaccttttacagtgctcattttaacatattttagaaaggatggaaacagatttattatgagcgaatatatcatgtatcttagaaaaagcagacaggataatccagaagaaacagtggaggaggttcttttc

SEQ ID NO: 19491 - DNA, 260 bp, Unknown
  Description of Unknown: LeftRegion for integrase B6492 sequence
atttttaaaaactatctaatatagcaaacaaaaaaaagatccttcaccgcgccaacagtgaaggatagatcgatacagtctgcgccaacagaactgtatcagcattgtaaaattatgacctgctaaaatcaccttttacagtgctcattttaacatattttagaaaggatggaaacagatttattatgagcgaatatatcatgtatcttagaaaaagcagacaggataatccagaagaaacagtggaggaggttcttttc

SEQ ID NO: 19492 - DNA, 260 bp, Unknown
  Description of Unknown: LeftRegion for integrase B6493 sequence
tgctataacttataactgtcaagaataatacaattaaaaaaagtcccctgctaccaacagaggaccaaaaaactaacctatcaaggcaagtgccaagatataatcagcctgaacaactgtattatatcacaaatagcacctgccttgcaaggtgttatttttatacccaaaaacatattttttataaggagtgatataatatgatagctgtatatacaaggcagtctatagataagaaagattctatatctattgaaaca

SEQ ID NO: 19493 - DNA, 260 bp, Unknown
  Description of Unknown: LeftRegion for integrase B6494 sequence
tacaaacggcggcacaaaataccacaataaatcttcttgcagtaatatggacaatccccagcaagtaacaaaagacgaggctgtcgcaatgggttttaccccatgcaaaagatgttattaatcattttaataaaatacaagcttaattaaaattaagctgcaacacaataatatttgacgggagatctataaaaagaattatgatagccatatattcaagacaatccatagataaaaaagacagtataagcattgaaacg

SEQ ID NO: 19494 - DNA, 260 bp, Unknown
  Description of Unknown: LeftRegion for integrase B6495 sequence
gatattacaaaacaaaccattgtttttctttcccctaagaaaaatatataccatagcaatgaacactgcagtggaatgcagaatgctctttctattcgtttggaaaaggcaatgaaaatgggctttattccctgcaaaaaatgctgtagttttaattttaatgaattataatcactaactaacaccaaaggagtgatcctatgtccacaaccatcaaaacagctgctgcctacatccgcgtatcgacagatcgccaggaa

SEQ ID NO: 19495 - DNA, 260 bp, Unknown
  Description of Unknown: LeftRegion for integrase B6496 sequence
caattaaaaaagtcccctgctaccaacagaggacctacactgacaatccaatgctaccaataaaggattgtcaaagtaccatacaaggcagatgccctgatataatacaccaacaaagatattatatcacaaataacacctgccttgcaaggtgttatttttatacctaaaaacatattttttataaggagtgatataatatgatagctatatatacaaggcagtctatcgataagaaagattccatttccattgaaaca

SEQ ID NO: 19496 - DNA, 260 bp, Unknown
  Description of Unknown: LeftRegion for integrase B6497 sequence
tttataatattcgaattttcatttttaaaaatcaataaattttatatattcttctactactataacataattatatttttattattaaatagaaataaatatatagtatataaaagtaaaaaaataaagaaaaataatatttataaggaattaaagattttttggttattctgttatgacagtacaaaggaggttttattatgagatttttaaatgtagcattgtatgtaagagtatctacagatattcaggtcgatggt

SEQ ID NO: 19497 - DNA, 260 bp, Unknown
  Description of Unknown: LeftRegion for integrase B6498 sequence
agaaaaagaatgggcaaaagaaaaatacttacgttttgatgtaaaattagatcgtgaggtatttggggaaactatagccagtatcaaggaagagttaggaactgctgcgttcttaaagaaagctttagagctttacaaaacaaatcctgagttatttaagtagtaaaatcaattcaaagaaataagataggtgtttaaaaatgaaggcagctttatacactcgtgtttctacagatgaacaggctgaacatggcttttcg

SEQ ID NO: 19498 - DNA, 260 bp, Unknown
  Description of Unknown: LeftRegion for integrase B6499 sequence
caactagaaagcaaaaattaactatgaaaacaaaagcgatccctgcgccaacaggaaccgctttaacatagatcactcttatcaggtatactgaaagatataatccactccattccagattataccatttcagtggcacctgcacaagaggtgtattttttatacccttttttaataaattttaatcaggaggcaatattatgactgcaaaaaacgctgaatctttcttagaaatcggagctgcttacatccgtgtaagt

SEQ ID NO: 19499 - DNA, 260 bp, Unknown
  Description of Unknown: LeftRegion for integrase B6500 sequence
aataaaagacccttgtgctggtaacacaagagcctttatataacgacatttacataagctgtgcttatgatataatatcgccctagacaagccatattatatcattcatagcaccgcttttgcaagtggtgttatttttgtacccatttttgagttgcaccggtgcaacttgcatatattctacagaaaggatgattaatatggctaaggatatacttaatatgaaatctgcgtgtgcttatatccgtgtatctactgac

SEQ ID NO: 19500 - DNA, 260 bp, Unknown; identical to SEQ ID NO: 19499
  Description of Unknown: LeftRegion for integrase B6501 sequence

SEQ ID NO: 19501 - DNA, 260 bp, Unknown
  Description of Unknown: LeftRegion for integrase B6502 sequence
aaaagatttccgcagacgaattttaaaaataaaagcgatccctgcgccaacaggaaccgctttaacatagatcactcttatcaggtatactgaaagatataatccactaccactccaaattataccatttccgtagcacctgcacaagaggtgtattttttgtacccatttttaatacattttaagcaggaggcaatattatgactaccaaaaacactgaatctttcttagaaatcggagcagcttacatccgtgtaagt

SEQ ID NO: 19502 - DNA, 260 bp, Unknown
  Description of Unknown: LeftRegion for integrase B6503 sequence
taaaagcccctgtgctaccaacacaagagcttttaccacgatacttacataagcactgcttatgatataataccgccttagacaagccatattatatcatttctaacaccgcttatgcaagtaggtgttattttttatacccatttttactgagttgcaccggtgcaacttgcatatattttacagaaaggatgattaatatggctaaggatatacttaatatgaaatctgcttgtgcctacatacgtgtgtccaccgat

SEQ ID NO: 19503 - DNA, 260 bp, Unknown
  Description of Unknown: LeftRegion for integrase B6504 sequence
tttccttaaattaactgtatttaccaattttccacattcttttaaaatatcatctatattttcattatggcaatagctgtcatctataattatttttatatttccaatttgttctgtctttttcatattaaaccacctctttttattcatattctcaattataaaaaatataattttctcaaagtatttcaggtgatattatggcatattgtatgtatttaagaaaatccagagctgacaaagattatgaaaatttatca

SEQ ID NO: 19504 - DNA, 260 bp, Unknown
  Description of Unknown: LeftRegion for integrase B6505 sequence
ataaaagcccctgtgctaccaacacaagagcttttaccacgatacttacataagctgtgcttatgatatataccgccttagacaagccatattatatcatttctaacaccgcttatgcaagtaggtgttattttttatacccatttttactgagttgcaccggtgcaacttgcatatattttacagaaaggatgattaatatggctaaggatatacttaatatgaaatctgcttgtgcctacatacgtgtgtccaccgat

SEQ ID NO: 19505 - DNA, 260 bp, Unknown
  Description of Unknown: LeftRegion for integrase B6506 sequence
caactagaaagcaaaaattaactatgaaaacaaaagcgatccctgcgctaacaggaaccgctttaacatagatcactcttatcaggtatactgaaagatataatccactccattccagattataccatttcagtggcacctgcacaagaggtgtattttttatacccttttttaataaattttaatcaggaggcaatattatgactgcaaaaaacgctgaatctttcttagaaatcggagctgcttacatccgtgtaagt

SEQ ID NO: 19506 - DNA, 260 bp, Unknown
  Description of Unknown: LeftRegion for integrase B6507 sequence
aaaagatttccgcagacgaattttaaaaataaaagcgatccctgcgccaacaggaaccgctttaacatagatcactcttatcaggtatactgaaagatataatccactaccactccaaattataccatttccgtagcacctgcacaagaggtgtattttttatacccttttttaataaattttaatcaggaggcaatattatgactgcaaaaaacgctgaatctttcttagaaatcggagctgcttacatccgtgtaagt

SEQ ID NO: 19507 - DNA, 260 bp, Unknown
  Description of Unknown: LeftRegion for integrase B6508 sequence
taaaataaaagctcctgtgctaccaacacaagagcttttaccacgatacttacataagctgtgcttatgatataataccgccctagacaagccatattatatcattcatagcaccgcttttgcaagtggtgttatttttgtacccatttttgagttgcaccggtgcaacttgcatatattttacagaaaggatgattaatatggctaaggatatacttaatatgaaatctgcatgtgcttatatccgtgtatctactgac

SEQ ID NO: 19508 - DNA, 260 bp, Unknown
  Description of Unknown: LeftRegion for integrase B6509 sequence
gccacgaaaccgggtacgaagaaggcgaaagcgaaggatacgaaagtggataccaagaaggctatgaagaaggcgaatcgcatatgcgcttcctacaaaagaagaaagatagcgcagccagtaatgttatactgatcggcgctgtgattttcttcattatatatcacttcgaaaagaaaaagtctgaataaggaggaattatggaacgcaaagtcgcttgctacatccgtgtgagcactcaggagcaggccacgcacgga

SEQ ID NO: 19509 - DNA, 260 bp, Unknown; identical to SEQ ID NO: 19499
  Description of Unknown: LeftRegion for integrase B6510 sequence

SEQ ID NO: 19510 - DNA, 260 bp, Unknown; identical to SEQ ID NO: 19503
  Description of Unknown: LeftRegion for integrase B6511 sequence

SEQ ID NO: 19511 - DNA, 260 bp, Unknown
  Description of Unknown: LeftRegion for integrase B6512 sequence
ataaataaaagcccttgtgttggtagcacaagagcctttaccacgatacttacataagctgtgcttatgatataataccgccttcgacaagccatattatatcattcatagcaccgcttttgcaagtggtgttatttttttacccatttttgagttgcaccggtgcaacttgcatatattttacagaaaggatgattaatatggctaaggatatacttaatatgaaatcagcatgtgcttatatccgtgtatctactgac

SEQ ID NO: 19512 - DNA, 260 bp, Unknown
  Description of Unknown: LeftRegion for integrase B6513 sequence
ttcccctctattcacattgataggtgcaacaatcatcttttcaacgccatcaacgaaagcccgaacgcaaccctcaacatcaacggtacagagggatttacggctcaggagcttgaattgattgagctgtatcggaacttcccgctgagaaagcaaatggaactgctgaactacgctttcagcctgaaagaaggtaagcaatgagagtagttctttacatgaggtatagcagcgaccgtcagactgagcaatccatagag

SEQ ID NO: 19513 - DNA, 260 bp, Unknown; identical to SEQ ID NO: 19507
  Description of Unknown: LeftRegion for integrase B6514 sequence

SEQ ID NO: 19514 - DNA, 260 bp, Unknown
  Description of Unknown: LeftRegion for integrase B6515 sequence
aaataaaagcccctgtgctaccaacacaagagcttttacccgcgacttacaattaagctgtactcaaatgatataatcgccttcagcaagccatattatatcatttgaaacaccgcttttgcaagtggtgttatttttatacccatttttagagttgcaccggtgcaattcgcatatattttacagaaaggatggttaatatggctacagatattgcaaacatgaaagtagcatgtgcttatattcgtgtatctacagac

SEQ ID NO: 19515 - DNA, 260 bp, Unknown; identical to SEQ ID NO: 18960
  Description of Unknown: LeftRegion for integrase B6516 sequence

SEQ ID NO: 19516 - DNA, 260 bp, Unknown; identical to SEQ ID NO: 19501
  Description of Unknown: LeftRegion for integrase B6517 sequence

SEQ ID NO: 19517 - DNA, 260 bp, Unknown
  Description of Unknown: LeftRegion for integrase B6518 sequence
atggataataaaaaagaagtcctaaagcttcaaattgtccttgaactaatcaaattgcaaagagatttaatcaagacgattaatgaagcaaacaagagaggcaagtaagcctctccccttaaatgggggacttcttctactattattttaacatcttttacaataaaatcaattcaaagaaataagataggtgtttaaaaatgaaggcagctttatacactcgtgtttctacagatgaacaggctgaacatggcttttcg

SEQ ID NO: 19518 - DNA, 260 bp, Unknown
  Description of Unknown: LeftRegion for integrase B6519 sequence
caactagaaagcaaaaattaactatgaaaacaaaagcgatccctgcgccaacaggaaccgctttaacatagatcactcttatcaggtatactgaaagatataatccactccattccagattataccatttcagtggcacctgcacaagaggtgtattttttatacccttttttaatacattttaagcaggaggcaatattatgactacaaaaaatactgaatctttcttagaaatcggagctgcttacatccgggtaagt

SEQ ID NO: 19519 - DNA, 260 bp, Unknown
  Description of Unknown: LeftRegion for integrase B6520 sequence
atgtaaattgttaaatagatagaaaagccgcccagtgctaccaacaccaaacggctttcacatagattttctcttaccagattactccggtttgattaatccagacttagaacatctgaattatatcattttcggaacatcctggcaagggtgttatttttatactcatttttcatacgtatagagaaggagatgatcatatgtcagataaacctacacccaaaaatcttgaaatcggtgctgcctatatcagagtcagt

SEQ ID NO: 19520 - DNA, 260 bp, Unknown
  Description of Unknown: LeftRegion for integrase B6521 sequence
tttccttaaattaactgtatttaccaattttccacattctttcaaaatgtcatctgtattttcattattacaatagctgtcatctataattaactttatatttttaacttgttctacttttttcatattaaatcacctctttttattcatattcccaattataaaaaatataattttctcaaagtattttaggtgatattatggcatattgtatgtatttaagaaaatcccgagctgataaagattacgaaaattcatca

SEQ ID NO: 19521 - DNA, 260 bp, Unknown
  Description of Unknown: LeftRegion for integrase B6522 sequence
taagattagcaaaacattttactcaagaaagattagccgaaagattaaatattagtcaaggatatttatctaggctagaacgtaatgaaaaggtagctgtcttaggggttagacttaaaactataagagatttagcaagggagcttggagttaaggagaaggatattttaaaattcaaataaactctaggagggacttgtatgaaaaaaatagcaatttatattagaaaatctgtaaagggagatgagaattcaatttcc

SEQ ID NO: 19522 - DNA, 260 bp, Unknown
  Description of Unknown: LeftRegion for integrase B6523 sequence
tatattttcctgatttagtcaaatatcctacgtatttcttcatatatttattctccaaataagctttcaaatttcttctttaaactccggtttgattaatccagacttagaacatctgaattatatcattttcggaacatcctggcaagggtgttatttttatactcatttttcatacgtatagagaaggagatgatcatatgtcagataaacctacaccaaaaagtcttgaaatcggtgctgcctatatcagagtcagt

SEQ ID NO: 19523 - DNA, 260 bp, Unknown; identical to SEQ ID NO: 19501
  Description of Unknown: LeftRegion for integrase B6524 sequence

SEQ ID NO: 19524 - DNA, 260 bp, Unknown
  Description of Unknown: LeftRegion for integrase B6525 sequence
agacttgctctttcttttgctttgattgatagactatgggaaaaaggacttataacagatgatgaaaagaaaaaaataaaagaaagagaaaaagttaaaattttatcaacaaaagactagatattaattcatatttgcggtattgttttggtacaatcaactccgtaaatgagttaggtgtataaaacaaggaggtacatatggaaaaagccgtagcctatataagggtttctacaaaaagtgattttcagcttcatagt

SEQ ID NO: 19525 - DNA, 260 bp, Unknown
  Description of Unknown: LeftRegion for integrase B6526 sequence
aggactcacataccttacaggagcaagagataccagttgcataattaaaaaccgcccctgcgccaacaggaacggttttagatgcactccgaagagatacacccctattcaaatatattgtatcatcttcgagcagccaatgcaagagaacgaaagttcgctggctgttatttttatactattttcaaggaggacaaataatgaataaacgcgtagccggttatgcccggtactctacagacaatcagacagaaaacagt

SEQ ID NO: 19526 - DNA, 260 bp, Unknown
  Description of Unknown: LeftRegion for integrase B6527 sequence
tactcttttgcatagattcggcagaaaaggttgtgcagattggtgatagctttcagtggtttcctgtggtactgtgttgagctgaaaagctgccctatctgccgcgactgattttgcaagcatagcgtttggatatccaccaaacgcaaatcttggggcggcgccccaaaccccgcaagtgaccataaggaggaatgccaatgaaagcagtcatctacgcccgatacagcagcgacaaccagcgagaggaaagcatcgag

SEQ ID NO: 19527 - DNA, 260 bp, Unknown
  Description of Unknown: LeftRegion for integrase B6528 sequence
aactagaaagcaaaaattaactatgaaaacaaaagcgatccctgcgccaacaggaaccgctttaatatagattactcttatcaggtatactgaaagatataatccactaccactcccgattataccatttccgtagcacctgcacaagaggtgtattttttatacccatttttaatacattttaatcaggaggcaatattatgactatcaaaagcactgaatctttcttagaaatcggagctgcttacatccgtgtaagt

SEQ ID NO: 19528 - DNA, 260 bp, Unknown; identical to SEQ ID NO: 19503
  Description of Unknown: LeftRegion for integrase B6529 sequence

SEQ ID NO: 19529 - DNA, 260 bp, Unknown
  Description of Unknown: LeftRegion for integrase B6530 sequence
aataaataaaagcccctgtgctaccaacacaagagcttttaccacgatacttacataagctgtgcttatatataataccgccctagacaagctatattatatcattcatagcaccgcttttgcaagtggtgttatttttgtacccatttttgagttgcaccggtgcaacttgcatatattttacagaaaggatgattaatatggctaaggatatacttaatatgaaatctgcttgtgcctacatacgtgtgtccacagat

SEQ ID NO: 19530 - DNA, 260 bp, Unknown; identical to SEQ ID NO: 19527
  Description of Unknown: LeftRegion for integrase B6531 sequence

SEQ ID NO: 19531 - DNA, 260 bp, Unknown
  Description of Unknown: LeftRegion for integrase B6532 sequence
gcgcgcttagggttagctggctagtaaaagagcgccgctcgcgcgacgctccactcgcactcgcttgcaggagcaagcagagagcagccttgtctattataatagcacactctgctgctcttgtcttgtgggtacatgccgaaaaaggaaaataatgtatctttaccatgcttttactgtacatttggaggtaaataaaaatgataagagcagctatctatatccgagtcagcactgaggaacaggcccggcacggcttc

SEQ ID NO: 19532 - DNA, 260 bp, Unknown
  Description of Unknown: LeftRegion for integrase B6533 sequence
agaaaaagaatgggcaaaagaaaaatacttacgttttgatgtaaaattggatcgtgaagtatttggagagactatagccagtatcaaggaagagttaggaactgctgcgttcttaaagaaagctttagagctttacaaaacaaatcccgagttatttaagtagtaaaatcaattcaaagaaataagataggtgtttaaaaatgaaggcagctttatacactcgtgtttctacagatgaacaggctgaacatggcttttcg

SEQ ID NO: 19533 - DNA, 260 bp, Unknown
  Description of Unknown: LeftRegion for integrase B6534 sequence
ctcaaagcttactctatcacataccacagacgtcataacaaacaccgggtagaataaaagaacataaaaaatggctcacctcgctattggcgtagcgaagtgagccggtattctactcatgtatgtgtacatgaatcaactaaagcatattcattatacatcacatgagctatacgcacaagtaggaaaggaaaagtataatgaatgtattagataacgtagtagacctgtatgtgcgggttagtactaccgagcaggcc

SEQ ID NO: 19534 - DNA, 260 bp, Unknown
  Description of Unknown: LeftRegion for integrase B6535 sequence
tgatgctttgcttcaactggcctgccgcaaaacaggcaatattcgttatattcagtaattattccttttttcatatttcacttgcgcatactgaaagatataatccactccattccagattataccatttcagtggcacctgcacaagaggtgtattttttatacccttttttaatacattttaagcaggaggcaatattatgactacaaaaaatactgaatctttcttagaaatcggagctgcttacatccgggtaagt

SEQ ID NO: 19535 - DNA, 260 bp, Unknown; identical to SEQ ID NO: 19518
  Description of Unknown: LeftRegion for integrase B6536 sequence

SEQ ID NO: 19536 - DNA, 260 bp, Unknown
  Description of Unknown: LeftRegion for integrase B6537 sequence
tgatgaaaataaaacagaatactctattactgatattagagaagcttttaacttaatacttagttctgatgaattgacattaaataataaagaacttagttataatgaaaaatcattaattgaagatacaataaatgatgtactagactttatagtaaaaaaaagaaacaaactaaataactaatttaaaaggtgataatatgaaaagcatagctatatatataagaaaatctgtaaaaggtgatgataactcaatttct

SEQ ID NO: 19537 - DNA, 260 bp, Unknown
  Description of Unknown: LeftRegion for integrase B6538 sequence
atggataataaaaaagaagtcctaaagcttcaaattgtccttgaactaatcaaactgcaacgagatttaatcaagacgattaatgaagcaaacaagagaggcaagtaagcctctccccttaaatgggggacttcttctactattattttaacatcttttacaataaaatcaattcaaagaaataagataggtgtttaaaaatgaaggcagctttatacactcgtgtttctacagatgagcaagctgaacatggcttttca

SEQ ID NO: 19538 - DNA, 260 bp, Unknown
  Description of Unknown: LeftRegion for integrase B6539 sequence
caactagaaagcaaaaattaactatgaaaacaaaagcgatccctgcgccaacaggaaccgctttaacatagatcactcttatcaggtatactgaaagatataatccactccattccagattataccatttcagtggcacctgcacaagaggtgtattttttatacccttttttaatacattttaagcaggaggcaatattatgaccataaaaaacactgaatctttcttagaaattggagcagcttacattcgggtaagt

SEQ ID NO: 19539 - DNA, 260 bp, Unknown
  Description of Unknown: LeftRegion for integrase B6540 sequence
gccacgaaaccgggtacgaagaaggcgaaagcgaaggatacgaaagtggataccaagaaggctatgaagaaggcgaatcgcatatgcgcttcctacaaaagcagaaagatagcgcagccagtaatgttatactgatcggcgctgtgattttcttcattatatatcacttcgaaaagaaaaagtctgaataaggaggaattatggaacgcagagtcgcttgctacatccgtgtgagcactcaggagcaggccacgcacgga

SEQ ID NO: 19540 - DNA, 260 bp, Unknown
  Description of Unknown: LeftRegion for integrase B6541 sequence
ataaataaaagcccctgtgctaccaacacaagagcttttaccacgatacttacataagctgtgcttatgatataataccgccttcgacaagccatattatatcattcatagcaccgcttttgcaagtggtgttatttttgtacccatttttgagttgcaccggtgcaacttgcatatattttacagaaaggatgattaatatggctaaggatatacttaatatgaaatctgcatgtgcttatatccgtgtatctactgac

SEQ ID NO: 19541 - DNA, 260 bp, Unknown
  Description of Unknown: LeftRegion for integrase B6542 sequence
agaaaaagaatgggcaaaagaaaaatacttacgttttgatgtaaaattagatcgtgaggtatttggggaaactatagccagtatcaaggaagagttaggaactgctgcgttcttaaagaaagctttagagctttacaaaacaaatcctgagttatttaagtagtaaaatcaattcaaagaaataagataggtgtttaaaaatgaaggcagctttatacactcgtgtttctacagatgagcaagctgagcatggcttttcg

SEQ ID NO: 19542 - DNA, 260 bp, Unknown
  Description of Unknown: LeftRegion for integrase B6543 sequence
tttactatttatttactatattctatatacttttaaatatatatattttattaatttgaaattacaaaatacactaaattgtttttttatcaatttattttacatttttattcaaaacttatatttttttcatatcaatttaattttacagttataaaaaaatttagtattattcccttgaaagaaggaggttttttagtatgaaaaacatagctatatatataagaaaatctgtaaaaggtgatgataactcaatttct

SEQ ID NO: 19543 - DNA, 260 bp, Unknown; identical to SEQ ID NO: 19507
  Description of Unknown: LeftRegion for integrase B6544 sequence

SEQ ID NO: 19544 - DNA, 260 bp, Unknown; identical to SEQ ID NO: 19539
  Description of Unknown: LeftRegion for integrase B6545 sequence

SEQ ID NO: 19545 - DNA, 260 bp, Unknown
  Description of Unknown: LeftRegion for integrase B6546 sequence
taagattagcaaaacattttactcaagaaagattagctgaaagattaaatattagtcaaggatatttgtctaggctagaacgtaatgaaaaggtagctatcttaggtgttagacttaaaactataagagatttagcaagggagcttggagttaaggagaaggatattttaaaattcaaataaactctaggagggacttgtatgaaaaaaatagcaatttatattagaaaatctgtaaagggagatgagaattcaatttcc

SEQ ID NO: 19546 - DNA, 260 bp, Unknown
  Description of Unknown: LeftRegion for integrase B6547 sequence
aataaaagcccctgtgctaccaacacaagagcttttaccacgatacttacataagctgtgcctatgatataatatcgccctagacaagccatattatatcattctagacaccacttttgcaagtaggtgttatttttatacccattttttgagttgcaccggtgcaacttgcatatatttacagagaggatgattaatatatggttaaggatatacttaatatgaaatctgcatgtgcatatattcgtgtgtctactgac

SEQ ID NO: 19547 - DNA, 260 bp, Unknown
  Description of Unknown: LeftRegion for integrase B6548 sequence
ttaggttttgtcccatgcaaacgttgtaactaaaataaaagcccctgtgctaccaacacaagagcttttacggatacttactcaagcagtgcctgatataatatacccctaaccaagttatattatatcattccagacaccgcttttgcaagtaggtgttatttttatacccaattttgaatagaatggagtgatatactatgaaaaagaccttaaatgaaatgaaaaatgcctgcgcttatatccgggtatctaccgat

SEQ ID NO: 19548 - DNA, 260 bp, Unknown
  Description of Unknown: LeftRegion for integrase B6549 sequence
gcaatacgttactaatgagcttggattaaactaaataaaagcccctgtgctaccaacacaagagcttttacggatacttactcagacggtgtctgatataatatacccctaaccaagttatattatatcattccagacaccgcttttgcaagtaggtgttatttttatacccaaatatgaatagaatggagtgatatactatgaaaaagaccttaaatgaaatgaaaaatgcctgcgcttatatccgtgtatcgaccgat

SEQ ID NO: 19549 - DNA, 260 bp, Unknown
  Description of Unknown: LeftRegion for integrase B6550 sequence
ataaaataaaagcccctgtgctaccaacacaagagcttttaccacgatacttacataagctgtgcttatgatatataccgccctgaacaagccatattatatcattcatagcaccgcttttgcaagtggtgttatttttgtacccatttttgagttgcaccggtgcaacttgcatatattttacagaaaggatgattaatatggctaaggatatacttaatatgaaatctgcgtgtgcttatatccgtgtatctactgac

SEQ ID NO: 19550 - DNA, 260 bp, Unknown
  Description of Unknown: LeftRegion for integrase B6551 sequence
taggttttatcccatgcaaacgttgtaactaaaataaaagcccctgtgctaccaacacaagagcttttacggatacttactcaagcagtgcctgatataatatacccctaaccaagttatattatatcattcccggcaccgcttttgcaagtaggtgttatttttatacccaattttgaataagaatggagtgatatactatgaaaaagaccttaaatgaaatgaaaaatgcctgcgcctatatccgtgtatctaccgat

SEQ ID NO: 19551 - DNA, 260 bp, Unknown
  Description of Unknown: LeftRegion for integrase B6552 sequence
tgttgacatcagcaaaatcatcttaaatagaaaaaccgtccggtgctggtaacaccgaacggctttgcattatttttcttgccggttgtccggaaagatataatttgatacgcatccagattataccatttcagtggcacctgtgcaagaggtgtattttttgtacccttttttaatacatttaagcaggaggcattagcatggctactaaaatatctgaaaacttggagatcggagctgcttatatccgtgtaagcaca

SEQ ID NO: 19552 - DNA, 260 bp, Unknown
  Description of Unknown: LeftRegion for integrase B6553 sequence
taaataaaagcccctgtgctaacaacacaagagcttttaccacgatacttacataaggctgtgcttatgatataataccgccctagacaagccatattatatcattcatagcaccgcttttgcaagtggtgttatttttgtacccatttttgagttgcaccggtgcaacttgcatatattttacagaaaggatgattaatatggctaaggatatacttaatatgaaatcggcatgcgcttatatccgtgtatctactgac

SEQ ID NO: 19553 - DNA, 260 bp, Unknown; identical to SEQ ID NO: 19549
  Description of Unknown: LeftRegion for integrase B6554 sequence

SEQ ID NO: 19554 - DNA, 260 bp, Unknown
  Description of Unknown: LeftRegion for integrase B6555 sequence
ttcaaaaaataaaaaatcccccggtgttgcaacaccgagggaccacgctctagatgttggcaacatcatggagctgtaatcacattctttttatacacttaccacagcaacaaaacagaactgattactataatagtataacaaatttttatcagttctgctactgtatgccaatttttttagcaaaggagctggtttttatgttaaaaaatatacccgctgttgtttacgcccgctattcatcctccaatcaaagagaa

SEQ ID NO: 19555 - DNA, 260 bp, Unknown
  Description of Unknown: LeftRegion for integrase B6556 sequence
caagttacccttgatgaaatcaaaaaggtggtacgaagcaactttgacaaaacggtagaatgggtagatgtgccagaagcagaacagtatcggcaatcattgatcatgaagtaaagcattcgcagattgattgctttcgaaattacagaaactgtgccctgccccaccccagcagggcaatattatagaaaggggccatcatggaaacatattgtatctatctccgaaagtcccgcgcggatgccgaggcggaagcgcgc

SEQ ID NO: 19556 - DNA, 260 bp, Unknown
  Description of Unknown: LeftRegion for integrase B6557 sequence
agcataatacaaaaaagccctgctgaatcaaactcggcagggcaatcttatatgaaggatggcggaaggtgtgcgtatgaaaaagtcgcgccccacgcgggcgcgtgagttgaaattgtgacagagcaagtgacagacattgccggggccacgtcgcgccccacgcgggcgcgtgagttgaaatatagaaaggagccatcatggaaacatattgtatctatctccgaaagtcccgcgcggatgccgaggcggaagcgcgc

SEQ ID NO: 19557 - DNA, 260 bp, Unknown
  Description of Unknown: LeftRegion for integrase B6558 sequence
taaaagcccctgtgctaccaacacaagagcttttaccacgatacttacataagcactgcttatgatataataccgccttagacaagccatattatatcatttctaacaccgcttatgcaagtaggtgttattttttatacccatttttactgagttgcaccggtgcaacttgcatatattttacagaaaggatgattaatatggctaaggatatacttaatatgaaatctgcgtgtgcttatatccgtgtatctactgac

SEQ ID NO: 19558 - DNA, 260 bp, Unknown
  Description of Unknown: LeftRegion for integrase B6559 sequence
ataaataaaagcccctgtgctaccaacacaagagcttttaccacgatacttacataagctgtgcttatgatataataccgccctagacaagctatattatatcattcatagcaccgcttttgcaagtggtgttatttttgtacccatttttgagttgcaccggtgcaacttgcatatattttacagaaaggatgattaatatggctaaggatatacttaatatgaaatctgcatgtgcttatatccgtgtatctactgac

SEQ ID NO: 19559 - DNA, 260 bp, Unknown
  Description of Unknown: LeftRegion for integrase B6560 sequence
tatatctcaaaatactggattaagtgagcaagaaatactacatttacagcaatcattagataaatgatataatccatgaacaactaaaaaaacgcccagtatttgcactactgaacgtttttatgctgtgatatataaccacattcacctatagcgttattatatcacagctatttttataaagaaaggctgtgttttttatgcttaagacagttatatatgctcgctattctagtgacaaacaaaatgaacaatctatt

SEQ ID NO: 19560 - DNA, 260 bp, Unknown
  Description of Unknown: LeftRegion for integrase B6561 sequence
catggatcttttatttttcgtgctagctttattgataaaaatggtatcaaaagatatgccaaaagttatggtaaacgtgctttcaaaatctatgttactggtcctttaaaaggtaagctcgccaatgctttaaattaatcatctatagtcgatatccatatttgggatatcgactatttttataaaaggatgtgcctccattgttaaaaacaattatctatgctcgctattctagtgacaaacaaaatgaacaatctatt

SEQ ID NO: 19561 - DNA, 260 bp, Unknown
  Description of Unknown: LeftRegion for integrase B6562 sequence
actaaataaaagcccctgtgctaccaacacaagagcttttaccacgatacttacataagctgtgcttatatataataccgccctagacaagctatattatatcattcataacaccgcttttgcaagtggtgttatttttgtacccatttttgagttgcaccggtgcaacttgcatatattttacagaaaggatgattaatatggctaaggatatacttaatatgaaatctgcatgtgcttatatccgtgtatctactgac

SEQ ID NO: 19562 - DNA, 260 bp, Unknown
  Description of Unknown: LeftRegion for integrase B6563 sequence
tattgaaaaagtcggaaacaagtaattgaaataaataaaagctcctgtgctaccaacacaagagcttttacggatacttactcaagcagtgcctgatataatatacccctaaccaagttatattatatcattccagacaccgcttttgcaagtaggtgctatttttatacccaaatatgaatagaatggagtgatatactatgaaaaaggccttaaatgaaatgaaaaatgcctgcgcttatatccgtgtatctaccgat

SEQ ID NO: 19563 - DNA, 260 bp, Unknown
  Description of Unknown: LeftRegion for integrase B6564 sequence
ataaaagcccctgtgctaccaacacaagagcttttacctgcgacttacaattaagctgtgctcaaatgatataatcgccctagacaagccatattatatcattcataacaccgcttttgcaagtaggtgttatttttgtacccattttttgagttgcaccggtgcaacttgcatatatttacagagaggatgattaatatatggttaaggatatacttaatatgaaatctgcatgtgcatatatccgtgtgtctactgac

SEQ ID NO: 19564 - DNA, 260 bp, Unknown
  Description of Unknown: LeftRegion for integrase B6565 sequence
gtgattgagtttcagaagaattaaactaaataaataaaagcccctgtgctacaaacacaagagcttttacggatacttactcaagcagtgcctgatataatatacccctaaccaagttatattatatcattcccggcaccgcttttgcaagtaggtgttatttttatacccaattttgaataagaatggagtgatatactatgaaaaagaccttaaatgaaatgaaaaatgcctgcgcctatatccgtgtatctaccgat

SEQ ID NO: 19565 - DNA, 260 bp, Unknown
  Description of Unknown: LeftRegion for integrase B6566 sequence
atatctcaaaatactggattaagtgagcaagaaatactacatttacagcaatcattagataaatgatattaatccatgaacaactaaaaaaacgcccagtatttgcactactgaacgtttttatgctgtgatatataaccacattcacctatagcgttattatatcacagctatttttataaagaaaggctgtgttttttatgcttaagacagttatatatgctcgttattctagtgacaaacaaaacgaacaatctatt

SEQ ID NO: 19566 - DNA, 260 bp, Unknown
  Description of Unknown: LeftRegion for integrase B6567 sequence
tcgggagagctgtcgccttccagagcgacgttaaataattctgccgccgcacggtgcaaacgattattcgcacgcatagaaaaccaacagcgtaaatattgtgtaacagcggctcggcagaacagcaaagcaaccctctccggtgagccgaaattactcccggaagaataatcaaacaatatcagacaaggaggtgccgcatggatgatttattaaaaatcggagcttcttacatcagagtctcagacgaaagacaggac

SEQ ID NO: 19567 - DNA, 260 bp, Unknown; identical to SEQ ID NO: 19549
  Description of Unknown: LeftRegion for integrase B6568 sequence

SEQ ID NO: 19568 - DNA, 260 bp, Unknown
  Description of Unknown: LeftRegion for integrase B6569 sequence
ttatatctcaaaatactggattaaatgaacaagaaatactacatttacagcaatcattaaataaatgatataatcatgaacaactaaaaaaacgcccagtatttgcattactgaacgtttttatgctgtgatatataaccacattcacctatagtgttattatatcacagctatttttataaagaaaggctgtgttttttatgcttaagacagttatatatgctcgctattctagtgacaaacaaaatgaacaatctatc

SEQ ID NO: 19569 - DNA, 260 bp, Unknown
  Description of Unknown: LeftRegion for integrase B6570 sequence
ataaaaataaacttcatatattgattaatatgaagtttattagattggggggtatattatgaaatcaaaacttgatacgttaccagttataataacttattcagataaaaaaatagataaagatagattatttaaaattttttatgatatcatagaagaacaagaggcaaaggaagagagggaaagagaggatgatttagatgaggaaaaagaatgtttgtctaatgcgagttagtacagatgtacaagaaacaacatca

SEQ ID NO: 19570 - DNA, 260 bp, Unknown
  Description of Unknown: LeftRegion for integrase B6571 sequence
ataaaataaaagctcctgtgctaccaacacaagagcttttaccacgatacttacataagctgtgcttatgatatataccgccctgaacaagccatattatatcattcatagcaccgcttttgcaagtggtgttatttttgtacccatttttgagttgcaccggtgcaacttgcatatattttacagaaaggatgattaatatggctaaggatatacttaatatgaaatctgcgtgtgcttatatccgtgtatctactgac

SEQ ID NO: 19571 - DNA, 260 bp, Unknown
  Description of Unknown: LeftRegion for integrase B6572 sequence
gccaagttaatcttaatagacaatttcatttacataaaaaatttgcgaagaaatacttttttatgtaaaattcctattatttaacaaaaaaacgcccagtactagcactactgaacgtttttatgctgtgatatataaccacattcacctatagcgttattatatcacagctatttttataaagaaaggctgtgttttttatgcttaagacagttatatatgctcgctattctagtgacaaacaaaatgaacaatctatc

SEQ ID NO: 19572 - DNA, 260 bp, Unknown
  Description of Unknown: LeftRegion for integrase B6573 sequence
atatctcaaaatactggattaagtgagcaagaaatactacatttacagcaatcattagataaatgatattaatccatgaacaactaaaaaaacgcccagtatttgcactactgaacgtttttatgctgtgatatataaccacattcacctatagcgttattatatcacagctatttttataaagaaaggctgtgttttttatgcttaagacagttatatatgctcgctattctagtgacaaacaaaatgaacaatctatt

SEQ ID NO: 19573 - DNA, 260 bp, Unknown
  Description of Unknown: LeftRegion for integrase B6574 sequence
ttaggttttgtcccatgcaaacgttgtaactaaaataaaagctcctgtgctaccaacacaagagcttttacggatacttactcaagcagtgcctgatataatatacccctaaccaacttatattatatcattcccggcaccgcttttgcaagtaggtgttatttttatacccaaatatgaatagaatggagtgatatactatgaaaaagaccttaaatgaaatgaaaaatgcctgcgcttatatccgtgtatcgaccgat

SEQ ID NO: 19574 - DNA, 260 bp, Unknown
  Description of Unknown: LeftRegion for integrase B6575 sequence
ctaaataaaagcccctgtgctaccaacacaagagcttttaccacgatacttacataagctgtgcttatgatataataccgccctagacaagccatattatatcattcatagcaccgcttttgcaagtggtgttatttttgtacccatttttgagttgcaccggtgcaacttgcatatattttacagaaaggatgattaatatggctaaggatatacttaatatgaaatcagcatgtgcttatatccgtgtatctactgac

SEQ ID NO: 19575 - DNA, 260 bp, Unknown
  Description of Unknown: LeftRegion for integrase B6576 sequence
tccattgcacagatggagcattccggcgaatctccaacaccagaaacagcaaaagcgatgctagaggctgaccgtatcgcaagggatccgaatgtcaaaggttacgccagtattgcagaactgatggacgcattggattcataacagcaaaaaccagccctgcccccccccggcagggcaatcttatagaaggagccatcatggaaacatattgtatctatctccgaaaatcccgtgcagatgcggaggcagaaacacgg

SEQ ID NO: 19576 - DNA, 260 bp, Unknown
  Description of Unknown: LeftRegion for integrase B6577 sequence
cgttatgatggcgaaggaccgaatggcgaaacaataaagggaaatattaatagtaaaggtgagaaaatttatcacgttccgggcggagctttttacaatagaacagatgctgaagaatggttctttacagaagaagatgcaaaagctgctggttatcgagcttccaaacgttaatataaaaatagaaaggctgtgcttttatgttaaaagctgttatatatgcccgctactccagcgagaagcaaaatgaacaatccatt

SEQ ID NO: 19577 - DNA, 260 bp, Unknown
  Description of Unknown: LeftRegion for integrase B6578 sequence
ttatcaaacacgtcccctgcctgaaatgcgcccagtgcggcgaagtggtctacaccggtacaacgctgcaaaaggtcgaacagattctggagaaatgcaaggcagccatgaccgaagtcgccattgtggaatatcaacccgcagcataaccgaaccgccctgcccaccccggcagggcggtgctatcaaggagggaaaccatgaacgcatattgtatctatctccgaaaatcccgtgcggatgcggaggcagaagcacgg

SEQ ID NO: 19578 - DNA, 260 bp, Unknown
  Description of Unknown: LeftRegion for integrase B6579 sequence
gaaaaagtcggaaacaagtaattgaaataaataaaagcccctgtgctaccaacacaagagcttttacggatacttactcaagcagtgcctgcctgatataatatacccctaaccaagttatattatatcattccagacaccgcttttgcaagtaggtgttatttttatacccaaatatgaatagaatggagtgatatactatgaaaaagaccttaaatgaaatgaaaaatgcctgcgcttatatccgtgtatcgaccgat

SEQ ID NO: 19579 - DNA, 260 bp, Unknown
  Description of Unknown: LeftRegion for integrase B6580 sequence
taaataaaagcccctgtgctaccaacacaagagcttttaccacgatacttacataagctgtgcttatatataatatcgccctagacaagccatattatatcattagcagcaccgctttttcaagtaggtgttatttttgtacccatttttaagttgcaccggtgcaacttcgcatatattttataaaagggagtgattttatggctaaaaatattcttaacatgaaaactgccgccggctatattcgcgtatctaccgat

SEQ ID NO: 19580 - DNA, 260 bp, Unknown
  Description of Unknown: LeftRegion for integrase B6581 sequence
atatctcaaaatactggattaagtgagcaagaaatactacatttacagcaatcattagataaatgatattaatccatgaacaactaaaaaaacgcccagtatttgcactactgaacgtttttatgctgtgatatataaccacattcacctatagcgttattatatcacagctatttttataaagaaaggctgtgttttttatgcttaagactgtaatatatgctcgttattctagtgacaaacaaaatgaacaatctatt

SEQ ID NO: 19581 - DNA, 260 bp, Unknown
  Description of Unknown: LeftRegion for integrase B6582 sequence
tgattttgtataccacccacaaataattgctctgaaaagatcgaatattgtcgaaatacttgtgatgatatacaaagagtgatatagatcgcgccccacgcgggcgcgtgagttgaaattgacaaaacggtagaatgggtagatgtgccagagtcacgccccacgcgggcgtgtgagttgaaatatagaaaggagccatcatggaaacatattgtatctatctccggaaatcccgcgcggatgccgaggcagaagcgcgc

SEQ ID NO: 19582 - DNA, 260 bp, Unknown
  Description of Unknown: LeftRegion for integrase B6583 sequence
ttcatttgataaatttatatagttatttttttgttctgaagtatctactcttacatcagaaaaatctccaaatacaattaatttatgagatggactaacaaacatattattccctacctttatatatttttattttaattataacatatatacataatatagataagaaaatatttaattatagaaaggctgtattttttatgcttaaaactgtaatatatgctcgttattctagtgacaaacaaaatgaacaatctatt

SEQ ID NO: 19583 - DNA, 260 bp, Unknown
  Description of Unknown: LeftRegion for integrase B6584 sequence
atatctcaaaatactggattaagtgagcaagaaatacttcttttaaagaaatcattagataaatgatattaatccatgaacaactaaaaaaacgcccagtatttgcactactgaacgtttttatgctgtgatatataaccacattcacctatagcgttattatatcacagctatttttataaagaaaggctgtgttttttatgcttaagacagttatatatgctcgctattctagtgataaacaaaatgaacaatctatc

SEQ ID NO: 19584 - DNA, 260 bp, Unknown; identical to SEQ ID NO: 19580
  Description of Unknown: LeftRegion for integrase B6585 sequence

SEQ ID NO: 19585 - DNA, 260 bp, Unknown
  Description of Unknown: LeftRegion for integrase B6586 sequence
aataaacctgttattatagttggtgttgttaaagaattaagaagaaaaagataaaaaaaaaagacctactgcttgaacagtaagtcaaatgaaaaatcacaatttagtcgaccaaaactaaaaaacaaaatataagatataatgttatggatttttctatttcattatatcaaaaattcaagaaaaaaggaatgattataatgaaagaatataaaaaaggtgctatttctgttcgtgtttctactgatatgcaaacaaaa

SEQ ID NO: 19586 - DNA, 260 bp, Unknown
  Description of Unknown: LeftRegion for integrase B6587 sequence
gcaatacgttactaatgagcttggattaaactaaataaaagcccctgtgctaccaacacaagagcttttacggatacttactcagacggtgtctgatataatatacccctaaccaagttatattatatcattccagacaccgcttttgcaagtaggtgttatttttatacccaaatatgaatagaatggagtgatatactatgaaaaaaaccttaaatgaaatgaaaaatgcctgcgcttatatccgtgtatctaccgat

SEQ ID NO: 19587 - DNA, 260 bp, Unknown
  Description of Unknown: LeftRegion for integrase B6588 sequence
cgttatgatggcgaaggaccgaacggcgaaacaataaagggaaatattaatagtaaaggtgagaaaatttatcacgttccgggcggagctttttacaatagaacagatgctgaagaatggttctttacagaagaagatgcaaaagctgctggttatcgagcttccaaacgttaatataaaaatagaaaggctgtgcttttatgttaaaagctgttatatatgcccgctattccagcgagaagcaaaatgaacaatccatt

SEQ ID NO: 19588 - DNA, 260 bp, Unknown
  Description of Unknown: LeftRegion for integrase B6589 sequence
aaataaaagcccctgtgctaccaacacaagagcttttaccacgatacttacataagcaatgcctatgatataataccgccctgaacaagctatattatatcatcttaaacaccgcttttgcaagtaggtgtattttttatacccttttttagagttgcaccagtacaacttgcatatattttacagaaaggatgattaatatggctatagatattgcaaacatgaaagtagcatgtgcttatattcgtgtatccacagac

SEQ ID NO: 19589 - DNA, 260 bp, Unknown
  Description of Unknown: LeftRegion for integrase B6590 sequence
tgattttgtataccacccacaaataattgctctgaaaagatcgaatattgtcgaaatacttgtgatgatatacaaagagtgatatagatcgcgccccacgcgggcgcgtgagttgaaattgacaaaacggtagaatgggtagatgtgccagagtcacgccccacgcgggcgtgtgagttgaaatatagaaaggagccatcatggaaacatattgtatctatctccggaaatcccgcgcggatgccgaggcggaagcgcgc

SEQ ID NO: 19590 - DNA, 260 bp, Unknown
  Description of Unknown: LeftRegion for integrase B6591 sequence
tttccttttagcttaataatattatatttaaaagttgcaccggtgcaacttttaaaaaggaaaaccgctctcgcaaagagagcggagcaaccatcgacaagcgatgtgtactatcaaacgcaaacatagtatagcacacatctgttttattttcaataggtggggtgtattttttatgccctaatacaaggagattttgtatgatttcaaataaaaaagaatgttttgcttacataagggtatcaacggacgaccagttg

SEQ ID NO: 19591 - DNA, 260 bp, Unknown; identical to SEQ ID NO: 19448
  Description of Unknown: LeftRegion for integrase B6592 sequence

SEQ ID NO: 19592 - DNA, 260 bp, Unknown; identical to SEQ ID NO: 19571
  Description of Unknown: LeftRegion for integrase B6593 sequence

SEQ ID NO: 19593 - DNA, 260 bp, Unknown
  Description of Unknown: LeftRegion for integrase B6594 sequence
tattgaaaaagtcggaaacaagtaattaaactaaataaaagctcctgtgctaccaacacaagagcttttacggatacttactcaagcagtgcctgatataatatacccctaaccaagttatattatatcattccagacaccgcttttgcaagtaggtgttatttttatacccaattttgaatagaatggagtgatatactatgaaaaagaccttaaatgaaatgaaaaatgcctgcgcttatatccgggtatctaccgat

SEQ ID NO: 19594 - DNA, 260 bp, Unknown
  Description of Unknown: LeftRegion for integrase B6595 sequence
gcagttagtttctgaatacggtgaaggattcacaccagaagaagcacaatatgctgtcgataatttagggtaaaaatctactttgaaataagtgtgtgagttgaaatagaattaatataatattttatagtttcatcattgtcacgcctcgcatgaggcgtgtaagttaaaatgaaataaaaggagagtgaatcaaaataatgagacaatactgtatgtatctcagaaagtcccgagctgacgcagaagcagaggctcga

SEQ ID NO: 19595 - DNA, 260 bp, Unknown
  Description of Unknown: LeftRegion for integrase B6596 sequence
aaaataaaagcccctgtgctaccaacacaagagcttttaccacgatacttacataagcactgcttatgatataataccgccttagacaagccatattatatcatttctaacaccgcttatgcaagtaggtgttatttttataccattttttgagttgcaccggtgcaacttgcatatattttacagaaaggatgattaatatggctaaggatatacttaatatgaaatctgcgtgtgcttatatccgtgtatctactgac

SEQ ID NO: 19596 - DNA, 260 bp, Unknown
  Description of Unknown: LeftRegion for integrase B6597 sequence
ctgtcgatattatctttgaactttctaaagaagataaggtaaattatttttctatcgggtttggtacgccacactggatgaaccgacttgattttaacgggtatgaagaagtcaaatggcagtataatttcttagaaagtactgcttcatagaaaaaaaccaccgaaacctgcagggcggtgctatcaaggagggagaccatgaacgcatattgtatctatctccgaaaatcccgtgcagatgcggaggcagaagcacgg

SEQ ID NO: 19597 - DNA, 260 bp, Unknown; identical to SEQ ID NO: 19580
  Description of Unknown: LeftRegion for integrase B6598 sequence

SEQ ID NO: 19598 - DNA, 260 bp, Unknown
  Description of Unknown: LeftRegion for integrase B6599 sequence
gcaatacgttactaatgagcttggattaaactaaataaaagcccctgtgctaccaacacaagagcttttacggatacttactcagacggtgtctgatataatatacccctaaccaagttatattatatcattccagacaccgcttttgcaagtaggtgttatttttatacccaaatatgaatagaatggagtgatatactatgaaaaagaccttaaatgaaatgaaaaatgcctgcgcttatatccgtgtatctaccgat

SEQ ID NO: 19599 - DNA, 260 bp, Unknown
  Description of Unknown: LeftRegion for integrase B6600 sequence
tattgaaaaagtcggaaacaagtaattgaactaaataaaagctcctgtgctaccaacacaagagcttttacggatacttactcagacggtgtctgatataatatacccctaaccaagttatattatatcattccagacaccgcttttgcaagtaggtgttatttttatacccaaatatgaatagaatggagtgatatactatgaaaaagaccttaaatgaaatgaaaaatgcctgcgcttatatccgtgtatctaccgat

SEQ ID NO: 19600 - DNA, 260 bp, Unknown
  Description of Unknown: LeftRegion for integrase B6601 sequence
accgagaagaattagagggggataaagaatcttctgcgcacagcgaagataatccccatagaattgctcaggcgtaagaaacacttggaggtgatactacgaaagcggtaatctatgccagatattcgagccatagccagagagaggaatccatagagggacagcttcgtgagtgtcacgaatttgcactgaaaaatggaatgacgatcatcggtgaatactgcgacagagcaatctcaggcaaaaccgataatcgtcca

SEQ ID NO: 19601 - DNA, 260 bp, Unknown
  Description of Unknown: LeftRegion for integrase B6602 sequence
aaaataaaagcccctgtgctaccaacacaagagcttttaccacgatacttacataagctgtgcttatgatataataccgccttagacaagccatattatatcatttctaacaccgcttatgcaagtaggtgttatttttataccattttttgagttgcaccggtgcaacttgcatatattttacagaaaggatgattaatatggctaaggatatacttaatatgaaatctgcgtgtgcttatatccgtgtatctactgac

SEQ ID NO: 19602 - DNA, 260 bp, Unknown
  Description of Unknown: LeftRegion for integrase B6603 sequence
ataaataaaagctcctgtgctggaacacaagagcttttaccgcgatacttacatagcagtgcctatgatataataccgccctagacaagccatattatatcattcaatgcaccgcttttgcaagtaggtgtattttttatacccttttttagagttgtactggtgcaactcgcatatattttacagaaaggatgattaatatggctacagacattgcaaacatgaaggtagcatgcgcttatattcgcgtatctacagat

SEQ ID NO: 19603 - DNA, 260 bp, Unknown
  Description of Unknown: LeftRegion for integrase B6604 sequence
cccctgtgctaccaacacaagagcttttaccacgatacttacataagcttaagctgtgcttatgatataataccgccctgaacaagccatattatatcattcatagcaccgcttatgcaagtaggtgttattttttatacccatttttactgagttgcaccggtgcaacttgcatatattttacagaaaggatgattaatatggctagggatatacttaatatgaaatctgcttgtgcctacatacgtgtgtccacagat

SEQ ID NO: 19604 - DNA, 260 bp, Unknown
  Description of Unknown: LeftRegion for integrase B6605 sequence
ataataaaagctcctgtgctggaacacaagagcctttacctgcgacttacaattaagctgtgctcaatgatataatcgccctagacaagccatattatatcattaacagcaccgctttttcaagtaggtgttatttttatacccatttttagagttgcaccggtgcaattcgcatatattttacagaaaggatggttaatatggctacagatattgcaaacatgaaagtagcatgtgcttatattcgtgtatctacagac

SEQ ID NO: 19605 - DNA, 260 bp, Unknown
  Description of Unknown: LeftRegion for integrase B6606 sequence
taaataaaagcccctgtgctggaacacaagagcttttactacgatacttacataagcagtgcctatgatataataccgccctagacaagctatattatatcattccgaacaccgcttttgcaagtaggtgtattttttatacccatttttactgttgcactggtgcaactcgcatatattttacagaaaggatggttaatatggctgcaaatattgcaaacatgaaagtagcatgtgcttatattcgtgtatctacagac

SEQ ID NO: 19606 - DNA, 260 bp, Unknown
  Description of Unknown: LeftRegion for integrase B6607 sequence
acaagagcttttacccgcgacttacaattaagctgtgctcaatgatataatcgccctagacaagccatattatatcattctaaacaccgcttttgcaagtaggtgttatttttgtacccattttttaagttgcactggtgcaacttgcatatattttataaaccggtgacattttgtaaccagttgaaagggatgattgtatggctaaaaatatacttaacatgaaaattgcagccggatacattcgtgtatctactgat

SEQ ID NO: 19607 - DNA, 260 bp, Unknown
  Description of Unknown: LeftRegion for integrase B6608 sequence
taaaagcccctgtgctaccaacacaagagcttttaccacgatacttacataagcactgcttatgatataataccgccttagacaagccatattatatcatttctaacaccgcttatgcaagtaggtgttattttttatacccatttttactgagttgcaccggtgcaacttgcatatattttacagagaggatgattattatggctaaggatatacttaatatgaaatctgcttgtgcctacatacgtgtgtccacggat

SEQ ID NO: 19608 - DNA, 260 bp, Unknown
  Description of Unknown: LeftRegion for integrase B6609 sequence
gcccctgtgctaccaacacaagagcttttaccacgatacttacataagcttaagctgtgcttatgatataataccgccctgaacaagccatattatatcattcatagcaccgcttatgcaagtaggtgttatttttatacccatttttactgagttgcaccggtgcaacttgcatatattttacagaaaggatgattaatatggctagggatatacttaatatgaaatctgcttgtgcctacatacgtgtgtccacagat

SEQ ID NO: 19609 - DNA, 260 bp, Unknown
  Description of Unknown: LeftRegion for integrase B6610 sequence
ccaacacaagagcttttaccacgatactacaaagctgtgcttatatataatatcgccctgaacaagccatattatatcattagcagcaccgctttttcaagtaggtgttatttttgtacccatttttaagttgcactggtgcaacttgcatatattttataatccggtgacattctgtctccagttgaaagggtgattgtatggctaaaaatatccttaacatgaaaattgcagccggatacattcgtgtatctactgat

SEQ ID NO: 19610 - DNA, 260 bp, Unknown
  Description of Unknown: LeftRegion for integrase B6611 sequence
aaataaaagcccctgtgctaccaacacaagagcttttaccacgatacttacataagcagtgcctatgatataataccgccctgaacaagccatattatatcatttgaaacaccgcttttgcaagtaggtgtattttttatacccattttaagagttgcaccggtgcaatttgcatatattttacagaaaggatggttaatatggctacagacattgcaaacatgaaggtagcatgcgcttatattcgtgtatctacagac

SEQ ID NO: 19611 - DNA, 260 bp, Unknown
  Description of Unknown: LeftRegion for integrase B6612 sequence
caagagcctttacttgcgacttacaattaagctgtgctcaaatgatataatcgccctaagcaagccatattatatcattctaaacaccacttttgcaagtaggtgttatttttgtacccattttttaagttgcactggtgcaacttgcatatattttataaaccggtgacattttgtaaccagttgaaagggatgattgtatggctaaaaatatacttaacatgaaaattgcagccggatacattcgtgtatctactgat

SEQ ID NO: 19612 - DNA, 260 bp, Unknown
  Description of Unknown: LeftRegion for integrase B6613 sequence
gttgcgacatcgcaacaattaaataccgcccagctgcaactggacggcattttgagaaaaccatttgcatctgccgagaaaaaacagacgaaatgctttacatagacaactaaagtatatcattttttcttggcatcctgcaagggtgtattttttgtacccaattttaatattttataaaaaggaaaaggtgatttactatgaaaaagatcgcagctgcttatataagagtcagtacgcacatgcaagaagaattatct

SEQ ID NO: 19613 - DNA, 260 bp, Unknown
  Description of Unknown: LeftRegion for integrase B6614 sequence
aaataaaagcccctgtgctaccaacacaagagcttttaccacgatacttacataagcagtgcctatgatataataccgccctgaacaagccatattatatcattctgaacaccgcttttgcaagtaggtgtattttttatacccatttttagagttgcaccggtgcaattcgcatatattttacagaaaggatggttaatatggctacagatattgcaaacatgaaagtagcatgtgcttatattcgtgtatctacagac

SEQ ID NO: 19614 - DNA, 260 bp, Unknown
  Description of Unknown: LeftRegion for integrase B6615 sequence
aaataaaagctcctgtgctggaacacaagagcttttacccgcgacttacaattaagctatgctcaaatgatataatcgccctaagcaagccatattatatcattctgaacaccgcttttgcaagtaggtgttatttttatacccatttttagagttgtactggtgcaattcgcatatattttacagaaaggatgattaatatggctacagacattgcaaacatgagggtagcatgcgcttatattcgtgtatctacagac

SEQ ID NO: 19615 - DNA, 260 bp, Unknown
  Description of Unknown: LeftRegion for integrase B6616 sequence
ataaaagcccctgtgctaccaacacaagagcttttaccacgatacttacataagcagtgcttatgatataataccgccttagacaagccatattatatcatttctaacaccgcttatgcaagtaggtgttatttttatacccaatttttaagagttgcaccggtgcaacttgcatatattttatagagaggatgattattatggctaaggatatacttaatatgagatctgcttgtgcctacatacgtgtgtccacggat

SEQ ID NO: 19616 - DNA, 260 bp, Unknown
  Description of Unknown: LeftRegion for integrase B6617 sequence
taataaaagcccctgtgctaccaacacaagagcttttgccacgatacttacataagcagtgcctatgatataataccgccctgaacaagccatattatatcattctgaacaccgcttttgcaagtaggtgtattttttatacccatttttagagttgcaccggtgcaattcgcatatattttacggaaaggatggttaatatggctacagatattgtaaacatgaaagtagcatgtgcttatattcgtgtatctacagac

SEQ ID NO: 19617 - DNA, 260 bp, Unknown
  Description of Unknown: LeftRegion for integrase B6618 sequence
gattattgtaatataacatcaataccattggattttgacgaaagagccaaaaactttttaagtgatttatatagacattaacaaaaaaagcccctcattagcgacaactaataaaggacttaaagtgtagtatatgctatatacctagcactaatattatagcatatgctcctaaaaaaacataaaaaaggagtaaaagtatgaaaaaagcagtaggttattgtagattttctacagacatgcaaagagaagaatctatc

SEQ ID NO: 19618 - DNA, 260 bp, Unknown
  Description of Unknown: LeftRegion for integrase B6619 sequence
caagagcctttacttgcgacttacaattaagctgtgctcaaatgatataatcgccctaagcaagccatattatatcattctaaacaccgcttttgcaagtaggtgttatttttgtacccattttttaagttgcactggtgcaacttgcatatattttataaaccggtgacattttgtaaccagttgaaagggatgattgtatggctaaaaatatacttaacatgaaaattgcagccggatacattcgtgtatctactgat

SEQ ID NO: 19619 - DNA, 260 bp, Unknown; identical to SEQ ID NO: 19607
  Description of Unknown: LeftRegion for integrase B6620 sequence

SEQ ID NO: 19620 - DNA, 260 bp, Unknown
  Description of Unknown: LeftRegion for integrase B6621 sequence
cccctgtgctaccaacacaagagcttttaccacgatacttacataagcttaagctgtgcttatgatataataccgccctgaacaagccatattatatcattcatagcaccgcttatgcaagtaggtgttattttttatacccatttttactgagttgcaccggtgcaacttgcatatattttacagaaaggatgattaatatggctagggatatacttaatatgaaatctgcttgtgcctacatacgtgtgtccaccgat

SEQ ID NO: 19621 - DNA, 260 bp, Unknown
  Description of Unknown: LeftRegion for integrase B6622 sequence
ataaataaaagctcctgtgctggaacacaagagcttttaccgcgatacttacatagcagtgcctatgatataataccgccctagacaagccatattatatcattcaatgcaccgcttttgcaagtaggtgtattttttatacccttttttagagttgcaccagtacaacttgcatatattttacagaaaggatgattaatatggctacagacattgcaaacatgaaggtagcatgcgcttatattcgcgtatctacagat

SEQ ID NO: 19622 - DNA, 260 bp, Unknown
  Description of Unknown: LeftRegion for integrase B6623 sequence
aataaatatgttattgcgtaaaaataaaaaaaccgcccagctgcaactggacggcatttaagaaaatctcttgcatctgtcgggaatgacagatactttacatggacatttaaagtatatcattttttcttggcatcctgcaagggtgtattttttgtacccaattttaatattttgtaaaaaggaaaaggtgatttactatgaaaaagatcgcagctgcttatataagagtcagcacgcacatgcaggaagaattatct

SEQ ID NO: 19623 - DNA, 260 bp, Unknown
  Description of Unknown: LeftRegion for integrase B6624 sequence
aaataaaagctcctgtgctggaacacaagagcctttacttgcgacttacaattaagctgtgctcaaatgatataatcgccctaagcaagccatattatatcattctaaacaccgcttttgcaagtaggtgtattttttatacccatttttagagttgcaccggtgcaattcgcatatattttacagaaaggatggttaatatggctacagatattgcaaacatgaaagtagcatgtgcttatattcgtgtatctacagac

SEQ ID NO: 19624 - DNA, 260 bp, Unknown
  Description of Unknown: LeftRegion for integrase B6625 sequence
caagagcctttacttgcgacttacaattaagctgtgctcaaatgatataatcgccctaagcaagccatattatatcattctaaacaccgcttttgcaagtaggtgttatttttgtacccattttttaagttgcactggtgcaacttgcatatattttataaaccggtgacattttgtaaccagttgaaagggatgattgtatggctaaaaatatacttaacatgaaaattgcatccggatacattcgtgtatctactgat

SEQ ID NO: 19625 - DNA, 260 bp, Unknown
  Description of Unknown: LeftRegion for integrase B6626 sequence
gcttcgcaatttggaaaacatctgcaagctaaaatccaagagcaagtgaacagcgaaagcaattcttctcttttacttgaacagatgaacgaattgtttaacaatgtttccaaattgtccgaaactgaacaaaaggctttttataccggacttgtaaaagggatagagcgttgggaaaatgaacaaaagggggaataataatgccggaagcattaaacgcggtcatatacgcccgctattcctccgatcgtcagacagaa

SEQ ID NO: 19626 - DNA, 260 bp, Unknown
  Description of Unknown: LeftRegion for integrase B6627 sequence
taaaagcccctgtgctaccaacacaagagcttttaccacgatacttacataagcactgcttatgatataataccgccttagacaagccatattatatcatttctaacaccgcttatgcaagtaggtgttattttttatacccatttttactgagttgcaccggtgcaacttgcatatattttacagaaaggatgattaatatggctaaggatatacttaatatgaaatctgcatgtgcttatatccgtgtatctactgac

SEQ ID NO: 19627 - DNA, 260 bp, Unknown
  Description of Unknown: LeftRegion for integrase B6628 sequence
gtaaatatggggaatatactgcagttgataattacataatttattttgaaccctatctcggagttatgaaactaatataatagatgtgagttttggtgaaaatagtttacgctatacgatactaaaatatatgctctggttctcaaaccagggcatttttatgtccttttctcaatataatgaaaaaaggagttgataatatgcaaacagcatctgccaggatagccgccttatatatccgggtaagtaccgataagcag

SEQ ID NO: 19628 - DNA, 260 bp, Unknown; identical to SEQ ID NO: 19602
  Description of Unknown: LeftRegion for integrase B6629 sequence

SEQ ID NO: 19629 - DNA, 260 bp, Unknown
  Description of Unknown: LeftRegion for integrase B6630 sequence
aaaaataaaagcccctgtgctaccaacacaagagcttttacctcgatacttaataagctgtgcttatatataatatcgccctagacaagccatattatatcattaacagcaccgctttttcaagtaggtgttatttttatacccatttttagagttgcaccggtgcaattcgcatatattttacagaaaggatggttaatatggctacagatattgcaaacatgaaagtagcatgtgcttatattcgtgtatctacagac

SEQ ID NO: 19630 - DNA, 260 bp, Unknown; identical to SEQ ID NO: 19629
  Description of Unknown: LeftRegion for integrase B6631 sequence

SEQ ID NO: 19631 - DNA, 260 bp, Unknown
  Description of Unknown: LeftRegion for integrase B6632 sequence
ttgctgatatcgggaaaatggtaaaaaaataccgcccagctggtaactaggcggtattcagaaaaacacttgcacctgtcaagaacagatgaaatacttttccctcaacaagtaaagtatatcattttttcttggcacccggcaagggtgtattttttgtacaaatttttaatattttataaaaaggaaaaggtgataacatgaaaaaaattgcagctgcttatataagagtcagcacgcacatgcaggaagaattatct

SEQ ID NO: 19632 - DNA, 260 bp, Unknown; identical to SEQ ID NO: 19606
  Description of Unknown: LeftRegion for integrase B6633 sequence

SEQ ID NO: 19633 - DNA, 260 bp, Unknown; identical to SEQ ID NO: 19613
  Description of Unknown: LeftRegion for integrase B6634 sequence

SEQ ID NO: 19634 - DNA, 260 bp, Unknown; identical to SEQ ID NO: 19607
  Description of Unknown: LeftRegion for integrase B6635 sequence

SEQ ID NO: 19635 - DNA, 260 bp, Unknown; identical to SEQ ID NO: 19570
  Description of Unknown: LeftRegion for integrase B6636 sequence

SEQ ID NO: 19636 - DNA, 260 bp, Unknown; identical to SEQ ID NO: 18174
  Description of Unknown: LeftRegion for integrase B6637 sequence

SEQ ID NO: 19637 - DNA, 260 bp, Unknown
  Description of Unknown: LeftRegion for integrase B6638 sequence
ataaaagctcctgtgctaccaacacaagagcttttaccacgatacttacataagcagtgcttatgatataataccgccctagacaagccatattatatcattcataacaccgcttttgcaagtaggtgttatttttatacccatttttactgagttgcaccggtgcaacttgcatatattttacagagaggatgattattatggctaaggatatacttaatatgaaatctgcttgtgcctacatacgtgtgtccacggat

SEQ ID NO: 19638 - DNA, 260 bp, Unknown; identical to SEQ ID NO: 19604
  Description of Unknown: LeftRegion for integrase B6639 sequence

SEQ ID NO: 19639 - DNA, 260 bp, Unknown
  Description of Unknown: LeftRegion for integrase B6640 sequence
aaataaaagctcctgtgctggaacacaagagcctttacctgcgacttacaattaagctgtgctcaaatgatatactcgccctaagcaagctatattatatcattctgaacaccgcttttgcaagtaggtgtattttttatacccatttttagagttgcaccggtgcaattcgcatatattttacagaaaggatggttaatatggctacagatattgcaaacatgaaagtagcatgtgcttatattcgtgtatctacagac

SEQ ID NO: 19640 - DNA, 260 bp, Unknown
  Description of Unknown: LeftRegion for integrase B6641 sequence
taaataaaagctcctgtgctaccaacacaagagcttttgccacgatacttacataagctgtgcctatgatataatatcgccctagacaagccatattatatcattctgaacaccgcttttgcaagtggtgttatttttatacccatttttagagttgcaccggtgcaattcgcatatattttacagaaaggatggttaatatggccacagatattgcaaacatgaaagtagcatgtgcttatattcgtgtatctactgac

SEQ ID NO: 19641 - DNA, 260 bp, Unknown
  Description of Unknown: LeftRegion for integrase B6642 sequence
tgctgatatcgggaaaatggtaaaaaaataccgcccagctggtaactaggcggtattcagaaaaaacacttgcacctgtcaagaacagatgaaatacttttccctcaacaagtaaagtatatcattttttcttggcacccggcaagggtgtattttttgtacaaatttttaatattttataaaaagggaaaggtgataacatgaaaaaaattgcagctgcttatataagagtcagcacgcatatgcaagaagagctgtct

SEQ ID NO: 19642 - DNA, 260 bp, Unknown; identical to SEQ ID NO: 19613
  Description of Unknown: LeftRegion for integrase B6643 sequence

SEQ ID NO: 19643 - DNA, 260 bp, Unknown; identical to SEQ ID NO: 15597
  Description of Unknown: LeftRegion for integrase B6644 sequence

SEQ ID NO: 19644 - DNA, 260 bp, Unknown; identical to SEQ ID NO: 19605
  Description of Unknown: LeftRegion for integrase B6645 sequence

SEQ ID NO: 19645 - DNA, 260 bp, Unknown; identical to SEQ ID NO: 18252
  Description of Unknown: LeftRegion for integrase B6646 sequence

SEQ ID NO: 19646 - DNA, 260 bp, Unknown
  Description of Unknown: LeftRegion for integrase B6647 sequence
ttgctgatatcgggaaaatggtaaaaaaataccgcccagctggtaactaggcggtattcagaaaaacacttgcacctgtcaagaacagatgaaatacttttccctcaacaagtaaagtatatcattttttcttggcacccggcaagggtgtattttttgtacaaatttttaatattttataaaaaggaaaaggtgataacatgaaaaaaattgcagctgcttatataagagtcagcacgcatatgcaagaagagctgtct

SEQ ID NO: 19647 - DNA, 260 bp, Unknown
  Description of Unknown: LeftRegion for integrase B6648 sequence
cgtgcagacggagaccaagacgcttgagttcccgaaggacttcgacgtccagggtctctactcgctgctctcggagctcgcatacgagaacgtgcgccgcatcaacgcatagaaaagaagaagccccacggggtcatagcgctgcaacgctgcccgcggggctttcctaaagaacctctgaaaggaggccgtttccaattatgccaaaaactgcggtgatatacgcccgcttttcatgcaacaagcagcgcgaggcctcc

SEQ ID NO: 19648 - DNA, 260 bp, Unknown; identical to SEQ ID NO: 19646
  Description of Unknown: LeftRegion for integrase B6649 sequence

SEQ ID NO: 19649 - DNA, 260 bp, Unknown
  Description of Unknown: LeftRegion for integrase B6650 sequence
taaatatgattatgaaggtgaagatgctttcaaagttcttaataaaaataatgaacaaataggaagtattagaaaaagcgatattccaaaaatgaatgaaatttataataatattaaaaaagttaatgttttaggaacatcacatttcaccaatgaagaaggaaatactgttctttcttgtcaagtaggtgttacttattatgaatgatattaaacgtggtgctttatatattcgtgtgtcgaccgatgaccaaacagaa

SEQ ID NO: 19650 - DNA, 260 bp, Unknown
  Description of Unknown: LeftRegion for integrase B6651 sequence
tatactatcatttattttttttaaagtcaatagtttaattttaacaataaaaaactccccggctgcaaccggggagcacaagcaaagtaccacaagtgatacaacgccctgaacaagcatattgtatcatctagcccggtattttgcaagtcgggctatttttatgcccattttcatataatttgaaagggtgatacataatgacactgaaaaacgcatgtgcatatatcagagtctcaactgacaagcaggaagagctt

SEQ ID NO: 19651 - DNA, 260 bp, Unknown; identical to SEQ ID NO: 19646
  Description of Unknown: LeftRegion for integrase B6652 sequence

SEQ ID NO: 19652 - DNA, 260 bp, Unknown
  Description of Unknown: LeftRegion for integrase B6653 sequence
ctgcaggaaaagcaaatatccgagctgagaaaggatacgcgcgcgggccgctttgcgatttatctttctgtcgtgctcggcatcattgtcgccatttatttcttccattatgatgtgcctaatcccgattggggatttacgcggtctgtccatgaatttatttcctggtttcgatgaatgcaacaaagaggttttctgctatgacgccaatttctgatttccgtattgccgcctgctatatccgcgtttccacggacgat

SEQ ID NO: 19653 - DNA, 260 bp, Unknown; identical to SEQ ID NO: 19646
  Description of Unknown: LeftRegion for integrase B6654 sequence

SEQ ID NO: 19654 - DNA, 260 bp, Unknown; identical to SEQ ID NO: 19646
  Description of Unknown: LeftRegion for integrase B6655 sequence

SEQ ID NO: 19655 - DNA, 260 bp, Unknown; identical to SEQ ID NO: 19646
  Description of Unknown: LeftRegion for integrase B6656 sequence

SEQ ID NO: 19656 - DNA, 260 bp, Unknown; identical to SEQ ID NO: 19646
  Description of Unknown: LeftRegion for integrase B6657 sequence

SEQ ID NO: 19657 - DNA, 260 bp, Unknown; identical to SEQ ID NO: 19646
  Description of Unknown: LeftRegion for integrase B6658 sequence

SEQ ID NO: 19658 - DNA, 260 bp, Unknown; identical to SEQ ID NO: 18267
  Description of Unknown: LeftRegion for integrase B6659 sequence

SEQ ID NO: 19659 - DNA, 260 bp, Unknown
  Description of Unknown: LeftRegion for integrase B6660 sequence
tcgatagggctttttgttttatctaaatgaattttattacctaaaataaaaaactcccggggctaaccgggagcaactgcgaaataccgaattaacgataccacgccctgaacaagcatattgtatcatctagcccggtattttgcaagtccgggctatttttatgcccattttcatataatttgaaagggtgatacataatgacactgaaaaacgcatgtgcatatatcagagtctcaactgataagcaggaagagctt

SEQ ID NO: 19660 - DNA, 260 bp, Unknown
  Description of Unknown: LeftRegion for integrase B6661 sequence
tgctgatatcgggaaaatggtaaaaaaataccgcccagctggtaactaggcggtattcagaaaaacacttgcacctgtcaagaacagatgaaatacttttccctcaacaagtaaagtatatcattttttcttggcacttcgcaagaggtgtattttttgtacaaatttttaatattttataaaaaggaaaaggtgataacatgaaaaaaattgcagctgcttatataagagtcagcacgcatatgcaagaagagctgtct

SEQ ID NO: 19661 - DNA, 260 bp, Unknown; identical to SEQ ID NO: 19646
  Description of Unknown: LeftRegion for integrase B6662 sequence

SEQ ID NO: 19662 - DNA, 260 bp, Unknown
  Description of Unknown: LeftRegion for integrase B6663 sequence
ttcacagcttgttaaaccgcatacgcaaaaagccacccctgttggcgcaggaatgacttttaacataactctcttgccggactgctccagcagatatatttagcttgaacacctaaattatatcattcctgaagcgtcctggcaaggggcgtattttttatatccatttttcatatggttataacaaaggagatgatataatgaccacaccaaccaccctggaaatcggcgccgcctacgtccgcgtcagcacagatgac

SEQ ID NO: 19663 - DNA, 260 bp, Unknown
  Description of Unknown: LeftRegion for integrase B6664 sequence
tgctgatatcgggaaaatggtaaaaaaaataccgcccagctggtaactaggcggtattcagaaaaacacttgcacctgtcaagaacagatgaaatacttttccctcaacaagtaaagtatatcattttttcttggcaccctgcaagggtgtattttttgtacaaatttttaatattttataaaaaggaaaaggtgataacatgaaaaaaattgcagctgcttatataagagtcagcacgcatatgcaagaagagctgtct

SEQ ID NO: 19664 - DNA, 260 bp, Unknown; identical to SEQ ID NO: 19618
  Description of Unknown: LeftRegion for integrase B6665 sequence

SEQ ID NO: 19665 - DNA, 260 bp, Unknown; identical to SEQ ID NO: 19646
  Description of Unknown: LeftRegion for integrase B6666 sequence

SEQ ID NO: 19666 - DNA, 260 bp, Unknown; identical to SEQ ID NO: 19646
  Description of Unknown: LeftRegion for integrase B6667 sequence

SEQ ID NO: 19667 - DNA, 260 bp, Unknown
  Description of Unknown: LeftRegion for integrase B6668 sequence
ttgctgatatcgggaaaatggtaaaaaaataccgccaagctggtaactaggcggtattcagaaaaacacttgcacctgtcaagaacagatgaaatacttttccctcaacaagtaaagtatatcattttttcttggcacccggcaagggtgtattttttgtacaaatttttaatattttataaaaaggaaaaggtgataacatgaaaaaaattgcagctgcttatataagagtcagcacgcatatgcaagaagagctgtct

SEQ ID NO: 19668 - DNA, 260 bp, Unknown
  Description of Unknown: LeftRegion for integrase B6669 sequence
cagttattaaattcataatacgaaaaagccccaggagctgcgaactcccagagcttttcacataggttttctcttgccaggtacgcctggaagatatatttagcttgaacacctaaattatatcattcctgaagcgtcctgacaaggggcgtattttttatatctatttttcatatggttataataaaggagatgatataatgaccacaccaaccaccctggaaatcggcgccgcctacgtccgcgtcagcacagatgac

SEQ ID NO: 19669 - DNA, 260 bp, Unknown; identical to SEQ ID NO: 19663
  Description of Unknown: LeftRegion for integrase B6670 sequence

SEQ ID NO: 19670 - DNA, 260 bp, Unknown
  Description of Unknown: LeftRegion for integrase B6671 sequence
aaaagcgcaggtttaacacaaaaacaactttcagaaaaaaccggcattacccaagcagatataagtaagctggaaagtggcaacgccaatccctctttgcgcactttacaaagactagcttccggtatgggcatgaaagttaaaattgagtttcgacctatcggacaaaattaaacatttatcccctatccgctcccaaaatgagcagaaaaggggatttttatttcaaaaaaacaggtgattatatgaaaattgctgcc

SEQ ID NO: 19671 - DNA, 260 bp, Unknown; identical to SEQ ID NO: 19646
  Description of Unknown: LeftRegion for integrase B6672 sequence

SEQ ID NO: 19672 - DNA, 260 bp, Unknown; identical to SEQ ID NO: 19646
  Description of Unknown: LeftRegion for integrase B6673 sequence

SEQ ID NO: 19673 - DNA, 260 bp, Unknown
  Description of Unknown: LeftRegion for integrase B6674 sequence
cctaataaaactatttagtttatctaagtgtgctgcaaaaactagattagatttttatgattatgatttaaaaaactctttattcccccgttctgtagagttaaaaaaacaatgcgctatgtttataaatatgtcaaaattaggaattacattagggcatagatcgtgcctagatttaaatattaatagaaggtgattacatgaatgcagcattatatattcgtgttagtacagacgatcaattagaattttcaccagat

SEQ ID NO: 19674 - DNA, 260 bp, Unknown
  Description of Unknown: LeftRegion for integrase B6675 sequence
agcaaatgttattaattaaaaaaataccgcctagctggcactagacggcatttaaaaaagaaaaaactttgcatatgccaagaatggcaaatgatatattttctccgacaagttaagtatatcattttttcttggcacccggcaagggtgtattttttgtacaaatttttaatattttataaaaagagaaaggtgataacatgaaaaaaattgcagctgcttatataagagtcagtacgcatatgcaagaagagctgtct

SEQ ID NO: 19675 - DNA, 260 bp, Unknown; identical to SEQ ID NO: 19663
  Description of Unknown: LeftRegion for integrase B6676 sequence

SEQ ID NO: 19676 - DNA, 260 bp, Unknown
  Description of Unknown: LeftRegion for integrase B6677 sequence
gtcgatagggctttttgttttatctaaatgaattttattacctaaaataaaaaactccccggctgcaaccggggagcacaagcaaagtaccacaagtgatacaacgccctgaacaagcatattgtatcatctagcccggtattttgcaagtcgggctatttttatgcccattttcatataatttgaaagggtgatacataatgacactgaaaaacgcatgtgcatatatcagagtctcaactgacaagcaggaagagctt

SEQ ID NO: 19677 - DNA, 260 bp, Unknown; identical to SEQ ID NO: 19646
  Description of Unknown: LeftRegion for integrase B6678 sequence

SEQ ID NO: 19678 - DNA, 260 bp, Unknown
  Description of Unknown: LeftRegion for integrase B6679 sequence
aaatgttattaaataaataaaataccgcctagctggtaactagacggcatttaaaagaaaaccacttgcacctgttaagttaacagatgagtacttttccctcgcaagtttaagtatatcattttttcttgacacttcgcaagaggtgtattttttgtaccaatttttaatattttgtaaaaaaggaaaaggtgattactatgaaaaagatcgcagctgcttatataagggtcagtacgcatatgcaagaagaattatct

SEQ ID NO: 19679 - DNA, 260 bp, Unknown; identical to SEQ ID NO: 19646
  Description of Unknown: LeftRegion for integrase B6680 sequence

SEQ ID NO: 19680 - DNA, 260 bp, Unknown; identical to SEQ ID NO: 19660
  Description of Unknown: LeftRegion for integrase B6681 sequence

SEQ ID NO: 19681 - DNA, 260 bp, Unknown
  Description of Unknown: LeftRegion for integrase B6682 sequence
aatcttaaattgaaataaaaaataccgcctagctggtaactagacggcatttaaaagaaaaccacttgcacctgttaagttaacagatgagtacttttccctcgcaagtttaagtatatcattttttcttgacacttcgcaagaggtgtattttttgtaccaatttttaatattttgtaaaaaaggaaaaggtgattactatgaaaaagattgcagccgcttatataagggttagtacgcatatgcaagaagaattatct

SEQ ID NO: 19682 - DNA, 260 bp, Unknown; identical to SEQ ID NO: 19663
  Description of Unknown: LeftRegion for integrase B6683 sequence

SEQ ID NO: 19683 - DNA, 260 bp, Unknown; identical to SEQ ID NO: 19646
  Description of Unknown: LeftRegion for integrase B6684 sequence

SEQ ID NO: 19684 - DNA, 260 bp, Unknown
  Description of Unknown: LeftRegion for integrase B6685 sequence
tatactatcatttattttttttaaagtcaatagtttaattttaacaataaaaaactccccggctgcaaccggggagcacaagcaaagtaccacaagtgataccacgccctgaacaagcatattgtatcatctagcccggtattttgcaagtcgggctatttttatgcccattttcatataatttgaaagggtgatacataatgacactgaaaaacgcatgtgcatatatcagagtctcaactgacaagcaggaagagctt

SEQ ID NO: 19685 - DNA, 260 bp, Unknown; identical to SEQ ID NO: 19663
  Description of Unknown: LeftRegion for integrase B6686 sequence

SEQ ID NO: 19686 - DNA, 260 bp, Unknown
  Description of Unknown: LeftRegion for integrase B6687 sequence
gctgccaaatcactcatgcaggaagtttctgtcattgactataatagagtagcataaaacgcaaaaccgcccgcttgccagaatactccagtagatataatcaatccgacacttgaattatatcatttccaaagtgccctggcaaggggcgtattttttgcactcttttcacgtacatttaatcaaggaagtgatatatcatgaaaaaagaaacagagtacttacaaataggtgccgcatacatccgtgtcagtaccgat

SEQ ID NO: 19687 - DNA, 260 bp, Unknown; identical to SEQ ID NO: 19674
  Description of Unknown: LeftRegion for integrase B6688 sequence

SEQ ID NO: 19688 - DNA, 260 bp, Unknown; identical to SEQ ID NO: 19663
  Description of Unknown: LeftRegion for integrase B6689 sequence

SEQ ID NO: 19689 - DNA, 260 bp, Unknown
  Description of Unknown: LeftRegion for integrase B6690 sequence
ggaaaagcacaggtttaacgcaaaaacaactttcagaaaaaaccggtatcacccaagcagatataagcaagttggaaagcggaaacgctaacccctctttgcgcactttacagagattagcttccggtatgggtatgaaggttaaaatcgaatttcaaccaatcggacaaaattaaatttatcccctatccgctcccaaaatgagcagaaaaggggatttttatttcaaaaaaacaggtgattatatgaaaattgctgcc

SEQ ID NO: 19690 - DNA, 260 bp, Unknown; identical to SEQ ID NO: 19660
  Description of Unknown: LeftRegion for integrase B6691 sequence

SEQ ID NO: 19691 - DNA, 260 bp, Unknown
  Description of Unknown: LeftRegion for integrase B6692 sequence
gaaaagcgggtctttgatgcctctatcctatccggctctgcctttgagcctttaaaggatgaatccatcttccagaattttaaaatagtccatggagctgttacctggatggatgaggatattgattgtgctccagaatatatgtatgagcatagttatgcttacgatgaaatgctggtgtagtgaataaggaggttcctatgaacgctgctcttagaactgctgccgcgtatatccgtgtttccactgatgaccagatt

SEQ ID NO: 19692 - DNA, 260 bp, Unknown
  Description of Unknown: LeftRegion for integrase B6693 sequence
ttaaagtgcggaatatataaagaattacgtagacgctcccttttgtcagatgagcaactaaattctctgataaatgaaaaataacgcaaatcaaattgcacatcacaagagattttgatacaatatagttgtcttgtggtgtgctattttcatttatggaggtagcacaatgaaagaaaatattttaagggttgcggcatatgccagagtatctacagataaagaagcgttccggctttaagaaaatgatacaggatgct

SEQ ID NO: 19693 - DNA, 260 bp, Unknown
  Description of Unknown: LeftRegion for integrase B6694 sequence
cgtattccgtttcccgcatccccggcatgttctacgtccccggctcataggctgtggcgagggggaatgaacgtggaagtcaagcacacccatccgcagtatgaggatccgcaggcgcggcagcagcagatgaaggacgcctacgccgcctgcatggcgaagctgcgggcgctgcgggcggcccagcgggaaaagaccgcatgaaaacagacgcggtatacgcccgccagtccgtggagaaaaaggacagcctgtccatc

SEQ ID NO: 19694 - DNA, 260 bp, Unknown
  Description of Unknown: LeftRegion for integrase B6695 sequence
ctgtctgcttatcggctatctggcttttgacgccagcattcccaacggcggtctggttcgggatggtcatgcaactgttttcgcctgggtcgttattatcctgttgtccttcagcgtgggcgtcctggtctccaccctcctgcgcgcccttaaacattctcgagaccgcatgtcgttccaaagagaggagaatcccacagatgacacctaaagattaccgcatagccgccgcctacatccgcgtctccaccgatgaccag

SEQ ID NO: 19695 - DNA, 260 bp, Unknown
  Description of Unknown: LeftRegion for integrase B6696 sequence
ttgatatatcgcaaattcattttgatatatcaaaagtttcttttgaataatcgaaagaaattatatagttgtaacacaatcacacaattattactaaagttaatagaaaatatatagataagtatatataaagtaataaatataaaatatataagaactttaaaaagtttttgtgtttgtgtgacggaaggagtaaaaatatgaaaaatgtaaaagttggtatctacataagagtatctacacaagaacaagctgatgaa

SEQ ID NO: 19696 - DNA, 260 bp, Unknown
  Description of Unknown: LeftRegion for integrase B6697 sequence
gaaaattattgaattagaattgcaacaagttaaaggactagtttttaaaattgataaagagaaatttattgtaataaataaaaatttattaaatatagaaaaaaaggaaataataaaatgtcttcattcccatatcaaattgaataaatttgattatatactcattgacaacaaaattttgattaatgaggataaaaaaaatgaaaacagcaatttatattagagtatctacccaagaacaagcaaaagaaggatattca

SEQ ID NO: 19697 - DNA, 260 bp, Unknown
  Description of Unknown: LeftRegion for integrase B6698 sequence
aaatgttattagacaaataaaaataccgcctagctggtaactagacggcatttaaagaaaaccacttgcacctgttaagttaacagatgagtacttttccctcgcaagtttaagtatatcattttttcttgacacttcgcaagaggtgtattttttgtacccaattttaatattttataaaaaggaaaaggtgatttactatgaaaaagatcgcagctgcttatataagagtcagtacacatatgcaagaagaattgtct

SEQ ID NO: 19698 - DNA, 260 bp, Unknown
  Description of Unknown: LeftRegion for integrase B6699 sequence
acgcagaatgccccggcttattcggatgccggcgatatgaccgtaacggatgaatgtgttggcgcgtttgtcctgcctgcccctgtcgcaaaggcgctcgccgaaaagctgggcgcgatttttgatggttccgccaattgataaaaaatgcagcctccgcatgtgcggcaggctgcattttcatatgaaaggttattgtaatgacaactattgatcttcgtattgccgcggcctatatccgcgtctccaccgacgaccag

SEQ ID NO: 19699 - DNA, 260 bp, Unknown; identical to SEQ ID NO: 19369
  Description of Unknown: LeftRegion for integrase B6700 sequence

SEQ ID NO: 19700 - DNA, 260 bp, Unknown
  Description of Unknown: LeftRegion for integrase B6701 sequence
gaccatcatggagacgggcgaggtgtacgccctctttcccggggaggttccagaggaacgcgacgaggcggttgaggttctggaaaaggaggtctcgtcggcgtttagacggtgagacgaaaaagccccgcgcatatgggcggcaaccctgcgcgaggctctgcaaaacaccgaccccgaagggagggtgagcccattatatggcaagcgcggttatctacgcacggtactcctcgtcaggacagcgcgaggagtcgata

SEQ ID NO: 19701 - DNA, 260 bp, Unknown
  Description of Unknown: LeftRegion for integrase B6702 sequence
ccagcaagatataattaattaccttaagcaagtaaattatatcattcctggagcgtcctggcaaggggcgtattttttatacccttttttcaaagctcaccaaaatcttacaggctgtaatatgggttataatacgggccaaaatgtggattgaaacatcccccaaactcatatacatgataggaacaggagatgatataatgccagcaacaccactagaaatcggcgccgcctacgttcgtgtcagcacagacgatcag

SEQ ID NO: 19702 - DNA, 260 bp, Unknown
  Description of Unknown: LeftRegion for integrase B6703 sequence
aaaacatttttattataaccgaatattcatttttaaaaatcaacaaaaatataggtatctatctactactataacataattacatttttattattaagttaatataaatatatagatatataagtaaaaatgttagagaaaataatattataaggagttagtaatttttttgttattttgttatgttaggaggttttagaatgaaaaaaataaaagttggtatttacattagagtatcaacgcaagaacaagctgaggct

SEQ ID NO: 19703 - DNA, 260 bp, Unknown
  Description of Unknown: LeftRegion for integrase B6704 sequence
gaaaattattgaattagaattgcaacaagttaaaggactagtttttaaaattgataaagagaaatatattgtaataaataaaaatttattaaatatagaaaaaaaggaaataataaaatgtcttcattcccatatcaaattgaataaatttgattatatactcattgacaacaaaattttgattaatgaggataaaaaaaatgaaaacagcaatctatattagagtatctacccaagaacaagcaaaagaaggatattca

SEQ ID NO: 19704 - DNA, 260 bp, Unknown
  Description of Unknown: LeftRegion for integrase B6705 sequence
tgcagtaaatgttattaatataaaataccgcctagctggtaactagacggcatttaaagaaaaccacttgcacctgttaagttaacagatgagtacttttccctcgcaagtttaagtatatcattttttcttgacacttcgcaagaggtgtattttttgtaccaaattttaatattttgtaaaaaggaaaggtgattactatgaaaaagatcgcagccgcttatataagagtcagtacacatatgcaagaagaattgtct

SEQ ID NO: 19705 - DNA, 260 bp, Unknown
  Description of Unknown: LeftRegion for integrase B6706 sequence
atgttattaaataaataaaaataccgcctagctggtaactagacggcattttgaggaaatcatttgcatctgtcgagaaaaaacagacgaaaatgctttacaaccaattaaagtatatcattttttcttggcatcctgcaagggtgtattttttgtaccaatttttaatatttttataaaagaaagaaaaggtgattactatgaaaaagatcgcagctgcttatgtaagagtcagcacacatatgcaagaagaattgtct

SEQ ID NO: 19706 - DNA, 260 bp, Unknown
  Description of Unknown: LeftRegion for integrase B6707 sequence
ccagcaagatataattaattaccttaagcaagtaaattatatcattcctggagcgtcctggcaaggggcgtattttttatacccttttttcaaagctcaccaaaatcttacaggctgtaatatgggttataatacaggccaaaatgtggattgaaacatcccccaaactcatatacatgataggaacaggagatgatataatgccagcaacaccactagaaatcggcgccgcctacgtccgtgtcagcacagacgatcag

SEQ ID NO: 19707 - DNA, 260 bp, Unknown
  Description of Unknown: LeftRegion for integrase B6708 sequence
tccggaagatataattaattaccttaagcaagtaaattatatcattcctggagcgtcctggcaaggggcgtattttttatacccttttttcaaagctcaccaaaatcttacaggctgtaatatgggttataatacaggccaaaatgtggattgaaacatcccccaaactcatatacatgataggaacaggagatgatataatgccagcaacaccactagaaatcggcgccgcctacgtccgtgtcagcacagacgatcag

SEQ ID NO: 19708 - DNA, 260 bp, Unknown; identical to SEQ ID NO: 19703
  Description of Unknown: LeftRegion for integrase B6709 sequence

SEQ ID NO: 19709 - DNA, 260 bp, Unknown
  Description of Unknown: LeftRegion for integrase B6710 sequence
gaatcgtggctgtgaaaatgtaagcctgcaaactttattgaagttgtcggcttcttttaattgctcgcttgaagaactcgtacacggaacgcctgaatatgttgtcacttactctacgaatgaatatacggagaaagaacttgaattgatatatctttatgccctatttttgaaaagtttgcgcacaaggggtggtgttgatgataattaaaaaggtcgctttgtatcttcgtaaaagcagaaaagacgaagggaacgaa

SEQ ID NO: 19710 - DNA, 260 bp, Unknown
  Description of Unknown: LeftRegion for integrase B6711 sequence
ttttgtggcatccagcgttttccagcactaccatccggaatctaaaaaataactacaaataaaaaaccccttccctgttggcgcagagaaagaggattcatgaagcagtcgcatgatgcaaccaccactcacaaaagtattgtatcataagaccgctttatttgctatacatttttataagcaaaaggaggtctttttttatgattatcgcagctgcttatgtccgcgtttctacggatgagcaaaccgattattctccg

SEQ ID NO: 19711 - DNA, 260 bp, Unknown; identical to SEQ ID NO: 19622
  Description of Unknown: LeftRegion for integrase B6712 sequence

SEQ ID NO: 19712 - DNA, 260 bp, Unknown
  Description of Unknown: LeftRegion for integrase B6713 sequence
gacttttatcacagcaaagcagtaatcgtaacagaatcaggctcccgctatcatacatatagctgctatcattgggactatcctatctggatttataataaagaggctgctatctccgaaggctataccccttgcaaagattgcaaccctccccaataaaccccttctcatacattttataaataaaggaggtcttttttatgattatcgcagcagcctatgtccgtgtctccacagatgagcaaaccgattattctccg

SEQ ID NO: 19713 - DNA, 260 bp, Unknown
  Description of Unknown: LeftRegion for integrase B6714 sequence
cagcaagatataattaattaccttaagcaagtaaattatatcattcctggagcgtcctggcaaggggcgtattttttataccctttttttcaaggctcaccaaaatcttacaggctgtaatatgggttataatatgggccgaaatgtggattgaaacgtcctccaaactcatatacatgataggaacaggagatgatataatgccagcaacaccactagaaatcggcgccgcctacgtccgtgtcagcacagacgatcag

SEQ ID NO: 19714 - DNA, 260 bp, Unknown
  Description of Unknown: LeftRegion for integrase B6715 sequence
ctacatccttcctgccggtgctgaaaaaattatctgattactataaagaaatttaaataaaaaatcccctctccctgttggcgcagggaaagaggattcataaagtggtcgcatgatacaaccactcctcgcaacagtattgtatcataagaccgctttatttgctatacatttttataagcaaaaggaggtccttttttatgattgtcgcagctgcttatgtccgtgtttccacggacgagcaaaccgattattccccc

SEQ ID NO: 19715 - DNA, 260 bp, Unknown
  Description of Unknown: LeftRegion for integrase B6716 sequence
attcttcgaccattcaccatgtcactaaactgctgctttgaatatcccgctctgcttgcaatcacacattgcttaacaccctttttctgaataatttccagaatattttctggcactgttccattgcgattcacatgtattgtatcataagaccgctttatttgctatacatttttataagcaaaaggaggtctttttttatgattatcgcagctgcttacgtccgcgtttctacggacgagcaaaccgattattccccc

SEQ ID NO: 19716 - DNA, 260 bp, Unknown
  Description of Unknown: LeftRegion for integrase B6717 sequence
tacgcctggaagatataattaccctaagcaagtaaattatatcattcctggagcgtcctggcaaggggcgtattttttatacccttttttcaaagctcaccaaaatcttacaggctgtaatatgggttataatatggaccgaaatgagaattgaaacatcccctaaactcatatacatgataggaacaggagatgatataatgccagcaacaccactagaaatcggcgccgcctacgttcgtgtcagcacagacgatcag

SEQ ID NO: 19717 - DNA, 260 bp, Unknown
  Description of Unknown: LeftRegion for integrase B6718 sequence
attattgaattagaaatgcaaaactttcaaggactaatcatcaaaaactgtaacgaaatatttatagttatcaacacaaatttaactgatgtcgaaaagaaaaaaattataaattgtcttcatacccgcatcgaattacaacaattcgatttcctactcattgacaatacaatcgtaccaaataatgaggagaaaaaagaatgaaaacagcactttacatcagagtatctacacaagagcaagcaaaagagggatactca

SEQ ID NO: 19718 - DNA, 260 bp, Unknown
  Description of Unknown: LeftRegion for integrase B6719 sequence
gaaagaaaagtaagagagcaattcgatgatttcatcagaaattaccgaagataaataaaataaaaaatcccctctcctgcgccaacaggaaagaggattcatatagcggtcgcatgatacaaccaccactcacaaaagtattgtatcataagaccgctttctttgctatacatttttatagacaaaaggaggtcttttttatgattatcgcagctgcttatgtccgtgtttccacggacgagcaaaccgattattccccc

SEQ ID NO: 19719 - DNA, 260 bp, Unknown
  Description of Unknown: LeftRegion for integrase B6720 sequence
ccagcaagatataattaattaccttaagcaagtaaattatatcattcctggagcgtcctggcaaggggagtattttttatacccttttttcaaagctcaccaaaatcttacaggctgtaatatgggttataatacaggccaaaatgtggattgaaacatcccccaaactcatatacatgataggaacaggagatgatataatgccagcaacaccactagaaatcggcgccgcctacgtccgtgtcagcacagacgatcag

SEQ ID NO: 19720 - DNA, 260 bp, Unknown; identical to SEQ ID NO: 18816
  Description of Unknown: LeftRegion for integrase B6721 sequence

SEQ ID NO: 19721 - DNA, 260 bp, Unknown; identical to SEQ ID NO: 19718
  Description of Unknown: LeftRegion for integrase B6722 sequence

SEQ ID NO: 19722 - DNA, 260 bp, Unknown
  Description of Unknown: LeftRegion for integrase B6723 sequence
ttctcggaagctggacttaatatatcaaaaacaatttcataaaaggaaagcccgcaacggctattggcgtagcggctgcgggctgattccatgtgatgtgtaataaaacaccttcaaacgaatttattatacatcgcatggctccaaaacacaagtaaatattggggctatttttatgcccttttttaggaggaaatgcgatgagacgtgttgtaatttatgtaagagtttctacacaggagcaagccacagagggttac

SEQ ID NO: 19723 - DNA, 260 bp, Unknown
  Description of Unknown: LeftRegion for integrase B6724 sequence
cgacatcgcaacaattaaaaaataccgcccagctgcaaccggacggcattttgaggaaatcatttgcatctgtcgagaaaaaaacagacgaaaatgctttacaaaaccaattaaagtatatcattttttcttggcatcctgcaagggtgtattttttgtaccaatttttaatattttataaaaaggaaaaggtgattactatgaaaaagatcgcagctgcttatgtaagagtcagcacacatatgcaagaagaattgtct

SEQ ID NO: 19724 - DNA, 260 bp, Unknown
  Description of Unknown: LeftRegion for integrase B6725 sequence
atgactttgagaaccgagaggagttagagggggataaagacaatactgcggcagtctaagatcattcccatagaattactgagacgtaagaagctattggaggtgagattacgaaagcggtaatttacgctcgatattcgagccacagtcagagagaagaatccatcgaaggtcagctccgtgagtgtcacgacttcgccttgaagaatgggttcacgatcataaatgaatattgcgacagagcgatttcgggtaagacc

SEQ ID NO: 19725 - DNA, 260 bp, Unknown
  Description of Unknown: LeftRegion for integrase B6726 sequence
aataagttgcgacatcgcaacaataaaaaaccgcccagctgcaactggacggaattaaaagaaaaacacttgcacctgtcaagaacagatgaaatacttttccctgaacaagtaaagtatatcattttttcttggcaccctgcaagggtgtattttttgtacaaatttttaatattttataaaaagaaaaggtgataactatgaaaaaaattgcagctgcttatataagagttagtacccacatgcaagaagaattgtct

SEQ ID NO: 19726 - DNA, 260 bp, Unknown
  Description of Unknown: LeftRegion for integrase B6727 sequence
agttgcgacatcgcaacaattaaaaaccgcccagctgcaactggacggcattttgagaaaaccatttgcatctgccgagaaaaaacagacgaaatgctttacatagacaactaaagtatatcattttttcttggcatcctgcaagggtgtattttttgtaccaaattttaatattttataaaaaagaaaaggtgataactatgaaaaaaattgcagctgcttatataagagtcagtacgcacatgcaagaagaattatct

SEQ ID NO: 19727 - DNA, 260 bp, Unknown
  Description of Unknown: LeftRegion for integrase B6728 sequence
gacatcgcaacaattaaaaaataccgcccagctgcaaccagacggcattttgaggaaatcatttgcatctgtcgagaaaaaacagacgaaaatgctttacaaaaccaattaaagtatatcattttttcttggcatcctgcaagggtgtattttttgtaccaatttttaatattttatagaagaaagaaaaggtgattattatgaaaaaaattgcagctgcttatgtaagagtcagcacacatatgcaagaagaattgtct

SEQ ID NO: 19728 - DNA, 260 bp, Unknown; identical to SEQ ID NO: 19701
  Description of Unknown: LeftRegion for integrase B6729 sequence

SEQ ID NO: 19729 - DNA, 260 bp, Unknown; identical to SEQ ID NO: 19703
  Description of Unknown: LeftRegion for integrase B6730 sequence

SEQ ID NO: 19730 - DNA, 260 bp, Unknown
  Description of Unknown: LeftRegion for integrase B6731 sequence
taaatgttattaaataaataaaaataccgcctagctggtaactagacggcattttgaggaaatcatttgcatctgtcgagaaaaaacagacgaaaatgctttacaaccaattaaagtatatcattttttcttggcatcctgcaagggtgtattttttgtaccaatttttaatattttataaaaaggaaaaggtgattactatgaaaaagattgcagctgcttatgtaagagtcagcacacatatgcaagaagaattgtct

SEQ ID NO: 19731 - DNA, 260 bp, Unknown
  Description of Unknown: LeftRegion for integrase B6732 sequence
gttcagcgagacagggcttaatatatcaaaatcaattaaataaaaagaagcccatagtcactattggcgtaatggctacgggcaggttccatgtgatgtataataacacctttcaaacaaatgttattatacatcgtatggctccaaaacacaagtaaatattggggctatttttatgcccttttttaggaggaaatgcgatgagacgtgttgtaatttatgtaagagtttctacacaggaacaagccacagagggttac

SEQ ID NO: 19732 - DNA, 260 bp, Unknown
  Description of Unknown: LeftRegion for integrase B6733 sequence
acgcagaatgccccggcttattcggatgccggcgatatgaccgtaacggatgaatgtgttggcgcgtttgtcctgcctgcccctgtcgcaaaggcgctcgccgaaaagctgggcgcgatttttgatggttccgccaattgataaaaaatgcagcctccgcatgtgcggcaggctgcattttcatatgaaaggttattgtaatgacaactattgatcttcgtattgccgcggcctatatccgcgtctccaccgatgaccag

SEQ ID NO: 19733 - DNA, 260 bp, Unknown
  Description of Unknown: LeftRegion for integrase B6734 sequence
atgactttgagaaccgagaggagttagagggggataaagacaatactgcggcagtctaagatcattcccatagaactgctgagacgtaagaagctattggaggtgagattacgaaagcggtaatttacgctcgatattcgagccacagtcagagagaagaatccatcgaaggtcagctccgtgagtgtcacgacttcgccttgaagaatgggttcacgatcataaatgaatattgcgacagagcgatttcgggtaagacc

SEQ ID NO: 19734 - DNA, 260 bp, Unknown
  Description of Unknown: LeftRegion for integrase B6735 sequence
attggtaaatcagacattaaagaacgaaatgaagggaagacgactaatttgttgttttcattggatcatttcattaattatgtaaagaactctaaatatctgacaatcggctcgaggcaagtcactgagcgagaaaaatatatgcttattaaaattctacaattggctaaagacatcttagataaaggggaatgatttaaatgggcgaaacatacggagtggtcaatagaaacgccatgcgtgtagcattatatccacgc

SEQ ID NO: 19735 - DNA, 260 bp, Unknown
  Description of Unknown: LeftRegion for integrase B6736 sequence
gtctacaagttataacacttcttgatgatgattatatttatacattaggatatataccaaaaattttagaacacgaattatatcaagcacttgataaatctgacacttataatacagaattatatgttactaaaaaagataatatttttaatttacaactagaaataatatttaaaaaagcaaaaaaggagttttaaataatgatacaaagaggagcttgttatttaagagtaagtacaaatgatcaattagaatttagc

SEQ ID NO: 19736 - DNA, 260 bp, Unknown
  Description of Unknown: LeftRegion for integrase B6737 sequence
ccctgcaagtattgtaaatactgacatgggagaaaaaaatctcgcccccaagtgctaccaacactcagaggcgagcagagcggatactaccaatatcagctcgattcaaattcacactaacccattaagaaagggcgaattctgcccttttattatactgcatattattaaatatgtcaaggaaataggaggaaaaatcaatgaagatcgcagcggcttacgttcgtgtttccaccgaagagcaaacagagctgtcccct

SEQ ID NO: 19737 - DNA, 260 bp, Unknown
  Description of Unknown: LeftRegion for integrase B6738 sequence
tgcaagtattgtaaatactgacatgacaaaaaaaaatctcgcccccaagtgctaccaacactcagaggcgagcagagcggatactaccaatatcagctcgattcaaattcacacccacttcaaccacgaaagggcgaattctgcccttttattatactgcatattattaaatatgtcaagaaaataggaggaaaaaatcaatgaagatcgcagcggcttacgttcgtgtttccaccgaagagcaaacagagctgtcccct

SEQ ID NO: 19738 - DNA, 260 bp, Unknown
  Description of Unknown: LeftRegion for integrase B6739 sequence
ccctgcaagtattgtaaatactgacatgacaaaaaaatctcgcccccaagtgctaccaacactcagaggcgagcagagcggatactaccaatatcagctcgattaaaattcacacccacttcaaccacgaaagggcgaattctgcccttttattatactgcatattattaaatatgtcaagaaaataggaggaaaaatcaatgaagattgcagcggcttacgttcgtgtttccaccgaagaacaaacagagctgtcccct

SEQ ID NO: 19739 - DNA, 260 bp, Unknown; identical to SEQ ID NO: 19736
  Description of Unknown: LeftRegion for integrase B6740 sequence

SEQ ID NO: 19740 - DNA, 260 bp, Unknown
  Description of Unknown: LeftRegion for integrase B6741 sequence
tcccctgctagtattgtaaatactgacatgacaaaaaaatctcgcccccaagtgctaccaacactcagaggcgagcagagcggatactaccaatatcagctcagaacgaacaaaacccaatcaccacaaaagggcttattctgcccttttattatactgcatattattaaatatgtcaagaaaataggaggaaaaaatcaatgaagatcgcagcggcttacgttcgtgtttccaccgaagagcaaacagagctgtcccct

SEQ ID NO: 19741 - DNA, 260 bp, Unknown
  Description of Unknown: LeftRegion for integrase B6742 sequence
aaaaaacccgtcagtaccgcaaatactgacaaaaaaaatctcgcccccaagtgctaccaacactcagaggcgagcagagcggatactaccaatatcagctcgattaaaattcacaccaatagaccaataaagggcgaattctgcccttttattatactgcatattattaaatatgtcaagaaaataggaggaaaaaatcaatgaagatcgcagcggcttacgttcgtgtttccaccgaagagcaaacagagctgtcccct

SEQ ID NO: 19742 - DNA, 260 bp, Unknown
  Description of Unknown: LeftRegion for integrase B6743 sequence
ctgctagtattgtaaatactgacatgggagaaaaaaatctcgcccccaagtgctaccaacactcagaggcgagcagagcggatactaccaatatcagctcgatccaaattcacacccacttcaaccacgaaagggcgaattctgcccttttattatactgcatattattaaatatgtcaagaaaataggaggaaaaatcaatgaagatcgcagcggcttacgttcgtgtttccaccgaagagcaaacagagctgtcccct

SEQ ID NO: 19743 - DNA, 260 bp, Unknown
  Description of Unknown: LeftRegion for integrase B6744 sequence
aagcccgccagtaccgcaaatactgatagggagaaaaaaatctcgcccccaagtgctaccaacactcagaggcgagcagagcggatactaccaatatcagctcaaaatgaacaaaacccaatcaccacaaaagggcttattctgcccttttattatactgcatattattaaatatgtcaagaaaataggaggaaaaatcaatgaagatcgcagcggcttacgttcgtgtttccaccgaagagcaaacagagctgtcccct

SEQ ID NO: 19744 - DNA, 260 bp, Unknown
  Description of Unknown: LeftRegion for integrase B6745 sequence
tctcagcggaagccgcacagtaccgctcaaaccgcatgaaagagctgcgagggcgcgggaagttcctcacatcgccgctagaacggcaggtgttcgagaatttcaagccgtggatagaccagcaaaagaaccaataaaaaaatccccctgcccgcaaggacaggggaactattacataaactatacaaggagatgatatcatgaaactagcagcctgttacataagagtgtccaccgatgaccagctggaatactccccc

SEQ ID NO: 19745 - DNA, 260 bp, Unknown
  Description of Unknown: LeftRegion for integrase B6746 sequence
aataagttgcgacatcgcaacaattaaaaaccgcccagctgcaactggacggaattaaaagaaaaacacttgcacctgtcaagaacagatgaaatacttttccctgaacaagtaaagtatatcattttttcttggcaccctgcaagggtgtattttttgtacaaatttttaatattttataaaaagaaaaggtgataactatgaaaaaaattgcagctgcttatataagagttagtacccacatgcaagaagaattgtct

SEQ ID NO: 19746 - DNA, 260 bp, Unknown; identical to SEQ ID NO: 19743
  Description of Unknown: LeftRegion for integrase B6747 sequence

SEQ ID NO: 19747 - DNA, 260 bp, Unknown
  Description of Unknown: LeftRegion for integrase B6748 sequence
tcccctgcaagtattgtaaatactgacatgacaaaaaaaatctcgcccccaagtgctaccaacactcagaggcgagcagagcggatactaccaatatcagctcaaaatgaacaaaacccaatcaccacaaaagggcttattctgcccttttattatactgcatattattaaatatgtcaagaaaataggaggaaaaatcaatgaagatcgcagcggcttacgttcgtgtttccaccgaagagcaaacagagctgtcccct

SEQ ID NO: 19748 - DNA, 260 bp, Unknown; identical to SEQ ID NO: 19745
  Description of Unknown: LeftRegion for integrase B6749 sequence

SEQ ID NO: 19749 - DNA, 260 bp, Unknown; identical to SEQ ID NO: 19725
  Description of Unknown: LeftRegion for integrase B6750 sequence

SEQ ID NO: 19750 - DNA, 260 bp, Unknown
  Description of Unknown: LeftRegion for integrase B6751 sequence
ctggtatctaatttgggactttcgtctcccaaatgcgggacttatcatcggcggcaacatctcgcttgccgcgtggtttattctgcttctggtcatcgcggccgcctgcgtcatgggccactgtctgcttcgtatgtcttcccggtatacgaagcgatcccacaccgtttttatcggtcacgagccgggaggtgacgagcatgactgatttgaaaatcgccgcggcctatattcgcgtttccaccgatgatcaggtggag

SEQ ID NO: 19751 - DNA, 260 bp, Unknown
  Description of Unknown: LeftRegion for integrase B6752 sequence
aactcaactgatgatatagacgaataaataaataaaaaaatctcgcccccaagtgctaccaacactcagaggcgagcagagcggatactaccaatatcagctcaaaatgaacaaaacccaatcaccacaaaagggcttattctgcccttttattatactgcatattattaaatatgtcaagaaaataggaggaaaaatcaatgaagatcgcagcggcttacgttcgtgtttccaccgaagagcaaacagagctgtcccct

SEQ ID NO: 19752 - DNA, 260 bp, Unknown
  Description of Unknown: LeftRegion for integrase B6753 sequence
ttccctgctagtattgtaaatactgacatgggagaaaaaatctcgcccccaagtgctaccaacactcagaggcgagcagagcggatactaccaatatcagctcaaaacgaacaaaacccaatcaccacaaaagggcttattctgcccttttattatactgcatattattaaatatgtcaagaaaataggaggaaaaatcaatgaagatcgcagcggcttacgttcgtgtttccaccgaagagcaaacagagctgtcccct

SEQ ID NO: 19753 - DNA, 260 bp, Unknown
  Description of Unknown: LeftRegion for integrase B6754 sequence
cctaaaaaacttgatgtctcagatttttatagatttttagttcaattgtctatcgaaaatagacaaaaaattaattcataaaacaaaaaaagccctccaagttttggtcgaggaggagggcttaatctaatttacagtaaaactctcggaaacgagcgcttttactgtacccattttaacaaaaaagaggtacaaacacaatgagtaaaaaagtggctatttacaccagagtatcaacaacgaaccaagcagaagaggga

SEQ ID NO: 19754 - DNA, 260 bp, Unknown
  Description of Unknown: LeftRegion for integrase B6755 sequence
atcggatatgcagcgctccaaagacgcagcatacgcggagggttttctcgatggcaagaagcgcgagtccgcggtttcatatgccgcgggtgagaaggcggggtatgaccgcggctaccaggtcggcttgctggacggtcgcgccgaaggttgggatcacggatacacctgcgcaaggcgcgacatgaacggaggtgcccatgactgatttcaaaaccgccgcggcctatatccgcgtctccactgacgatcaggtggag

SEQ ID NO: 19755 - DNA, 260 bp, Unknown
  Description of Unknown: LeftRegion for integrase B6756 sequence
atgctgcaaaagctggatccataccttgcagactatggcagcatccgtgatgccgttgttcattcgctggatgtgtacccccctccccgacattttgcataatttctttcattcctttttgtgcataacaaaaaagcagccccgcactacgcacggagctgctttttcttcagctatcattatcttctggaggtttcgcaatgggctatgtgacgaagaaggcggcacaacgctttgaggaaaagaaagccgccatatac

SEQ ID NO: 19756 - DNA, 260 bp, Unknown
  Description of Unknown: LeftRegion for integrase B6757 sequence
tagccgacataatcagctactaccgtccgcacatttacgaaccccgttgagataaactattactagtgtctctacttttattattatacactttttctaaaaaaaatgcaagtttttataaaaaatgtaaataaaacgttactttctcgtaatatttttgtaatgtttttataatattaatttaaaaggagctataaataatgattaaacgaggtgcttgttacattagggtaagtactaacgaccaactagaatttagc

SEQ ID NO: 19757 - DNA, 260 bp, Unknown
  Description of Unknown: LeftRegion for integrase B6758 sequence
ctggtatctaatttgggactatcgcctcccaaatgcgggtctcattatcggtggcaacatatcgctcgccgcgtggcttattctgctgctggtcatcgcggccgcctgcgtcatgggccactgtctgcttcgtatgtcctcccggtataccaggcagtcccacaccggtttcatcggtcacgagccgggaggtgacgagcatgactgatttgaaaatcgccgcggcctatatccgcgtttccaccgatgatcaggtggag

SEQ ID NO: 19758 - DNA, 260 bp, Unknown
  Description of Unknown: LeftRegion for integrase B6759 sequence
ctggtatctaatttgggactttcgcctcccaaatgcgggacttatcatcggcggcaacatctcgcttgccgcgtggtttattctgcttctggtcatcgcggccgcctgcgtcatgggccactgtctgcttcgtatgtcttcccggtatacgaagcgatcccacaccgtttttatcggccacgagccgggaggtgacgagtatgactgatttgaaaatcgccgcggcctatatccgcgtttccaccgatgatcaggtggag

SEQ ID NO: 19759 - DNA, 260 bp, Unknown
  Description of Unknown: LeftRegion for integrase B6760 sequence
cccatgctagtattgtaaatactgacatgacagaaaaaaatctcgcccccaagtgctaccaacactcagaggcgagcagagcggatactaccaatatcagctcaaaacgaacaaaacccaatcaccacaaaagggcttattctgcccttttattatactgcatattattaaatatgtcaagaaaataggaggaaaaatcaatgaagatcgcagcggcttacgttcgtgtttccaccgaagagcaaacagagctgtcccct

SEQ ID NO: 19760 - DNA, 260 bp, Unknown
  Description of Unknown: LeftRegion for integrase B6761 sequence
ccctgctagtattgtaaatactgacatgacagaaaaaaatctcgcccccaagtgctaccaacactcagaggcgagcagagcggatactaccaatatcagctcaaaacgaacaaaacccaatcaccacaaaagggcttattctgcccttttattatactgcatattattaaatatgtcaagaaaataggaggaaaaaatcaatgaagatcgcagcggcttacgttcgtgtttctaccgaagaacagaccgagctgtcccct

SEQ ID NO: 19761 - DNA, 260 bp, Unknown
  Description of Unknown: LeftRegion for integrase B6762 sequence
atcggtggctctttattcaatggagaatccacaggtttatatatttcaaaagaccaaagccaagctagtttaggtgtaggcattttaattgattctaaaaattcaactttcatctactctcccgaatctttcgactattctgattactctttaacctttaacgctaataccactccatacgagcttaaggaggtatccaaatgattcctgctgtcggttactgtcgtttctcttctgagaaccaagcggatggattctcc

SEQ ID NO: 19762 - DNA, 260 bp, Unknown
  Description of Unknown: LeftRegion for integrase B6763 sequence
caattatgaaattagagagctgcctcctaatgagttttcaatatgtggaatctacatgggtcactttaagccagtagaagaataggaggatgggatggcatcaaaaaaataaagaatagttttgctgtaaacgtaggaggggcaactgagccgatttctagggaggatctcgatgagagtataaaaaaggagagtttagaatggttgtgcttgcatatataagagttagtactgatgaacaagcggaaaaagggaactcc

SEQ ID NO: 19763 - DNA, 260 bp, Unknown; identical to SEQ ID NO: 19725
  Description of Unknown: LeftRegion for integrase B6764 sequence

SEQ ID NO: 19764 - DNA, 260 bp, Unknown
  Description of Unknown: LeftRegion for integrase B6765 sequence
ctggtatctaatttgggactatcgcctcccaaatgcgggtctcattatcggcggcaacatatcgctcgccgcgtggcttattctgctgctggtcatcgcggcctcctgcatcatgggccgctgtctgcttcgtatgtcctcccggtataccaggcagtcccacaccggtttcatcggccacgagccgggaggtgacgagcatgactgatttgaaaatcgccgcggcctatatccgcgtttccaccgatgatcaggtggag

SEQ ID NO: 19765 - DNA, 260 bp, Unknown
  Description of Unknown: LeftRegion for integrase B6766 sequence
taatgaacctgtcatttttattataaaacaaaaaccgttcctggctgcaaccaagaacggctttacatagtttctcttaccggatgtactccagaagatacactacatatcagaattctagtatatcatttctggagtgtcctgacaaggggcgtattttttgcacccaaaaaccgtacaatgcactaggagatgatattatgacactattatctacattggaaattggagccgcatatattcgggtaagttctgatgaa

SEQ ID NO: 19766 - DNA, 260 bp, Unknown
  Description of Unknown: LeftRegion for integrase B6767 sequence
acaaaaacggctcgccagataaaagatataataataacagacagcttcctgtatgcctttatggatacgttaccataagaagcggcgcgggacttgaaatccagttgtgctgttccaacaattctaaaatcgacggtctgggatgatcctccgcaaggacaaacaccccaacgcatacactataataaggagatggtaacatgaagctagcagcctgctacataagagtatcgaccgacgatcagcttgagtactccccg

SEQ ID NO: 19767 - DNA, 260 bp, Unknown
  Description of Unknown: LeftRegion for integrase B6768 sequence
tagttctcctatatttaatgaatttattatatcatataattaaaataaaaaaaactccccggctgcaaccggggagcacaagcaaagtaccacaagtgatacaacgccctgaacaagcatattgtatcatctagcccggtattttgcaagtcgggctatttttatgcccattttcatataatttgaaagggtgatacataatgacactgaaaaacgcatgtgcatatatcagagtctcaactgacaagcaggaagagctt

SEQ ID NO: 19768 - DNA, 260 bp, Unknown
  Description of Unknown: LeftRegion for integrase B6769 sequence
agtcttttaaaataaaaaaagaatggaacctacaacccatagggtcgtttacaggttccatgtctgttaataattctagtgttatctattataacatatagaattgtagttgtcaaattcgacactaatattttattcaattttattaaaattattcttgcaatatttttataatattaatttaaaaggagctataaacaatgattaaacgaggtgcttgttacattagggtaagtacgaacgaccaactagagtttagc

SEQ ID NO: 19769 - DNA, 260 bp, Unknown
  Description of Unknown: LeftRegion for integrase B6770 sequence
agcttgagggggataagggagcaactgcggcggtgtgataagctcattccattcgctttgatacatagaaagaagatattggaggtgagactatcaaagcagtaatttatgctcgttactcgagccataatcaacgagaagaatccatcgagggtcagcttcgagagtgccatgagttcgctctcaagaatgacttcatcgtggttgacgaatatatcgaccgggcaatctccggcaagactgacaaccgaccgagcttc

SEQ ID NO: 19770 - DNA, 260 bp, Unknown; identical to SEQ ID NO: 19747
  Description of Unknown: LeftRegion for integrase B6771 sequence

SEQ ID NO: 19771 - DNA, 260 bp, Unknown
  Description of Unknown: LeftRegion for integrase B6772 sequence
cctgcaagtattgtaaatactgacatgacaaaaaaatctcgcccccaagtgctaccaacactcagaggcgagcagagcggatactaccaatatcagctcgattcaaattcacacccacttcaaccacgaaagggcgaattctgcccttttattatactgcatattattaaatatgtcaagaaaataggaggaaaaaatcaatgaagatcgcagcggcttacgttcgtgtttccaccgaagagcaaacagaactgtcccct

SEQ ID NO: 19772 - DNA, 260 bp, Unknown
  Description of Unknown: LeftRegion for integrase B6773 sequence
agccagtcagtaccgcaaatactgataggaagaaaaaaatctcgcccccaagtgctaccaacactcagaggcgagcagagcggatactaccaatatcagctcaaaacgaacaaaacccaatcaccacaaaagggcttattctgcccttttattatactgcatattattaaatatgtcaagaaaataggaggaaaaaatcaatgaagatcgcagcggcttacgttcgtgtttccaccgaagaacaaacagagctgtcccct

SEQ ID NO: 19773 - DNA, 260 bp, Unknown
  Description of Unknown: LeftRegion for integrase B6774 sequence
attggtaaatcagacattaaagaacgaaatgaagggaagacgaccaatttgttgttttcattggatcatttcattaattatgtaaagaactctaaatatctgacaatcggctcgaggcaagtcactgagcgagaaaaatatatgcttattaaaattctacaattggctaaagacatcttagataaaggggaatgatttaaatgggcgaaacatacggagtggtcaatagaaacgccatgcgtgtagcattatatccacgc

SEQ ID NO: 19774 - DNA, 260 bp, Unknown
  Description of Unknown: LeftRegion for integrase B6775 sequence
gtcggatgtgcagtgctccaaggatgcagcatatgcggagggttttctcgatggcaagaagcgcgagtccgcggtttcatatgccgcaggtgaaaaggcagggtatgaccgcggctaccagaccggcctgctggacggccgtgccgaaggctgggatcacggatacgcctgcgcaaggtgcgacatgaacggaggtgcccatgactgatttcaaaaccgccgcggcctatatccgcgtctccaccgacgatcaggtggag

SEQ ID NO: 19775 - DNA, 260 bp, Unknown
  Description of Unknown: LeftRegion for integrase B6776 sequence
atcaaatcgaagtctttagtcaatatataaaaaaagagccagccgcaaaggaccagctccaaactgtgatattaaataccaccctagacaagttgtattttatcattctttggagcacccggtcaatcagaactgttgttcttaggcatggtgttatttttatacccatttttcataaaataaacaaaggagtgatagaaatgaaaacaggtgcattatatgtcagagtatcaacagatgatcaggtagagtattctcct

SEQ ID NO: 19776 - DNA, 260 bp, Unknown
  Description of Unknown: LeftRegion for integrase B6777 sequence
acctcaattagcaatttttgtcaatatactaaaaaagagccagccactaggaccagctccaaactgtgatattaaataccaccctagacaagttgtattttatcattttttggagcacccggtcaatcagaactgttgttctttggttgggtgttatttttatactcatttttcataaaataaacaaaggagtgatagaaatgaaaacaggtgcattatacgtcagagtatcaacagatgatcaggtagagtattctcct

SEQ ID NO: 19777 - DNA, 260 bp, Unknown
  Description of Unknown: LeftRegion for integrase B6778 sequence
aaataaaaaaccgaacaaacagagaaatgcatataagattgcaaatgaatttttaataaaataaaaaatcgcccgatgctgcaacatcaggcgacaaaatcgtccccttggaaacgattactaaacttgcacatttagtatatcgtatttttccaaagtccacaagggcttattttttatacccttttttagagggaattatgaaaaaagaaaaagtaataccgatagactccctcgatctggtcgatctatacatccgt

SEQ ID NO: 19778 - DNA, 260 bp, Unknown
  Description of Unknown: LeftRegion for integrase B6779 sequence
aaataaaaaaccgaacaaacagagaaatgcatataagattgcaaatgaatttttaataaaataaaaaatcgcccgatgctgcaacatcaggcgacaaaatcgtccccttggaaacgattactaaacttgcacatttagtatatcgtacttttccaaagtccacaagggcttattttttatacccttttttagagggaattatgaaaaaagaaaaagtaataccgatagactccctcgatctggtcgatctatacatccgt

SEQ ID NO: 19779 - DNA, 260 bp, Unknown
  Description of Unknown: LeftRegion for integrase B6780 sequence
aaataaaaaaccaaacaagcagagaaatgcatataagattgcaaatgaatttttaataaaataaaaaatcgcccgatgctgcaacatcaggcgacaaaatcgtccccttggaaacgattactaaacttgcacatttagtatatcgtatttttccaaagtccacaagggcttattttttatacccttttttagagggaattatgcaaaaagaaaaagtaataccgatagactccctcgatctggtcgatctatacatccgt

SEQ ID NO: 19780 - DNA, 260 bp, Unknown
  Description of Unknown: LeftRegion for integrase B6781 sequence
caggagtgataaactatgaatgaagtaataaaagtagtcggatatgcacgattttcttcttcaatgcaaagagaggagtccataacagctcaaaaaagatatatgatgatgtatgctaaaagaaacaatatggaagttattgattggtattgtgatgaacaaaatcggcaaaaacagtcaacagacctgaatttcagagaatgataaatgacgcaaagaacaatcctgaatttaaggcggtattggtacataaaacagac

SEQ ID NO: 19781 - DNA, 260 bp, Unknown; identical to SEQ ID NO: 19778
  Description of Unknown: LeftRegion for integrase B6782 sequence

SEQ ID NO: 19782 - DNA, 260 bp, Unknown; identical to SEQ ID NO: 19778
  Description of Unknown: LeftRegion for integrase B6783 sequence

SEQ ID NO: 19783 - DNA, 260 bp, Unknown
  Description of Unknown: LeftRegion for integrase B6784 sequence
tggacagcgtacccaacaaagccggatacatcaaggcattgatccgcaaggatattgaagaaaacggataaaaaaaccgccccacggcggcaaccgtgaagcggcaagaggaaaaactattgctataatagacttcccaaagcaaggtctattatagcatatttcctctgaaaaatcaagtcttaggaggaaatttacacatgaatgcagtgatctacgcccgttacagctgcgaccggcagaccgagcagtccattgag

SEQ ID NO: 19784 - DNA, 260 bp, Unknown; identical to SEQ ID NO: 19777
  Description of Unknown: LeftRegion for integrase B6785 sequence

SEQ ID NO: 19785 - DNA, 260 bp, Unknown
  Description of Unknown: LeftRegion for integrase B6786 sequence
atatcaaatcgaagtctttagtcaatatataaaaaaagagccagccactaaggaccagctccacagaatgattaaatcatccctaggcaagttgtattttatcattctttggagcacccggtcaatcagaactgttgttcttaggctaggtgttatttttatacccatttttcataaaatacataaaggagtgatgaaatatgaagacaggagcattatatgtcagagtttcaacagacgaccaggtagaatattctcct

SEQ ID NO: 19786 - DNA, 260 bp, Unknown
  Description of Unknown: LeftRegion for integrase B6787 sequence
atattatatcaaatcagaggttttagtcaataaaaaagagccagccactaaggaccagctccaaagcgatattaaataccaccctagacaagttgtattttatcattctttggagcacccggtcaatcagaactgttgttcttcggttgggtgttatttttatactcatttttcataaaataaacaaaggagtgatagaaatgaaaacaggtgcattatacgtcagagtatcaacagatgaccaagtagagtattctcct

SEQ ID NO: 19787 - DNA, 260 bp, Unknown
  Description of Unknown: LeftRegion for integrase B6788 sequence
gtggaatcgttcttgtgaaaatatcagtttgcagacgcttttgaagttggcaaagttctttaattgcacgattgaggaacttgtaaacggcgcacccgaaaagtcgtatacttttgatttgaacgaatacacttttgcggaacttgaactaatccgtttttatgcagggttcttgaaagcaaacagagggaggacaacgaatgaaatcatcaagcgtggctttatacctccgaaagagtagggaagaagaaacagaaacg

SEQ ID NO: 19788 - DNA, 260 bp, Unknown
  Description of Unknown: LeftRegion for integrase B6789 sequence
aggagagaaaaactacaactacatagcaaaaaccgcccggtgctggtaacgccgaacggttatgcatagattccgtacagatcaaagatctgtgtgaaaatcttccctaagcaagaagattataccacacacctcttcgctttgtacagggtgtattttttatactcttttttcatattttcaaagagggggtggtcttaatggataatacaatgcgttatggcgcgttatatatccgtgtgagcactgacaagcaggaa

SEQ ID NO: 19789 - DNA, 260 bp, Unknown
  Description of Unknown: LeftRegion for integrase B6790 sequence
aaatggtaacaaccctaaaatgcaaaaaccgcccggtacgccaataccgaacggctttgcatagatcttctcttgccggatgctccggaaagatataaatcagacttaagacacctgaattatatcattttccagagcaccctgcaaggggtgtattttttataccctaaatccatatggtttacaggagatgatatagtatggcacaaaatttgaggatcggcgctgcttatatccgcgtcagcaccgatgatcaggca

SEQ ID NO: 19790 - DNA, 260 bp, Unknown
  Description of Unknown: LeftRegion for integrase B6791 sequence
aggaaggtggacgacttaaatagcaaaaccgtccggtgctggaacaccgaacggcttcacacagattttctcttgccggatgctccggaaagatataaatcagacttagaacacctgaattatatcattttccagaacaccctgcaaggggtgtattttttatacccaaaatccatatggtttacaggagatgatatagtatggcacaaaatttaaggatcggcgctgcctatatccgcgtcagcaccgatgatcaggca

SEQ ID NO: 19791 - DNA, 260 bp, Unknown
  Description of Unknown: LeftRegion for integrase B6792 sequence
cacctcaattagcaatttttgtcaatatactaaaaaagagccagccacaaaggaccagctccaaagcgatattaaataccaccctagacaagttgtattttatcattctttggagcacccggtcaatcagaactgttgttcttcggttgggtgttatttttatactcatttttcataaaataaacaaaggagtgatagaaatgaaaacaggtgcattatacgtcagagtatcaacagatgatcaggtagagtattctcct

SEQ ID NO: 19792 - DNA, 260 bp, Unknown
  Description of Unknown: LeftRegion for integrase B6793 sequence
ttgtaaaaccaaaagaaaaaccggtcccctgcgccaacaggaaaccggcttgcatatctccgaagagatacaatgtgacataccaatcacagaatctattgtatcatcttcgagcagccaagacaacgggaacatttgttttccggtggctgttatttttgtaccctaaagtccatatggtttacaggagatgatatagtatggcacaaaatttgaggatcggcgctgcttatatccgcgtcagcaccgatgatcaggcg

SEQ ID NO: 19793 - DNA, 260 bp, Unknown
  Description of Unknown: LeftRegion for integrase B6794 sequence
cgaaactttaaatatagttttagatgcttaatataataaaaaccggctcctgcgccaacaggaaccggcaagtaacatcccgaagaatggtaccaatttcgcaaaaatattgtatcatcttcggaggcagtctgcaagcagaactcgcgttctttgctggctgttatttttgtacccatttttaagaaggtgaagatgatatgaaaaacaaaagaaaagaaatccttcccgggctttcggatatggtagatctctacatt

SEQ ID NO: 19794 - DNA, 260 bp, Unknown
  Description of Unknown: LeftRegion for integrase B6795 sequence
atattatatcaaatcagaggttttagtcaataaaaaagagccagccactaatgaccagctccaaagcgatattaaataccaccctagacaagttgtattttatcattctttggagcacccggtcaatcagaactgttgttcttaggctaggtgttatttttatactcatttttcataaaataaacaaaggagtgatagaaatgaaaacaggtgcattatatgtcagagtttcaacagacgaccaggtagaatattctcct

SEQ ID NO: 19795 - DNA, 260 bp, Unknown
  Description of Unknown: LeftRegion for integrase B6796 sequence
gaaaaaaacaattatataagcgatagaattgaatataaatgtattcaaagagcatttgaacaaatattggagcttaatctagttgatgatgtaaaaaaattaagaatagaagctccagaaggtagtatagaagaattacttgttcttgctataaaagcagatttagaacatttaataaacaagaaaaaaggagcagaataatgcgagttgcaatttattcaagaaaatctaagttgacagataagggtgaaagtattgaa

SEQ ID NO: 19796 - DNA, 260 bp, Unknown
  Description of Unknown: LeftRegion for integrase B6797 sequence
tcaaaatcaaattgagcaaaaataataaaaccgcccctgcgccaacaggaacggtatgaaattgcatatccgaagatatacactatactttggtcagtaatattgtatcatcttcgggaacagcttgcaagagaacaaaagttcgctggctgttatttttgtacctttttttacataaaacttacaaaggagctgatacaatgtcaaataacacaccttcttcgcttcctgatttgcgtactggtgccctttacatccgg

SEQ ID NO: 19797 - DNA, 260 bp, Unknown
  Description of Unknown: LeftRegion for integrase B6798 sequence
tgcactggtgcaactcccataaatagcaaaaccgcccggtgctggaacatcggacggcttcacatagactttctcttgccggatgctccgggaagatataatcagcctgaacacctgaattatatcattcctggaacatcctggcaaggggtgtattttttataccctaaatccatatggtttacaggagatgatatagtatggcacaaaatttaaggatcggcgccgcttatatccgcgtcagcaccgatgatcaggca

SEQ ID NO: 19798 - DNA, 260 bp, Unknown
  Description of Unknown: LeftRegion for integrase B6799 sequence
tatatcaaatcgaagtctttagtcaatatataaaaaaagagccagccactaatgaccagctccacagaatgattaaatcatccctagacaagttgtattttatcattctttggagcacccggtcaatcagaactgttgttcttcggttgggtgttatttttatactcatttttcataaaataaacaaaggagtgatagaaatgaaaacaggtgcattatacgtcagagtatcaacagatgatcaggtagagtattctcct

SEQ ID NO: 19799 - DNA, 260 bp, Unknown
  Description of Unknown: LeftRegion for integrase B6800 sequence
cacctcaattagcaatttttgtcaatatactaaaaaagagccagccactaggaccagctccaaagcgatattaaataccaccctagacaagttgtattttatcattctttggagcacccggtcaatcagaactgttgttctttggttgggtgttatttttatactcatttttcataaaataaacaaaggagtgatgagatatgaagacaggagcattatacgtcagagtatcaacagatgatcaggtagagtattctcct

SEQ ID NO: 19800 - DNA, 260 bp, Unknown
  Description of Unknown: LeftRegion for integrase B6801 sequence
tcaaatcgaagtctttagtcaatatataaaaaaagagccagccgcaaaggaccagctccaaactgtgatattaaataccaccctagacaagttgtattttatcattctttggagcacccggtcaatcagaactgttgttcttaggctaggtgttatttttatacccatttttcataaaatacataaaggagtgatgaaatatgaagacaggtgcattatatgtcagagtatcaacagatgatcaggtagagtattctcct

SEQ ID NO: 19801 - DNA, 260 bp, Unknown
  Description of Unknown: LeftRegion for integrase B6802 sequence
tattatatcaaatcagaggttttagtcaataaaaaagagccagccactaatgaccagctccaaagcgatattaaataccaccctagacaagttgtattttatcattctttggagcacccggtcaatcagaactgttgttcttaggctaggtgttatttttatacccttttttcataaaatacataaaggagtgatgaaatatgaagacaggagcattatatgtcagagtttcaacagacgaccaggtagaatattctcct

SEQ ID NO: 19802 - DNA, 260 bp, Unknown
  Description of Unknown: LeftRegion for integrase B6803 sequence
ttgcaaggccaaaagaaaaaccggtcccctgctccaacaggaaaccggcttgcatatctccgaagagatacgatgtgacataccaatcacagaatctattgtatcatcttcgagcagccaagacaacgggaacatttgttttccggtggctgttatttttgtatcctaaagtccatatggtttacaggagatgatatagtatggcacaaaatttgaggatcggcgctgcttatatccgcgtcagcaccgatgatcaggca

SEQ ID NO: 19803 - DNA, 260 bp, Unknown; identical to SEQ ID NO: 19790
  Description of Unknown: LeftRegion for integrase B6804 sequence

SEQ ID NO: 19804 - DNA, 260 bp, Unknown; identical to SEQ ID NO: 19775
  Description of Unknown: LeftRegion for integrase B6805 sequence

SEQ ID NO: 19805 - DNA, 260 bp, Unknown; identical to SEQ ID NO: 19777
  Description of Unknown: LeftRegion for integrase B6806 sequence

SEQ ID NO: 19806 - DNA, 260 bp, Unknown
  Description of Unknown: LeftRegion for integrase B6807 sequence
aggaaggtggacgacttaaatagcaaaaccgtccggtgctggaacaccgaacggcttcacacagattttctcttgccggttgctccggaaagatataaatcagacttaagacacctgaattatatcattttccagagcaccctgcaaggggtgtattttttatacccaaaatccatatggtttacaggagatgatatagtatggcacaaaatttaaggatcggagccgcttatatccgcgtcagcaccgatgatcaggca

SEQ ID NO: 19807 - DNA, 260 bp, Unknown
  Description of Unknown: LeftRegion for integrase B6808 sequence
cctcaattagcaatttttgtcaatatgcaaaaaaagagccagccgcaaaggaccagctccaaactgtgatattaaataccaccctagacaagttgtattttatcattctttggagcacccggtcaatcagaactgttgttcttaggcatggtgttatttttatacccatttttcataaaataaacaaaggagtgatagaaatgaaaacaggtgcattatacgtcagagtatcaacagatgaccaggtagagtattctcct

SEQ ID NO: 19808 - DNA, 260 bp, Unknown
  Description of Unknown: LeftRegion for integrase B6809 sequence
atcaaatcgaagtctttagtcaatatataaaaaaagagccagccgcataggaccagctccaaactgtgatattaaataccaccctagacaagttgtattttatcattctttggagcacccggtcaatcagaactgttgttcttaggctaggtgttatttttatacccatttttcataaaataaacaaaggagtgatagaaatgaaaacaggtgcattatacgtcagagtatcaacagatgatcaggtagagtattctcct

SEQ ID NO: 19809 - DNA, 260 bp, Unknown
  Description of Unknown: LeftRegion for integrase B6810 sequence
gattctggagaagtgcaaggcagccatgaccgaagtcgccattgtggaatatcaaccggcggcataacacaaaaaaaaccgccccacggcggcaaccgtgagacggcaagaggaaaaactattgcgataatagtcccccaaacaaggtctattatagcatatttcctcgtaaaaatcaagtcttaggaggaaatttacacatgaatgcagtgatctacgcccgttacagctgcgaccggcagaccgagcagtccattgag

SEQ ID NO: 19810 - DNA, 260 bp, Unknown
  Description of Unknown: LeftRegion for integrase B6811 sequence
cttttacgttatataaaccataaaaccgcctcagcgctaccaacactaagacggtccatataaactacatatccgaagatatacagtctcattgcaaaaatattgtatcatcttcgggaacagcttgcaagagaacaaaagttctcaggctgttatttttgtacctttttttacataaaacttacaaaggagctgatacaatgtcaaataacaccccttcttcgcttcccgatttgcgtaccggtgctctttacatccgt

SEQ ID NO: 19811 - DNA, 260 bp, Unknown
  Description of Unknown: LeftRegion for integrase B6812 sequence
ttacagtgcattatttgatgcacaataaataaaaaaagagccagccactaaggaccagctccacagaatgattaaatcatccctaggcaagttgtattttatcattctttggagcacccggtcaatcagaactgttgttcttaggctaggtgttatttttatacccatttttcataaaatacataaaggagtgatgaaatatgaagacaggagcattatatgtcagagtttcaacagacgaccaggtagaatattctcct

SEQ ID NO: 19812 - DNA, 260 bp, Unknown
  Description of Unknown: LeftRegion for integrase B6813 sequence
catattttttttggaggtcttttctttgagcaattacagcgaacgtgataaagccgttctggacagtctggacgagaacattcgtcttgcacctcgtctcggagtctgcgccgatactttctatgccctgaagcaggagttcctgcgtgtcatgcgtgaacgcgacgaagccatccagaagctttcggaggtgcaagcgcatggcaaacactgatttgaccgtcgcggctgcctatatccgcgtctccacagaggatcag

SEQ ID NO: 19813 - DNA, 260 bp, Unknown
  Description of Unknown: LeftRegion for integrase B6814 sequence
gacttgtaaaaccaaaagaaaaaccggtcccctgctccaacaggaaaccggcttgcatatccccgaagagatacaatgtgacgtcgcaatcacatagatattgtatcatcttcgggcagccatagcaacgggaacgtttgttttccggtggttgttatttttgtaccctaaagtccatatggtttacaggagatgatatcatgtcacagactttaaggatcggcgccgcttatatccgcgtcagcaccgatgatcaggca

SEQ ID NO: 19814 - DNA, 260 bp, Unknown
  Description of Unknown: LeftRegion for integrase B6815 sequence
ataatatatacatttttttaagtcaatatactaaaaaagagccagccactaaggaccagctccacagaatgattaaatcatccctagacaagttgtattttatcattctttggagcacctggtcaatcagaactgttgttcttcggttgggtgttatttttatactcatttttcataaaataaacaaaggagtgatagaaatgaaaacaggtgcattatacgtcagagtatcaacagatgatcaggtagagtattctcct

SEQ ID NO: 19815 - DNA, 260 bp, Unknown
  Description of Unknown: LeftRegion for integrase B6816 sequence
cctcaattagcaatttttgtcaatatactaaaaaagagccagccactaatgaccagctccaaactgtgatattaaataccaccctagacaagttgtattttatcattctttggagcacctggtcaatcagaactgttgttcttcggttgggtgttatttttatactcatttttcataaaataaacaaaggagtgatagaaatgaaaacaggtgcattatacgtcagagtatcaacagatgaccaggtagagtattctcct

SEQ ID NO: 19816 - DNA, 260 bp, Unknown
  Description of Unknown: LeftRegion for integrase B6817 sequence
tcaaatcgaagtctttagtcaatatataaaaaaagagccagccacaaaggaccagctccaaactgtgatattaaataccaccctagacaagttgtattttatcattttttggagcacccggtcaatcagaactgttgttctttggttgggtgttatttttatactcatttttcataaaataaacaaaggagtgatgagatatgaagacaggagcattatacgtcagagtatcaacagatgatcaggtagagtattctcct

SEQ ID NO: 19817 - DNA, 260 bp, Unknown
  Description of Unknown: LeftRegion for integrase B6818 sequence
cacctcaattagcaatttttgtcaatatactaaaaaagagccagccactaggaccagctccaaagcgatattaaataccaccctagacaagttgtattttatcattctttggagcacccggtcaatcagaactgttgttcttaggctaggtgttatttttatacccttttttcataaaatacataaaggagtgatgaaatatgaagacaggagcattatatgtcagagtttcaacagacgaccaggtagaatattctcct

SEQ ID NO: 19818 - DNA, 260 bp, Unknown
  Description of Unknown: LeftRegion for integrase B6819 sequence
tcaaatcgaagtctttagtcaatatataaaaaaagagccagccgcaaaggaccagctccaaactgtgatattaaataccaccctagacaagttgtattttatcattctttggagcacccggtcaatcagaactgttgttcttaggctaggtgttatttttatacccttttttcataaaatacataaaggagtgatgaaatatgaagacaggagcattatatgtcagagtttcaacagacgaccaggtagaatattctcct

SEQ ID NO: 19819 - DNA, 260 bp, Unknown
  Description of Unknown: LeftRegion for integrase B6820 sequence
cacctcaattagcaatttttgtcaatatactaaaaaagagccagccgcaaaggaccagctccaaagcgatattaaataccaccctagacaagttgtattttatcattctttggagcacctggtcaatcagaactgttgttcttcggttgggtgttatttttatactcatttttcataaaataaacaaaggagtgatagaaatgaaaacaggtgcattatatgtcagagtatcaacagatgatcaggtagagtattctcct

SEQ ID NO: 19820 - DNA, 260 bp, Unknown
  Description of Unknown: LeftRegion for integrase B6821 sequence
tttgcaaaaattttatcattccttttaaagctatgataaacaaatcgccttataattaaatataaaaaagccccttacctgttggcgcaggtaaagggccagtagttaattacataccttggagggatatataatcgaaccacgcaactcgattatatcacctccagggcgtatttgtcataccccaggaggttttatttatgtgtacaaaaaatgtaggtatctatatccgtgtttctacacaagaacaagctaatgaa

SEQ ID NO: 19821 - DNA, 260 bp, Unknown
  Description of Unknown: LeftRegion for integrase B6822 sequence
tgcaccggtgcaactcccataaatagcaaaaccgcccggtgctggaacaccggacggcttcacatagactttctcttgccggatgctccgggaagatataatcagcctgaacacctgaattatatcattcctggaacatcttggcaaggggtgtattttttataccctaaatccatatggtttacaggagatgatatattatggcacaaaatttaaggatcggcgctgcctatatccgcgtcagcaccgatgatcaggca

SEQ ID NO: 19822 - DNA, 260 bp, Unknown
  Description of Unknown: LeftRegion for integrase B6823 sequence
tttaacgtctatacatgcattatatctataacctctatttaagtcaatctatataaaatcccccaccctgcgccaacaggatgagggaaagaattgaatacaatacctagagcggtaccgcatcaactcgacaaattgattatatcacggttcacactctaggtcagctttgctatacctaaaaggagtgtgatttttttatgctttccacaaatgtaggtatctatatccgtgtttcaacacaagaacaagctaatgaa

SEQ ID NO: 19823 - DNA, 260 bp, Unknown
  Description of Unknown: LeftRegion for integrase B6824 sequence
gcacctgtacagcttccataaattgcaaaaccgcccggcgctaccaacaccgaacggcttcgcatagattttctcttgccggatgcccggaaagatataaatcagacttaagacacctgaattatatcatctccagagcatctcggcaaggggtgtattttttataccctaaaaccatattgtttacaggagatgatcttatggcacaaaatttaagaattggagcggcctatatccgtgtcagcacggatgatcaggcg

SEQ ID NO: 19824 - DNA, 260 bp, Unknown; identical to SEQ ID NO: 19817
  Description of Unknown: LeftRegion for integrase B6825 sequence

SEQ ID NO: 19825 - DNA, 260 bp, Unknown
  Description of Unknown: LeftRegion for integrase B6826 sequence
caatattggatttatctcgacaatggtgatattgaaaagattgagtaatcaaaaaattttaataaaaaatcccctctcctgcgccaacaggaaagaggattcatatagcggtcatacatggtataatccgccctgaacaagctaattataccacatgaccgccttgtttgctatacccaaaacaaaggaggtctttttttatgataaatgcagtaggttacacccgtttctccaccgacagacagacggagaactccacc

SEQ ID NO: 19826 - DNA, 260 bp, Unknown
  Description of Unknown: LeftRegion for integrase B6827 sequence
acacctcaattagcaatttttgtcaatatgcaaaaaaagagccagccactaatgaccagctccaaagtgatataaataccaccctagacaagttgtattttatcattctttggagcacccggtcaatcagaactgttgttcttcggttgggtgttatttttatactcatttttcataaaataaacaaaggagtgatagaaatgaaaacaggtgcattatacgtcagagtatcaacagatgatcaggtagagtattctcct

SEQ ID NO: 19827 - DNA, 260 bp, Unknown
  Description of Unknown: LeftRegion for integrase B6828 sequence
aaataaaaaaccaaacaagcagagaaatgcatataagattgcaaatgcatttttaataaaataaaaaatcgcccgatgctgcaacaccaggcgacaaaatcgttcccttggaaacgattactaaacttgcacatttagtatatcgtatttttccaaagtccacaagggcttattttttatacccttttttagagggaattatgcaaaaagaaaaagtaataccgatagactccctcgatctggtcgatctatacatccgt

SEQ ID NO: 19828 - DNA, 260 bp, Unknown
  Description of Unknown: LeftRegion for integrase B6829 sequence
gtggaatcgttcatgcgaaaatatcagtttgcagactcttttgaagttggcaaagttttttaattgcacgattgaggaattggtgaacggtgcggctaaagaatcatatactttcgatctgaacgaatttacctttgcggaattggaattgatacgattttacgcggggtacctgaaagcaaacagagggaggacaacggatgaaatcatcaagcgtggcattatacctccgaaagagtagggaagaagagacagagacg

SEQ ID NO: 19829 - DNA, 260 bp, Unknown
  Description of Unknown: LeftRegion for integrase B6830 sequence
aggaacgaaaacgacttaaatagcaaaaccgcccggtgctggaacaccggacggcttcacatagattttctcttaccggttgctccggaaagatataaatcagacttagaacacctgaattatatcattttccagagcaccctgcaaggggtgtattttttataccctaaatccatatggtttacaggagatgatatattatggcacaaaatttgaggatcggtgccgcctatatccgcgtcagcaccgatgatcaggca

SEQ ID NO: 19830 - DNA, 260 bp, Unknown
  Description of Unknown: LeftRegion for integrase B6831 sequence
tgcaccggtgcaactcccataaatagcaaaaccgcccggtgctggaacaccggacggcttcacatagactttctcttgccggatgctccgggaagatataatcagcctgaacacctgaattatatcattcctggaacatcctggcaaggggtgtattttttataccctaaatccatatggtttacaggagatgatatattatggcacaaaatttaaggatcggcgctgcctatatccgcgtcagcaccgatgatcaggca

SEQ ID NO: 19831 - DNA, 260 bp, Unknown; identical to SEQ ID NO: 19817
  Description of Unknown: LeftRegion for integrase B6832 sequence

SEQ ID NO: 19832 - DNA, 260 bp, Unknown; identical to SEQ ID NO: 19800
  Description of Unknown: LeftRegion for integrase B6833 sequence

SEQ ID NO: 19833 - DNA, 260 bp, Unknown
  Description of Unknown: LeftRegion for integrase B6834 sequence
cctcaattagcaatttttgtcaatatactaaaaaagagccagccactaggaccagctccaaactgtgatattaaataccaccctagacaagttgtattttatcattctttggagcacccggtcaatcagaactgttgttcttaggctaggtgttatttttatacccttttttcataaaatacataaaggagtgatgaaatatgaagacaggagcattatatgtcagagtttcaacagacgaccaggtagaatattctcct

SEQ ID NO: 19834 - DNA, 260 bp, Unknown; identical to SEQ ID NO: 19775
  Description of Unknown: LeftRegion for integrase B6835 sequence

SEQ ID NO: 19835 - DNA, 260 bp, Unknown
  Description of Unknown: LeftRegion for integrase B6836 sequence
gctgcacctgtgcagcttccataaatagcaaaaccgcccggtgctaccaacaccgaacggttttacatggattttctcttgccggatgcccgggaagatataatcagcttgaacacctgaattatatcatctccagagcatctcggcaaggggtgtattttttataccctaaaaccatattgtttacaggagatgatcttatggcacaaaatttaagaattggagcggcctatatccgtgtcagcacggatgatcaggca

SEQ ID NO: 19836 - DNA, 260 bp, Unknown
  Description of Unknown: LeftRegion for integrase B6837 sequence
ttcaaacaaatttttaatatccaatctaacacctctttacattttcgatataaagaattgtatatcttatttgctattttgtcaatatgtttttatttttcctcattttttgtctagttttaataataaatctattcttaaatatattgacgtatattaacatatatgttatgttgaatttgcaaggagatgatctaataatgaataaaacattaaaatccgtctgcgcctacatccgtgtgagcaccgatgatcaggta

SEQ ID NO: 19837 - DNA, 260 bp, Unknown
  Description of Unknown: LeftRegion for integrase B6838 sequence
caacatcatccggcagtaagggttttatggctggcgatcgcatccaggcgacaatggtgtttgaatctatcgactaaaattaaaaatcccgctccggtgttagtagcaccgaaacgggacatgggctgaaaaactttgacaggttgtattcagcccttttattatatcatattttaagagtaaataaaaggagtgattttatgcgcattgacgcgatctacgctagacagtcaatcgaaaagcgagattctatttccatc

SEQ ID NO: 19838 - DNA, 260 bp, Unknown
  Description of Unknown: LeftRegion for integrase B6839 sequence
caactcatacagctccgcaaatcccaagggctaactcagaaagacctggccgctgctgccaatcttgcgcagccagccattgcacggcttgagagcaaatcagcggtacctcagcttgataccttcgtgaaggtagccggagcacttggatacacaatagagcttgtacagcaatcataattttttaggaaggtgatacaatgagccatacttttaaatccgtctgcgcctacatccgtgtgagcaccgatgatcaggta

SEQ ID NO: 19839 - DNA, 260 bp, Unknown
  Description of Unknown: LeftRegion for integrase B6840 sequence
ttctggacaaatgcaaggcagccatgaccgaagtcgccattgtggaatatcaaccggcggcataacacaaaaaaaaccgccccacggcggcaaccgtgaagcggcaagaggaaaaactattgcgataatagacttcccaaagcaaggtctattatagcatatttcctctgaaaaatcaagtcttaggaggaaatttacacatgaatgcagtgatctacgcccgttacagctgcgaccggcagaccgagcagtccattgag

SEQ ID NO: 19840 - DNA, 260 bp, Unknown
  Description of Unknown: LeftRegion for integrase B6841 sequence
tcgctgaaggaattttcataactgagtaagtgattaacacgaattaaaaaaccgcccggtgctggtaacaccgaacggtctcttgcatcccttgtggtggatgcggttgcttattaaattcgcacttataagtatatcgcatttcccataagtccacaagggcttattttttacaccctttttcaggaggaagatgcgttttgaaacaaaaaatagcagcgccgccggctgatccggtggtcgatctagtcgatctgtat

SEQ ID NO: 19841 - DNA, 260 bp, Unknown
  Description of Unknown: LeftRegion for integrase B6842 sequence
attaaaaattttaaccattatggtgacttcaccgcaatggtaaataaaaagagccagtccatacaagaccagcccaaagatgatacaatcatccaaatcgcaactagattgtaccattaaaaatagcatctggtcaagtatggctaggtgttatttttatacactaaaatacataagattttaagggagtggtacaatctatgaaaacaggagcactatatatacgagtatcaacagatgatcagacagaatactctcct

SEQ ID NO: 19842 - DNA, 260 bp, Unknown
  Description of Unknown: LeftRegion for integrase B6843 sequence
aggcggaaaaaccgcgctatttccatcctggccgtgattgtgggcttgcttctggtggtcattattgccgcgttgattggcgatttgctcaatgataaggttggcttcttctggctccggtcgcttctatcgccaagcgggcaattggagccgataaaaaatatcgcgttgaaaaaatagcaaacaaaggggaaaacagaatggaaacattatcaggatatatagacgggaaagaaacaataaacatgcgtatagaacgg

SEQ ID NO: 19843 - DNA, 260 bp, Unknown
  Description of Unknown: LeftRegion for integrase B6844 sequence
gctgcaagagagaaaaacaactacatagcaaaaaccgcccggtgctggtaacaccgaacggttttgcatagattctgtacaggcgaggcctgtgtaaaatcttccctgaacaagaagattataccacacacctcttcgctttgtacagggtgtattttttatactcttttttcatatttttaagagaggaaggtgtttttatggacgaaatgcgttatggcgcgttatatatccgtgtgagcactgacaagcaggaagag

SEQ ID NO: 19844 - DNA, 260 bp, Unknown
  Description of Unknown: LeftRegion for integrase B6845 sequence
ttatgacctgtcttttttatgccaaataaatattaatgtttatttggcatattattttataggggtgatattatgcgtgttaaaatcaaaccgccaaagagtaagcaaatatttgagtcggaattgttgaagatactttcaaggaaaccgatcaaacgcagatgatatacataatgaaagtggaagggaggtgcggtagaatgagaatggcggcatattgtcgtgtcagtacagagaaagaggaacaactatcttctctt

SEQ ID NO: 19845 - DNA, 260 bp, Unknown
  Description of Unknown: LeftRegion for integrase B6846 sequence
aaattctagcccctctccattaagattacttatttattgtataatcttaattaataataggctagtggtaaattcaggaaatacatttacataacccactttacaaatcaaatttcattcgtaattaataatattattacccttttacaattgacaaccttggtaaaaaaatgtatcgtatataaaaagggggatttaaaatgacatttggggcagcttatatacgtgtatcgacagatcaccaggatgaatatagtccg

SEQ ID NO: 19846 - DNA, 260 bp, Unknown
  Description of Unknown: LeftRegion for integrase B6847 sequence
taccatggcggggtcgccttattttttggcaggaagctctatttttacccgcttcagacggcgccggagcgggaccacaaaccagccggatgcggcgcgcataaatccgcgtaaccgctcatttatttcgaatatacgggataagtgggcggttttgtcatgcaaatttgacatttacgcccggaaagggtttgtgtgctatggaacagaagaaaatcggcgcggcgtacatccgcgtctcgaccgacgaccagctcgat

SEQ ID NO: 19847 - DNA, 260 bp, Unknown
  Description of Unknown: LeftRegion for integrase B6848 sequence
tacctaaaaagtaaaaaaccggcccctgcgccaacaggaaccggccttcacacagattatctcttaccggaaactccaggaaagatataatcagctcgaacacctgaattatatcacccctggagcaccccggtcaagagggtgtattttttatacccatttttcgtaccatataccaatacataccaggagatgataaaatgaccaacctagacatcggagccgcctacattcgcgtcagcactgatgagcagacggaa

SEQ ID NO: 19848 - DNA, 260 bp, Unknown
  Description of Unknown: LeftRegion for integrase B6849 sequence
atgacctgtcttttttatgccaaataaatattaatgtttatttggcatattattttatagggggtgatactatgcacattaaaatcagaccgccaaagagtaagcaaatacttgaatcggaattattgaagatactttcgaggaaacctattaaacgcagataattatacatataccgagtggaagggaggtgcggtagaatgagaatggcggcatattgtcgtgtcagcacagagaaagaggaacaactatcttctctt

SEQ ID NO: 19849 - DNA, 260 bp, Unknown
  Description of Unknown: LeftRegion for integrase B6850 sequence
atgacctgtcttttttatgccaaataaatattaatgtttatttggcatattattttatagggggtgatattatgcgtgttaaaataagaccaccaaagagtaagcaaatacttgagtcggaattattgaagatactttcgaggaagccaatcaaccgcagataattatacatacaccaagtggaagggaggtgcggtagaatgagaatggcggcatattgtcgtgtcagcacagagaaagaggaacaactatcttctctt

SEQ ID NO: 19850 - DNA, 260 bp, Unknown
  Description of Unknown: LeftRegion for integrase B6851 sequence
agtttcttggctcgcacggaggctctccggctcgaaaatgcaagtctacgcacgcagcgtgagcatgtgaaaaaatcattgcggatgcatcgcattacaaccttcatcttgcttggcattgtggccgtctgcgtgctggcgctgctggtggacgtcctgaaccccgccatcggctgggtgcgcgcatgatggaggctgatatgcaagcacagacacagcgcgtcgcggcggcttacatccgcgtgtcgacggacgaccag

SEQ ID NO: 19851 - DNA, 260 bp, Unknown
  Description of Unknown: LeftRegion for integrase B6852 sequence
cattattcaaatctgtaattggaaaaatatattccataaaaccaaaaactcctattacgttttatacctattatactgtcagtattacaaatctgtcaataataatattataatctttcacaattaatgatactattatctttttacaattgacaaccttggcaaaaaaatgtatcgtatataaaaagggggatttaaaaatgacatttggggcagcttatatacgtgtatcgacagatcaccaggatgaatatagtccg

SEQ ID NO: 19852 - DNA, 260 bp, Unknown
  Description of Unknown: LeftRegion for integrase B6853 sequence
tcattattcaaatcagtaattggaaaaatatattccataaaaccaaaaactcctattacattttatacctattatactgtcaatattacaaatctgtcaataataatattataatctttcacaattaatgatgctattatctttttacaattgacaaccttggtaaaaaaatgtatcgtatataaaaagggggatttaaaatgacatttggggcagcttatatacgtgtatcgacagaacaccaagacgaatacagtcca

SEQ ID NO: 19853 - DNA, 260 bp, Unknown
  Description of Unknown: LeftRegion for integrase B6854 sequence
ctgatatgcagttttaaaaatctgtcaaaaaaccgtccggtgctaccaacaccgaacggctttacatagattttctcttgccggacgaaccggaagataaatcaccttcaacaagtgaattatatcatttctggtacgtcctgacaaggggcgtattttttatacccaaaattaatacactagaccaaggagatgatatcatgaccacccaatccaccgtggaaataggtgctgcctatatccgcgtcagtacaaatgat

SEQ ID NO: 19854 - DNA, 260 bp, Unknown
  Description of Unknown: LeftRegion for integrase B6855 sequence
tgaagaggccattgctatgggttatggtccctgcggacactgtaaaccataaaaacataacaaaagaccggtctctgcgttcccttaacaaagaccggtcttttgcgtctacccaatcaaacgagtgacattaactgtgttgctattttattatacactcttttggttggatttgcaacttaaacaaaggagtggtaattatgaggatcgcggctgcttatattcgtgtatctaccgatgatcagcttgagtattccccc

SEQ ID NO: 19855 - DNA, 260 bp, Unknown
  Description of Unknown: LeftRegion for integrase B6856 sequence
tatgtattgactgtaagataaaatgtaaaaaccgcccggtgctaccaacaccgaacggctttcacatagattttctcttgccggacgcaccggaagataaatcaccttcaacaagtgaattatatcatttctggtacgtcctggcaaggggcgtattttttatacccaaaattaatacacttaaccaaggagatgatatcatgaccacccagtccaccgtggaaataggcgccgcctatatccgcgttagtacaaatgat

SEQ ID NO: 19856 - DNA, 260 bp, Unknown; identical to SEQ ID NO: 19843
  Description of Unknown: LeftRegion for integrase B6857 sequence

SEQ ID NO: 19857 - DNA, 260 bp, Unknown
  Description of Unknown: LeftRegion for integrase B6858 sequence
aaaattctagcccctctccattcagattacttatttattgtataatcttaattaataataggctagtggtaaattcaggaaatacatttacataacccactttacaaatcaaatttcattcgtaattaataatattattactcttttacattgacaaccttagtaaaaaaatgtatcgtataagaaaagggggattttaaatgatatttggggcagcttatatacgtgtatcgacagaacaccaggacgaatacagtccg

SEQ ID NO: 19858 - DNA, 260 bp, Unknown
  Description of Unknown: LeftRegion for integrase B6859 sequence
atcagttacgaagcgtccgcactgggcacaaccacaaccatccatctggaaaaacaggattaagaacccgcgaatacaataaaaaatcccgctccggtgttagtagcaccgaaacgggacatgggctgaaaaactttgacaggttgtattcagcccttttattatatcatattttaagagtaaataaaaggagtgattttatgcgcattgacgcgatctacgctagacagtcaatcgaaaagcgagattctatttccatc

SEQ ID NO: 19859 - DNA, 260 bp, Unknown
  Description of Unknown: LeftRegion for integrase B6860 sequence
gatatgcagttctaaaaaatttgtcaaaaaaccgcccggtgctaccaacaccgaacggttttcacatagattttctcttgccggacacaccggaagataaatcaccttcaacaagtgaattatatcatttctggtacgtcctggcaaggggcgtattttttatacccaaaattaatacactagaccaaggagatgatatcatgaccacccaatccaccgtggaaataggtgctgcctatatccgcgtcagtacaaatgat

SEQ ID NO: 19860 - DNA, 260 bp, Unknown
  Description of Unknown: LeftRegion for integrase B6861 sequence
ttcagatttatttgaataaatagatgaaaaaagccccaggagctaccaactcccagagcctttcacatagattctcttgccggatcattccggaaagatatatcattctcgcaaattgattatatcatttctggtacgtcctggcaaggggcgtattttttatacccaaaattaatacacttaaccaaggagatgatatcatgaccacccagtccaccgtggaaataggcgctgcctatatccgcgtcagtacaaatgat

SEQ ID NO: 19861 - DNA, 260 bp, Unknown
  Description of Unknown: LeftRegion for integrase B6862 sequence
agctccttggcgcgcacggaggctctgcggctcgaaaatgcaagcctgcgcacgcagcgtgagcagctgaaaaaatcattgaagatgcaccgcatcacaacattcatcctgcttggcattgtggccgtctgcgtgctggcgctgctggtggacattctgaaccccgccatcgactaggtgcgcgcatgatggaggctgatatgcaggcacaggcacagcgcgtcgcggcggcttacatccgcgtgtcgacggacgatcag

SEQ ID NO: 19862 - DNA, 260 bp, Unknown
  Description of Unknown: LeftRegion for integrase B6863 sequence
tataacctgtcttttttatgccaaataaatattaatgtttatttggcatattattttataggaggtgatactatgcacattaaaatcagaccaccaaagagtaagcaaatatttgagtcggaattattgaagatactttcgaggaagccgataaaacgcagataatatacataaaccaagtggaagggaggtgcggtagaatgaaaatggcggcatattgtcgtgtcagtacagagaaagaagaacaattatcttctctt

SEQ ID NO: 19863 - DNA, 260 bp, Unknown
  Description of Unknown: LeftRegion for integrase B6864 sequence
cattattcaaatctgtaattggaaaaatatattccataaaaccaaaaactcctattacgttttatacctattatactgtcagtattacaaatctgtcaataataatattataatctttcacaattaatgatactattatctttttacaattgacaaccttggtaaaaaaatgtatcgtatataaaaagggggatttaaaaatgacatttggggcagcttatatacgtgtatcgacagatcaccaggatgaatatagtccg

SEQ ID NO: 19864 - DNA, 260 bp, Unknown
  Description of Unknown: LeftRegion for integrase B6865 sequence
agttggacagtgtccccaacaaagccggatacatcaaggcattgatccgcaaggatattgaagaaaacggataaaaaaaccgccccacggcggcaaccgtgaagcggcaagaggaaaaactattgcgataatagtcccccgaacaaggtctattatagcatatttcctctgaaattgcaagtacaaggaggaaatttatcatgcaggcagcagcatatgcacgatacagcacagagcatcagaccgacagcagcattgcc

SEQ ID NO: 19865 - DNA, 260 bp, Unknown
  Description of Unknown: LeftRegion for integrase B6866 sequence
aaattctggagaagtgcaaggcagccatgaccgaagtcgccattgtggagtatcaaccggcggcatagcacaaaaaaaccgccccacggcggcaaccgtgaagcggcaagaggaaaaactattgcgataatagtcccccaaacaaggtctattatagcatatttcctctgaaattgcaagtacaaggaggaaaaaatatcatgcaggcagcagcatatgcacgatacagcacagagcatcagaccgacagcagcatcgcc

SEQ ID NO: 19866 - DNA, 260 bp, Unknown
  Description of Unknown: LeftRegion for integrase B6867 sequence
ttcgcttggatttggacaaacttcgcgagatagcgttgtaggatttaagacatctaattttaccccttccccggtcggcgccggagcgggaccacaaaccagccggatgcggcgcgcataaatccgcgtaaccgctcatttatttcgaacatacgggataggtgggcggttttgtactgcccggaaagggtttgtgtgctatggaacagaagaaaatcggcgcggcgtacatccgcgtctcgacggacgatcagctcgat

SEQ ID NO: 19867 - DNA, 260 bp, Unknown; identical to SEQ ID NO: 19863
  Description of Unknown: LeftRegion for integrase B6868 sequence

SEQ ID NO: 19868 - DNA, 260 bp, Unknown
  Description of Unknown: LeftRegion for integrase B6869 sequence
tcgctgaaggaattttcataactgagtaagtgattaacacgaattaaaaaaccgcccggtgctggtaacaccgaacggtctcttgcatcccttgtggtggatgcgattgcttattaaattcgcacttataagtatatcgcattttccataagtccacaagggcttattttttacaccctttttcaggaggaagatgcgttttgaaacaaaaaatagcagcgccgccggctgatccggtggccgatctggtcgatctgtac

SEQ ID NO: 19869 - DNA, 260 bp, Unknown
  Description of Unknown: LeftRegion for integrase B6870 sequence
aataatttacttgttacatcgcaagaataaaaataatgtaaattaaaaaagagccagcccatacaagaccagcccaaagatgatacaatcatccaaatcgcaactagattgtaccattaaaaatagcatctggtcaagtatggctaggtgttatttttatacactaaaatacataagattttaagggagtggtacaatctatgaaaacaggagcactatatatacgagtatccacagatgatcagacagaatactctcct

SEQ ID NO: 19870 - DNA, 260 bp, Unknown; identical to SEQ ID NO: 19853
  Description of Unknown: LeftRegion for integrase B6871 sequence

SEQ ID NO: 19871 - DNA, 260 bp, Unknown
  Description of Unknown: LeftRegion for integrase B6872 sequence
gaacggttctctatcagacgataaacaattatttaaaataccaataaaaaaccgcccggtgctagtaacaccgaacggtctcttgcatcccttgtggtggatgcgattgcttattaaattcgcacttataagtatatcgcattttccataagtccacaagggcttattttttacaccctttttcaggaggaagatgtgttttgaaacaaaaaataacagcgccgccggctgatccggtggtcgatctggtcgatttgtat

SEQ ID NO: 19872 - DNA, 260 bp, Unknown; identical to SEQ ID NO: 19852
  Description of Unknown: LeftRegion for integrase B6873 sequence

SEQ ID NO: 19873 - DNA, 260 bp, Unknown
  Description of Unknown: LeftRegion for integrase B6874 sequence
aaaagaggatgcgaaacgtagttaaaatataaaagtttaattcagcataccattttatagggggtgatactatgcacattaaaatcagaccaccaaagagtaagcaaatacttgagtctgaattattgaagatactttcgaggaaaccaattaagcgcagataattatacataaaccaagtggaaaggaggtgcggtataatgagaatggcggcatattgtcgtgtcagcacagagaaagaggaacagctatcttctctt

SEQ ID NO: 19874 - DNA, 260 bp, Unknown
  Description of Unknown: LeftRegion for integrase B6875 sequence
tcattattcaaatctgtaattggaaaaatatattccataaaaccaaaaactcctattacgttttatacctattatactgtcagtattacaaatctgtcaataataatattataatctttcacaattaatgatactattatctttttacaattgacaaccttggtaaaaaaatgtatcgtatataaaaagggggatttaaaatgacatttggggcagcttatatacgtgtatcgacagatcaccaggatgaatatagtccg

SEQ ID NO: 19875 - DNA, 260 bp, Unknown
  Description of Unknown: LeftRegion for integrase B6876 sequence
atttgctcttgctttttcatccattgaaatcataaaactaataatcaagtaaaaaagagcccagccactaacgaccagcctccaagtgaatataatcactccttgaacaagatgattatatcattcttgaagcactcggtcaaatgctgggtgttatttttatacctaaaaacataaattttacaaaggagtgattcaatatgaagaccggagccttgtatgtgcgtgtctcaacagatgatcaggtagagtattctcct

SEQ ID NO: 19876 - DNA, 260 bp, Unknown; identical to SEQ ID NO: 19874
  Description of Unknown: LeftRegion for integrase B6877 sequence

SEQ ID NO: 19877 - DNA, 260 bp, Unknown
  Description of Unknown: LeftRegion for integrase B6878 sequence
cagattctggagaagtgcaaggcagccatgaccgaagtcgccattgtggaataccaaccggcggcataacacaaaaaaaccgccccacggcggcaaccgtgagacggcaagaggaaaaactattgcgataatagccctccagacaaggtctattatagcatatttcctctgaaattgcaagtacaaggaggaaatttatcatgcaggcagcagcatatgcacgatacagcacagagcatcaaaccgacagcagcatcgcc

SEQ ID NO: 19878 - DNA, 260 bp, Unknown
  Description of Unknown: LeftRegion for integrase B6879 sequence
tctccgttttgctgaaactcaaagaatactatgaaaactaaaatataaaaaaagaaccgccctctgtgctaccaacacagaaagcggctcggttgccccgtaaaggagcgcgcatgataataaatcgcactgttattatagcacttcttttgcgggttggcaactgcatacgctattttaagcaaaaggagtgttgtatgatgaaggttgctgccgcttacatccgcgtttcgaccgacgaccagctggaatattccccc

SEQ ID NO: 19879 - DNA, 260 bp, Unknown
  Description of Unknown: LeftRegion for integrase B6880 sequence
gatcccacagctgaatttaacaaaacaatgcttgcggaagatttccggcaatctctttcgagcgatgaaaactacacaacagatattgaatttgattcggatgatgaagaggaagatgtttcttccgatgaataatcagctcataaatattgatgcggcggtcgtttggctgccgcctgtattttttaaggaggaatattatgcccggaacaaacagcataccgggaacagctgcggcatacattcgagtttcggatgac

SEQ ID NO: 19880 - DNA, 260 bp, Unknown
  Description of Unknown: LeftRegion for integrase B6881 sequence
atccgctggaacgacaggtatttgaacagtttcaacagtttatcaacaagcaatcattctcgtgaggtcacgaaaatgaaaaaagccgccccacggcggcaaccgtgaagcggcaagagggaactattgctataatagtccaaaccagaacggtactattatagcacattctctcaaaaaatgcaaggaggaagtgcaaaatgcaagcagcagcatatgcaagatacagcacagagcatcagacagagagcagtattgct

SEQ ID NO: 19881 - DNA, 260 bp, Unknown
  Description of Unknown: LeftRegion for integrase B6882 sequence
tatgtcaaaccaacaaatttgtcaaatcgcaaaaaccgcccctgctaccaacaggaacggctttcacatagatttctcttgccggataaccggaaagatatatcagcttgaacacctgaattatatcatttctggaacgtcctggcaaggggcgtattttttatacccaaaaaacgtataaatacacaggagatgattgaatgaatgaaaaaaatcttgagattggggctgcttatatccgcgtcagcaccgatgatcag

SEQ ID NO: 19882 - DNA, 260 bp, Unknown
  Description of Unknown: LeftRegion for integrase B6883 sequence
aaagctcctgccggctccttcgccacactggttgatattgatgtggaagcatacaaaaggcgacttgacagccgggcggttcggaagaactgcactattcccagttggttaaattctaaggcggaagctgccgggattaatttttcagaggttttacgagaagcattggagaatcggctgaacgtgtgataggaggtcatatgcaaactgctgcggcgtatataagagtttcgacagatgatcaggttgaattttcaccg

SEQ ID NO: 19883 - DNA, 260 bp, Unknown
  Description of Unknown: LeftRegion for integrase B6884 sequence
tcaaaatatgcgccaattattattacacctgaaacacccgcaaaaatattaggcaaagccgttaaagtaagctttgatctttaaaaaaatacagatactctccccgaccaaagtttgagtatctgcattggattatgtgaaacctagggtgcaggtttctataatgtaccctattttatcaaaaaataggaggaattactatgaaagcagcaatttatgtaagagtatcaaccatggaacaagccgaggagggatattca

SEQ ID NO: 19884 - DNA, 260 bp, Unknown; identical to SEQ ID NO: 18929
  Description of Unknown: LeftRegion for integrase B6885 sequence

SEQ ID NO: 19885 - DNA, 260 bp, Unknown
  Description of Unknown: LeftRegion for integrase B6886 sequence
gtatcggtgcgcttatttcatttataatgtttttaattctttaaacagtaaaatcaatatttaaaacacaaaaaaagcccacgctctctaagtttggcgactcagagcgtgagcgatactgtataagaaaataggcattaaaaagccctttttcttgtactcattttaacattttttaataaattttgaaagagggtacaatgatgaacacaatcaacaaagttgctatttacgtacgtgtatcaacaaacatgcaggca

SEQ ID NO: 19886 - DNA, 260 bp, Unknown
  Description of Unknown: LeftRegion for integrase B6887 sequence
tttacacagccttcaacagggtggcaaagccgtccggaataacttccggtcctggctcatacattctcgaaggaggaaacccttatgattatcaaaaacacttattcaaccgttgaccctatagagcgctctgcgcgtcaggcggcgatctgccgccgctgccttctgctgctggctgcccgcgcgcagaggtgaggccgatggatgccatttatgcgcgtcagtccatcgataaaaagggcagcctttcgattgaggga

SEQ ID NO: 19887 - DNA, 260 bp, Unknown
  Description of Unknown: LeftRegion for integrase B6888 sequence
tttacacagccttcaacagggtggtaaagccgtccggaataacttccggttctggctcatacattctcgaaggaggaaacccttatgattatcaaaaacacttattcaaccgttgaccctatagagcgctctgcgcgtcaggcggcgatctgccgccgctgccttctgctgctggctgcccgcgcacagaggtgaggccgatggatgccatttatgcgcgtcagtccatcgataaaaagggcagcctttcgatcgaggga

SEQ ID NO: 19888 - DNA, 260 bp, Unknown
  Description of Unknown: LeftRegion for integrase B6889 sequence
atttcaagatttattgaatgttttatagttgtaatatggactcatagacacaaagaaagaaataaatttatcgtaggagcatatcgtaattttaaaattgaaaaaaatcttacaaaacatattatattaaggggaactcctcttttaatgaatataagtctatattagaaccattataattaaaaaaggaggaaaacaaattggatattgcagtatatacaagagtttctacagaaaaagaaagtcaagttagtagttat

SEQ ID NO: 19889 - DNA, 260 bp, Unknown
  Description of Unknown: LeftRegion for integrase B6890 sequence
tttacacagccttcaacagggtggtaaagccgtccggaataacttccggtcctggctcatacattctcgaaggaggaaacccttatgattatcaaaaacacttattcaaccgttgaccctatagagcgctctgcgcgtcaggcggcgatctgccgccgctgccttctgctgctggctgcccgcgcgcagaggtgaggccgatggatgccatttatgcgcgtcagtccatcgataaaaagggcagtctttcgattgaaggg

SEQ ID NO: 19890 - DNA, 260 bp, Unknown
  Description of Unknown: LeftRegion for integrase B6891 sequence
gccactcgtgccttcatcctccggagttttcaaaaagctcagctgggcgcagataaggcgaaaacggtgaagggaaaacagagccagtttgatcaccttttggataaaatggcaccatattatgatcggatgactctcgcaaatgttgaactggtgaagcagctccacgccagtgcagttctcgagattggagggcaatcatgagtaaaatgaagggcgttatttatgccagatattcaccaggaccagatcagacggag

SEQ ID NO: 19891 - DNA, 260 bp, Unknown
  Description of Unknown: LeftRegion for integrase B6892 sequence
aaagctcccgccggctccttcgccacactggttgatatcgatgtggaagcatacaaaaggcggcttgacagccgggcggttcggaagaactgtaccattccaagctggctgaattccaaggcagaagccgccgggatcaatttttcagaggttttacgtgaagctttggaaaatcggctgaacgtgtgataggaggcaatatgcaaactgctgcggcgtatataagagtttcgacagatgatcaggttgaattttcaccg

SEQ ID NO: 19892 - DNA, 260 bp, Unknown
  Description of Unknown: LeftRegion for integrase B6893 sequence
tgatttaaaatgagataatttgattacaaattgtagtcaattcaaaatgaaaacagcacctactgcaataggtactgaaaattagaaaaacaactaagtcccagcaagaactttaaggagtttttctatacttaattataacaaataatgtgcaaaagcacaataaaaacataaaatatttaagaaaggaacaatttaaaatgagacaaggagcagtttatataagagtttcaactgatgaccaaacagaatatagtcca

SEQ ID NO: 19893 - DNA, 260 bp, Unknown
  Description of Unknown: LeftRegion for integrase B6894 sequence
gcttgacagcgtacccaacaaagccggatacatcaaatcactgatacgaaaagacattgaagagaatggagtataaaaaaaccgccccacggcagcaaccatggagcggtaaaaggagaactattgcaataatagcccctaagacaggtatattatagcacagtcctccgaaaattgcaagtactaggaggaatttttttatgcaggcagcagcttatgcacgatacagcacagaacaccagaccagcagcagcatcgcc

SEQ ID NO: 19894 - DNA, 260 bp, Unknown
  Description of Unknown: LeftRegion for integrase B6895 sequence
attctccatgtaataaatgcctcaaatagcaaaaaccgcccctgcgccaacaggaacggttttcacatagatttctcttgccggatgcaatccgaaaagatatactctatcccaaacaaagtatatcatttctggaacgtcctggcaaggggcgtattttttatacccaaaaaacgtataaatacacaggagatgattgaatgaatgaaaaaaatcttgagattggggctgcttatatccgcgtcagcaccgatgatcag

SEQ ID NO: 19895 - DNA, 260 bp, Unknown
  Description of Unknown: LeftRegion for integrase B6896 sequence
tttacacagccttcaacagggtggcaaagccgtccggaataacttccggccctggctcatacattctcgaaggaggaaacccttatgattatcaaaaacacttattcaaccgttgaccctatagagcgctctgcgcgtcaggcggcgatctgccgccgctgccttctgctgctggctgcccgcgcgcagaggtgaggccgatggatgccatttatgcgcgtcagtccatcgataaaaagggcagcctttcgatcgaggga

SEQ ID NO: 19896 - DNA, 260 bp, Unknown
  Description of Unknown: LeftRegion for integrase B6897 sequence
tttacacagccttcaacagggtggtaaagccgtccggaataacttccggtcctggctcatacattctcgaaggaggaaacccttatgattatcaaaaacacttattcaaccgttgaccctatagagcgctctgcgcgtcaggcggcgatctgccgccgctgccttctgctgctggctgcccgcgcgcagaggtgaggccgatggatgccatttatgcgcgtcagtccatcgataaaaagggcagcctttcgatcgaggga

SEQ ID NO: 19897 - DNA, 260 bp, Unknown
  Description of Unknown: LeftRegion for integrase B6898 sequence
cctgacgaaaggagctgtcaaagctgaatatcaagatcgattataacggcattgacaagtccggaaaaatcgccgttgtctatgccagatattcttcccacagccaaggcgaacagtccatcgaaggacagcttgccgctgcgaaagcatatgccgatgcacggggatatacaatcgttcatgagtatatcgaccgcgctatgaccggcaggaacgacaaccgcgatgaatttcagcaaatgctttctgactgtgcaaag

SEQ ID NO: 19898 - DNA, 260 bp, Unknown
  Description of Unknown: LeftRegion for integrase B6899 sequence
ctgaccgtgctggcgcagctggcgctcatgtcgctcggcgtggactacagtgccaccgatgggctaagctccaaactcatcagcgccgccagcgcttccgccgacggcgacaaggccaattccgccgtcgacgtaggcgcgtggcgcatgctggcggacgtatcggacaaggccaacacgtacctaatctacgccaagtcatgaaaattgctgcagcctatatccgcgtatccacagatgatcaggaggagtactcccct

SEQ ID NO: 19899 - DNA, 107 bp, Unknown
  Description of Unknown: LeftRegion for integrase B6900 sequence
catgcctcgcaaacccgcataaatactgaatgtgtggagttttgctcatggctatattttataaaaccgaggtgatatttatgagcagtaaagtggcatgtctttac

SEQ ID NO: 19900 - DNA, 260 bp, Unknown
  Description of Unknown: LeftRegion for integrase B6901 sequence
tatgtcaaaccaacaaatttgtcaaatcgcaaaaaccgcccctgctaccaacaggaacggttttcacatagatttctcttgcctgattgctccaggaagatatactctatcccaaacaaagtatatcatttctggaacgtcctggcaaggggcgtattttttatacccaaaaaacgtataaatacacaggagatgattgaatgaatgaaaaaaatcttgagattggggctgcttatatccgcgtcagcaccgatgatcag

SEQ ID NO: 19901 - DNA, 260 bp, Unknown
  Description of Unknown: LeftRegion for integrase B6902 sequence
tgcaactggttgtgaagtgaaaagacgaatgtctttcaaaatttcttgacgatagataacaatcagctcctttcggtgaattgattttgacaacttaattatatcatttggagctgattgttactataaatttgaagtgattaatgaagttgccatgcctcgcaaacccgcataaatactgaatgtgtggagttttgctcatggctatattttataaaaccgaggtgatatttatgagcagtaaagtggcatgtctttac

SEQ ID NO: 19902 - DNA, 260 bp, Unknown
  Description of Unknown: LeftRegion for integrase B6903 sequence
tgcaatcgtttccacgatggtctgtcggatgtattcgatgtactcaagttccatggtccgcacctccgtgtattatgtatatatgcgagtaacagcaaggatagaatgcttgttattcctttgcgacgaaaattattgtaatattataaaccgccaaaatcaaatgaaataggtggaagatttggaaggatgggagaagcatgacgaatcaaacaggaactgggcaatacgtcgggggaacaaactacatcgaggaagtg

SEQ ID NO: 19903 - DNA, 260 bp, Unknown; identical to SEQ ID NO: 19896
  Description of Unknown: LeftRegion for integrase B6904 sequence

SEQ ID NO: 19904 - DNA, 260 bp, Unknown; identical to SEQ ID NO: 19896
  Description of Unknown: LeftRegion for integrase B6905 sequence

SEQ ID NO: 19905 - DNA, 260 bp, Unknown
  Description of Unknown: LeftRegion for integrase B6906 sequence
acggcgtgaacttttctcagaccttgcaggacgcattgagagaacagctgcacgtgaattcataacaacataaaaaaaccgccccacggcggcaaccgtgaagcggcaagaggaaaaactattgcgataatagacttcccaaacaaggtctattgtagcatatttcctctgaaattgcaagtactaggaggaatttttttatgcaggcagcagcttatgcacgatacagcacagagcaccagaccagcagcagcatcgcc

SEQ ID NO: 19906 - DNA, 260 bp, Unknown
  Description of Unknown: LeftRegion for integrase B6907 sequence
gacaggtgtttgaacagtttcaacagtttatcaacaatcagtgaaaaagcaatcattctcgtgaggtcacgaaaatgaaaaaaagccgccccacggcggcaaccgtgaagcggcaagagggaactattgctataatagtccaaaccagaacggtactattatagcacattctctcaaaaaatgcaaggaggaagtgcaaaatgcaagcagcagcatatgcaagatacagcacagagcatcagacagagagcagtattgct

SEQ ID NO: 19907 - DNA, 260 bp, Unknown
  Description of Unknown: LeftRegion for integrase B6908 sequence
ttaaatcttatacagcattaattgcagaatgaaaaaccgcccctgcgccaacaggaacggttttcacatagattctcttgccggatgtaatccgaaaagatatactctactacaaacaaagtatatcatttctggaacgtcctggcaaggggcgtattttttatacccaaaaaacgtataaatacacaggagatgattaaatggatgaaaagaaaattgaaatcggcgctgcctatatccgtgtcagcactgatgatcag

SEQ ID NO: 19908 - DNA, 260 bp, Unknown
  Description of Unknown: LeftRegion for integrase B6909 sequence
ttgcagcgatttccctccccgtggattttctatctattgacattatagaacgtatgttcgtattttgcaatacctttctcctttctctgaaaaaaaatccctccctgataaatcaggaagggatagcaaatacatattctttaccgatagaaccatcatatcatattttgtaaacaataacaactataaaggtgattattatgaaaatagcagcagcatatatccgtgtatctacggatgatcagacagaatactctccc

SEQ ID NO: 19909 - DNA, 260 bp, Unknown
  Description of Unknown: LeftRegion for integrase B6910 sequence
tttacacagccttcaacagggtggtaaagccgtccggaataacttccggccctggctcatacattctcgaaggaggaaacccttatgattatcaaaaacacttattcaaccgttgaccctatagagcgctctgcgcgtcaggcggcgatctgccgtcgctgccttctgctgctggctgcccgcgcgcagaggtgaggccgatggatgccatttatgcgcgtcagtccatcgataaaaagggcagcctttcgatcgaggga

SEQ ID NO: 19910 - DNA, 260 bp, Unknown
  Description of Unknown: LeftRegion for integrase B6911 sequence
cggcgtgaacttttctcagaccttgcaggacgcattgagagaacagctgcacgtgaattcataacaacataaaaaaaaccgccccacggcggcaaccgtgaagcggcaagaggaaaaactattgcgataatagacttcccaaacaaggtctattgtagcatatttcctctgaaattgcaagtactaggaggaatttttttatgcaggcagcagcttatgcacgatacagcacagaacaccagaccagcagcagcatcgcc

SEQ ID NO: 19911 - DNA, 260 bp, Unknown; identical to SEQ ID NO: 19877
  Description of Unknown: LeftRegion for integrase B6912 sequence

SEQ ID NO: 19912 - DNA, 260 bp, Unknown; identical to SEQ ID NO: 19883
  Description of Unknown: LeftRegion for integrase B6913 sequence

SEQ ID NO: 19913 - DNA, 260 bp, Unknown
  Description of Unknown: LeftRegion for integrase B6914 sequence
ataaaagaaattgaaatggaagaattgaaaaaaattgaaataaaataaaaaaacagcacctactgcaataggtactgaaaattagaaaaacaactaagtcccagcaagaactttaaggagtttttctatactcaattataacaaataatgtgcaaaagcacaataaaaacataaaatatttaagaaaggaacaatttaaaatgagacaaggagcagtttatataagagtttcaactgacgaccaaacagaatatagtcca

SEQ ID NO: 19914 - DNA, 260 bp, Unknown
  Description of Unknown: LeftRegion for integrase B6915 sequence
gcgccgcctgaactatatcttaggcatcgtgctgttttgcgtgttggtcggcgtcatcgggctgctgtattatgatctaagcaacggcgccgtcgggtttttccggcactaattatgttaatcacgccccgggcaatgggcccccgcaccatccgcggatgcgccccgcccggggcgatagaccatatggaggtaaccccatggcacagctcgccgcggcctatatccgcgtatctacagaggatcagaccgagtattcc

SEQ ID NO: 19915 - DNA, 260 bp, Unknown
  Description of Unknown: LeftRegion for integrase B6916 sequence
tgcaatcgtttccacgatggtctgtcggatgtattcgatgtactcaagttccatggtccgcacctccgtgtattatgtatatatgcgagtaacagcaaggatagaatgcttgttctttctttgcgacgaaaattattgtaatattataaaccgccaaaatcaaatgaaataggtggaagatttggaaggatgggagaagcatgacgaatcaaacagaaactgggcaatacgtcgggggaacaaactacatcgaggaagtg

SEQ ID NO: 19916 - DNA, 260 bp, Unknown
  Description of Unknown: LeftRegion for integrase B6917 sequence
gaattcacatccaaagcagaagtaaatggagattttgtgctgttgtatgatgtgaaatcagacaaagtatcggctgcatttgctactgtagacgtagaataaacaaaaccgcccaccctttttacggggtgggcgtaaatttgcactaattgtcacgccctacacgggcgtgtgagttgaaataataaggaggaggtcatatgcaaactgctgcggcgtatataagagtttcgacagatgatcaggttgaattttcaccg

SEQ ID NO: 19917 - DNA, 260 bp, Unknown
  Description of Unknown: LeftRegion for integrase B6918 sequence
tttacacagccttcaacagggtggcaaagccgtccggaataacttccggccctggctcatacattctcgaaggaggaaacccttatgattatcaaaaacacttattcaaccgttgaccctatagagcgctctgcgcgtcaggcggcgatctgccgccgctgccttctgctgctggctgcccgcgcgcagaggtgaggccgatggatgccatttatgcgcgtcagtccatcgataaaaagggcagcctttcgattgaggga

SEQ ID NO: 19918 - DNA, 260 bp, Unknown; identical to SEQ ID NO: 19913
  Description of Unknown: LeftRegion for integrase B6919 sequence

SEQ ID NO: 19919 - DNA, 260 bp, Unknown
  Description of Unknown: LeftRegion for integrase B6920 sequence
ctgcaatcgtttccacgatggtctgtcggatgtattcgatgtactcaagttccatggtacgcacctccgtgtattatgtataaatgcgagtaacagcaaggatagaatgcttgttcttcctttgcgacgaaagttattgtaatatataaaccgccaaaatcaaatgaaataggtggaagatttggaaggatgggagaagcatgacgaatcaaacaggaacttggcaatacgtcgggggaacaaactacatcgaggaagtg

SEQ ID NO: 19920 - DNA, 260 bp, Unknown; identical to SEQ ID NO: 19905
  Description of Unknown: LeftRegion for integrase B6921 sequence

SEQ ID NO: 19921 - DNA, 260 bp, Unknown; identical to SEQ ID NO: 19910
  Description of Unknown: LeftRegion for integrase B6922 sequence

SEQ ID NO: 19922 - DNA, 260 bp, Unknown
  Description of Unknown: LeftRegion for integrase B6923 sequence
ggtggaggatttacaaaatcagaagttaagtatgctatgaaacatttagaggacgaagattaaaataaaaaagctcacgctctcaaagtttggcgactcagagcatgagcaaggaagtatacaagaaaaagcaggcattaaaaagccctttttcttgtacctattttatcattttttaataaattttgaaagagggtacaatgatgaatacaatcaacaaagttgctatttatgttcgtgtatcaacgaacgtgcaagcg

SEQ ID NO: 19923 - DNA, 260 bp, Unknown
  Description of Unknown: LeftRegion for integrase B6924 sequence
gaaagcattgcctacatgaagaaaaaagaaaaaagctatctgcggttgatctgcaccttgtccattgcgctgtcggttacgcttgtcgttatcattgcggcgctggtgatggatatgatgaacccggataaaggctttttctggctacggagtatgctatagcaacacgaaaaacggaggaacaaagggagagaaaacacatggaaacagggaaatttattggcggagaaaactatatagaagaggtggcggcctatatc

SEQ ID NO: 19924 - DNA, 260 bp, Unknown
  Description of Unknown: LeftRegion for integrase B6925 sequence
accgagaagaattagagggggataaagaatcttctgcgcacagcgaagataatccccatagaattgctcaggcgtaagaagtacttggaggtgatactacgaaagcggtaatctatgccagatattcgagccataaccagagagaggaatccatagaaggacagcttcgtgagtgtcacgactttgcactgaaaaatggaatgacgatcatcggtgaatattgcgacagagcaatctcaggtaaaaccgataatcgtcca

SEQ ID NO: 19925 - DNA, 260 bp, Unknown; identical to SEQ ID NO: 19924
  Description of Unknown: LeftRegion for integrase B6926 sequence

SEQ ID NO: 19926 - DNA, 260 bp, Unknown; identical to SEQ ID NO: 16256
  Description of Unknown: LeftRegion for integrase B6927 sequence

SEQ ID NO: 19927 - DNA, 260 bp, Unknown
  Description of Unknown: LeftRegion for integrase B6928 sequence
aatctctgcgtatgcaccggcttgtgacgctcatcctcttgggtattcttctgctgtgtgcccttgcgcttttggtcgacatactcagtccctcgatcggctggctgcgcgccgccctgcatgtgcagatcctgcacttgtaatcccgaaccgtcccagccttcgctggggcggtattataaattttttggaggtatcctatgtctgagctacgcactgccgccgcatacattcgcgtttccacggatgaccaggtggag

SEQ ID NO: 19928 - DNA, 260 bp, Unknown
  Description of Unknown: LeftRegion for integrase B6929 sequence
gaaagcattgcctacatgaagaaaaaagaaaaaagctatctgcggttgatctgcaccttgtccattgcgctgtcggttacgcttgtcgttatcattgcggcgctggtgatggatatgatgaacccggataaaggctttttctggctacggagtatgctatagcaacacgaaaaacggaggaacaaagggagagaaaacacatggaaacagggaaatttattggcggagaaaactatatcgaagaggtggcggcctatatc

SEQ ID NO: 19929 - DNA, 260 bp, Unknown
  Description of Unknown: LeftRegion for integrase B6930 sequence
gcaggccgtccgcttggagtgcgaccactacaagcgtgagatcgagctgtataaacgctccattcgcacgcaccgcatcgtcactctcatcctcgttcccatcctcgcccttgtcgtgatctcgttggtcatcgatctcctcaacccctatgtcggctggattcgcgataccatgtccattttacgggaggtttccgtctatgcctgaaccacgcattgcagccgcctatatccgcgtctcaaccgatgaccagatggag

SEQ ID NO: 19930 - DNA, 260 bp, Unknown
  Description of Unknown: LeftRegion for integrase B6931 sequence
gcaggccgtccgcttggagcgcgaccactacaagcgtgagatcgagctgtataaacgccccattcgcacgcaccgcatcgtcactctcatcctcgttcccatcctcgcccttgtcgtgatctcgttggtcatcgatctcctcaacccctatgtcggctggattcgcgataccatgtccattttacgggaggtctccgcctatgcctgaaccacgcattgcagccgcctatatccgcgtctcaaccgatgaccagatggag

SEQ ID NO: 19931 - DNA, 260 bp, Unknown
  Description of Unknown: LeftRegion for integrase B6932 sequence
gatcccacagctgaatttaacaaaacaatgcttgcggaagatttccggcaatctctttcgagcgatgaaaactacacaacagatattgaatttgattcggatgatgaagaggaagatgtttcttccgatgaataatcggttcatgaacattaaggcggcggtcgtttggctgccgcctgtattttttaaggaggaatattatgcccggaacaaacagcataccgggaacagctgcggcatacattcgagtttcggatgac

SEQ ID NO: 19932 - DNA, 260 bp, Unknown
  Description of Unknown: LeftRegion for integrase B6933 sequence
ggtaaaaaaggaaaacacaactggcactgtcgaaactgtggctgtgtctttaagtccaagaaataaaaaaagccccacgctctcaaactttggcgagtctgagcgtgaggctggtaactacaagaaaggattttcatggagataacctcgcatgatgtcttttcttgtacctattttatcaaaaaagaggtacaaattcaatgaaaacaacaaataaagtagctatatacgtcagggtgtctactacctcacaagttgag

SEQ ID NO: 19933 - DNA, 260 bp, Unknown
  Description of Unknown: LeftRegion for integrase B6934 sequence
gcaggccgtccgcttggagcgcgaccacttcaagcgtgagattgagatttataagcgctcccttcgcacgcaccgcatcgtcactctcatcctcgttcccatcctcgcccttgtcgtgatctcgctggtcatcgatcttctcgacccctatgtcggctggattcgcgataccatgtccattttacgggaggtttccgtctatgcctgaaccacgcattgcagctgcctatgtccgcgtctcaaccgatgaccagatggag

SEQ ID NO: 19934 - DNA, 260 bp, Unknown; identical to SEQ ID NO: 19462
  Description of Unknown: LeftRegion for integrase B6935 sequence

SEQ ID NO: 19935 - DNA, 260 bp, Unknown
  Description of Unknown: LeftRegion for integrase B6936 sequence
gcaggccgttcgcttggagcgcgaccactacaagcgtgagatcgagctgtataaacgctcccttcgcacgcaccgcatcgtcaccctcatcctcgttcccatcctcgcccttgtcgtgatctcgttggtcgtcgatcttctcgacccctatgtcggctggattcgcgataccatgtccactttacgggaggtttccgtctatgcctgaaccacgcattgcagctgcctatatccgcgtctcaaccgatgaccaaatggag

SEQ ID NO: 19936 - DNA, 260 bp, Unknown
  Description of Unknown: LeftRegion for integrase B6937 sequence
tatgtgcatgacaaggacgaagtccagcttgcgcacgaagaaaacggcgcgatggtctacgataaataaaaaaagccccacgctctcaaactttggcgagtctgagcgtggagcagtcaagataaagaaaggtttcaaaatgaatattttgaaaggtgtctttctatactctattttagcagaaaaggagtatagaaacaatggataagatcaataaagtcgctctatatgtgcgcgtgtctaccacttctcagatggaa

SEQ ID NO: 19937 - DNA, 260 bp, Unknown
  Description of Unknown: LeftRegion for integrase B6938 sequence
gagatcaattacatatatctcatatttcaacagatgaaaacaaataaaaaatccctcaacctcgccaaaggttaagggaaaagcagagtgtaaaaagatacacatctacctcgcaaactgattgtatcacactctgcttgaaattgcaagcagggtatttttatgcccttttttaagtaaaaattaaagggagtggtactatgggtctgaagatcggcgctgcctacattagggtatctgatgagcggcaggacgaatat

SEQ ID NO: 19938 - DNA, 260 bp, Unknown
  Description of Unknown: LeftRegion for integrase B6939 sequence
tattctttaatgttatctaatctatcaagcaaaaatgcaattcaattggtaaagtctttagaacaattaaatgataaacaagctgaacaagttatcagctatatatcttttctacaatttcaagagttgaataaaagccaagaataaacaatgaggcggcagtcatttggctgccgcctgtatttttaaggaggaatattatgcccggaacaaacagcataccgggaacagctgcggcatacattcgagtttcggatgac

SEQ ID NO: 19939 - DNA, 260 bp, Unknown
  Description of Unknown: LeftRegion for integrase B6940 sequence
acagggaagaattagagggggataaagaatcttctacacacagcgaaggtaatccccatagaactgctcaggcgtaaaaagcgattggaggtgatactacgaaagcggtaatatatgctcgatactcaagccacaatcaaagagaggaatctatcgagggacaacttcgtgagtgtcacgacttcgccttaaaaaatggaatgacgattatcggcgagtattgcgacagagcaatctctggaaaaaccgataaccgtccg

SEQ ID NO: 19940 - DNA, 260 bp, Unknown
  Description of Unknown: LeftRegion for integrase B6941 sequence
aacgatttaaaaaattaaaaaaagactagaactgctggaacagtctagtcaaaaatgaaaaactttagtctagcaaactaacaatataatataattatataggtacaatataacatcgtttataagcgtgtttatgtacaagtttttctatataattatatcaaaaattaataataaaaacaataggaagtgatatatttatgaaaaaaggtgctatatatgtaagagtaagttcagaagagcaagcaagagatggttac

SEQ ID NO: 19941 - DNA, 260 bp, Unknown
  Description of Unknown: LeftRegion for integrase B6942 sequence
gcaggccgtccgcttggagcgcgaccactacaagcgtgagatcgagctttataaacgctcccttcgcacgcaccgcatcgtcactctcatcctcgttcccatcctcgcccttgtcgtgatctcgttggtcatcgatctcctcaacccctatgtcggctggattcgcgataccatgtccattttacgggaggtctccgtctatgcctgaaccacatatcgcagccgcctatatccgcgtctcaaccgatgaccagatggag

SEQ ID NO: 19942 - DNA, 260 bp, Unknown
  Description of Unknown: LeftRegion for integrase B6943 sequence
gcaggccgtccgcttagagcgcgaccactacaagcgtgagatcgagctgtataaacgctcccttcgcacgcaccgcatcgtcactctcatcctcgttcccatcctcgcccttgtcgtgatctcgttggtcatcgatctcctcaacccctatgtcggctggattcgcgataccatgtccattttacgggaggtctccgcctatgcctgaaccacgcattgcagctgcctatgtccgcgtctcaaccgatgaccaaatggag

SEQ ID NO: 19943 - DNA, 260 bp, Unknown
  Description of Unknown: LeftRegion for integrase B6944 sequence
gatcccacagctgaatttaacaaaacaatgcttgcggaagatttccggcaatctctttcgagcgacgaaaactacacaacagatattgaatttgattcggatgatgaagaggaagatgtttcttccgacgaataatcggttcatgaacattaaggcggcggtcgtttggctgccgcctgtattttttaaggaggaatattatgcccggaacaaacagcataccgggaacagctgcggcatacattcgagtttcggatgac

SEQ ID NO: 19944 - DNA, 260 bp, Unknown
  Description of Unknown: LeftRegion for integrase B6945 sequence
gaaagcattgcctacatgaagaaaaaagaaaaaagctatctgcggttgatctgcaccttgtccattgcgctgtcggttacgcttgtcgttatcattgcggcactggtgatggatatgatgaacccggataaaggctttttctggctacggagtatgctatagcaacacgaaaaacggaggaacaaagggagagaaaacacatggaaacagggaaatttatgggcggagaaaactatatcgaagaggtggcggcctatatc

SEQ ID NO: 19945 - DNA, 260 bp, Unknown
  Description of Unknown: LeftRegion for integrase B6946 sequence
gcaggccgtccacttggagcgcgaccactacaagcgtgagatcgagctgtataaacgctcccttcgcacgcaccgcatcgtcaccatcatcctcgtctccatcctcgcccttgtcgcgatctcgctggtcatcgattttctcgttcccaatgtcggctggattcgcgataccatgtccattttacgggaggtctccgcctatgcctgaaccacatatcgcagccgcctatgtccgcgtctcaaccgatgaccagatggag

SEQ ID NO: 19946 - DNA, 260 bp, Unknown
  Description of Unknown: LeftRegion for integrase B6947 sequence
gcaggccgtccgcttggagcgcgaccactacaagcgtgagatcgagctgtataaacgctccattcgcacgcaccgcatcgtcactctcatcctcgttcccatcctcgcccttgtcgtgatctcgttggtcatcgatctcctcaacccctatgtcggctggattcgcgataccatgtccattttacgggaggtttccgtctatgcctgaaccacgcattgcagctgcctatgtccgcgtctcaaccgatgaccagatggag

SEQ ID NO: 19947 - DNA, 260 bp, Unknown
  Description of Unknown: LeftRegion for integrase B6948 sequence
gaaagcattgcctacatgaagaaaaaagaaaaaagctatctgcggttgatctgcacattgtccatcgctcttgccgtcgccctgctggttattatcgcggcgctggtgatggatatgatgaacccggataaaggctttttctggctacggagtatgctatagcaacacgaaaaacggaggaactaagggagagaaaacacatggaaacagggaaatttatgggcggagaaaactatatagaagaggtggcggcctatatc

SEQ ID NO: 19948 - DNA, 260 bp, Unknown
  Description of Unknown: LeftRegion for integrase B6949 sequence
gcaggccgtcggattggagcgcgaccactacaagcgtgagatcgatctgtataaacgctcccttcgcacgcaccgcatcgtcaccctcatcctcgtctccatcctcgcccttgtcgtgatctcgttggtcgtcgatcttctcgacccctatgtcggctggattcgcgataccatggccattttacgggaggtctccgcctatgcctgaaccacatatcgcagccgcctatgtccgcgtctcaaccgatgaccaaatggag

SEQ ID NO: 19949 - DNA, 260 bp, Unknown
  Description of Unknown: LeftRegion for integrase B6950 sequence
gcaggccgtccacttggagcgcgaccactacaagcgtgagatcgagctgtataaacgctcccttcgcacgcaccgcatcgtcacgctcatcctcgtctccatcctcgcccttgtcgtgatctcgttggtcgtcgatcttctcgacccccatgtcggctggattcgcgttaccaagtcctttttacgggaggtctccgcctatgcctgaaccacatatcgcagccgcctatgtccgcgtctcaaccgatgaccaaatggag

SEQ ID NO: 19950 - DNA, 260 bp, Unknown
  Description of Unknown: LeftRegion for integrase B6951 sequence
gatcccacagctgaatttaacaaaacaatgcttgcggaagatttccggcaatctctttcgagcgacgaaaactacacaacagatattgaatttgattcggatgatgaagaggaagatgtttcttccaacgaataatcggttcatgaacattaaggcggcggtcgtttggctgccgcctgtattttttaaggaggaatattatgcccggaacaaacagcataccgggaacagctgcggcatacattcgagtttcggatgac

SEQ ID NO: 19951 - DNA, 260 bp, Unknown; identical to SEQ ID NO: 19085
  Description of Unknown: LeftRegion for integrase B6952 sequence

SEQ ID NO: 19952 - DNA, 260 bp, Unknown
  Description of Unknown: LeftRegion for integrase B6953 sequence
gctcctgcctcggtcacagctgtacaataattgtgcagctgtttttaattatacaaaaataaaaaagcccacgctcaaagattggacccagagagcgtgaggctagcgacaagaaaaacttttcaaaagatattaccttttgagatgttttcttgtacccattttatcattttttaggaaattttgaaagaggtactactatgataacaacaaataaagtcgcaatctatgttagggtgtctaccacatctcaggcagaa

SEQ ID NO: 19953 - DNA, 260 bp, Unknown
  Description of Unknown: LeftRegion for integrase B6954 sequence
aagtggtgttctcaacaaaaaaatgaaattaaaagtagataatagctaacagtatttaaaaacgaaaaaatccccatgttcgtggtcgccaaactttgaacatgaggaaaggaagtattacaagaaaaacaggcattaaaaagccctttttcttgtacctattttatcattttttaacaaattttgaaagagggtacaatatgaatacaatcaacaaagtagctatctatgtgcgtgtatcaacaaacgtgcaagcggaa

SEQ ID NO: 19954 - DNA, 260 bp, Unknown
  Description of Unknown: LeftRegion for integrase B6955 sequence
gcaggccgtccgcttggagtgcgaccactacaagcgtgagatcgagctttataaacgctcccttcgcacgcaccgcatcgtcactctcatcctcgttcccatcctcgcccttgtcgtgatctcgttggtcatcgatctcctcaacccctatgtcggctggattcgcgataccatgtccattttacgggaggtctccgcctatgcctgaaccacatatcgcagccgcctatgtccgcgtctcaaccgatgaccaaatggag

SEQ ID NO: 19955 - DNA, 260 bp, Unknown; identical to SEQ ID NO: 19924
  Description of Unknown: LeftRegion for integrase B6956 sequence

SEQ ID NO: 19956 - DNA, 260 bp, Unknown
  Description of Unknown: LeftRegion for integrase B6957 sequence
tatatgatttttttaaaaaattattactaaaaaagactagaactgctggaacagtctagtcaagaatgaaaaactttagtctagcaaactaacaatataatataattatataggtacaatatacaatgtataaatgtacaagtctttctatataattatatcaaaaattaacaataaaaacaataggaagtgatatatttatgaaaaaaggtgcaatatatgtaagagtaagttcagcagaacaagcaagagaaggatat

SEQ ID NO: 19957 - DNA, 260 bp, Unknown
  Description of Unknown: LeftRegion for integrase B6958 sequence
accgtgaagaattggagggggataaagaagttcctgcgaacggagaagatagtccccatagaattgctcatgcgtaaaaaggcgttggaggtgatactacgaaagcggtaatctatgccagatattcgagtcatagccagcgggaagaatccatagagggacagcttcgggagtgtcacgactttgcgctgaaaaacggaatgaccatcatcggtgagtactgcgataaggcaatctcaggaaagaccgacaatcgaccg

SEQ ID NO: 19958 - DNA, 260 bp, Unknown
  Description of Unknown: LeftRegion for integrase B6959 sequence
gctgttgacgaggatacatggtatcttaaggctacttgcaccgtgacaaacgaatataatgcaacaagggaaatggagtgcgaggctaaagtaaccggcacggacagcaatcccgaagtcatcgagtttgatgttcattgattaaatgcttaaggcggcggtcgtttggctgccgcctgtatttttaaggaggaataacaatgcccggaacaaacagcataccgggaacagctgcggcatacattcgagtttcggatgac

SEQ ID NO: 19959 - DNA, 260 bp, Unknown
  Description of Unknown: LeftRegion for integrase B6960 sequence
aattttagactttgcaccttagcgtgccaggggaagtaacttaaccgttgcttccctttttaaaaactaaaaaatccccacgctctcaaactttggcgagtctgagcgtgaggcatgtgacaggaaaagattttcatggagataacctctcatgatgtcttttcttgtacccattttatcaaaaaagaggtacaaattcaatgatgactacaaataaagtcgcaatctatgtcagggtatctactacctcgcaagttgag

SEQ ID NO: 19960 - DNA, 260 bp, Unknown
  Description of Unknown: LeftRegion for integrase B6961 sequence
gcaggccgtccacttggagcgcgaccactacaagcgtgagattgagctttataatcgctcccttcgcacgcaccgcatcgtcaccatcatcctcgtctccatcctcgcccttgtcgcgatctcgctggtcatcgatcttctcgttcccaatgtcggctggatacgtgctaccacgtccattttacgggaggtctccgcctatgcctgaaccacgcattgcagctgcctatgtccgcgtctcaaccgatgaccaaatggag

SEQ ID NO: 19961 - DNA, 260 bp, Unknown
  Description of Unknown: LeftRegion for integrase B6962 sequence
acggcggaggatttacaaagtcggaagttaagtatgctatgaaacatttagaggacgaagattaaaataaaaaagctcacgctctcaaagtttggcgactcagagcgtgagcgaggaagtatgcaagaaaatagccattaaatgggcgattttcttgtacctattttatcattttttaataaattttgaaagggtacaatatgaacacaatcaacaaagttgctatttatgtgcgtgtatcaacaaacatgcaggcagaa

SEQ ID NO: 19962 - DNA, 260 bp, Unknown
  Description of Unknown: LeftRegion for integrase B6963 sequence
ttagtagcagaagcttttattcccaatccaaataattattctgaaattaatcatatagatggaaataagcaaaataattatgtaaaaaatttagaatggtgtactcatagtgaaaatattaagcatgcgtataataaaagtttaattccaaaaataaagaatagaccaaaaggcctaaaaataaaaaaggaagtgttgcaatgaaaatagctgcggtatatacaagagtatccacggacgaacaagctcgtgaaggatac

SEQ ID NO: 19963 - DNA, 260 bp, Unknown
  Description of Unknown: LeftRegion for integrase B6964 sequence
aattgtacgatacaaacgctaaagaaattgcacaccaaaaaggtgtagatatggtattagactattaaaaaaagccccacgctctcaaagtttggcgacttcaagcgtgaggcaatcaagataaagaaaggtttcaaaatgacaaattttgaaaggtgtctttctgtactctattttagcagaaatggaggcgaaagacaatgaatgaaattaacaaagtagcattatatgtgcgcgtgtctaccacttctcagatggaa

SEQ ID NO: 19964 - DNA, 260 bp, Unknown
  Description of Unknown: LeftRegion for integrase B6965 sequence
ctgctaaatattacaaaaatgcaaaaccgcccggtgctaccaacaccgaacggcttcacatagattttctcttaccagatcgctccggccagatataatcagacttcaaacacctgaattatatcatctccagagcatcctggcaaggggtgttctttttatacccatttttcagtaaaattcacaaggagatgatagaaatgacaccaaaagcccttgagatcggcgcggcctacatccgcgtcagcacggatgatcag

SEQ ID NO: 19965 - DNA, 260 bp, Unknown; identical to SEQ ID NO: 19924
  Description of Unknown: LeftRegion for integrase B6966 sequence

SEQ ID NO: 19966 - DNA, 80 bp, Unknown
  Description of Unknown: LeftRegion for integrase B6967 sequence
tttacgggaggtctccgcctatgcctgaaccacatatcgcagccgcctatgtccgcgtctcaaccgatgaccagatggag

SEQ ID NO: 19967 - DNA, 260 bp, Unknown
  Description of Unknown: LeftRegion for integrase B6968 sequence
atcgtaacgagttagagggggataaagataaaactgcggcagtctaaggtcattccgatagaattgctcagacgtaagaagctattggaggtgagattacgaaagcagtaatttatgctcgatattcgagccacagtcaaagagaggagtccatagagggtcagcttcgtgagtgtcatgagttcgctcttaaaaacggaatgacggtcataaatgaatactgtgaccgagcaatttccggcaagacagataatcgtccg

SEQ ID NO: 19968 - DNA, 260 bp, Unknown
  Description of Unknown: LeftRegion for integrase B6969 sequence
caagccatttggctcttttagcccaatgagcaaaagcattcgaaaaatgatccgtatgggataccgggtcaagattaggtgcaaaaacgttggatggtacgcgcaggggatacctgagattgttgccatgattccagatccagaagctgtgttctcttggcttgacgagtgcgagagaagtggtgaggaggttccgttcaatgccaatagctagaactgcggtgatatacgcccgcttttcgtgcaacaagcagcgcgag

SEQ ID NO: 19969 - DNA, 260 bp, Unknown
  Description of Unknown: LeftRegion for integrase B6970 sequence
accgtgaagaattggagggggataaagaagttcctgcgaacggagaagatagtccccatagaattgctcatgcgtaaaaaggcgttggaggtgatactacgaaagcggtaatctatgccagatattcgagccatagccagcgggaagaatccatagagggacagattcgggagtgtcacgactttgcgctgaaaaacggaatgaccatcatcggtgagtactgcgataaggcaatctcaggaaagaccgacaatcgaccg

SEQ ID NO: 19970 - DNA, 260 bp, Unknown; identical to SEQ ID NO: 16707
  Description of Unknown: LeftRegion for integrase B6971 sequence

SEQ ID NO: 19971 - DNA, 260 bp, Unknown
  Description of Unknown: LeftRegion for integrase B6972 sequence
aatgggtgccttttaatttataaaatgaaaaaccgcccggtattagcgtaccgaacggctttccatagatttctcttgccggtcgcccggctatgataaatccagcttgaacacctgaattatatcattttcctgggcgtcctgcaaggggcgttatttttatactcatttttaagtaaaatacatagggagatgatatcatggcacctacagttctgcagattggcgccgcttacatccgcgtcagcacggacgatcag

SEQ ID NO: 19972 - DNA, 260 bp, Unknown
  Description of Unknown: LeftRegion for integrase B6973 sequence
accgtgaagaattggagggggataaagaagttcctgcgaacggagaagatagtccccatagaattgctcatgcgtaaaaaggcgttggaggtgatactacgaaagcggtaatctatgccagatattcgagccatagccaaagggaagaatccatagagggacagcttcgggagtgtcacgactttgcgctgaaaaacggaatgaccatcatcggtgagtactgcgataaggcaatctcaggaaagaccgacaatcgaccg

SEQ ID NO: 19973 - DNA, 260 bp, Unknown
  Description of Unknown: LeftRegion for integrase B6974 sequence
gccattgatgaggatacatggtatctaaaggctacttgcaccgtgacaaacgaatataatgcaacaagggaaatggagtgcgaggctaaagtaaccggcacggacagcaatcctgaagttatcgaatttaatgtttattgattaaatgcttatggcggcggtcgtttggctgccgcctgtattttttaaggaggaatattatgcccggaacaaacagcataccgggaacagctgcggcatacattcgagtttcggatgac

SEQ ID NO: 19974 - DNA, 260 bp, Unknown; identical to SEQ ID NO: 19935
  Description of Unknown: LeftRegion for integrase B6975 sequence

SEQ ID NO: 19975 - DNA, 260 bp, Unknown
  Description of Unknown: LeftRegion for integrase B6976 sequence
ttatgggattctatgttcaataagcatcctcataaaaattactatatttattaaaaaaagaaccggccacaaaggaccggctccaagaatggtattaaccactccctagacaagaatgattatactatttttggagcacctttgcaaacggtgttatttttttaccgtttttttcataaatttacaaaaggagtttcaaaatgaaaataggagctttatatattagagtatctacagatgatcagttggaatattcacct

SEQ ID NO: 19976 - DNA, 260 bp, Unknown
  Description of Unknown: LeftRegion for integrase B6977 sequence
acttttgacgaacaatagtaaaaaaaatcaactgtttccattttggaaacaactcaaaaaagccccacactctccgacggccatctttgagtgtgaggatatgcatcacagaaaataaaaacactatcacggtaaagcaacctaacaagattgtgttcttttttctgtacccattttatcaaaaaagaggtacaaaaacaatggcaacacataaagtcgctatctatgtccgagtatcgaccacatcgcaggttgacgag

SEQ ID NO: 19977 - DNA, 260 bp, Unknown
  Description of Unknown: LeftRegion for integrase B6978 sequence
tgacggcaatgctctagctagccaaaaacttgacggaacaatgaaagtcaaggttaaataagacaataaaaaaagccctataatctccctcgccaaagtttgattatagagctagcaccacagaaagagaaatgtaaactggaaacagccttacatgttcttttctgtacccattttatcaaaaacgaggtacaaatacaatgacaatgcataaagttgctatctatgtccgagtatcaaccacatcgcaggttgacgag

SEQ ID NO: 19978 - DNA, 260 bp, Unknown
  Description of Unknown: LeftRegion for integrase B6979 sequence
cagtgctattgcaagtcaaaaacttaatggagaaatgaaagtcaaggttaaataagacaataaaaaaagccctataatctccctcgccaaagtttgattatagagcagcaccacagaaaaaatccataaccactgaaaaatgaattgaggttatgtgttcttttctgtacccattttatcaaaaaagaggtacaaacacaatggcaatgcacaaagtagctatctacgtccgagtgtcaaccacgtcgcaggttgacgaa

SEQ ID NO: 19979 - DNA, 260 bp, Unknown
  Description of Unknown: LeftRegion for integrase B6980 sequence
tattatcttgctataaaatgcaatattgaaatctaaacatagaaaaagacagtccctgacaagaactgcctctccccatcgtttcctatgtagcacataacttcatagaatacagattcgcaacctttattctaccacgaagttgtgctgctgcatagctttatttttttacgcttttttacggcagaaagaaggtttttatgaatagtacatacttcagaccgcaaccggaactcttcggcctgcgtgttgttaaatat

SEQ ID NO: 19980 - DNA, 260 bp, Unknown
  Description of Unknown: LeftRegion for integrase B6981 sequence
tgatggcaatgcactagctagccaaaaactcaacggatcaatggaaatcaaagttaaataagacaacaaaaaaagccccacactcaccgtcgccaaacttcgagtgtagagcaagcatcacagaaaaaatcatgtaaactgagagcagtcttacaagtctttttctgtacccattttatcaaaaacgaggtacaaacacaatggcaacacataaagtcgctatctatgtccgagtatcaaccacatcgcaggttgacgag

SEQ ID NO: 19981 - DNA, 260 bp, Unknown
  Description of Unknown: LeftRegion for integrase B6982 sequence
ggtaaatttcgacaaatttacacaagaagaagctgacaatgctgtccaaaatctgaaataaaacaaaaaaagccctataatctccctcgccaaagttagattatagagcttatgcatcacagaaaaaaccgtgtaaactggaaaacaaccttacatgttcttttctgtacccattttatcaaaaacgaggtacaaacacaatggcaacacataaagtcgctatctatgtccgagtatcaaccacatcgcaggttgacgag

SEQ ID NO: 19982 - DNA, 260 bp, Unknown
  Description of Unknown: LeftRegion for integrase B6983 sequence
ttatgggattctatgttcaataagcatcctcataaaaattactatatttattaaaaaaagaaccggccacaaaggaccggctccaagaatggtattaaccactccctagacaagaatgattatactatttttgaaccccctttgcaaacggtgttatttttttaccgtttttttcataaatttacaaaaggagtttcaaaatgaaaataggagctttatatattagagtatctacagatgatcagttggaatactcacct

SEQ ID NO: 19983 - DNA, 260 bp, Unknown; identical to SEQ ID NO: 19178
  Description of Unknown: LeftRegion for integrase B6984 sequence

SEQ ID NO: 19984 - DNA, 260 bp, Unknown
  Description of Unknown: LeftRegion for integrase B6985 sequence
atagcgtataacacggcacagaagatgttatccatgttggatgtcatcacgcataacagctaaaataaaaaaacgccccggtgctggaacaccgaagcgtttatatagaacagcttacccttggaggataatccgccccaacaatcggattataccacctccggggtaggcttggcaagtcataccttggaggtgcttttttgcaggatttattacctaccgcgatttacgttcgagtgtccagcgagatgcaggccggc

SEQ ID NO: 19985 - DNA, 260 bp, Unknown
  Description of Unknown: LeftRegion for integrase B6986 sequence
accgtgaagaattggagggggataaagaagttcctgcgaacggagaagatagtccccatagaattgctcatgcgtaaaaaggcgttggaggtgatactacgaaagcggtaatctatgccagatattcgagccatagccagcgggaagaatccatagagggacagcttcgggagtgtcacgactttgcgctgaaaaacggaatgaccatcatcggtgagtactgcgataaggcaatctcaggaaagaccgacaatcgaccg
